United States Patent Application Publication US 2011/0014706 A2 - sequence listing, part 24

SEQ ID NO: 45307 - DNA, 529 bp, Arabidopsis thaliana landsberg
ccactaccaggtacctcatccaaagcatggggaaatgagttgccccgatcctttcctgcatatcaatggccttcagatcataaaaaagctccgtggccatatccgaacgttccccgtacaacgtatatacttcagaaagtaactggggatcattgagcagtcccgccagcttcagggcctgccggatatcgcttctgtctttctcgtctatgggcaggctcagttcccccttccctaatattttataaatcagaattctggcctgaaggcgcggggaggggtggcggtctaaatattcacgtaatcccctcatcgtggacgcaaaggcctgcggattgatatgagcctttaaatcggcataagtggcttccgcttgggtggtttgtgaagtatcattcacatcccatgcccgaatcagctggttaacactaagagtctgtgcaaaagagcggacagaaaaggtagcaataagtgttataacttataaaatacagttcttaataggaaaaataatgggtcataaagcaca

SEQ ID NO: 45308 - DNA, 791 bp, Arabidopsis thaliana landsberg
tttggtatttcaccaggaagttccataaaatgaactgctcgttctttataactagcaaaaacagactggagtaaacacttagtggttagaaattaaatgcaagaaaagttaattcacacttggcaaagatcatggattttgaagcaacaaagagctaaactataagccgttatatctaattttttgatgcgaaatttgaaaggaggaacaatcatgtttgacatttgaagcccaaccattggcgaataaaatggatcccgttcaataatatattgtgaccttccacttatctcctaatgctaccatttcattccatgataagcatttgattttactagcatgacatttaatgttcctaagtaaaatcattgggtacagaagtcatcacataacagaacagagtttagcttacttctaatgatccaatccctgtaaacgagtagagtcgagtaggggttacagccatcacatagtacctcatcccactgcttatgttggccgtttccatctacacatttgtttcaataaaagacagtgattggaataatgaaccaatggaggaaacatataattccaactcggtataaaattttagtacctgcaaagccttgaaggcttcaggaagttcttctaattcaaacaaaaacttgatgtacttgtctctcttatccttctcatccacggccatctcaaacagctgcccatcctgagtgcccagaatgatctccttagtagaaactgaatccagggaaagaccaaaacaaaatcaatatggatccatgtgagaaaaa

SEQ ID NO: 45309 - DNA, 472 bp, Arabidopsis thaliana landsberg
gcgaagccgccagcgtccgcagtgccgagcatcgcgccttatcttgttctataaagattagctcatggaaggccggcggggtctctagcgcaatgcgtgctgaccctggcagagacaaggtgtcgccacccatgccgacatcgcagtttcctgtgcccgcaaaggcgtcaatgtagagcaatcgaaaactctgcttcttaagcgcctgggtataggccgcgagatacttctgtagcgcctcaagtttgatcagcgtccagggaccgccgaaacgatgggcgtctgctccggagtcttgatcttcaatatcgcccattccccattcctcgcctagctgctaggcgttactccagcaggctgggctctgtgaatcgaagaattcgacaaccgttcccggcagagtcgccgctgctacggccagtgcgcgatggcagaaagactgctggtcagctggtggctgcccaataaacac

SEQ ID NO: 45310 - DNA, 487 bp, Arabidopsis thaliana landsberg
aaaatttatggcacattcataggctcatacctttaagtttttagctgggatgctattatcgaaaggaaaacgggaaatttttgttcgagatacaattcatttggagctactaattaaactgaattggaagatatacgttatacagactatagaaagcccaatcacatctttcgcgtggccttctctcttatctttcaatgattttgatgcatcaacctacaaaaattcgttaggattgacatatgaaaacttgtaatgttaatttaatttttttttgctacatataactgtctgacttgattagtttaactactcatcaaaatttaagttttccatgtgatttataacaaagtcttgttccaaagaagttaagatttaatgaaaatatatatacataaatagttaaaacttacaacagttacttaacacacttgaagtttttttttccatataacgcttatttataagagagatcacattttttaaa

SEQ ID NO: 45311 - DNA, 494 bp, Arabidopsis thaliana landsberg
tgaaaaccttattttcttgtttcttctcatattttcatatgaaatttgttcttgccactatattatctgatattccaatttctcaccatatattatcataatctaaattacaacctgaaacctcagtgtacttatttttggttggacatttcatccgattctcttgattaacaaaatttcagccttcaataaaaaacactttgagttatttcgggccaggtaagaaaaatagtattaaaaattagaaaaaaataatattaaaaataatattagatgttcaaaaaaaaataatattaaaattttaatttaaaaacaagtgttaagatttatagtttatgaattatggttttgcttagatcgtagggttttgttttttgggtttatgatttataatttggagcttatggtttgcatttggactattttaatttttaattttttaaatagatcttttattggttttgatctaaagagtattttcataattttctatt

SEQ ID NO: 45312 - DNA, 483 bp, Arabidopsis thaliana landsberg
gcccttacgtatagacaaaggaaaggaggtaatgggcggtttttttttattagatgttttgccatgttaatggaaggctatacacttcatggaattatactattagttctttaaaaccaagtccaacactcttgtgtttatctctgtttaggattcaatagtgattaatgaatgatgatataagtgtatgtatgatttgggtccgagtatcttgaaaataagatttagagttgtatttttaacgaaattgttttctaaaaagtttttaaattattaaaaccccattgttaaaaaataaaaagattaataataagttttaaggatttacaaagattaaaattaatatttaaatgactatttgacattctttttctttttttgttgctaaaggaagacaatttgacatattcataattactatatagcattagatatatttgtcattttaacaaatgattacaattgtttgactgaaaaaatgtc

SEQ ID NO: 45313 - DNA, 553 bp, Arabidopsis thaliana landsberg
taaaaacccagatattcacccatcataggcggtcacaaacaaaatttttaacaacttcatagtctacattaaattaggggaagatggagtagtattatttaccaacattgtactatttcaggatattcatatactgtattgcagatatgcatacatcttatggcaaaatatataataatcatagtacgtaaaatgtccccattatttgaaattacgtagcgatattgtagaatttttgtgatgatggactgatggtactataataacacaatcaggaccggctcaatgtttattgggacatttggacccatgacgacaagtttaaaattcaatattttcatcttattattatctacgaatatataattcagagttaattttgttactactagtaaattaaacagtttataaacactgtttatgatactctaactcgaccacaaaaataaatatatgcaaacataagttttagtgtttgtataattcataactttcatataaatcatttaataaacattttatattgtttattttacaaccgaaagaatcccca

SEQ ID NO: 45314 - DNA, 570 bp, Arabidopsis thaliana landsberg
tgtttaaattggtttatgtgtatgtgttggatattcattttgactttggtgctatggtagcattttagttctttggtaattttcggttacccacatctttttggatcgaattagaatgataatggacacgtctagacagcgtaataatttggtgattacatctaagatttttggaatcatatgttttgtaattaatcagagttattcggtagtatgagaccccacacggctatgaaccatgttaccatatattctaagtgggtttttaatttgataaccacctacctataactctaaattagtctattggatttttctaatgatcatcatataaatttattctctttatataatagtaatcgttgtaaataatatatgtgtgtctcccatcaatccgcatcacattcgtagaatcatacacgtatgtaaacgcatttttgacatacggaaaccatacaagtaggatctgttaggtggttattaatcaaaataaaatctcttttcattagaaaatataaagagactacttttataaaaagattgggattgtagtccttgccgacacccata

SEQ ID NO: 45315 - DNA, 642 bp, Arabidopsis thaliana landsberg
gaaacaatttagacgatgatcttaatgtctttgtacaaaggaggtactgcacgacttacttttggccttagaactatggcatgcagcgttactggattgtcaacattttcttgtgttcttgatctagtagaaatttttgttattttgtttgaaatagaatgcaacaaagtattagttttcggatttatgcggtattggtttgattattattcttccaaagagtttcctttcaccaacgtttgaatctttttaaaactcagctgctgtctaattataatcgtctgttgctgcttcatggttctttatcatgtttaaataatcacatcatgcagtttatcacgccaagctgctcctcttgatagtatgatgcgggataaactatcttccagtcatcctgaagccaatgagtggttttggtctgggcaagttccttcggcggtgacatcttttgtgaattgttttgagggggaccaacgatttgtttctgctacttctgtgtatgtcatttctttttactctcttcatatgagtacgttctgtaaaacactcgtttgactttgaggtttttgaaaagtgatgaagctttatgtttcatttcagctatgtcaaaagcaattccacagctgcaagcaatgagattga

SEQ ID NO: 45316 - DNA, 520 bp, Arabidopsis thaliana landsberg
gtaaatcgacttatcaacgaaaaagaagactcattgaattgtatgacgaagcactagccatgaataatttctctcttttagatccgacgccttatggtaaagagtttatcactcgaaagttcaataaagaattcaagatgaatgttagcaagaaaaacttgataatttcaaaaagaagtataagaagtggaaagctcttatgaaaacgtccaccggcatttcagttgatccgacgacatccatgttatctgcatctgaacaatggtggaaagacaatgaagcggtaattaattattatttatctcataaccaaaaatatttgtttaactaatatagatgtataaaaaatttataattttcttaacaagggtgtagaataataaaatcacttcatcgaaaaccaccataattttgggaagtgatggaacgttgtttctcattatatgatcttcattcacaacctcaatattctgtaaaccaaagaagagtagagatgatgaacgagggtgttgataatgaa

SEQ ID NO: 45317 - DNA, 725 bp, Arabidopsis thaliana landsberg
gaacgcccaatttgcattgctcaattatctgcaaaatttgaatgtcactcaattattttttgtaaagttacggatgcaaagaacgaggataaaagtttaaatgtcagtctataaagattaataattaaggcagtagtaatcaacctcgtttctcgtcatatcatggacttcaaatagggttcccagaatctgaatgctaagcttctcaataccgagtacacctttcgaatcaccaaactcattggatctaccttcttcaacagattctagcaacataaagccaaactgaataacacttggaaccacatgctctctcccatatcggcactcactaacctaacacaatataacaaaatacttttttaatcgtctcgcaatgctgtcctggtatgatagaaagggctaaaagtccaaaaataaaaaatcatggcaacataccgctcttagcaaagatttttcaaccaatttggcatgcaggaaactctcttccttaagctcaacaggtagccacttgcaatctctgtacatcattgacgaaaacattggtaaaaatgtatccctacagccttctttgtgtaagagactattacttacttggagagtctgtaatcattgtacgcagtaagcaaagccgttctcaacatccccaaggagctctcaccgaattttctaacccgagcaacggaaaacagaaccgcgactggtaaatgattgaaagctctaag

SEQ ID NO: 45318 - DNA, 825 bp, Arabidopsis thaliana landsberg
gctgaataagctacacaacataaataaaattcaacagtatgattgcgtcacgagcaatgcttaatcataaatcactcgcttgacgacaaaaaataaaatcattaatcagtagctttccgctacactaatccactctcctcttataaatttcaaaggattcatagtttttgtgttaagtattgataattttttattttttaatatgttaaaactaatacataagaaatatataactctgttaaatataatttgataaaatatgttattacttactatttatgaaaatacagacataaataataatctatatagactataacctaaaataggaaggtgtgttggcaaaaaacctaaatggaaggttaaaatctcaaaaaaaaaaactgtaatcagataaaatcgaatccaaaacattgaataaaaatattaataactaggtcaaccagtataaacaataatctttttactagtacttaatttcttattttatataaactaaaacttaatatcaaacaactattgtttccattatatatacctacccgtaacctttaaataatttagtacatacataaatgtgttattatcctaacctttttttttctctgactcttagcttcatttccattttcatatatataatgttgtcagattcaaattaaaataaaataaaaaagtgtcactaatggtcggtccgatttctccggctaacttacttaagctgacaagtctttctcctccttcctaacttcgtcccccacaccaaatctctctatttctctcaagctttctttatcgtcgcctatggcggctaacaaattcgcg

SEQ ID NO: 45319 - DNA, 604 bp, Arabidopsis thaliana landsberg
ctacttattgcatatttgcatggtttttccttggcaaatgattacctttaattctgtgcaaaatggaatttaaagtatatttgagactaataaagcgaatgaaactatatgcataaaaaaacgagacttaaaatctatttttaactattatttacaacggtgccaaaaaaaaaaactagtatttttcaaatgtttgacaagaaaaggttcattttaataaatggtcaaaacacatctaattcccttgtgagtttattactatatatgctataacaccacatcacaaatgtaaagagaccaacactgatataaaaaatctgacaactcccaatagttcgtatatttttttaggaatcagccgaatatcaatgtgttacggtgaatttttttatttaatatagtcaaggtacttgacaataatttgcaaaaccacattggtaggtgaccggacacgtttagatctctttattagtcatcactttcaagtttcaacgatgtgtttttcttttaaaacccgatgatccgctttaacgagacagtatgttctgttataatatatatatagtggccacctgcgattaagtcaatgattttttttttttgc

SEQ ID NO: 45320 - DNA, 790 bp, Arabidopsis thaliana landsberg
aatccaattttgattgtttcggttttgttagagagtcaattctgtagtgaataataccaaataattattaggaaactgttcaaagtatcgtaacacaaactattgatgatttgatggtcaaagattaagctcaaataagatatatgcatatatatattgtttttcacgaaaaaagctaaggaagtaaaagaaaacaagtatattaattagttttacaaaagtgttcaaaaagagaattgctttcataaataatgaagtttgactgattcatactaatacaatgcacgtagatcaatcatagataacatattcataagcatttatatcatcaaaagttttgatttctactttttccaagcaaagcaacaacggtgcacccttctttttctcgtcgtctttgctcttttctgtgacgaaaatattattattcttctttttcttttccttttttaaattggtaataggacatataacaacttctagctttaatttttttagtgtaacgtttcggtagcaaacacattcccatattatagaaaaaggtgtatgctcacgcactttttctccatctttttcataatataatattactcttttgaagaaaagatatgttagatctttgatatttgtttgtatccatgaccagttctagtatatcatctcatctccaatacattcatatctctattttatataattggatcttcagaaaacatttatggctacttggctagtggtcaaaacattttatgcaccacttggtttaaaacaaaataaggtatcaagtctc

SEQ ID NO: 45321 - DNA, 728 bp, Arabidopsis thaliana landsberg
gtgatcaccaagatgatatgcatgttgcctatctagctatatctatatcctgaaacttatgaatcatttctatacgtttaggttcatgcatatataccaaaatatgtcactatatctatatggatacgatggatagataatacaatccaaaacaagagcacacgatagataaatcaaatacttttttttgcatgatcacatgagattcggtttctactgatgtaatcttggttatgtgttttgtcaatttgttgtatgtatcttgctttctttctttttttttggcgattaagttagcatgtttttttttggtatgttttttgataagttaagaaagaaaaaaattagttttttttttttatcaattgttgttctcaacctttcaaaagcaacatgaaaaagcagaaataaatgtggtcttgttttgatgtgttgaaaatttataaataattttgataaattgtgatgtcatttcttaaaaacgttaacattcttttcattctaagaaattaacaatttataaattaatagttttttttttgttaagctataaattaatatgtctagtggtagattataaactgtaaaaaaccattattgtcttaggtcattaaagatttcagataaaaccggatgcttgaagaattaattcgggctttcgtcaaagatttttgtatttaattaagagaatatatatataatagacatatataaaagtgtaaatatag

SEQ ID NO: 45322 - DNA, 1687 bp, Arabidopsis thaliana landsberg
tttttcttagaacaaaaaagattctaaataaattgatgggaatcgttttgttttttatatttatactactatcaaacagtataaaaaacaaaatgtacacaacaacattgagaaactaatggggtctcacgtgtccatgttcccatccacatagccacggacgggatttgctttctaattttccacatttctttaggccaaacctttataaatggcacttgatatttgcttctttaatttcaatctcttttttttttgggtgtttttcccgttgtatccattgcatttagaagaaaattgttgagaccactgattttcttcgaaaaagaacttcagcaatgaagagtttgttttatgcacgtctttacaaaaaaaaaactaagagattatgacctgcattgaagtgagagcacttgagaaaacttgtgtgtgatgatttggaaaatagttgttatagataactaatcatatattggtatatatggattcctttgaagaaatactggtttgatttgaacaaaaacatttgttacgtatgattaaacatacttttcattgcacggtgatatgaaattttgattcagttgaattagatcaatgtagttttgagttatattttttatgtttgcccattcgttagtgatataaaacaaagtatcatcagtatatagctagtttcgagatagtatgtacaacttttaaatattaattacctatgcttaaatagtaatagtattatgtatgtgcatgtgctttgtacatacaattttgtcttcttgttgattaattattaaacagctcgaagttttaagactatgtagcttagcctatgtcaatgtcatcaatctatatgcaatatatatagagcctcaggcacataaaccgtagtccccatataaaaaagggaatgaaacagctaataactccatagagaataaattcacattcaaagcaaattcaccaccccaatcttctcaatggttcggtttcttttttcaattcttacattgtactaaaagctaaaaattcagactgatacgatacgaataggtttttgaaaatataaaaattaatcaatttccattaaagggctgaatagctaaaaactccatagagaacaagtcgctttattggatttagattttaaaaagacggcgctcgtgaattattaaagttaaaactaagataagatttaaagagatttagaggagacgtaatctggtgtatatcgttcacatagagtcacgtcactgtataatccatcgaccactaaggttttagagtttagtttcaaatcttactttttcatgcaggtgtaccgtatgtcacacagattatagtagtcgccaactgacgttcccaatgggtgataacggcgtcaacgtcctccgtcacgatcgtgtcgtaagctgtacactgtatagggtccgtgaaccttaaaatcggatttggaaagctacgtacgtacgtaaatattggttaaaaagttcaaacagttttgatctctcttttattacaaacaaactgtacttccgacaattttctttctttctatttcaagtacgttttcgtgtctaactatattaacatctaacttctgacttttatactctgatgggacaatctttaattcttaaattctaagttgtaccatgcgaatggatattagattttgtcagtacaattg

SEQ ID NO: 45323 - DNA, 560 bp, Arabidopsis thaliana landsberg
atagacacaattagctcaattatatacatatctattaataaagaaaacctagccaaaaaaagtatcgccttcatttaaaagaagacgtagctgaaaaaacaaacccatacctccaaaaccaggaatcactccaagagtcagttctggtaagcctaattgagctttcggagcagcaactctggcatgacacgcctaaagaatttcgagttacagaaaaatcaacacacaaagttaagaatatcaaaacacactttaaaacgcacaaaagggaaagaaactcaaaactcccaccattgcaagttccaaaccaccaccaagagctaatccttcaactgcagcaacaaccggcttcctggagtctgtgataaccgaataacaacaccaacatcagcatcacatcatttgatagttgcagtgcaacttacatgtgatagttgcagtccaacttattgagaaatacatcaaccctgaaagaacaaaaaatctgaaactaaaaagaagctaaataccttccatcaggttacacacaagctcaacagatacttctggcataagcgata

SEQ ID NO: 45324 - DNA, 605 bp, Arabidopsis thaliana landsberg
gagatgccttcgtgcgaaagcttacatgacagtatgtgtcacaacttcgctttctttttatttttttctttaatatattacctctttcagatttaagtttggggatggatcttttttttttctttcagtttggttttaagcctagtttttgataaaattccggtgtagttgttgtggtttttatgtttagtttgttttcagctttcttacatgatcaaaattcaaaacaaaattagagttacactaatttacttggttttgtttactcattcttgattaatcttgtttaacttagcatacccaattaattgatagacagacttttctcaatcaaattaatattcatataagaaacttaacaaaactatcaaaattaaatctatactatataaagacttgtttgcctcagactcgtatttgtagatcatccccctaaaggcctaaaccctaaaagaatatttctcttatcattacctttttatctttctttttttttggctttttactttttctttgccacagcttttgctggagtggatttctctttgtccctatttttttgaaagtgatatataatatgaacaatttaatgctgataaacaatt

SEQ ID NO: 45325 - DNA, 560 bp, Arabidopsis thaliana landsberg
gaagaaaataagaaagcagctgggaaaaccccgccttggccacaaaaattgaagcgttgaaaattgtgtgtctgttttttttgtatcaatcggttgaaaaagtgcctctcttgttttttttttcctctctttcttctttattcatatttcactttctttctttctttcaaaatttctcaccttctttctcttctcttctttgcttctacagttttcatggccatcggtgaaatccgtgtagagaaatattaaatttgatatatattgtgttaagtgttggttggttggttaatctctctcactgatgaagttatcgcctctgagtttctctacgagttcgagtttcagtcacgccgatggaatcgacgacggtgttgagttaatatcatctccatttgccggcggcgcaatgctgccggtttttctcaacgatttgagtcgtaacagtggagaatccggaagcggtagtagctgggaaagagagctcgtggaggttacgttagagctcgacgtcggcgatgactccatactcgtctgcggaatgtctgaggcggcgtctg

SEQ ID NO: 45326 - DNA, 767 bp, Arabidopsis thaliana landsberg
cacctttgattgaatcatatggaataaacagtaatgtatgaaaagaaaacaaaaaaacaaatatacttgtttaatgaccaaatataataaacctgggggatccagcccatatgatctttgctaaactcttgaacaatttgggccgtggcaatatgtagattttggtccatggatcatttatctattttaatgttacccttgcagagattattttcttctctttgttactttcacaatcaacaccccaaaatatgttattacaacaatttcaccctaaatcgttttgtccaaatgtgtaaattacactaaacatatatagggcaaaatattacatagtcaatataatgagccttaagctaatctaattagatgtgaaaacagagaagtgacgtaaatctagaaaatattgttacacataaagcattcaccagtcttgtactagtaaacagagatcctgaataaattcagtgtctcactcggttcatgtactgtcgtttccaaggtctgccattgacaaaccgaaaagttgaaactcttcacgccaaagccaaaatacaataactttttcccaatgggaaatatctttaatcgtggagagaaaacaaacaaagagcttcgacctaattacacatttttctttttcagtttacatataaaaagccttatagcgatcctttctctgtggccaatttgttctgtgaccaaaagatcctctgaaagcaattctacaggtattttgataggtagtctcaggttagtatttgtca

SEQ ID NO: 45327 - DNA, 877 bp, Arabidopsis thaliana landsberg
atatttattccaaaccatgtttaatcgacttgagtatgatgcatctgtttgatttctactttttactaagaagtggaattaactagaacttgttttttttaatcaataaatgaaggtactatgaattgaaaccagatgatccaccgtatgctgccaagttctatgattgttgcggggcagaggatcctaatgcaccaggttgtgtcacaaaccctcacatttcatatgatgactgatgtatgagtgagagctctcataagcctttttttttccataaaaacatcatgtaaataatcttaaattattgtagccttcttaggagtaaaagacttagcttgtgatctctctgctgggtactgtcttgaaccacttcttgcattgcacacagctacagagtgagctgttgtgttacagcttttgtcggttttgtgaataggagtgtcagaatcatttgacgtgagaaaattccggaacgactaacgattttatgtttatttgtaaggaatgttcttgtttctatggttgctttaaaaagagtcaaaactttatattctttttatgaacaccaacaacataaatctaaatcagacatataggttaattaactaatgcaagtaaatgtggaaaaatttacaaaacaaatttcagaagatctagaagtaatcttgagacagtacttatgagaaataatcttgcactatcatccctcttttctatgaacaccaagatttctgatgcacttataatttcttattttgcggtaacaatagaactcccaacaaaagtagagaaaaccattgaatggggacaaattattattatatttataaattgactggctttaaaggttaaacttaagttaccagattttttttag

SEQ ID NO: 45328 - DNA, 645 bp, Arabidopsis thaliana landsberg
  unsure (1)..(645): unsure at all n locations
tattaaattgtagtctgtcagctttctatatacatcttgttagtcacacggcaagagacacgacacattgtattcgttgtcttctatctataaactctcaacaatcaacatacaatgaagattgcggttggcgctgtggtttttctcgtaagggttttccacgtaaaattatatgtctcgtgtttaatctatttttctattatttattagcatgtggtgtaccagatccaaacacgagattgcaaaaaatctagcgtttcaaacgatatgcgtttgaatttacactaggagcctaagatcacgtagcaccaataaagactcccatatataaagcactaacatgtagtattttgattgtttctcatatctttcagggacaacaccctcgctatcatatagggaaactaggcttaggataaccacacataaaaatatagaaaacttaaattgacttagttacgatctgatggatccagttatgtatttgtcttacaagccaaaactagtcactgactcggttacaatctctagatctaatggatttagtccaaacttatcgtgtgcaggataaagtaagattcacgagtataccttggcagatttattttagaatttattgttaagtaataaatgagctngtcaaat

SEQ ID NO: 45329 - DNA, 1197 bp, Arabidopsis thaliana landsberg
ttggcttaatcaactcactgaagtgtttgtacacttttctaatttcttagggctgtaaactattatatatttcttcatctaagagaacctttttattatgcaaccaatttttatgaagaacgattttgggctgacaacgtagataacagttcatatttttggtatttgaccaagatagatacttctataaaatagcaactggatatgttatggataagataataaccttcaactgattttattcccttcataaggaattctgagtttatttctttgagcacaactcttatattgcttagaagtagagccgtagcgatgcctgaacccatcagaccgccaccaataactgcaactttttttatcggccttggtttcaatccaacgtcagttacattaggcacctgaaaagtgttttaagagatgctcaggatgaacactgaaagtgaaaactagaagtgctagaagaaacaaacacaacatatgccaatctcacttttgatgttgcacgttgtgcaaagaaaacatgaacaagaccctttgcagtgtctgacagtactagttgcttgaaaacttctgcttcctgcgaatcaaagagtttaggtacatagccaactagacaattaccgcaagtaatcaatgcaaggaatggacagattttgtgaaatgaagcactcatgattccctaatttaaaaagtcgaatgagcaccaacgagcagtaaatgatctatgtcaaagctatggaagaaatacggtaaacgtcgaaatcctaaagataccttgagaaccccactgtatcctccatggatgattccttcttcaatcacctcaatgcaagcatggtgctgaggcatatttggggcaatcttcttggctagctgtcttgaattcttcaatatagcacgagcttcagataaagaaccaattttgtcggttctgtgcagtgactgcagaaagggtttacgtccttttgcaatgtctagagcccactttctgggtgtggtgaacacatctccaggtggcaccaaggcatcaatgagacccagtttgtgcccctcttctgaggatattgacttagaaagctaccgaaataccagcatatagtttaatacaattttcagcgaagcaaatcatattgacgcaaacttggtaataaaactgttggtaactgcagaaaatgtcatccttaccagtatcat

SEQ ID NO: 45330 - DNA, 588 bp, Arabidopsis thaliana landsberg
  unsure (1)..(588): unsure at all n locations
tatatgtatcctacaaatcaaacttaagcatttctcaaatcagataccaaaaactcagtttttctttcttcacattttttaaaaattattctagaacctcaattctaattcatctaatctacttcctactagtggaatctaacgatcatgtatctcaaaatgttctcaaactcgaatatggcttcgcaagcacatgtactggtgatggtatgttcagaccgttccacacgacggacggtcacctccgaatgattacaannnnnnnnnnnnnnnnnnnnnnnnnnnnnncggcatagttggctaagagaagcatggtggtctgacatttgcaaaaaaatatcgcctccacccacaaccgatactactcgacgtaatccacagaaccatggtctaattaggaagaacataaatcggagattgttattggataagaaaaatcttagaaatggacccctcagacttccttaacaaaacgacatagattaactatgattcaaagtataacaaaacaacatcgtttatcaaaaacaaacaaaaaccctaagaggaatacaacagtcatcgaagtcaacaaacgaacaacaatca

SEQ ID NO: 45331 - DNA, 658 bp, Arabidopsis thaliana landsberg
catgatgatgagccatcacgcttcagctcaccacccgaacgagcatttggttatggcgactcgcaacggaagatcagtggatcatctacaagagatgcgtcggccaccaccagccaatagacgtaaccttccatcttctactctttatttcaacatcttcatatatatatataagaaaacaaaaaccctaattcacaaaaccttatccattcatttcttcaaccttttatatatacactccaaagaatctcgtttgtttataatgaatttataagttttgatttcatttttgttccctcggtatgtgacttctcgcatgcactttttttttggtcagaaaacaatttcgacaacaaaaggaaaattaataagtgatgtgtttatcccccggaaatctagctaaacctatagatgccaacagatatagttttgggggtagatcgtaagaaagataatgatgaagtgatgatgataacgagcaaagtgagagggagagggagagagagaaaggaggaagagctctccagtgattgcttttctttttttaattgactttttttggtgaatcttcagattttttggggaggcacagttaaaaccaataatgttcttttttacacaagggtttgatttggaattaaaattgaatatgttcctg

SEQ ID NO: 45332 - DNA, 642 bp, Arabidopsis thaliana landsberg
  unsure (1)..(642): unsure at all n locations
tacaggcacgagcgaaaaacgagctgaacgagtgatcaggtgcttcgacctctctttctacggttggtttctgacatcgatcgagattcaacattcagtaggtttgctttgacgagttaaaggtggaagcttcgaagcatcagtgaagagagtgacccggagcccatccttcctgtacgcatttctgccttattttgaaaagcagcacggggacttcatctgcccatgattgattcccggctatgatttataaaaaatcttcgcttcaaaagctttcatttcatnnnnnnnnnnnnnnnnnnnnnnnnnnnnnnnnnnnnnnnnnnnagaaagagtcgnnnnnnnnnnnnnnnnnnnnnnnnnnnnnnnnnnnnnnnnnnnngaagtagcctaagcgcttcaacctgctcgctcttacaagacgaatctctttctatacgcaattgaaactagagtctactcctttctggtctgaaatctcagtggagacggtaaagattaggtgccttttttcttgactatccannnnnnnnnnnnnnnnnnnnnnnnnnnnnnnnnnnnnnnnttcttttactccgcacttttgctctttcgagccaaaatgaatgggtcttagggtgaccctcttctccatgagtaggt

SEQ ID NO: 45333 - DNA, 376 bp, Arabidopsis thaliana landsberg
aatgaaagaaaacaacatgaatattcaggagaagaaagcgaccagaaagaaagagacgcttgtgaaatggagaaaacctgtgaaaccaccaaagaggctcatggagagcaatcatcaaatgaaagtcttagcgacactctagaagagaatgagagtatagacaacgacgcatcagcgaacaaacaaaagaaagaagaagaagggacaaggcagagagaatctatgtccgcaaaaacctgtccttggaaggtttttgagaagaccctcaaagacgccagccaaaaggaaggaactaatgagatggatgctgacaccaggttgtttgagaggaatgaagagacaccaccgctgggtgagaatggaggatgtaaccaac

SEQ ID NO: 45334 - DNA, 508 bp, Arabidopsis thaliana landsberg
  unsure (1)..(508): unsure at all n locations
atgctgccttccggcatcattcaacatagttcaagccccttttccagcccagtgctattggttcgcaaaaaggatcagtcttggcgcttttgtgtcgattttagacacctaaacgctctcacagtgaagaggaaatacccagtgcccattattgaggaattcttggacgaactgcaaggtgccagttggttttctagtttggatctgcgcgccgggtttcatcaaatactgctccaaaatggcgaagaattcaaaacaacatttcagacacatagcggccactatgagttcaaggtgatggcattcggtctgaccggagctcctgccacctttcaaggtgctatgaacactacattgcaaccagtgctccgcaagtttgctcttgtctttttcgatgacatcttgatttacagttcaaccctagaaaannnnnnnnnnnnnnnnnnnnnnnnnnnnnnnnnnnnnnnnnnnnnnnatggcaagtcgaaatttcaaagtgcatatttgc

SEQ ID NO: 45335 - DNA, 537 bp, Arabidopsis thaliana landsberg
ttcgattctggcgagcgtcggcagacgcgccgtttgagacgggggtcgcgcaggaaacggcgcacttcctcacgcgtttctacgcgcagcttagcttcggctttggcccggacaatgaattgattgtggccgattctggcagcggctgtgtcacggtgcgagacgtgccgtcattcggccagaagcaagtgctgttcgatgccaaaggcggcgacgtacgcgttcgttggtcgtgttccaatctcacccacatgactataggaagcgcggggagtgatgcgaatgtccccgtctggtcgactgctcctccttgacgccggtgacagcgacacgacgactcttttcacgtttgacggttccatcttgacgcgcgcggccaacttgaaacttcgctgggaccccgacgcgtcccttcgcactgaagtgcgtcctcgcgctcacaccactggttctttgtattgacgcatgcgcagtgtacgttgtgctttaaccacgccgaaacgcgtgtggccgtcggaatcggtcactatttgtttg

SEQ ID NO: 45336 - DNA, 903 bp, Arabidopsis thaliana landsberg
atttgtatgttatattttaattttataacgaatatagaatgttttatttctctttacatttctaagagtcatgaatcattcaaatccgtatatattagtattaagcaactaattcgttttaatttatagatcatcaagtatagatacatataaggctgcattattttccttgtgtggacgatgacttgacatctcaattaattgttatgggaagataggtatttttgaatatgaaacattatccaggacacttttgataaatcttttcttcgacttttccgacctcccggcaaataatttgtcatgtatgatacgctcgatactatgaaataaaagatgaatttatttcaatcattgatatgagatagatggggggaaaataataaactaaatacatacaatagagtatttttgaaataaattcatattaccaactaacatcttaaagatgttgcattattctttggtcaaatattggtctacttgatgattccgtatggcgtaagatcagtgccgcgtaatttgattaactaagattgttttaaatttatgtaagagattacaattaaactaaactttttatatggggttgagtcgttgactatatgtgcctgaccatccattattcgacaacaacgtattcacttcatttggatgatactcagtcaattaagcaacatattggctccgtttttatccaatttgattaagtaaaaaaaaaaatgtttcagatagtgtaagaagctacgaagaatttatgggtatgactgaaagttgaaactttctaaagctatcacaattgtatactttacaaaataataagatacattgctgtcaaattttatagttttttctcgtttggaaaatatcaaaatatatacctaaaaccataaactatatgct

SEQ ID NO: 45337 - DNA, 248 bp, Arabidopsis thaliana landsberg
tcacaaaatgtgcccccttcctctctgcctacccctcacacacggaagcaaggcacgctggggcatgcgacgcattcgaccgagccgagccaaacaaccgcgatggcgagcctcgagggagagggcacgcagacgtggctcctgcgcactgtcgtttagaagacggacttgtgacgacgcgacgagcccaacacccgagcatgggtcgccgctgcgcactggtgacacagggacggctgaagtctgac

SEQ ID NO: 45338 - DNA, 480 bp, Arabidopsis thaliana landsberg
aactatgtccatcgttttgaatatgacggattcgatcatggaaaagcaaacttaggaattttcatgttttaaaaagtcaatgcatccatacaaaaagttatactacatgaattaagaagtgttgtgtatgctttagcactaactatgttgtaactaaaagctaattatgctttagccgacaaaagaaaagaagaagcttactaattctctccattgtcacgaaaagaatctgtctttcaaacttattttaacattgtggcattagaaatcgaaattcttgacgttttcggtttgtataagagccatgtcgctataatgtaatctttctctccgggttcacgtaaagaatttctctgcaccttttccatctttcaaaactttaatttcgaagaggaaataatcgaagatggtgaagaccggcgatgtttccgatcagcgttcgaggctcgagtgggatgtattccttagttttcaaagaga

SEQ ID NO: 45339 - DNA, 774 bp, Arabidopsis thaliana landsberg
  unsure (1)..(774): unsure at all n locations
tttcctggtcccattggtttctcttggggaccattttccttaaaccaatcattttcagcttccactatatgcaaatttagtttcaatttttttttcaatcttagtttccggaataaaaataattttaaataaactcttctattgcttgtggatcgcttcttgcaatgtttaccaaatgtacggccccggaatgcggacacccatagttggctctagtttggtctagtttggtctgttgttgtcttgttgacatagaccgatcaatttatagcccacaaaaatattatccatgcggacggatctatttaggtatgtttaaatacgttttacagctctactaaaatacgcaaatataatggccaaataatatcaattgggttattgttttttaggggaacaaaaaaattgagagaagtgttagctactcaaagttaagttcaatgggaactctcatgcaaagctgagaggagggaacatttttgcaggatgtgaaaatgtaattaaaacttatttttttggttgaaaaatcgaataacaatttttgctataaaaataataattgagacacattacacgcctgctcctatctgtcatgttaattctctcatggtagtgcgtggccccatgtttgttcttctttcccaaacacatgcgttttctgttttgcaaatgttctaatcccaaaaactcgaaatttcgaattgcattgagcaacttttatacaaaattgtataacatatatttactgacaactnttaaaatctagattcatac

SEQ ID NO: 45340 - DNA, 560 bp, Arabidopsis thaliana landsberg
caacccaaaagaaggaagaatatgcaaaacctgatgcaaaatagcacagtttttcaactagctaaccaataaccatatactcttattttgaggttgttcttccgatatctctatcttcttagctctcttcttgtttttcttggaagtgtgggaagcagagatctcgtccctggtgagatgatcttcaaaggcttctatgatctggatgatgagctcacggttagacgaagaatcccatttagaccagtaacttgtgtagcaatcaaaacattgacagccaagcaaaggagctgtatggcttctcttcttcttgcactataccacgatcgcggtgttgactgacctggtgattaagctagcaggaacttccagatcttcagaggagagaaccgagactagaactagaatcggactcttgagaaccttactgacacatagagagtcatctccattcaaagaagaagaacatggcagatgaggagatggctgcactttacctttgttcattactttcatggctgatactgaggaatctctcttttctagatacagagagagag

SEQ ID NO: 45341 - DNA, 595 bp, Arabidopsis thaliana landsberg
ataatctcttctgcaattgtcattgcggtcccgctcggagaatccagcttttgcgtatggtggatctcctttaccttcacatcataagcaggatagtcattcatcagtctagccagtattttgttcatatgaaaaaagaggttgacccctatactgaaattagagccgtaaagcagtgcattgttactgatcaggcattcattcttgacctcttgtaattgtccgtaccatcctgtcgtacctaccaccacaggcacattagcatcaaaacacatataaatgtttccgattgcagcatcaggtgtactaaaatctattgcaacatctgccttacgcaaattattttcggtaaggtcttcctgattgtcaatcgtaattttcaatacgatctcatgaccacgctctaaagcaaaacgctcaatgatctgacccatctttccataacccagtaatgctatcttcatttgtttatgatttgtcttttataagtttatacttttttatgcatataataaaggcatctgcaaactatgcgtattaacccgttattctgcgattcaaaagtatcaaaatttaaagtgtaattttatacccg

SEQ ID NO: 45342 - DNA, 624 bp, Arabidopsis thaliana landsberg
atgtcaattatatatagctgatattaaaattagtatcaattattaacaaatgattctagttgttgtgtcatttataataattgataaaaaaagtatataaaatttaatcacaaataatttataaattaaaaatcaaattacagaatccatataacgtaattcatcatccaatcttaaatagaaatcctaatagaaaataataactaaaaccaaagtgcacatgttcataaactaacacgtcctctacgtacgttccatactaagattgatgatctccaccttggtcttcaccattatgatttccacttataccagcgcccgttagctgagaaaaacacattaaatattttaccatttaattgttttatgtatgaagtttcaatagaaatgacattcacctctatattacgtggatttggaatgttagcaagcagcaaagtttgttgcccatgcacttgcctacatcattagtatttaaaaacataaaatgtttctaaattataagaaatcaatatatcataaactatttaactacaaaatataaaaagaaaatatattattacctgatcaacagatgcaacaccaaacatattctggaacaaagcattcgtttttaacttgatc

SEQ ID NO: 45343 - DNA, 511 bp, Arabidopsis thaliana landsberg
cgagagaaggtacaatgagtcattacagttttagcaaaggtcttcttccgccgcttggagtcggagccaccgctcgctctagccgtcacattaagctccgctgcttcatcgtctctcctttcgatcctcgctacaggtacgatgatttttccgttaactgattctctgttttggttcctctgtgtaaattgagattttctgattcataaatcgttgatgcatgtcgtgtggaactgatttcgcttctcttcttctgagatttctcgagagatttatcattgaagttaatagtgatatcaattctctccaaatctgtgaaactgttccgatatttccatgaatgtaaactggtcgatgtaatgcctgtgtggaagagacactaattctgtgatctcttagtttagctattcaattgaaccgtgtaggtttccctatgcattaaactttagtgtaaattctgcaaagagcttttgtgttctttctctctttctcctcatacatcagttacgtt

SEQ ID NO: 45344 - DNA, 383 bp, Arabidopsis thaliana landsberg
tgctctcatacggtgtccgttgaaacattcgtcgtgaagaagatagatggaaaaaaaattcaatttctttgcggtactctcactacagtaaacggagacacgtccgacggccttcttatctccgacggccctgtacgaggccgtcggagataagcttatgtccaacggccgcaaccggctcttggaaatagcgcttatctccgacggccttgtaccgagccgtcggagataaggttatctccgacggccttccacctagccgtcggacataagcctttttaacgcttggatcggacccgcgcggctttcatttccgcgcgtcggtttcttcagccgccgtcgcgatccgctcgccgccaccatcgccgccgctcgctctgtcg

SEQ ID NO: 45345 - DNA, 444 bp, Arabidopsis thaliana landsberg
tgatttacagtcgcctcatattttattttattttaagaaaccaattaagctgtcctctcaaccaatttatatccaccttttgcttaatgttcagattattctttcctagagaaacgttcatgcacattgttttcccaatacataaattattaacaatagtagaacggttttgtgacaataatatgaatgtcaaacaaaaaccaaatctgattccaactatattggtcactctttatttcactagtgcgcattgcatatttgcattcactttaagcatctaggcatgcactcacatattctttgtgtcttcgtggtacattaaataatgtgaaagttagagatgttgtgatgtatttaaccatttcaggaccggtcctctatttttgctgacagtttactgataaacccacttgaatctaagacaataataactatagttgaccg

SEQ ID NO: 45346 - DNA, 443 bp, Arabidopsis thaliana landsberg
cgggacgtcgacgggcgacacccgcgatacggtggagggcacgggccccgtagcccaatggcagaggcaggcgacttaaaatcgcttcagtgtgggttcgagtcccaccgggggtacccatctcctcttgcgtgcgcatcgcctgggagtacctgtctccacccgtaacgcggcgcgacccgccgttacaatggagggcaatcttccgaacggagtgtcggggacttatgtgggagtggctcgtaccggtcatcgtgatcgtcggcattctggtcatcgctggcatctacctgtgggccacctacaacagcctcgtcgcgctcaatgtgcgcgtcgacgaggcgtggagcgacatcacggttcagctcaaacgtcgcgcggacctgctgcccgacttgatcgagacggtgagggctacgcgcgcacgagaaggccgtgtcgag

SEQ ID NO: 45347 - DNA, 464 bp, Arabidopsis thaliana landsberg
taaaaccgatttcttccagtacctttgtatgagattaattgatttacaaacacttctatcatataatagaaaactctatttttatttacataaactcatactaataaaaaaaatgatgaattgatgcaggatacctcaacaccgttctaatgcatatggatcactttttcctcaaactatgggatccgctaggtacattatctaaaatttattccatattagtatatccgctaaatatagtggacactacatatctgaaatggattatagagcctctgtttatcaaataccttattgcttctgattgggaatctaattatggtgtctgagtccagagcaattatgtaccatatagtcccaaaaatctcactccaaaatgagactagtactactactcaaatgttacactttgtatgcttatgacattgaactataaagttttttgaagaatttaattgtcatga

SEQ ID NO: 45348 - DNA, 473 bp, Arabidopsis thaliana landsberg
tagatagtaataaaattttaaaaaaaaactgttgtacgcattatttgctcccccacagtaagaaggtgaaatggaatatccgaattctaagtattcgtatctatatttaaattttatatctatcgtttgagaatgtaaaattaagatctgccttttatgaatcggtacactttgaaaataataatacgaatttacacaacaatatctatatcctatttatttacaataaaaaatagcgagaatgataaaaattgatagtgaaataagtattcatcttcatcacaacaactgactcgttgctgcagcgaatgcaacctaaactgccttctccgcataagggagtggtggccatcattgcacactcagttgccacactcagaaaccactcgcaccagagcccgaagagtgctatgctaaagagccgtaagtcaactagccccaaggccaccgagggcatgcggatgcacgcagta

SEQ ID NO: 45349 - DNA, 527 bp, Arabidopsis thaliana landsberg
ctaataaggcaagatgttttgcgtcggagaagctgtgataaagacttagttggaaaattgtagctctgtggtctgcaacaaagtgctccaacttctccaaatatgtctccacaacgtagagtgcctaaaacagactctctctccatctctgaatcaatgatctcaacttctcctgacacaattatgtaaacatcatccggcgcttcgttctgcataatgacatcctctcttggtggtatatactcagccttcatttttgaaacctaatcaccaaaacctctgtttagaaaacttatccagcaagccaaaactcaaccaatcatgtcagaaaattaactcaccagaagaagaagtatttctcttgagacgcctttgaagaggtaaactttttcaacagatggaagaaaaagatgttgacaaatgcttttgtagatagattttgggagctggtcaataagatgttgctgatttaagctctctgctttaaaccttaaacacatgtaagctaatatctggtcttttaatct

SEQ ID NO: 45350 - DNA, 514 bp, Arabidopsis thaliana landsberg
aaccactatctctaaaacgatcatacgatgaattaataacattgaattagcatatgatctaatgctaaacacttctaaacaaagcagtccacaggcattagctgtcacatagataaagctactaaaagaaaagaatgtccgataatcagccttaattaattttgtgaatgtatcaaataatctcttaatcaaatgctttgatgccccggtatgtcgggtttggttcaagtggcagcaacaccagcaatagcatgatcgtcactaaaaacccggtttagtatcatggctagtctaactcctccctgaactattctcttcatcactattggcaaccttgtattgaaatattcttctgcaaaattatttatcggaaattattaaactaatcctttagctttcttataaaattatatataagacagtcatatatcccacacaaaaaagtagtgactattaaaaatcattaatcccgattaataaaacttcatttgtccgggttatttttaaatatttt

SEQ ID NO: 45351 - DNA, 422 bp, Arabidopsis thaliana landsberg
cccacccgcaaaaacgggcgaacggcgtcaaatctgccgccgtgcaaaattcgcgccaccatcggtaccgaatctctagccgcgtcctcgaatcacagcatccatgggaccaaccgagcagcggccggaggaatccagctccatcctatgcggtggcggccattccaatgctccctgatccaactcctctccggtcaatcggaattggggcaaggacggacggccaagccggaggggcatatctactacagattggactggactggacgccagatttgggatccctttgtaggattagggatttgggattaggtctggactctggaggaggatcgccgcgtgcaagagagaatcaacaacagtcgcagtccaatctaacccctcgtcaatttctctgatttcttccttcctcgcgacaccac

SEQ ID NO: 45352 - DNA, 346 bp, Arabidopsis thaliana landsberg
actctcacgaaaccattgtacgtcgagtatgttaatccggttgaaggattgttgtttggaggctcatttggcaatgaccggggatcgggactgatgaatcctaataacacaagcgaacaaaatgtatcagaaaactaagtaagaacatattttcgacgaaaatctatcaaaaacaacaaagaaatgtgtatatgtatatacctttttgggcttgtgcttcaacgagatgtcaaagagcatagaaagagatgaagatcaacgcacataacctaattgcttgaggatgatactccattattcttctatgaagcaaaagagagagacatttaccaaaagaaaaagctta

SEQ ID NO: 45353 - DNA, 1630 bp, Arabidopsis thaliana landsberg
cctcccaaagggaagctgtggttaagctgccattttcagattcaagcagcattaccgtaggaaaattcctcacaaatccttcgcgcttactctatctatcagatgaggtaaatctaaattttcatccaatgaagtttagaatgaaatgaacagtcattgtgattctcttatgctgcaggattatgctcagctggcgaaagatgctgtgccgtttcttccttttcatacagttccaaaggaaagttcccgttctgcacattttcctggtttcacaaaggttaagaatgtttacatcacaggacacagtgacggaaccattagtgtatgggacatgacctgttcttttcccattcttgtcttgtttctgaaagaacaggtaagagttctcggactcttttgtgttttccgcaaaggcagatcttatgaaaagttgcatttgttgtgtgtgttcttagcagatagatcaagatgtatcttcacgcggaaatgcggcattgacagctttacattatgacagcaactcaagacttcttgtttctggtgatcataacggaatggtaaaaaagcatcttacccaaaatactctatggaatgtgactaacatatatacaggcttatatatgatcgattctaaacttgtgcaggttcgcctttataggttcaaacctgagccatacctaacagaaaacagttttatccctttccaaggtatgttagaacatgtagaagttgggtttactatccttcagacagtatgtgttttcaatgagttgatattctttgtttttcaggaagcttaaagaaaggaaataaccatattgttcaaagtgttaagtacatcaagcttactggttccataacctgtattcagaagagccaaaactcgaaacatctcgctattggatcagatcaaggacatgtaagcttgtacttcttccacttccttgtaggattctttagttgaggtgattgatgcgttaacaccggtttacttacaggtttctctggttgacattgaggaagcaaatgtgttatacacaaaacacattgcaagtgatatatgtccagggatcatctccttgcaattcgagagttgcattgtgcaaggcttcgagaagaacgtgttagtggttgctatgagagactcgtcggtttttgctctggacagcgacacgggaaatatgattggaaccaacatgattaagcctaaaaagccattcaaggttctgtatatgcagatcctaggtaggttcaactctcctttttataagtttaaatcaacaatcaaaatctcaacgattttttctcatactttttatttgcagatggaaagcaagatacttcaggaaatggatttgatacgagcagagagagcacagttgaggagatctcgataaggcagccttcggttttggtttgttcggagaaagctatatatatctactccttggctcacgttgtccagggagtgaagaaggtcctccacaagaaaaagttcagttcttcacccatttgctcagcttccacattctatggaacctctggtgttggtcttacacttgttttcacagatggaactgttgagataaggtgaaaatacatctacctttctttcttcatattagcaaaa

SEQ ID NO: 45354 - DNA, 538 bp, Arabidopsis thaliana landsberg
gtcgcccacctggcggagtatcacggctgggatgcgagaagtagtgcttccggggatgagttgggttgtaggggacggtcgaaaaataagattttggaaggatatatggttgtttaataagacagtgagtcagctgacgatggaggatcttccggcgggttttgatttggtccttgcgagtgatctatggcatgatgggagagggtgggactttgagaagatctcgccgtttataattgagaatacacggcttgagttgctttatgtggtgttggaaaaggtaacaggagttcgagattgtatggcctggggggaaacatgttgacggtgagttctcagttagatcggctcatgccttggtgacaagagatttgagtccgcgacctaatgtttcttctctttttaatcgaatttggggagtggtggcgacagagagagcaaagatgtttctctggctagttggtaacaagctttaatgacagatgccgagcggattcggaggcatctttgcatataagaggtctgccaagtgtgcaaa

SEQ ID NO: 45355 - DNA, 419 bp, Arabidopsis thaliana landsberg
tgaggattcttaaaattttgatattttcttgatttgtagaatgcttcgtttacgtaagcaacagttttgttcgaatttcgactcatacttatatagtaaactgtagcaaaagttcggtttatcagaatcttaaaccattacgtatgggaaagtccggtttatcaccaaaccagtttatgggaacgaatttgtatgatgttctaaataacgattttaacctcaaagcttctgttaaattacgattgtgccataactatataaaggagagacccgaacaaacaatccggaagcggaacgtaaagttaagcaacggccgccgcgaagtaacctccaaagaaggggaaaaatggcgaaaggagacgataatgtgcagaggaagaagaatgaagtgacgaggaagaagatgagtaggaagaacg

SEQ ID NO: 45356 - DNA, 497 bp, Arabidopsis thaliana landsberg
  unsure (1)..(497): unsure at all n locations
gggtaaagcgctactggattatttgattcgtaatcatttttaaaacgaagagatttctcgaatatttagcacaaacacaaacagaaagaaannnnnnnnnnnnnnnnnnnnnnnnnnnnnnnnnnnnnnnnnnnnnnnnnnnnnnnnnnnnnnnnnnnnnnnnnnnnnnnnnnnnnnnnnnnnnnnnnnnnnnnnnnnnnnnnnnnnnnnnnnnnnnnnnnnnnnnnnnnnnnnnnnnnnnnnnnnnnnnnnnnnnnnnnnnnnnnnnnnnnnnnnnnnnnnnnnnnnnnnnnnnnnnnnnnnnnnnnnnnnnnnnnnnnnnnnnnnnnnnnnnnnnnnnnnnnnnnnnnnnnnnnnnnnnnnnnnnnnnnnnnnnnnnnnnnnnnnnnnnnnnnnnnnnnnnnnnnnnnnnnnnnnnnnnnnnnnnnnnnnnnnnnnnnnnnnnnnnnnnnnnnnnnnnnnnnnnnnnnnnnnnnnnnnnnnnnnnnnnnnnnnnn

SEQ ID NO: 45357 - DNA, 1069 bp, Arabidopsis thaliana landsberg
ctaatctcatgaattcaaagctaccaatacaatgccaaagtttttctttctctccccagtttcttagatatacataaaatggtctcaaaattttcaagttcgaagctacatttacataaaatctatagcgcctttacattttcatcaaatctgcttggttttattgaattttggaaaataagtttcaaattaacaaactggagtaaggtgaagggccaccaaagagtgacttatgtaggaactcaggatagacttattttctcgtcatggtgacagcacagataagctgccttagctgggacatgaattggtgcagcaaagtagatcttgagccttgagataaaccaaaaccaaggacgcaaagatcatctaataattaaatgatacaacactcacaatgcagccataccatgatcttgtgaactacattaacatgagacattaagcttcggcatcaacagcaatgcaaatcaaacagtcctccaccttctcaagtttcgttttagttccaattaataaaacaatataagcattcactctatttctgaattcgttcttctaaccagagtcagatgaaaagagcatacttgtaatcccataataaaattctgaattcacagatccctatgagaattcctaaatgcttacattgaacataacatgactgatgcattgtcattcactcgcaaacatattagctgttgctctctctagatgtaacaaaacttcaccaaaactcaaaactttttacggtgaggaaagatatgtctaactaaccaagtaaccaactaacctgtgtgaaagcagaattaacgagatatgaaagaaactgtccaccagtgatcatcaatacgttggtgctcacaagtccacctctaacttccgatggagatgcttccgctatataaaccggagcagtcacagaagcaacaccaactcctaaaccgaccaagagacgacccgatatcaaaacatacggatcaggagcagcagccataacgatagctccagctgcaaagacaacatctgcaaaaagagtcgcccttttacgaccgtagtagtcattgat

SEQ ID NO: 45358 - DNA, 843 bp, Arabidopsis thaliana landsberg
tatatctcatttattactatcaaatagttagctgtagttaatcaattaaccaaaagccacattgcgaccacgattgtttacttaaccatattatgaactgtacacatttataatagttaacaagaaagtcttttgtttatactaaaaaatgaaaaacaaatggatgatgtaagttgagttgatcaaaatgtctactaagattatttttttgtgataaaaaatagaaattctgtgggagctcagatccccaaaggaaaaaagtaattgaaatttggatcgagaccaaatgaagtatttaagattcaacttggcatataattaaatttaatcacattcacgaaataattttttaaaatgttgagccatcaaaaataaaaatcatttgtttcttataatacgggccatacaaatattgatttgaaattaaaactaataaattgcccggtttgaagaattggagacaggaaagacgacaatttgctagcttatacattaataagaaaatggttagctacttaatgtaatctcttcgaaattttatcatacttgtgttcgagtaacgcttatatatatgcgtataactatagataatgataaaatatatttcgttatatcttgagttgaaactaaattattaataaatattaaataagagaatagaacaaatagtgtcttttgacggaaaaaaaatgcatgttatttttttaacgccatgcagcgttacgtcactgacgaaatttgacaactatcaactatgtgaagcatttgacatttcgttgttggccgtaaaatgaaacaagatgttcatgaatttgatattgccttgggactttaaaaaaggaa

SEQ ID NO: 45359 - DNA, 572 bp, Arabidopsis thaliana landsberg
ctgaaaatgtacttattatatatgtagtgtagtcatgaatggtggtaacatacatttagctaattttttgcggtgtacatatagactgcaatttcatagttgtaatcaataattcgtatacgtatacagaattatcaatactagcactatttatttgtggtcataaaaccgttttcacaatacttgtggattgtaaaacataaacatattctcgatggagatgtcgtacgtccacaaaacaccgagctagctcggttgcaaaaaccaagccattttgtaaacacaagtctatatatcatacaaattaagtcggtggaattattgacaaaatgtgagaaaaaacatgattttgtaaaacacaattctatcattttataaaaacaaaaagtcatacatatacatgcattgaattccaaatttaaatttcttactatttctgacatatatatatattaatctattaaggatattgtgtatatatattgtaaatcgatgaatggaataaattaattacttctataaacccttatataatctgcatttagatgcccattcgcacgaggtttattata

SEQ ID NO: 45360 - DNA, 409 bp, Arabidopsis thaliana landsberg
agtactataagggatgggtactgatcattccctctgttatagcgcaggctatccatgggaataccatactttattttaggcatttgcccatataacatttctaaaaaaggggccatctcgcacgatactgggcctgatggtaaaataaggaccatctgactaggactaaagcttggctctaacccataacggtcagtgtccaccattaagcataattatgacgacaatctatagaaacgacagctggtacctttaggaaccgaacatccgctgcatagtctagacctatctgcaagatcatttaacgcattttgtaataacgccaaatttagaacctcgaccaagtctggtatactcaatggtataactaaaacttgcaacggggtgactcactcggtcttgagacgag

SEQ ID NO: 45361 - DNA, 354 bp, Arabidopsis thaliana landsberg
tgttccgcccgtcctccttccgtgtgtgtatacagtcgtgggtacaacatgggcatggatttgctgcggcttcgatgtcgacgtcgtgtcgcggggcacgacagagcttggcatggagtcgatggtggctttcaacaatattgtcgcgtcgggagcgcgggcatagcttgcacatagagtcgacgacgacagttggagggcaacgactgcgagcgcgggcagagcatggacatggagtcgacggtggccagcgtcgcaggagtgggcaagctgcccgccggtggctatcggggccaaccgttacatcacatgctacgagccacgacgcttgggaaaatgtccgatggatgtttg

SEQ ID NO: 45362 - DNA, 1549 bp, Arabidopsis thaliana landsberg
  unsure (1)..(1549): unsure at all n locations
gtagacattgaacattatagggttgaggatcggtaaccgtaacataacccgcgtactattgtttattggttaacattgagattcnnnnnnnnnnnnnnnnnncgatctgttctacacgccccactaaaaatttcctttgaaaagatatttggatatgcatctaaaagatatgtaatatgaaaattacaattttttatatcttcaagatcttgatcgatgtacacaattttttaaaaggaataccaacaatattcttctattattattattagaccattataatataataatgagtagaaagattttgcatctctggatagtggatacttctttaaagttttctgtgatcaaagatctggtcgaagaagcactcattgtaactcgatcgagttgtctttttgttctaaaaaaaaaaccttcatcatctacatagagaaaagattaaagtaaacatagtattataagatatgatttaaaatgttgaaagaaaaaagtctatttagcagtatacttgtcaattcctataagattttgtgattagtgtagctaggtcttggcctacgatgatttcgataataataaaatatataaatagaagaagtatcaaatgcatgagttctttttatttcaatataggaaatgattaagaaagaattgcaatggcgaagaattaaacaatgattactgtgtttatcgaaaaagaaaaaaaaaaacaagcaaaccaaatgtttgtgatgaactaatcctaccgaccacaattcatataaatgtatataaactaatcctaccgaccaaaatttctatcatataatattagaccaaatagatgtttgtgaatcgcgatatggtaggcattatatcgcacgaacaacgtgagttaactcttagattctcccgtttgtcctaaacatagaaaacgcctaaaacacacttaattaaactacttaaacatagtgcatttgtatatacacacttgttatggatcttaaaattctatcctcaagcaaacaattatttcatcatctcaaacaataaacgttatattgtataagcgattaagccaaactactggtagcatggataatcacttaggctaacaatggattatcaaagtatatacaacgagtttttgtgatgattaaccgttgaaaatttgcttgattcatcttttcaatgtctttccaaaaagatctgattccttattaatatatgttatcagaagtcagaagaggtcagctactttttttgtttattttttgactccacatagacacgtaaatatatttaatcgtgaaaccgtccaatagctcccctgaaacccaagaaaggtgttttaaaagatctaatatataatttagtattaagaaaggacaaatgaatgatgacaagatattacaagaataaaacttgagatttttcagtatatgactaaaatcacaaaactatgtataacaaatgacaaatatagtcgtggaataaaaaaataagggtttaaatactctaaggaaaagtaaaggggattatacctataatataactgttatgagat

SEQ ID NO: 45363 - DNA, 863 bp, Arabidopsis thaliana landsberg
ctattgagaagatttagatgtaatatacagacttatggagcttcagacatacagagcttacccctgtagttctgtgaagcagagacaaagaagaaccctaagtttggtttggtttggtgatcttaggacattttcttgagatgaaattattgacggagagagaaggattaggacacaagcaagcacgttgttgccgccacaacctcattatatacatagtcagctcactaaatcattttatttttttcttttctttgataaaattttaatactttttcttcatacattgaaacaataatacggactttctctgttttatttctttaggatctacgtaggtatatccctcaggttgcagttttcgctttaaaaaacgaagtcaaacaaataaatattcaataaaggcttgagaattgttttcgctttgattcactgttagcatatgattacatatttaggatgaagcttgaaattatgtctaaacttaggatttagttggctgcatgacttgctcctcgtttttgtcacgtcttctcttttttacaattttcttactaaactttataataatagaaacaaaagttatataactttgtatattatatttttcctatcattctttaataattaaatagctagatatagagtcgtcgaggatataccaaggaattctcctaattttatgtgctcgtgttttcacaaaaaaactgttatattctcaatcactaaaattacagaaagtcaactatgttcatgtttacagaaaaaaaaaaaaatcatctagtctctttgtctgatcaattcagacaaaatccgaaattcctttttttttataaaagccaaacatattttagaatactcca

SEQ ID NO: 45364 - DNA, 539 bp, Arabidopsis thaliana landsberg
cgtgtttgtacgcggtgacccgaacgtcgggaacgcagtgaagccgcagttgggtcctccggtgtagaaccactggaagacggaccagagcaagctccctaggcacgaccggacgatgagcgacacctgcctcctgtgataagaaagcggcatctatccgtcagctccaggaactgagctgagcgtcaccaggcatgtgctgccagtgccactcactttgcctgcatgaaaccgtgggggctgtggaagctgttgatgaggtgcgccgtggcggacccgctcgggaacgtcagccggtggggtatgatcatggtctgttcaccggtgggacgtcaggacgcgtcgcctgatgatggttggtggttggtcagagcctgcctacgtaccttcctcatgggcacgatgacgaggaggccggcgaacgtgacgaggaagaagaaggccatcgtccgaccgagcgtcggctcgctgatgttcgcaccggggctgttcgcggtgctcgtcttctccgccgtctcccggtccatcccgagaagata

SEQ ID NO: 45365 - DNA, 216 bp, Arabidopsis thaliana landsberg
cctgtcggaactgaagcgtctcgaaaacgagtggctttcagagaacaaggacaaggtaatcggcattcccctcaaattcgggaaagacgagcacggcaacaggactattcaaaggctttgtttcacatcaatatacagccagccgctgcatttgctgctggaagaacctcggctgtaatgccttattgtctttctttacccctatgatggcattat

SEQ ID NO: 45366 - DNA, 649 bp, Arabidopsis thaliana landsberg
atggaatctatgtaatattagtcattccactaattaatatttttagtcatctcactgactatatatttttaaattttaataatttttatacaaagatggcaaatatatcaatttttatttattttttaattagaaatttctattcttattcttattttgttatttttcttatttttctacaaaaaatgatcaatcacgattacccatctcactaattaatatttttagtcatcttactatttaaaaaatagaaaagtagaagctataagcttctcaggctgtccaactaagcttttaaacgaccaatcgcggttagccacttcatcggttaatacttttgaagttataatgttttattctctacatttataaaacttgtagataaatttaaattatgtagcaaaaatatttatttgacaattttcatttttgtatatttattaaacttgcaactaaatttaaattatgctgcaactatttttatgtggaaatttaaattaaaaatgtaaaatttaaaaagataattatgatggttataaaatttaaatcctgcagcaaattgttttatttgaaaattttctaattaaaaaaatataaaatgtaagatggtgattgtaacaacccgctctgtgggactcagttgccggct

SEQ ID NO: 45367 - DNA, 862 bp, Arabidopsis thaliana landsberg
aatgattccaaggttaattcacagatggtctgccttgtgcaccattagaatcttgaggattattgttaccagtgcctcccattgatcctccaaacatctgcatcattgatcgtaatgcacccgataaatcttccggcatttgctctgtgcctccgagatctatgttgatatttccgcctacatgtatctcaggctcatctgcaccatttctggtaccatctccacctgctcctccctcgttattgcgagaatgatttcccgggaatgtgtttcccgccatgttcatgaacatgctcatcaaatcagggtttacaggcattgagaactgagatggtattccctggcctcctcccatttctggctcttgagtgtaaaacgtgctcgtgttctgctgttcacaacaccacaaaacattagttcctttcgtctctcgacttatttacgctacatgagatgactggtcagacatttcaatacctggctacgtctctgtcgttgttgttcttctcttattttctgttcagccacctgtgatacacaccatgtcaatatcagactctcatgtaagttacagaacgatcctttaaataggagaaatgtataaaaaaataccaaccctgatattttctttcacagattcgttatgcggatccaacagcaaagctgccatgagtgtgatgaaaaaggttaggcagaataaatgctagctaacttgaagaagcaaagttctagctctattcttaagcaatcaatcctcataaaggaatatggtaatttctgactaattctaaaagatatacatacctttcttgaaacctttctcgatagcctcggcatattttccttgagcataatatgctaa

SEQ ID NO: 45368 - DNA, 861 bp, Arabidopsis thaliana landsberg
agaccaagttcatgcatcttaaaacaaaatgcctcgttaaatttcattaaattttagatataacttcatttttgaaccaccgttttcatgtcttgcttattctgcatatgataattctattacaactgttttcattaattttctggggatcaatttagaacatcgcaccaaaacttgtaccgttccaaaagtaagttaattaagagaggacttatcacgaaaaagggttgttgacgtatcgttatttgttgaattgtaaaagttttcagcctcctaatgaggaaatctaatttgtaaagtcattacttgtacttggtactttatttttgatcatgcatttgcttcttatttttaagcatatgacagccggcaaaaccataatttacagtgccataatggaatttgttaattatatttatatggaagaaaaataagagtatactttcaaaattatattacataaggtgttcaatgttacataaagtgaaattataatttgccttggtataaaattataagtatggctatctaatgtaaatttgatttgttaaccggtatttattgtgagtaattctcgtagctatctaatgtaaatttgatttgttaaccggtatttattgtgagggaaaagttttatgaaaataaaataaaccccagtgaaggtaaattagtggcgtgtatgagatgaggaaagcacgaaattaaaaaaaaatatgttaagatccaataattcaatgtctgaatcgagcaagtcacgatgatcacttcctcgagatagtgtctcccttattcataacccttaaagtaaagttaacttgaacacaagaataattcacaaagaaaatattatagaagagctaa

SEQ ID NO: 45369 - DNA, 614 bp, Arabidopsis thaliana landsberg
aagccaaagcttaatcttttcatctgagcagcagcgaggaatgatggttagatacaactgtaaattaagttacaaaatttaaaagtaccagattgagatttagcattaccagggttgtataaaccttgagatggatcccaaggtccaacaaaagaattggtccaagtggtaagaaacccttccttctgcaaccgtagatgagaggaaagtacaagatatgttgcaacttcattctgctcagctcttgaactgaaaaaaaaactccagagtgaccagactaattagtacaatgtcaataaggaaaaactaaaacaacccattgaaaaagcttaaagctttaaccttctatcaaagccaggattcagctcagtttcacttggaagaaactgaaaccaagaaacattatgtagaccaccctgtagaagaaaaatcatcatgtattaccaataagtcaattttcacacacaatgggaaaaagatgatagaataagacttacaattctgaaaacattagtccacatcacttggggatagatacaacaagttcaatcctttttttcttcaaattataggctataacccccaaatcatcgttttgagcgctcggaattgga

SEQ ID NO: 45370 - DNA, 726 bp, Arabidopsis thaliana landsberg
aaagttggcattaacattttgatgttagagaaccttagaaaagtcaccaagaaaacaaacccataagcagaaaaccttccaatctctaaaatattgaaataactgaacccggagaaagaaactttcttacataccttatacttatcgaaatacaaattataatttatacaaatgaatattataaataataagattttccactctcaactcaagtctcatactatgtaccatattaatagtggtggaagtaaatgggaaaatgaaaacaattactccttctaaagtaacggacaatgaagaataatgcaatcaatacacttaatgtccaattaaattgcaattgtttgattagcaaataagttagaattatgaatataagaatacgtttaatttgaaagaaaagttgagacaaatttcaagagaaaaattaaaaaaaatttgagatgtcttttatatgaatcttaaaagaatatgtaagatagaaaaattaggaaaaagattaattataaaataggccaagtgtactaatgttgtgaggatttaaaattttactaattcatatgtgataataagaagatattattcttaactaaaaatattagaagacaaaaatcaatctaaaaatatatgcgaaatggataaatatgattttttggaattaaatactagaaagaagatttacatcggaagatacaaagtattaattggtagaagacaagtgtcacc

SEQ ID NO: 45371 - DNA, 722 bp, Arabidopsis thaliana landsberg
tgcaatcaaccggaaaagaaaaccaagaaagatgaagatgagagattggattgttacgagtttacgagctggttgttgctgaagtcaaaagtcactgacataagatgcgtcgatattcttagaacaatcgaagaggcttatctctctctctgctacaaggatcttagcttagccaaagctagttgcgcggtgtatatttcacgtgattaagcttgcaatttgaaatgtagataaatatatttgggtggtatttggatatcaatagagaatttgcaaagacagcagtaattttgggaaggtgacttggggatcaaagtcttttcatggtacatattgtagacatctttacattttctggcttcaaaacattttgtaagatttcagtattaacaatttgtttctcgaaaagatctcagccttttagaaccttacttgaattaaaatcttgaataatgctgcaaattgcgaggatgcagtttgatctatctctttcctactttcatgtaaacaaatctttcaattatctaagaaagttttggtaagtcttaatatacattctcagtgtactgcacatattcagctaatcccatctgatcatatattttatcaagcagcaagcaaacctcatctgaagctgagtgagacttatcaggtgcagcaaacagatggtctggtttatctatccgaatagaacttgtgccagacatatttttctataccca

SEQ ID NO: 45372 - DNA, 465 bp, Arabidopsis thaliana landsberg
ttccagtgagtttaatgttatggcacatccttttccccatcggacatgatgattggatctacattctcacaattcacaacttcccattacaaggcactgaaaatgaatacaagctagtccatggctattcacaacactcagagaaactaagtaaatcattcacaacactcatagaaacgagaatgatacagctgaaatccactccgagaagcatatatacctgattattctcgttgacagaatctggaaataactatccccacaaatgatacaacgataactgtgcaattggcctgaaagcaggaagccctgtcatctaatatacgcagaagctgatatggaatgtgctatattgacagcgctaaggatctatgtaagggctaaacactgacctcattgtagatgattttaatacttacgggcctctaattacttatgagaggattaaaggaatcagtatgaggg

SEQ ID NO: 45373 - DNA, 1859 bp, Arabidopsis thaliana landsberg
attggagttgattgtgtattcgaatgaataaattaacagtctcatcacaagtatattagtatatgaatgaattatttgtgtgtttaaaatgaaaaattaaagtcttaattaaattccaaacaaatatggagcaatcttcatgagaggctcgagggtgctcacatgaaacttcctcccgaaaagaaaacacacattcgtcacctcaccttcgtagctacaattcgaaccgaaccggatccgatccaagaacccgacccgaatatctttcctcacaaacctcgctggatgggacccacctcttgaccaatcaacccacgtcactgtccggttcgaattcatctccggacaaatcttgttaactaacgtcggaagataatgctcgtcgatataacacggcggtcggcagtgatccttaaagacggcgtagtaccggcgatcagagacgatctcggcggcgactctacgtgagatttcgaaccattggtttcctttccgccagtcagagagcgacacgtgtgggagcattttaggggtgtaacggcctcggcccatgggccttgggtcgtcgaatgagccgaggaaagagcgagtggagcgcgtgaggtaagtgtagattgtggtgaagttgaagagagggatacaagtctcggagaggaggacgaagcgtgcgttggaaggttctagtagggcatgagatataagacgcttctctgcatccatcatcgaacattttccccattcaacggcctacaatattttacaaatgtcaaagtatcgcaatgttatcttgtaaaatacaataatatgttaaccaacaaggcaacaaattaaacctaattaatgaatgtaaatatataatcatataccttgcttggtatccgtttcttgtaaaatactgaagattccggcggctcttgagtgaactccggcgaggtatgaacgtagatggaataaaacccttcatgacctttgaagaacatttcccaaagaggggacaacggcaaattccacctcgttagaaacatgaacgcaacctttggatgggtctcattcttcatggggctgcgtgggggcatcgctgctcgccacatcagctcttcgtctgcaatattactaccagagctgcgaggagaaggagaaggaggaggagagagggaaggagaagtgagaggatttgaggagagagtgtgataatcttcgacgaggaagagtgatgtttggaggcgttggttaaggtaaaaagcaaggaggatgacgagagaggagacagaggagaagaagacaacggtgccaaggatgtgaatgtatcggagacttatcggttctttcttcgaattcatccgtaagttgagttctttaacaaaggttgtaatcttttgcttcttcattttcctttcttgtgtctattgattctagtctacgttctttggcttgcgtcgttgaagtcctattttgtgtgtgaataagtgtatgcatttatagtgcatattaagaacgcgtctccaaagtggtgctaaagtatattgtagaatgagattaccgttttggccacaaaataagcctataaaggaatcgaaagttcacaatcaattatgttgattctttaatatatacttataataattaatagaaaaataggatcatgtaattgatccatatactcaggattagtaaacctaggcatgatgtgtgaattgtgatgtgtatacatgatggacgtgcatggtgtgagaagaaatgtgcatgggaattgtgggattcgagcaacgagggtcttccacgctacactgaagtgacatttgacaacgaataaccttattttgaccataacatgcattttacttcagaattttgtgttg

SEQ ID NO: 45374 - DNA, 704 bp, Arabidopsis thaliana landsberg
  unsure (1)..(704): unsure at all n locations
aaacaaaaaaacgaacttggtcaaatcttaaaaataaaacggtcgagcaaagaacaggactaaaacactcactagtctctgcaactttatattctgttcaaaatacgctgcttttactttgccctgttcattgaagctcctctctctccctttctttctttctctctgtagaatttgttaactttaactttctcactctaaaatctgccctcattgtctcgcctctgtctactttcaagaattgatgtctcttcaacactttctcttattttaagtctctctctctttgctacatttcctttttttctgtctctgccattaaaccttctctcaagaacaaaaaagaaagaaagccctcacattgctttgtccaaagagagtcttagaatctcaaacctatctcttagggagaaaccctgattctatattcttacttgctttcctttaagtttctgtctcgtccagagggacaaagccccccaattccagtcaatttcctttgtttttgatggattgagcttctttctgctggagaaagaaaaagaaaagagctacacatacacttgcagagaagaagcaacaatgagagaagagaaatccaagactaataagggttctttattctcgaaatctattaactntatttttgcccatcttcatggaatttaaaagctgaactctnttttttattctatgaatttctg

SEQ ID NO: 45375 - DNA, 594 bp, Arabidopsis thaliana landsberg
  unsure (1)..(594): unsure at all n locations
caaccggtaaattaacaaagccaagacagaccaaaagccaaaaatagtaatcaagagtaccgcgatttaggttcattgtcgtgaaatatgcaacaagtgtaagaatcaatgagccgagtgaagagtccaagcactacacaaattttgcatctagagattgttcatagaaaaaagccgactaataaagaacaaaacgctagatgttcccataaagatatattgagggatatgccaaaaaatgctcattgnnnnnnnnnnnnnnnnnnnnnnnnnnnnnnnngattactcttgtctctctcgaagtcgagaagttggtggcggtgaccactggaccataaaatgtgttcttgttaacaacacgttttaagaaattgcaaaattgagtggacctattgggctttaaatattagtgggtttcctagtttgtacttggtgggccaattttatgacctccacaacttggatataaaatatttgggaaggaattaaagtaataaatactattttattttttgaagaccaaatggcattaaaccatctcattggnggtttttataagagtttccacaattaaaaaaaaaatataatgaaatg

SEQ ID NO: 45376 - DNA, 512 bp, Arabidopsis thaliana landsberg
atagtgtttgtcatctcttgtgatgcacaccacagagagaaggatctagtcctttgagtccaagatatagctcgatcaacaatatcctttgtttgttctctttaatttcttgggtattcacggtatagattgactattatatattttttaattatatttttaatatatagatatattagtatgtggtttaaacatattattaccaaggtcttaaagatttgctttgcaagagttaaaaaatgttggagtaaggacctcttgattaataaattgactgacgcaacaagttgtatcatgtcttcaaggaaacccgaaaatcacctatatgttggtggcagaataatgctatctggaagatgaatggatatgaccagattcagggtggataaagagcaagtatgcatgcaagtttgatcaaatgacttcttttcgctggactgccactaatgacttaagatcatatttatgggttactcgatccaaactacgatcggcattggaagctcaagttt

SEQ ID NO: 45377 - DNA, 568 bp, Arabidopsis thaliana landsberg
atcgtaattatatatcatcatatttagtcttccaccagattgcgtttgccatgattatgttttcccgatcacatttttctgaagtcaaactaaaacatatatatcaatcccacaaaaagaaatagagtaaaaaattggcccgacgcgtataaagacctaaatgttgcactattttaaccaagtaaaaacttaagacatgagtggctacatatttacataagttaattatgtaaaaaacactttacaattttaaagttactgtgaaaacataattatatcaaagcacatatagcttaatttaccagggtaatcaaatcgcgacacctaaacatgacatcatcatatttgaagaggccaatcaaattggtctaacctcccaaactcttcacgccttgaaacgtggtaagctaccacgcgagaagagttatggaggccataatatcagtatgactcctccagaaagctttagtgaacgtatatccaagtcccatgaacatgagtctagctcatgaactctttcaattctcaacgtcaacgatgtccataacgtatgttgcttacttttcat

SEQ ID NO: 45378 - DNA, 869 bp, Arabidopsis thaliana landsberg
tttgagttaaaaacagctatttgtaaatcgctgaattaggttgctagacacacactaaagaacacaccacacacagatccacaagtatacatgttacgaaaagagacgagtaaagaaattccaaaaacttgcatctatatttttatgttataaccttttttagatgagtagttttaattttgtttgtaatattcatatcaaaatatttctccgccagcatgcatagtgttaaatttttttataaccttttttaaaaagttgtcattatggaagaataaattaaattttacacacaaacatgcatatacatatttgaaacccccaagaagatgctcatctcgttttacaccattctcgatctattatctaagattcaatttttattaactaaatcttgtttcttttatatccataaaacttaaattaatacacttaaagtttacaaataaaacaacaacaaaatcgccgtttaaataactcaatcacactaattaaataaaaatattggtatagtattattgtttgttgaatattaaaactagaagtaaaaatgttgttttagatgaacttaacttaagtactttggagttatgttcgtaaatgggtggtaatcacgtttagctatattaattgcttataataatattgagctgcatcagaatatataaatagttaaatacaaaacaacaaaagaatatagaaatatattatttatgtgcataaataagcgaaaagaaggcagtagattcccaaggtttcttatgctcagagattattattttttctggtttctcagacacgaggagagagatagagagagatgttgaccggtcgcacagtcaatacataaataaatgggcccactaaac

SEQ ID NO: 45379 - DNA, 875 bp, Arabidopsis thaliana landsberg
  unsure (1)..(875): unsure at all n locations
gagatatcagaaagtctaaaactttagccacttctaagtaaaacctaaataaagatcaaacctgagcaacttgctcatccaattcagaaagttccacacccttctccttatgaatcttatgctgagccgaaaacatcttctcactcaaatgcaccctccaaaaccttgatcagagcactctggatcaaaaacatttcaataatcaacaaaaatgatactttaagctcaacacacacaaaaaacttaataagcatctagcattgatcacaaccaagaccaaaagaaagtaactttactgaaaagttcatcatatcacagatcaatgcaacaatcaaacatgaaattttaccgcgaaatacaacaaatagagaacaaacaaagaaacccatctctgaaattaagatccaagagaatataaaagaagagaacgaaacaaaacgcacctgaggctaatccgccaatggatactgaagctaatctccgctgaaaaaaccctaaagctcgaggaggaggataaagagactttataaaggatgnnnnnnnnnnnnnnnnntactaacatgacacgtgtaggtttgggattgtaagtaaatgaaagccgtttgatcaatctgagccgttcaatgtagatgacgtggcgttaacttaacaaagccacgttttgctcacgtgttactgatcgtatcttatcatttcctcgaatagataaacaatagccgacaccggagatccttaccgtctcactttctccgcttctcttgtttgtcacttttcgataaaccccaattcacggcagaatcttgataattggagaaaacgaaagcgtatatggtggtgtgggagaacaattcatagctgtgaagttagttgatttc

SEQ ID NO: 45380 - DNA, 329 bp, Arabidopsis thaliana landsberg
aaataggatttaattgcgaacgcgcaaggactttttttcctactttaatcctccctgatgaaactactgcgttttttactcttttggctgagcctgatctttgtgcccggttccctctttgcacaaaaaacctcggtcagtaataccggtagcttcgcttttggacagggcaaaaatctctccctggaccacccctgggaattttactggaacaacctctatactcctgccgacttcaacatcaactcacccgtccctgatttattgaccaaaccaggttcctggaacgaattggtcgtgaacggaaaaatatgcgggagttatggtta

SEQ ID NO: 45381 - DNA, 1061 bp, Arabidopsis thaliana landsberg
atactacaacgggatcaccaaagcttttgatttcatatctattgaaaaaggtatgtgatttgttttttcacgaatagatgataatatatgactgtgattttctcactagtatcaccgacgtttcaccaacaaattttagtttcaaatgaatgcaaatgcgatttttagtttcgcacaagtttcatcttcgtttcaccacaaaattctaatttttttaattttttttcatcccacaaaattctaattgtcaaatgaaaattgttggaattttcagttttacaaagtgtttcgccattgtttcaccataaattttaaaattttcagtaaacatgatttttagttttacgctagtgtcaccgtagatttaccataatgtagccgtaaaattacgtacgatggagttattaaactggacaagagtttagagttttcatttctaatctatcgctatcaagtatcaatattcattattattgaacctaccctcgtttccgtctatatccatgattccaatatcatcgtggtaatcttattacgaaacaagaaaccacagttttaaagaaaacgtcaatttggaaaataaaatatcatgcatgtggtcgtccatcaacgttactcatacaactgttaaccaataaattattaactcctatatatgaatcgtcctagcacaactttaatattgagatacaaaatgctttttacgtgattacaaatcatcagtgaaaactcatgctaaaattgttaaagacgaattatttgcaggattactaatcaaactagcaataatgtaaatataggtttagatttttgtaacattaaaataagcccacatatccgccatacctaatcaatactattatactaacaacaatttataaccctctaccaattgcttaacatcaatccacaatagtcccactcagtgattcagctcctacgacgactgtgtaagacaaatgcccttcaattatcacatacattttatatcatttggaacaagacgtgtggattctatttatccacaaatttttcatattttcctactaacaaaaatctat

SEQ ID NO: 45382 - DNA, 563 bp, Arabidopsis thaliana landsberg
ttcataaaaaaaaaaaacataaaaaaaggtagccatgtgaaaaatccataaatgcccttattttcgttttcttattccgaaaccgcttttgtaagtttcagttttgtaagaaaaccaaaaacaaaataaatcattttttcttcttagaaggaacagagaaatggtttcggactcggacctcgtgacccagctccgggaaattctccgtagctccgacctagaaactacgactccggcgagcgttcgccgtcagctggaggtgtatttcggtgtcgaattaaccgataagaaagctttcgtcagggaacaaaacgatgcttttcttgaaagcgatgctttgttagaaagcaaacccgcgcaagaagaagaagactgtaatggcgatcaaaacgatgaatagggaagtgaaaacgatgatgataagaccgaactgtaagcttatctcttccttttggaaccgactgttgtgttataatacaaattttggaactgactgtgttcttggtgatttcggaaaaatggtgtctctatctggcaatggctagccaactaaagttatcttg

SEQ ID NO: 45383 - DNA, 606 bp, Arabidopsis thaliana landsberg
cactggtgcttgttgaaaagtagttcgtacaaaactaagatattggatactgtattttctcattcatggactaacaatgatctcattcatggaactaaaattgcaggaagaattcaaaactcacacctcgaaatgatgaggacaaaacaaagcaaattagtaattctgaaattgagcaacaattgtattagtgaagtaacaaacatggcttgtgtatgcaattaacaacatggaacttgacatatcttaatgaccctacatagttattgcagcatctattcctgaggaaaatacaaattgcagttggaactaagtgtaaacactataacatttgccctgtggcacaacaatggagtaaagagattgtcagaactccaaaaatcttgtgaagagatcaagtctgcacttcatgatcaaaagtaatcttcgaagcccccttccttatcactgtcgtagctctcagttcctgcaatattattgttctacaagatgagaagaaggatgattccattaacaatgtataccatgtgcaaaatgtttatattaaggtggatttagaggctagtgtaacaaaaaggaaaatgatttaaaaaaattgtcccaaaa

SEQ ID NO: 45384 - DNA, 844 bp, Arabidopsis thaliana landsberg
aatacttctcaatgattttgggagaatcttagagttaaacatttttttccatttgaagcatggtagttctatcccgagaaagttaaatcaatagacagtctcctgatttgcttagaatgctcagtaaatttattgatggtgctgctgctaaataactgaaatatctgtgaaagcttggatcttgcaattgtctacgttacctatagtactccatttccagtgagctcttttcgtaaagcatttagtagtatttctttaggtaataattaataggcaatctattgcggagaaggcgatttaggtgcattgaatgtggaaccaaattgtaacgaactgggtatcttcatatcaacttggtacttaaattggcagaaacttttgcaaaccctgtagcactattactgttagtgtaatgaagaaatttatcaaatgttttgtggctgcttctctctgatattcttaataactcttacatacttatggaaatcatgcggaattatttggtctaagctaacagtgcacttgctaacagcaagctttgaacctttctttttcttcacgcagacaactaaagtaatctcggaccttctcatatctgtttccaaaactgagagacaagaagcaagaacgaaagtcagaaatgaatctttgcgattaggcagtgttggtgttctcaggtctgccataatatatttataattttatatgagttcttagtatttatccaatatatcattcatttctgtgatcatttacacaaggtttgaaattatatttacagagaggtataataaacatgtatagcaaatacaaatttgctttatagtaaaatctttaacaaact

SEQ ID NO: 45385 - DNA, 464 bp, Arabidopsis thaliana landsberg
ccaaacggatggagtgaatgagaaaaaagaagaagatcctttgttttctggctgatcagttagcttctcaggccttcacttagagaaagatgatgtaagtcccattatcatcacttgagtttatgctttaacaagcattcatatattctgctaattgtttgactttagaagtagagatctcggtttggtatcttaaagagtagtactattgtgggtaaataaattcaagtgaggttttaagtttgtatctgtttaaagggtattgctacagtctacagatttccatggcagctgcagatttgtaagaaatcaatatgtgcaataaatttcgaaccagctcaacaagagcattagatgagaagatacggatactgtcaaacgttaataccatgtctgatttaataagttggtgttctaatcagagtatatttaaaatacactgattaattggagaaagtaacaca

SEQ ID NO: 45386 - DNA, 657 bp, Arabidopsis thaliana landsberg
  unsure (1)..(657): unsure at all n locations
acattcctctaatcttaccttaaaccattagtagtctattaaaagtaaatctgtgtgtcaggctgggactccttggttttcaatattaacgagaaccggagtattcaaaggaaaagataaccatgccgagtttcctgctgatctggtaagcatcaacatcatcacttagccttgagaagaagattattattattcccgtgagtttatgttcatgtgaaactgtttaacttcttcaggtcgttgacaccgtcgaggaagcagttgatttcattttgacaagagagtccgccaagcaaagcttactgtcatgagttatatcactctcattttttctgaccagtccaagtatttcttgacgatttgagattttatttaacatattggttattttcacggcgaggccaaagaaatggtgtagtaacaagtaaacagaaattagtgaacattattgaatctagaagacactattttctttatgatttgagattttattcaactttcaacatattgtgtttctcttcacgattgtgattacattactaaattgataagtcattattttggtattaaatcgtttaaatgctctttcaattaatgtttgtactaaggatcntaggcacatagacattataaaaaacattagtttcacaacattta

SEQ ID NO: 45387 - DNA, 540 bp, Arabidopsis thaliana landsberg
tacttccatccaaaacggtatcgattgttgcaaactgtacatcacatgtatatatataaaaataggtaagtaaaaaaaaataaaacaaaaaaaaaatgtgtataataaattgactcgttcacaaattatacgtgtgttatataatcgacttaatttatagatagaatcaatgataaaaccctaaaaaggcaagaacatgaatatataaaaattattcgcgattaaataaaatttagataaaatgaaaaataagaaaattacatgttgaccaggatactcgactgtgttgagatgaatgatttcagttccatttttttgttttaaaactggaactgttccttgtggacaacttagaacattttctttatatttattttttataatatggcttttattgaaattgaaattttcctgtaacaacacaaaataaaaggattaaggaaaataatataatcacaatattatgctcatatacattggatggattatacgacatcttattatatctaagtaaccactattacgactatacctgaatct

SEQ ID NO: 45388 - DNA, 838 bp, Arabidopsis thaliana landsberg
atctacttacttaagctaggcactttcagctgaattttgattcgtttctggactcattagttgtgtaatgattagttttagtttctctttggtgaatattttgtttgattaggtaattactagacagtagtttctcattgggttttggttgatttaggataattcttgggtcatatttggtgttgggtctgttggttggttttttagattggtagtgaggtttttactataggtattggatttttgtggagatggataggcctagacaaaatgatcatttgggtgtgaataggattgggaaaaatatcagaaagagtcctcttcatcaatcgactttcgctgccagtactagcaacggtgccgctccaaggcttcaaacacagcctcaggtttataacataagcaagaacgactttagaagtattgttcagcagctaacgggttctccatcacgtgaaagccttcctcggccttctcagaacaactcgctaaggcctcagaatacacggatgcagcggatcagaccatccgccttaacgcagataaaccggcctgcggagcctctcccttccatgggtccgccacagtctcatcctcagtttgctagacagcctccacaccagccacctttcccacaaaccacacaacaaccaatgatgggtcacagggaccagttttggtctaatacagctgagtctcccgtctcagagtatatgcgttatcttcaaagttcacttggagattcaggacccaatgctaaccaaatgcagccaggtcatgagcagcggccttatatcccaggtcatgagcaacggccatatgtgccaggtaatgagca

SEQ ID NO: 45389 - DNA, 820 bp, Arabidopsis thaliana landsberg
aaaggctattggctattgctattggtcagtgatgaagtcatgaagaagcgtcaatggcaagtctagtgagtccacgtagtcaataaacccgaaacgtctagattgagatttttcatatcaatgaatgaagcttgtaaattactcatcattatttttattttttgcggacaaacttttcgcaatggtatctttatttagtttcaactaaggaatatgcttaatttttaagatctttgactcattttttctccttgatcgtcgtataagataacctagtttagtagtaacatttagtcgccagtttatttataacttaaaagtaattattttttcagagggatttcagttggatcaggacacggttatgtcataatcatgtaataaagttattgttctctttagtttattgtgtttccttgtgtgcttaagattcgtttgtcattctgttggttggtggtaagcaaattaattatgtatttttatactttactatatattttgttactgcatttttttgttttggttaacaagagttcagaatcttaggtcttttgtatttgtatttgactcatttagaatcttaaatgcatattttcttatttggagattttaaatcttattgacacgattctaaatatggttagggacatcatagaaaaaaaggtccgttaccattgattgtaataaggcttggttggacacaaacacagaaagaaaatcattgtacatattgataaaagtaacccgaccccgatagattgagtagatttctcaattaagaaaagttacaagtgaaaaaataaaaaataaaaactttaaa

SEQ ID NO: 45390 - DNA, 518 bp, Arabidopsis thaliana landsberg
aacttattatagttctatatattgatcagtcatatattggattttgtattatacccattttctcaaacacaacaatagatttcacataattgttgtaacttgtcttaagtttcattttagaaacttccgatcgttaaaaacattataactagctacaacaatcttagtgaagataaggttaagtaatgggaaataatagatgaagataagaatactttgcttgcaagataagttcatgtttggagagttatcttttttacttagaaggtgaataacgaatcttttgttttatggttttgactcgtgttttggataaagttgtaaacataaatagtatgggcacttactacacgaatgcttaacttcaaaaacgattatatgtcctgagtatattcatctctttggaaattgaagagtaaattaactcatgtatacgtgcctgatctaactttggatcgatcttgtatattaagtttttgagggttcaaaaaatattaacaatcaatataagctgcttg

SEQ ID NO: 45391 - DNA, 528 bp, Arabidopsis thaliana landsberg
ggcgaggaagttagctaagggctttatataggacaatgagttggagcagatggatttgatcaagagagatgcaagtctatctaagattcactcaagcaaagaaccataaattttcaaaagacaagtacctggtgtagaatcattgaagaaacagctccaagtaatgccggtgtagaatcattgatctaaagtgaagtgaagtttatggttttctcttcatgagctaaaatgaagttgcagggagaagctcgggatcaatgggtgcctcagacaagcaaagaaaacggtttagttttctggtttaagctcaagtgggaaattgagaaactgacaactacgtgtgttttgtagttacaagttacctgagcggttttttgcagtggtgtatacatcaagacagggttcgaaagattgttcttgttgagctgcattgctgcaaggtttaagaaattcaaaacagtgaggagatgttgaagataagtcacagatgtcttcaatgtttaaggtacaaagaaagtagacaaggca

SEQ ID NO: 45392 - DNA, 596 bp, Arabidopsis thaliana landsberg
aaaagaaatcaactgtgtgaaggcgtttgcactataggatctcaaattttaagtgttactaattgcctttcgtcctgtattttttgcaggctgatagtagaacaggagcacagttactggagagtattattttcattatcgattctgtcctacccttgatccgcaagctgcctctaagtgtcacagaagatctggaacaggatctaaagcatatgattgttcggcattcgtttctaactgttgtgcatgcttgcgttaggtaccctctatatttcaactaccatcactcctggctctactcatcgtattctctttcacatatgttcattgtttttgggacgattgcatgtcttcatagaagatgcagtcgagtaaaatcactcatccttttcaggagactactaatgcaaccttttgaattctcaggtgtctttgttctgtgagtaaattggcggggaaaggtgttagcatagttgagcatcttcttcagttcttttttaagcggctggaggcccaaggttccgataacacacaggtgggtttactttgaaaagatcatgcatcaggattgtttcatgtttaagcacaattaaggt

SEQ ID NO: 45393 - DNA, 818 bp, Arabidopsis thaliana landsberg
caataaaaactaactccctcagagaatttagaataataaatagtaccttttacctaaaatcaacaatagtatagattggctataatatgaatctataagaccaacaaaattaattaaagtgaggacgaacaaatttcttttgtcaaaaagaatgatagtaattaattttctttttaacaaaaacaataaattgctctgacatattaaaaacattacatccccaataaaggatatagacccgagattcagattcaatgtctaaaaaacaaagaaagaaagagagagaaaagcttaaaaaacgtacatgtttggtcttttcttggatatcaactgtctcaagatcatcccaaccacaaagatagtttctcatgaaatcatcaatcttaggcaagagatggtctttcatcatggttgggcttattaaaaaagcaacgagcctacattatccggtggctcgggccatgaaccgcagctatgttgcatgtccctagaatatcaaacatcgattgcgggtaaccggcaacaagtcctttctattcattcattagaatgaatctgttcaactctgcgtccattgagactatagctgggcaacgcaacaatgtgagacttggagaaactcccatatctgattagggacacaaatattattagtttttgcccataactttcgattaaccttaacataaaaattataatattgatggaagccttttttttaccttacactttggtttttcatgaaatctgggtcctgattaagaaacccattggttacaccaaatattggcccgcccattgccccaggaggaagacct

SEQ ID NO: 45394 - DNA, 1170 bp, Arabidopsis thaliana landsberg
gaagatgaaacgtggatgttttcattacacagagacacataaagcctttagacagagaacaaaaggacattagtatagaaaaacagagtcaatacaattctctgaatgattcgtgtttaattcattagactgaaattggcttttataagagccttacaacgtgaatacgaaaactaaggaataagaaacggaactgaaaaacgaaacaaactcaaaacaagaaaactcaatcagttcctaaaaacaagctaagacttgacttagtgattgacttattcaaaacccaacaaattcctccccttaaactgaaacgcacattggcatcagtttaatccttcaagcgccgaactccaagcatctctctaagcttctcgaactgatccagcttgattggcttagtcatgatatcagccacttgatcttctgttccacaaaacaacaatctcatagctccctcatttaccaagtcacgaagataatgatacctcacatcaatatgttttgttctcctatgcatgactggattctttgacaacttgattgcagaactgttgtcgcacataatgtcaatacactcacagctttcaacacccaattcctgcaagattcccttcagccaaacagaatgacacgccgaggaagttgctgcaacatactctgcttctgtagacgataaagtgacaatgtcctgtttgcgtgagctccaacatattgctgcaccattaagcaagaacacatacccagaagtgcttctcctgtcataccgatctcttgcataatcactgtctgtgaaacccaacaaattcaacaccgacgatctcttgtaaaagactccaaaatccagtgttccacttaagtatcttagtactctcttagcagccatcatatgttcttccttcgggtcagccaagaaacgagaaagcaaatacactacaaacatcaagtcaggacgagttaccgtaagatacattagggagccaacgagctgtttgtagagtgttgcatcagttccccggacgccttctctcaaaagttcagtacctgggacaatcggattcttgacagaattacagttccccatattgaaccactccaacccttctttagcatacttcttttgagagataagtatgccatcttcactttgatgaacctccactccaaggaaga

SEQ ID NO: 45395 - DNA, 436 bp, Arabidopsis thaliana landsberg
  unsure (1)..(436): unsure at all n locations
ctggcacggcagcatgcaagcctatgcgcaggccaaggcgcgcctgctgggcatggcccgcgtggccatcgtgaatcgagccgatccgctcaccacggccatggtgcccgcattgcagggcctggcggtgcgcagcttcggcggcgacctgcccgagctggtaggcgacatgggtctggaactgggccagggcgtggcctggctggccagctgcgaagctaacgatttcgacgaacccggtcgccgcgccgacgcgccgcaagaaggacgcgcccgagcccggtgcgcgccgccggccgcctgaaccgcctgatgccgatggacgcgctgcgcatncgcggnctgcacaacgccatgaacgccttggccgcgctgcaattggcgcgcgtgctgggcttgggctggggccctatgctgcgggccttgcgcgactatg

SEQ ID NO: 45396 - DNA, 498 bp, Arabidopsis thaliana landsberg
atcgttgacgaacatctttcataataaagtcactcagttcaccactaaactcaacaccagttggtccaccaccaaccacaacacaatgtaacagcctccttttctcctctttcgatatacctaattaaacaaatcgtgcaacgactgttacgttctcattctcattctgattcttatcctgcaggagataaattctgtttaccaggagtatcagagagcatcagattcaaaagtagcttcctacgaatctcctgagcatggtgaacttcacgaaggaagatcgcattttccataacaccatggattccaaacgtagaagcctctgcaccacttgctatcacaagcttatcataagcaatcttagacttccatggctttaatgtgttcaatccatcagtcaaagtctcacaatgaacctattaccaataacaaacaatacaatgcgagcacacaaaaacaaaactaaatctcacattttagtatgaaactccattactc

SEQ ID NO: 45397 - DNA, 785 bp, Arabidopsis thaliana landsberg
  unsure (1)..(785): unsure at all n locations
cttagggcgttaaacaatatgttaaaaattgattttttgggaggcttgcagttaacgtctgaaaatcaataatattaagaattaagacaaaagatcagtaaaactgatagataaatatatattttgtatataataactaaatttacaaaataataatcactaaattttgtatattttaatttaagtcacaattatatcattatttttaattttcaaaaccaacgtaattttgaatatttaaagataaaatttagcttaaaataaaatagaatcaaaagtcaactttttttgcagaggtattatagaaaccttctactttttaatttgtgtgaaaaacatagggaaacgataattattataaaatgttggaagtacaataatgtattctgcactgcataatcccaaaaccttcacaatcatatatacgtagaaaacgtagcagagtaaattccctctctattaaatttagttagaaaaatatccattattcaacttaaaaaaatataaactagttcaaaaactgattcaatcaattagaaattaattggattggttctgttaaattttaattggaatataaaataatgtttgagaagaaacaaattttgtaagaaaatatatttaaatactgatacctttttttaaagtattatctcatgtaccctcgcaattntatagattagaaatatcacttcttcatacacacacgtcaatagctataattattttggtgctaagattcactttttataactaaagaanatagtaaattcaacgtatgagta

SEQ ID NO: 45398 - DNA, 2780 bp, Arabidopsis thaliana landsberg
gtatgttaaagtgggagagttatatcattcgagctaaggatattttaaacctgccgtccagtcagttcccaaagcacatggatttggcaggaaaaatcccataaaaccaaaatcagtttggggaaagggttttgctttcagattttgttcttgctttttcttttcttatatttttgaagggtttattcgttaataaccctaatttatgaaattggtgaaagggcaatttttatttttatttttgctgagatatgaaaaggcgacagtgtgagaaagttgtgattcgtatccacaatattggcacaccattgatttctgggtcttctggtttgcctttagagttatttcacattcaatcagatcggccgtacacgattggtcgaagtagtagtgatgggttttgcgattttgttattgatcatagctctatcagtagaaaacactgtcagattctatttgatagccaaagtcacaaactttatatttttgacggcgtgattcacttgccttccggtagttttagtcaagtttatgatgagtttaggagaagattagttggtgttgaggatttggggaatttgaagtttagggcttctttgaatggggtttatgtaaatcgtgttagagttaggaaatctaaagttcaggaggtttctataggtgatgaggtattgtttttttgcgggaaggaagggttgtgttgtaaagatggtcgagttgggtttgtggttcaggagattgtgtttgaaggaagagatgcttcgattgtatcggtctcttcaggacattctcgaggaaccttttcaagtgggaagagaagcaaaagggtttttgctccgatggaaaacgagattaattctccagtttctgggttttatccacctaaagctgttggtgttgttgagagagtgaattctcttgtaagctattgtagacatatattgaagagtgatgatcctctatcttgccttaggctatctattatatcacattctggaaaggaatgtctatcttgttgtacatccaaaatgtttaggtcaaaagtaggtatagtggccgatgatagaggagttaagagtgctgagataaatcatgatatgggtcatggtttgtctggtctaaggttgagtattgaacggccaaactcaaatttacatgtagatagaagactaggtgtctctgacttgattagcgaaatagaaaacgagtttgctgcttgtacttttatcagtgataagactaggactatggttccttttgatggggaaaaagttaatactcccgatattacttgcatcaataaagagaaaagttatcaaagttctctccaagcacctgggaagaacttttatctaaatcgtctacagtatattgaacaaagctcaactggttgtcaacgggaggtttccttgccagaacttcttcaccctgtggaaagcattcacaaatctttcttgcaacatttacaagtgatattttatggtatgttgaaaagagtttgtttttgtattttccctagtagtctaaacacaacaatagataccatatctacaattgttccccaggcttgttcaagagtctgacgaatttgtattagcaggtttcttacctgttgtgatacacctagacacttgcctgtgactatcgcatgtcacaatgctgagagatgttggagttcaaaccctgatgcaagaactgctgtgcctttgccaaattacccaaatgtgactatggtgtacgtaatactgatcatatatctgttaaaaggaatggtgaatggttttatacttgtttgttattaaaacttcattacttcctgtttgtcttaggtatccaccatttcctgaggaaattgcatttgggaaggaccgcacgaaccgtggcattgcttgtcatcaccccaagctgtttattttgcaaagaaaagatagcattcgtgtaattatcacatctgcaaacttagtagcaagacaggttagagtgtaggccttagtatataggaatatatatatatatatatatatatatactatgaatcacagatgagtcttggctattatgagggttcagctattttcagagagttttatcatatttaattttctaatggagatttatcattccagtggaatgacgtgaccaacacagtttggtggcaagactttccacgaagagcagaccctgatcttttatcccttttcggccattgccaaagagaaaccaatcatggtttaaagccagacttttgtgctcagctggctggatttgccgcatcacttttgactgatgttccaagtcaggcccattggattcttgagttcacgaagtacaactttgaacactcagcaggtcaccttgttgcttcagtgcctggaatccattcttataagccgtcttatctcacagagtctggttgctcaaataccgtgagtagcttcaccttccatcttctatgcatgcattctctgattagtatcaatatcttgaactcatcttttattggttcacttagttgttttttcttaaagaatattgaaagtttaattgtgtcctgtatattagaaattttggtctatgcatccctttcttgactaattgtatgattattgtttcacagattttcagtgaagaatttctgggatctgttgaagcatcttgtgtaggtctcagttaccttttccgctctgccaatgattccacaggagcacaactgaaacgactggcttcatatatccgcagaacccgggaaaattctctcggaatgttagaactttgtttga

SEQ ID NO: 45399 - DNA, 594 bp, Arabidopsis thaliana landsberg
attggggtgctaaatttttgggaaagatgacatattgcaagtggttgatgagagggtaaagcaggatgataagtaccttgaggagcaagtagcactggttctaaagctcggctaggactgtttgcatccggttgcagccgtcagaccaagcatgtcgagcgtcatccagttcttggacggtgtggctcagctaccaaacaacttgtttgacattgtgaaagctagggagaacgttggagccattgaaggcttcggtgaagcagatgagtcccttgcagagccctgttcggtggctacattgacgtttacagaaccatttgtctcgcatgggcgctaagagacacttagtaactcttgaattatctcctcacttcacattatgaagtaagtttcgatctgttataacttaaaagaacctgtgtaattactatttagccgatgtttgcacaatagattaccgaaattaaatatagacaactatttttatgaaacaatttttcaagcgctccacaaatttgtgtgacgcatccaggatagagagagttcgaagagttggctatgccgaggaagagagcatcctttttgttttttttt

SEQ ID NO: 45400 - DNA, 489 bp, Arabidopsis thaliana landsberg
acactatagggattacaaagcctattaacgttgtctcctttttactttttattgatcttgaagtcagttcccatagcgttttgagatatcagtttgattaaattatatacttgtattcttatgttattatattgcactgctttatataattatatcaaaatacatttcatgagaccttatatgtcatagactgatatatatcaacattttaagaaaacagcaaattttgtaagaatttacagcccacggcatggtgcctaggctacatagatgaattgtttatatctatttaaacaatgttttattttatttgaaaaaatataaacgtaaataaacacatgtacaaggtacatggttgggtaggttgctagattttcaactgggtgatgttattagattaattacgttaacactcgaagtggtcaattaaacaaataggattaggaatttatattcttgtcttgcttgggatctttactccactcatat

SEQ ID NO: 45401 - DNA, 570 bp, Arabidopsis thaliana landsberg
ggaatttctttccgctgatcatcttggcttcctgcgtaagctggatatggttgatgttcttgaaagatttttggaactcttcgatcacatacctgccttcatcggtggaattatcgtttaccagcacgatctcatgcgtggtcttgtaatcctgcaccagtacgccgggcaggttgcgggccaggttttcggcctcgtccctggcgcagatcactacggaaacgggatggtcgttctgcagttcgcgctgtttttccctgtaaaaagccagccggcagaagaagtacaggtaataaaaaagctggatgaaaataacagtgcagaaggaacagaagataaccagggatacgatgggcggtatgaacatgcggcaaaaataatgattccctacttttgccggatggctgcattgacattccggttagaagcaaacgaccctggatccaaggccagggccggcaggatccggaccgaccacggtgaaatacttaccccgatctttatgccggtgggcacttgttggcagcgtaaaagccgttacacagcagcagctggaaaacgatatacatg

SEQ ID NO: 45402 - DNA, 837 bp, Arabidopsis thaliana landsberg
atgggaaaaggaactattgaatttgaagcaaactgttgagcaacacatttaattaagtaagttttactgagttattttgatcatcttaagaatgatagatataattagttaaccgaatttaatcactttaatttaatcattattacgttgtatactttgtatttggctatttgctttgttcgttccaaaactttagtatattcaccacacttcttcaccttatctcgttagttttgctttattacctttcctctttctattttttttttattgttagggtcaaagctttgttaccctttttatcattcgatatttgtatatggcctttgtttgatatagataacaattatctacattggaaagatgcgtttgcgagcccataaaaattggatagagacttgcacttttggatgatatctaaattatagaaattagaaagtcaagttgccaaaaacttatccctcaaattccattggatcggtatcgaacggtgtcgtttatatcatctcgaggcaatgctgatattagccgctttactgctgacacgtggccagagattagcagctcaaagaatctagtgactcatctttcctcttatcacctcgttattacatttctaccctttgcttgctaatgtttctttacgtgcactggaagaaaaatagaattatcaaaccaaacgactaatgactaatctatgatgaatctaaataattacaggacacaaagttgaatattctgatttaacttaaggaggtttattattattttaattaaaaattgatcagatgactctgtctcgtctttcaaaactattacttggtgataatgattttt

SEQ ID NO: 45403 - DNA, 627 bp, Arabidopsis thaliana landsberg
aactatccaatccccagaaataaaaactatccacaagatgttgtccaaagtttgctacattgttttaataacttacaaaaataggtagcatcctatgtccaaaaacaattaccacaggactatagtgattcaaacgcataccaaccaccagtaatttcaaaaaaaagaaatctaataataatattatctaaaaaaacaccatctatgcaatcagtagatggtgacatagttccacgaaagggtgcttaccctatggatcatttgacgggttaacatagatgagagcaatgtagtgttgaaaaacattccttgcgtactgctgtctaagtctgtcgacatggtcatcacttagcaaaccaacagtcccggtataatgcatctccatcagcttaatggataaaggaccacagtcccctgatcgcacatcttgtacccatctttaaggctttgccacttgaaaggagctaagccaccatcttgagagggcagaggttcacactatttacggattaaataagggacttgctcaacaacaggggcgattaactttgagaccttcttgtcatctatgagatcaacaatcaggtcaagaatctcaacaagtctattgccaaggtggattactac

SEQ ID NO: 45404 - DNA, 812 bp, Arabidopsis thaliana landsberg
aatcaatttcaaaatatttataatctgtggtcaatcttcaagatctatatttgtattaaaatagaaaattgttttcttcctttaaattgatataatttttctctctttcttatcttcctcatatttttgcattatttcttatatagctcaattctctctcaccctttgaaaaaaatatattaaaatttgacctattttatagccaccccatctgttatttataatctttcatctgggatcctcatttacacaattcattcattcatacacatacgcatcattcatcaacgtacgcgtccctcccattatattctcttatatgcactctttcatcaccatcaaagagaaaccaaagctttcatttttatgaatattcaagggtgaatagttagcaaaggtgacaactttctttcattttcttttaatcttctcatattatttcatcatcacttctttttcgtcgtctgggcttttgctgcttcttgtttgttgcttcgcgggaaaccccaaaaatggtttctctgttgtatcgtctatcgagaatctattcgttgtttggtaacagagaattaatggcttctttgaagaaagttgttgttgggccttgaatttctcaatagatgcctgtaatgtatttgttaatatgcctcctcgaggggttttcttggtttatgttccttcgaatctcaggctaatatacgttgccggcgcaaaaattccctcttttttgtcagagcgatagcgagagagagagattggttgaaaaagatgtgtctttgttatgattccttaaagtatggttgcttttgtag

SEQ ID NO: 45405 - DNA, 410 bp, Arabidopsis thaliana landsberg
taaactcctatccaatagaaaatagtattgtgaagagagaatataatctgctaaagtattcccactatccagaaaaatacaaagtagaaaatgcacaaaacattatggttagatttctatccactatcgaagattggaatactagtttataaaaccaaaaacgtcacggtgtaactcctcgactgcacgtaatgcatcgaataacgaaatagtgatatatacacagaaaactatatagtatcatataaaattctttagtaataattattaggtcttaagaaatacagtaattgcgagtttaattgactagagagagtcatgattagtttaacgataatgactatttaatcgggcacattctttttcaaagatacccctacgacaacattaaaaaatacaaaaagccgaaa

SEQ ID NO: 45406 - DNA, 758 bp, Arabidopsis thaliana landsberg
agaaattttgcaataatagttttgagttaattagttaaacttagaagagagtggaaattattgattttaagtaaatgaaaatgaagccaattattttcttaaaatttatatttaaaattatatatatttggcattaatgtgaatggatttaccaagtaattatatagatataaactcattttgttcagttacattattggcccataaaaagtaaatattcatatatgacaaatatggttaacataaaaaaatttctaatgttgaactctagtgcttaaagaatccatagaagtggcaatgccatttgcgcttgtaaattttggtaatttttaattctgttttgtttaattttttaacaaatttattatgatgaaaaaaaacaaatttattatgatgatgcaaaagtataagaaaaaaaactcagggagtgaagcgttcaatattactacatatatatcttgcatgcttacattcattcaaactgcatggttccagcctccagccgatgacaacaagtaaacaaaattaattaatagattggtgagatatgtataaattatacataatgaccagaagttgaattgaatagagatgagtaacacacttcatttagatagacactttgtgcactgagtcactgacgaataatttatacttatttgaaacgttaaaatggtagggacataattttaagtataaatctatgaaaacaaatgctcgtatagaagtgacagctaattttccaccctttttttgct

SEQ ID NO: 45407 - DNA, 1629 bp, Arabidopsis thaliana landsberg
  unsure (1)..(1629): unsure at all n locations
tggccacttaaccgacataagattttaacaaactaaattgtgtcaatggacgtattacatgatcactggaagagaagagttttcaaaattagttagaacataagataatctgcgatcgaggagaaataattatctttctttttttaatggttttataatctgacatttgatccataagtttttggttaatataagaagaacaatcagcgttaagttatcttatgctacttttatggaaaatttattaccactaatggtaatggacaccatgaattagttaatgttcagattttactgtaatacctcaaatcggtccactggtattttgtcacaaacttacaattcactggaccatatttttttttcgtcaggatcaaatggaccacgtttttttccggaaaacttagcattaacttgtatctggttatttcatccaaactaaatttaatgcaatttgtttttggtagggactaaatttaatgcaataacatggcctttctttttttagttttttaatatatttttttttgaaagttcgtatgattttaaaggttgtctagagccaaatactaatcttatattccgaaaaactatgttgaattgctcgaattccggtgaccaatagtccaatactactcacaatgttgaaactagaaacaatgactctattcaaaaaaaaatatatatagtcgattgatcgatccttgttactgacattgaattaaacgcatgctccatgttatcacctcggtaaccaatactaaatatttattgttctgtcgagctattattaatcatacctacatcggatctcaatatctcatcccaatttaaacccttcggttttcgttccggttttgatttggtttacttcttaatgaacaataatcaaccgaattaatctcggtttggtttggtagagcagacataacacatgagcataaaagttcaaatacagacatagtagacataacacatgagcataaaagctagaaaaacctttccaaaaatggcaaagaaccgtaacttagtcttcttcttaggggtattagcgtcttttacactctccagtttcccggtaactgtttccggcgagccccctatcttattcactttcggcgactcttcctacgatgtgggcaacacgaagttcttctcgtcagagctcgatccagccaccacgtggccttacggcgattccatcgatgatccctccggtcgttggtctgacggccacattgtcccagatttcgtcggtaaaaactaaaagtcttacactttcttttagggttcttgtaattgattccaatttcattgctattaggtcgattgattggtcatcgtgaaccgattcctccggtacttgatccaaaagctgatctttctcgtggagcaagctttgccattgctggagcagttgttcttggatctcaatctactactgcatccgtaagcactgttcccgccattgttgataaaaaaggcttcgtaagagttttatatatctatgtgttttattttgttggatttgcagatgaattttggacaacagatatcgaagtttttagagttgcgtaagcaatggtttttccaagacccccaacaacacatatncttggttaacatagg

SEQ ID NO: 45408 - DNA, 503 bp, Arabidopsis thaliana landsberg
tgcgcgcttctggtggacacccaagcgagacgctgaacctacccatggggtgtcttctaacgatgctcaacgctccagttccggacgagagcaggtcgtcgtacctgcaggacgcactctccgtcttcaccgaaatcctttgcagcgatccgtagcacaagggtccacggtgttgccgtagtctgggtgaagggaagtgaagcctacaggcaacacgccgaagagtctgtacgtctcatgtttggtacttgtagaacaaattaggaatgtataactatgacctgatgttgctccggtgaatttgtaactccgtctgcagacatgtgtcgggattttcagttgtatgtgtgtaccagatcttgagcaatgttttcttgcgagctgtaccaatcgggactgatgtcatcagcttcatttcctgtgtatccatgtagtctgcatgtgtgactattacagggaagggcagcgtcacggcgacccgtgcatcggggtacattggagat

SEQ ID NO: 45409 - DNA, 811 bp, Arabidopsis thaliana landsberg
caccgctttgtttccttgccataagcaaagtaaacactttgagtcgtttacaaagatttcagtgaccggttttaatagccaaaatcaatcttacagtctaaccatcaataattaacaccgcttaactaagttatatctaagtatttgcaagagaatgattggagttgcattatgtgcaaagaatttctttaacaatctaagttgaagtacatttaaataaataatggatagggaagaacagttgtgggaacactgaattttctatatagggtttttgatgaggcaacagaggattttacacaaacgcatcacaaacacacataaattctcaagatatcgaaaaaattcaatagcagaaaataaaaccagaatagatccctcataatcttagataagtaggagactaatcgatagataaacagaaatggaagagcaaagtgacgcacctgtactcatcttgaagctagggattcaccagcaacgatgctttagattcatgtgtcaatggggaatagctaaatcttacagaaacagtccttaagtttatgggcctgaacttggaccgtacgcaggtttacgtaataatagtcataatcgatattgttaacactgaagtagactataagaaccaatgggtaatgccgggtttcaaggtgtgagctcaagtggtgctagaacacaaatgacaacaatgattaagctcatttccaaatttgcatagatgacagatagcaaaacaagtcgctcataagacttatccatgatcaacatgaccgcaagagaattgcttgtactgtcactagcacaaaac

SEQ ID NO: 45410 - DNA, 533 bp, Arabidopsis thaliana landsberg
attgtattttatataagaagttccggctaattaacaccattaacacaaacaaataatattcacgtgacgaagattcatgaacgatatgttgctttccagatggagtaataagtccaaatatatatatttgttagtgatgtttgtgtttgtgtaatgttttgtatacaacaaacaaggatgattctatcacggaaaacgaccttcggaaattttttgtattgatcgatagcatgcaaaaatttacataggtatagtcatatagagcctatacctaggtttgaaagggaaaaaatgaattttcagattctagagaataggaaaaacttaattaagaaaggaagatagagataggtacatcaaatatacgaaaatatattacgtaccaatagaccccccacatcacgtaatgtcctaattcctactattaatcccactttcttcatgggctcttgggatgatcgcacctctttaattaactaatctttaataatgcaattatgcaacaactttttgataattggataacctaaatc

SEQ ID NO: 45411 - DNA, 568 bp, Arabidopsis thaliana landsberg
aatacattcaaaagggtttcaatgcttgtgaatcagaaattgaaaatcttcaaatggaaactcatatttgtgaagctgtactgaagaaagagatcttcgcaaaatggagcttcaaagcttaaagaatatgatcaggtgtgtcttagtgatgattgtggtttacatatttgtgttctgatggtgtttgtaatggaatcacgtttagagataagctaatggtgtttgattgtagtaattgtcttaagctaatggtgtttgtttgtagtaattgtgtttgaactatgagttagttagttatgttgtttgtagtaattgtgtttgtatcttaaagtatgagatattgtaatgggatttgaattatgtctgaatttgtaaccttaaacttggttttcattaaaaccttaaacttgttcaatcatgtagacaagcaaaccaaacatctataacaagcattcttatatgttctaataagtcatcttaccaccaaaaaaaaaatgtcttcatgattctgatattgtccatacccgtagcagttccattgccaaaaacctacaaaatcgtcaacatc

SEQ ID NO: 45412 - DNA, 819 bp, Arabidopsis thaliana landsberg
  unsure (1)..(819): unsure at all n locations
aatcagtaactttattgacaaacaaaaaatgcagccctaagttgtccccaccgtataatacaaagattcgaatactttaataatacgagctaaagaataaagagcannnnnnnnnnnnnnnnnncacttataagttttcctccgagaccgagagagatcagagatggagcagattatttcaccacgctccggtcaaatatatatttcttctgttttaggcctcagcaaaaaccaccttcatagttgttatgttggatactatgacaatttagtgaagaagtggtctcaatctaaattatcattctggataatgacaaattgatgataattgataaaagatgcatactattacaaaagttgagaaaagaagattacgttacgtaatgtaggcgttttaatgaactccttaatttcatcgttcgtggaaaataataacacaagcaaagcaatgacttttatggacactatgattggttacaatgatcttattgaacatgtgaggaggcaaagtgtatatccttatcatctataatgtttttttctttcttctccaaagatgtcgcctaacatcacgttatttaacactacatttagcttacattagtaatctaaaaacaactttaataataatccaacaatcacgcctcatttaaccaaatcctaattagtctcaagctttcatgagaatttaagaaaacatactcatgtatgattgtttgtgcgcatgtgtacgtgggtttttttccttggttggatagatcggggtgcaacagtgtcaggtgtttagaccgcgaatttggatattctaatatttgattt

SEQ ID NO: 45413 - DNA, 864 bp, Arabidopsis thaliana landsberg
  unsure (1)..(864): unsure at all n locations
cagatcgtattaattatacattgccaagcatatatagacaatgtaatggctgtaaatggcagatttagtttgaatcttcataagcgattttgatcacttaaaaaccaataaaaagatgagcaatttgtcattgtgtaatgtgtatcaaattttaaactaatttacaaaatctgaagactgtagtaatcacgggaaaaaaaacttcgtgagttcatataaaactatggccaataatctaatataaccaatcatgcagtctccctacatgattgaagttgagacaatttagcttcagtgccctaggcataggactcaagttgggaaccatttttccctatctgcattctgcacaatagttcatgtcatgttttgtaatcttataaaaatttatgattttcatttttgtttcccctgaaagtcacagaacccatttaccatcaaacgtcaaatcaacgagaaaaagcattaaatattaatgattgtttctcataaatcgagttttaagaaaccgtgtcacgtggagaccaaactataaaaacttgactaggaatgaaagtagttcttgaacaaggaaattttatatattgtttgttcaccacaaatttagaatatttgtttttgtttctttccttttggtttacaggtcggtacgcattgatgaagataacgatgatgtacgaatgtgaatatatatagttaaataaatagaaccttgcaaaatcatttttaatgtgtgctccattactagaaaataatggattacatgtattattactaattaaacaacattcttgatatagtaaacacatattactntgttgatcgaaatcagaatctacgcaaatattattgtgtaatttttct

SEQ ID NO: 45414 - DNA, 574 bp, Arabidopsis thaliana landsberg
tccgatccataaaaagatgagaaatactactacatcagacacagcaacaaaaaaaaggccgtccacctccttgttggtccatcagtccaccactgtacacagaatgttagatgattgacggcgaaattataggcttccctccatcaaccacgacgcagatcatcaagcagctttgtgatcagcaacccgacgacgaaaccaaaaaaaaaaaagagtcactgtggtttctttcctagatagagagttttatcagcagcaaagcccaccaccaccaccccaagcagcagcagatgcagatcggtacaactataaagtcaagcttaccacccatcttcttgctataacatgtgaagtttgtgtgcatgtgctgctagaggttagccgcgaggaagtcgccgatctcctccatgacctcgtggtagtggtccgtgttggacagcaggtagaacccacggtggccttctcacggtacacgaccttcacatggtggccgtcttgctggaggcctcgggtacgcagctgccgatgcaggtgaggtcaggccgacacgatgatgaggccttggtgaagggag

SEQ ID NO: 45415 - DNA, 525 bp, Arabidopsis thaliana landsberg
  unsure (1)..(525): unsure at all n locations
gaatgcgtataatacaattatataagtttacaatccaaattcttgttctcattatgatttatgcatgcatattatgaatgggtaaattctcataatataatctaatattttctttggtatgttgcgcaatagtttgtactagtggatcgttatcaaagtactactctctatgtggaatcaaatattgtatttttgtgtttttcacaataatatgtcatgtggcgaaactgtaattatttagttagcaaatattgtcaaatatttagttagcaaatcatggtttttgttttaaatgacacaaaacagatgcaagtgtccagtatagtagtagtactgaaaattatctatgcccacattcccacgtaaacttaacaactaacgctagttcaaagagaattttaatcaagctaaaccaaagtattttgtcggctgtgattgagaaaatggagtaaacgagataacacagatgtagttctctaactctttctttttttntttttcgtctgaatgattcatgatattaac

SEQ ID NO: 45416 - DNA, 574 bp, Arabidopsis thaliana landsberg
tttgaattcttttttgtatggttttagttcgaattagccgcattggacaacccctagaatttaatatgctatcaattttcagtgatttcttagaatctaaatcatcgtggtttctatgtggatttgtgtagattgagatcttgaggaagaaaggtcactcttactcagaaatcatcaacgagagtgtgattgaatccgtggactctctaaacccatttatgcacaccaggggagtgtccttcatggttgacaactgctcaaccacagcaagattgggttcgaggaaatgggcgccacggtttgactacatcctgacccaacaagctcttgtggctgtggacagtggtgcagcaatcaacagagacctaatcagtaacttcttctctgatccagtccatggtgccattgaggtctgcgcacagctcaatgcctacgttgatatctctgtagctgctgatgcagactttgttcgacctgagttgcgtcaatctagcaactgagtgaagggttgaaagtttgtcagtctcttatttgtaatcggagtattaagtcgagagtttgtgatgtttcttag

SEQ ID NO: 45417 - DNA, 477 bp, Arabidopsis thaliana landsberg
tcgacttccataataatctaggttgctgcacaatggcactctaggttgtttttcgcacaagtagcagcggcagtacaagctagtgcatctgttgtacagatatttgtgggccaatggcgggtaaattcatgaagccatctttcaccatgaccctgtgctaaaaccataatgattttataaccacaaactacacaggattggggcaaggaatcactctagtgacccagagatagatgaagctttgaagaagggagaagataatgggctttcgttggttatcttcagtccttttttatttgttagttatttttgcatgattatattaatacttactatatacaagacatttgaagaatcaaatgcctggaaacaggagctgcaagcctgcctgccaccataatgacttatagtagttttgtgcttgctgctgactacgaagctaaaaccaaataaatagatttgaagttcttgtattca

SEQ ID NO: 45418 - DNA, 691 bp, Arabidopsis thaliana landsberg
gtaactttttttttttttttttgatattgcgtaacttagatattagtcttactagaaaatcatatcgatcgaacaaaaaatacaaattcacttatatatcactgaaaatatcaatattatattatagtatagtatgtaaaagccagaatgagtgggctacaaatcttttctacattggtcttctcaattgatttcccctagttcttggggccatcatattgtacaacaataatccatttctgtcatatgtttttagatcttttatgcattttgtggatcttttatgtattttgtttattacttaagtaataatttatatgttgggggaccaaaacacaggtactcgtacaagtttccatttcttgagagtaaaggaagaatagaagtggatgatgatagagttggtccactcttcgaacacactttccctccttgtctctccccttctctctcctttgtcggtatccccagaaaggtcctttattttatctctttttttttttgttttaactaaaacatcattggttttacctctaaacaaaatttgacaattcatttttggtattttgcagttgataggattcccattctttgaagcacaagcaaaatggatagcacaagttttgtcaggaaagtcatctcttccttctcctgaccaaatgttacaatcagtagacgagttttaccggtc

SEQ ID NO: 45419 - DNA, 481 bp, Arabidopsis thaliana landsberg
ttcgattgtatttaaatttatataatatatacaaaaatttaaatttaaaaaattgtcacgtgtgcgtttggtagctgtaaatgaatgcatcttacacagtagcccacatgtcgattttggtttttcttcattttttcttcaccacatagctgttgtcttcaaaacaatctaacgagttttttagatttgttgatttttttttgccttggattattgttgattttgccattttagatttgtcactttatataaaaatatttaaaattccccattttctgacacttaaaagctaaaattctgagaaactttttcaataaaaatatgtctttgagaattttatttcattatgttcccattttttttttaaaccacatattaccaatttttttcccctaaaaaaaagaaccaaataaacctaaatgtgtataatggtaactttagatataatttttttggctaatctatgaatgccactaaaaat

SEQ ID NO: 45420 - DNA, 731 bp, Arabidopsis thaliana landsberg
ggtatctggtgtacctcgggtatgccatggggattttggactaaagctgtcaatggatcagcatgctgaaaatcggtggaccccctaacttgagattttgccttaaaatcattttccttctctgagggcgaactctcaggctctccaagacgtctaaccactctcggtggaacatacttagagtccaattcattatctgagtgccacccattggcttctgaatcaaatctaccttccccttgagtgttctctccaagtttgtcgatgtcttcagtatcagaaatgctgctgtgcatagattcagttgcgctttccctagagagctgagtgcttatttcatttacactccaggagaggtggcgggtaggagcatgatcatgttcatcaagtggagatcctacaaccttgcgcataaggccatctgagacacctttgaactgacgtacaatatcgtccatggcatcatcaacattgactgctcaattccaagaattttttttagtaaaatggaaaagtaaagcaaccacataacacaatatacacttctcacttcattctgatcgttttcccagaattcatttttttagcataacatgacggattaaaaaaaatgtattaatggaatagaaagcgagggctgaattttgtatacagctacatgttactaaaacagcagtaaacaatacctgcaagagttttcatcactgatgaagactttccaaaagaataat

SEQ ID NO: 45421 - DNA, 522 bp, Arabidopsis thaliana landsberg
ttggatggcttgacccaatttgtttggtttacacaatttatgcgagagggaagagtgttgtttctgccggtattatcaccggttaataaatacttcatttaatatgactattttgcttttttatctgtagttttgtgatgtattatgatcttagcgaaaattttttgttattttcaaacgctctttgggaccctttttcttattttcatcgaatacatttataaaattacatgtttaccaattgtcgtctgaattatccttgagtgtgaacatactgtgtatgttcttgttgtaaaagaaaactccaaacatatactactacggacttgggaaactttttagtacagccgtattagatgttgggctaatgggcttataagtgtctaggctttaacggtccattaaaaatccgcctctcttcgtttcttcgtaaccgtagtcgtgtcccggaatctcggacgatccaccgagcttgaagcttaaaaatcatggcgttcttgtcgtgtcttccgatttgcggac

SEQ ID NO: 45422 - DNA, 921 bp, Arabidopsis thaliana landsberg
  unsure (1)..(921): unsure at all n locations
aaagaaccgatgaatttgaatacaagctggctaaaatacatttacagcacttatttctttatgttttctttgggcttttggtttttttaacaaaaagaaaacaaaaagatattacaatttatactgtaaaaatttataaaaatataatttttctttttcttttcgatatatctaaaggtctccgaaaaatttagcaaaattgtcgatagcattttttgcagcgaaattacaagcagtttctttcttgacaggatggtgaccacatccaacaaacttatcctcaatatggaaacaataggtttgattttcttcccaagtgtctttggacgtcaatttcaagatgctcttttgacacatatgattgagacctgtcattggatggcttttcattttgtctaaatgtattattggctccaagcaatggttttatcacctatcaacaatggttttgtcaacaatggtttcaacaccaaaaaagtcatggattaatcgattgccttaatctagtagctagatatttataactaaatgtttagtaagttaccttccagacggtctcggtggagttgcagtccatgaagatagctccaatggtagactctactatgtctgctagaactttaggaacttttaaaagaccatttgaatgtaatggatatttttccatggcttccacaaattctagtatctgcatataataatattgattcacatattacacacaaccaatacaaacgtttttattaaagattattgttggtaattttctaattaggcccatgggttatggaataaacaaacacattcattgagacaaattgtggatgaaactgatatagagaatggggaaaaaacttgacaaagtttaatttttacggattttataatgaaccaaattgncacaagacatgatcgaagtat

SEQ ID NO: 45423 - DNA, 794 bp, Arabidopsis thaliana landsberg
gcgtttcacgttccttgtattgatacttggttgcaatctcactctacttgtcctctctgccgcgcgttggtcgtcacttcatctgccgttgagatcgtcgatttatccactcaacagatcgttacggagatcaactcgatttcgaccgcagatgattccgtcgttgtcgttatcttagatctggaagattctagatctcggaatgaggcggttaatgaaggatcgacgccgaaaccaccggagatgcaggattcaagagacggagaagagcggagatcggcgtcgttaaactcaggcggcggtgtggtatcgatcgcagatatactaagggagattgaagacgacgaagaatcagcgggtgtaggaacttctcggtgggtagaagaaggggaaggagagaagacgcctccgccgtcaggatcggcggcgaatcaaacaaacggaatttcgaattttctggttcggagttcaatggcggcgatgaagagatctggttacgatagagcaaaaaattaccgtttaccgaaataagttataaaaaaaaaataaaaaaatagggaatttgaaattatttttaaaaatatcaaaaaagtgctgattggcttttttaaaaaaatctatattttagttttggtaatcttattataacaatcagaatcattgtaaaccatttgagaaacagagcaatcaaagagttttgaatttaccgcccaaatattcttacgtattttttttacttataattaatctacatgttctttttcttttctagggatgccactttcgagaaaata

SEQ ID NO: 45424 - DNA, 818 bp, Arabidopsis thaliana landsberg
agctttgagaaggtttgagattatgttcatgttaaattcataaacgaagacgtagagttttgaacattcacaagttttattcttaacaggtaagttttcttgatgagttattataaggaatttttcttgtccgcttacgcgtaagagtttagttatttttctttcactcagatttttgttgttagcagcaattaataatataattatggaaagtatagaagttaattcaatgattgcaaaaatccaagcacttgacgcaagcgacatcgtcgtcattggcttttatcccagcagctatgatcgccatgatctaaaactgtttaaaaaatgtttaaccttaatttattttggtccgatcatatcttatcttcttaaagaagaagaataagagttatttgatattttagtagaagtgattacttcattgattcttttactacaaagtaataataataaccaaatgcattctctcgaatgaaagtaggtacaattgttattttattcttttggtaaaagtaggtaggtaccatttattttggagaacacatatttaattctgaaacgggtcaattttcgtgagtttcatttttttttcttataaaggttttgttaatatcaaaagttttgtttattctatgttttttttctaatccacgaaaggtcgcattgacctaattcacctaactataaagaagtaaagaacacattgataacatatatagtgagcatataatataaattaatacaaaacttattgtgtcgcacatgtgggatatatgactgggtttcctatgtgcccgttttttgtgtgaagcgat

SEQ ID NO: 45425 - DNA, 1317 bp, Arabidopsis thaliana landsberg
tacactatgaccaagtaattcaaaattctctaaagcttccatgtctttaactcaagtttttcactatcatatcagccaagtgcgactgggctaatcgcggatgtagatcactcagttaatgtgacccatgactttaatccgggttcacaaaatcttcaaatgaaagcttgtcaaaactcgagaaagaatgagatgtgcgagaaagctctaggataagagtttacaaaggcaattttagtccttttatatatatattactattatagtgttatctgatcattggaaaggtgcatgattaatcccaaccaaaccacgtttatataagtgcaaatttgcttagtagtattttgaatggacaccatattttatagcatatcgaaaacaaaatcaaataaacaaattcgaggggtaacaaagacaaacccacatgcattatgcatacatgtacacgtgaaaattttatttctggctactacttaacatgcgaccattaattgaatcttatacttcataaaaaatagtaaacaaaagttacttaacaaaaaaaaaatgaatattagctcaattaggtcaataagtaaaggcttctctgttccgctaattttgtcaaaactccaatcaaagcgtcattgtattaattatcaaatcacatgcatgcccgaacaggttgatgatgataatgaatttatacaaaattgtcaaacatatatttataactgaggttttctttctttggttagacattttgttcaaacaaaacatgtaaccgaaaacaaactagcatatgtgatttaccattctttttttttttttttttttttgttatcaagatatcccacaatttgattattatccattttaggacatatatacatgaatgagacatgtgatgggtaggacaagcatttccattttgctacaaggtcgagaggttgaacggaacccaatgaacctattggacatatgaaacctgttcttgtatccaccaatcaatttttctacacatactaattttgcttttatgtctcaagatttttactagtcacacacaaaagaatccaaaatataaatttctatattccctgtatcagttctatggtgatctttttattattattttaattatctagttgggtttataggcatccccacatgcatataggtatggccctttactaaaacatcgttggtctcatatgcacacatggcaactatagctgactcttgtttcattcacaagattcatatcgcttttaattggtaaaagtgattaaaggtattatcgtttttatataacattttcatgtaattatgcaa

SEQ ID NO: 45426 - DNA, 639 bp, Arabidopsis thaliana landsberg
aatatattgatcattgattgtgctatttccagtgtttactgtgtatttacagaattacagtgttgttctccaacctcttggaccttgtttgggtacattcatacccatcttattatgcatgttttaccgtggattagggtccagatagaagagagagaaaaacaaagtgcttgacaaacaatacaggccccttagatttcagtggatatagtaggctacaaacagaagagaagaaacaaagtgcttgacaaacaatacaggcccctcaggtttcaggagcgatagatacagactgtgacaactcgactcagggtaacggtcgcggaggtcccctatccaccgggatacagactcaacttcagccattgccgcctctaccgacaagctagcgaagaactgttgaagctcaaatcgatgttgcgaaatccgaaacgtgcacatacgggcttcacccaatgtcaggacctgtgtatcttcgtaggatcggaccgcttctggtttattcagaaaacaatcgatcagagtaacaaaaaaaacattaggacgatctcgctggctgaagagttcgtcgtgatctgcaaagacgaagtagtcatggacatacgagtctgataatgcagtagtagtaggaatctgtag

SEQ ID NO: 45427 - DNA, 682 bp, Arabidopsis thaliana landsberg
accttatcacccgaaaagaagctctttcatagtttcattggcgtgaagcgatgaaagaaagtaaaaaatatcgattgatgtatgtacttttttgtgtattaaggtgtacgtacactgattttcgtggttttaagcatattttttttcttcgttttaaagcttaactttaactcatttgaatatataaattggttatgtaaaccaggaatcaaacgttagattatccatgattaaccgaatactctaattatacaaatagagtgtatcattgtaacggaatctttaagaggaataacagaataatttcatcttcttcgttttttttcaaattctcgttcactaatatggtatcatagagttaagttttaaaatctcaaccgatttgacctaaatttcatggatctttgagattcttcttctgtagatctcactgaagtctcgttcactaacaattagccattttttccacaatatatatatttctatattaaaattatatattttattttaatatatctatatatatatgtatataacattaagtcatatatatatctaaattattcagaatgtaaaacaggaaaaacaattattcaaaatgggttaagatattatctgggtatgtcaacatttgcaaaaacgttttctaagaatacaaaacaagaatggctgttcaaaatgg

SEQ ID NO: 45428 - DNA, 540 bp, Arabidopsis thaliana landsberg
taccaccagcgagcatgtcgcgagcaccatggatatgccggtgctgtcttaagggtctatcaggcctaaaaagacctccacggctccaattcgtgcgcttcgcctccaccggtacgctccccgtcgtgcgtcgcatgcgcccctactgacagctaccagagtcgaagcttgccccgagtctcctcctccgagcgaaaaccctcacgaccgaacacaatgacttgcaaaagacactaaacgactcatttgacgcggccaaggcgaagcgggtgggcgagctgcggcgcgtcgcccaggctctcgaggaatgggagcgagcaaacgactccatcacagagctgcgcagcatgacggaagagcccgaccaagacgctgacctagctgccattgcgcgcgatgaactagacaccgaagtcgccaagctggagcacctcgaaaggaacctgtctgcgagcctgacgccgcgccatccctatgccgacctgccctgcatgctcgagatccgacccgggccccgtggcctcgaaggacgatattttc

SEQ ID NO: 45429 - DNA, 818 bp, Arabidopsis thaliana landsberg
cgaaactataaacaacttggacacggattataatatatgggatccacctgtcaaccctgatcaatgttagtcttgcaagtatatatgtcgagaacggttttagagacagtttacagagcatttcagctggatggatagtaagtcaaaaacaaaattacttcaaaatttcataacaattcaaaaagaaaacctataaaattgtaaaataaataaatatcttacaggtgtccccgaaactaaatcagaataatagtggcttatttacatattggaccgtaagttcttcaaacatattgaaagtttgatagttcactacattgcatgtcaagccacactggctaaattggttggaatttatgatggaaacaggcagatggacatgagaagacaggttgctacaatacagtatgtccagggtttgtacaagtgagtagcaagctcgcacttggaactcttgccagaccaacttccacttatgatggcgaacaatactatttacaagccatcatttatcaggtatatataaccccatgtttctcaaatcccactcatattgacaagtcgatgttgcataacacttaggtatatatattgaccaaaaatggtagtaaaaatatcgaccgatgattactattgtttacttataactcaagtcagaaacaacccaaaattatttttgcgtaatcgaataaagaataagcaaaactttataaatttaccgtttgatttggtttcatgaaccaaaaccaagaattaaaaatggtttcatttggtttcaattctcataaacctattttatataaaatataaaaaacaac

SEQ ID NO: 45430 - DNA, 706 bp, Arabidopsis thaliana landsberg
gagtttataaagaagatggatcgaggttcacacgccataaaccgaccaaatctacttgtataatgtatttattcacttgtaaggtcacatccgagttcaatataattgtcacagttttacctctatattctaatataggagaattctactctcaaaatatgactagttgtgaattttgtattagaggaagaccaaccagatatatatatttttaaatagggccttaggagatatcagatatgtcatgtttatgtaatatagactttatttataaaatgaaagtagttgattagttactccaagggatatactttaactaactgtctacagataatatagaaaagaaacattgaaagaattcaaaattcgaatcccttaatatctgctattttagtatctcatctcaaatctcaataaccaataaagtctactcttggagaagaaaataatcaaatttccccaacaaccattccacaatttgcgcctaaagcaaagttgtgattctcttgttaaaattctgcctttttctcattttttctgaaccacttgcaaagttgaatatactaaagaataaccatgcaattttcacatttttcgtaaatctaaatttattaactaatttaagcaatgctattttcacatttctggtgatcaaagttctaaactaattttgtaaacaaaaaggacaaatactaaaatctaagcc

SEQ ID NO: 45431 - DNA, 746 bp, Arabidopsis thaliana landsberg
ttcttgatttgataacatttttttggttttagtcgcgctaaacctatgaccacaccataatatgtggatttcgaatccacaaaaagcctcgcaaagattaattttatttatgaatcttttttgagatgccctcaactaacataagtaggagaagctagtgtatcttcatctatcgagaagttggatgaattatatatacattatacacatagtacggaagaaatcattgttgcgatcgcttgaacatccttgatttgataacattttctaggggtttttgtcgtgctaaacctttgatcccattgctcctattgacaaaagagacgtatgagaaatattttttttttcctttacatataggtattgaaaaagaaaaaaacgaagtcatagcttgaatgcaaatatattttgagaaatttttaattttgcggttgcagttgtaagagataatataagcatagcttatataacagcaaccactttgatctagtggttgatcaaaggtttaatgttttttacactattctgagatttcattccaagataatgtagttgtttttgtagattacgatgcaaagttttttgaaaattctagcatatttaacataaccaaaattcacatcaaaatatctaacggatagaagtatctaaagtatctatatgcttggctagatataggctatctcttttcttggttgacttgctttctgatgatcttacttttcttttttggtcggccatttttc

SEQ ID NO: 45432 - DNA, 816 bp, Arabidopsis thaliana landsberg
tgctaggtttgggcaaaaaactagaatcctatatctagaatcaattcaaaaaaatgcggttccaaaaccgatccgaatcaaattgtcataaaactcgaactaattataaatgtttctactctattgtgtgtccctaagaggccggatagttcatctgacgatctgaaataaaattatatatgcagaaatattagttatattatagttataattttcaataaaactgagattaaacattttattgtccatattccataaagacgattctacttccacatgaagttgtgagaaacatcgtccggatcctttcaaaccaagttggtcgattcatttgttggagaacttggaagctatatataatccaaccttagcagctctatgtatgtatctggcaagacagcaagtttgtgtaattttccaaaagacgaatagagaatttcatgagtaacttgtagaaagaatttttcaaaatggtaatttctttgaagaatttttccaagaaatatctacaaaaacattttacttaataatgaatcttggtgtcaaaatgaactattaatagtattacattaatatcaataattgatctctattttggatcgtttaacagcaaaaaagagattctttttttttacagcaaaaagagagcttttttcgttggaacattaataattcatcacatgttccttaatagtaataaatttgagaaattttatttaatagtcagcaaaatattttttgcatataattttcaaaatgatgttttttagagtatttttccaataaatttctacagaaaaacagttaataaatcct

SEQ ID NO: 45433 - DNA, 486 bp, Arabidopsis thaliana landsberg
tcggactcgagctcacggatcttctccccgtccgtggtttttttgagcagcaccccgatgcggtcacgggcggctcgcgagacgaagaacgggcggccaatggacagcaacgcctcgcgttcgtctgggccggcacgcaacacgagcatcgggacgggcttgccggtccggccctcccgtgccacgagcaagcagaacgacctccgccggatgtcgaacgactgcgcccagaccaggacccggaccgtcacctccggcagcgccaggcatagcgtgcggacccgctcgacgatgtcctacgggacctctaccggcgcactcacgcgggacatctggcgcgccgctgacgaaccaccgacgatccgttgccgaaccgacgacctaccggtggaacgcggatcgggctgcggatgcggtggagctgaagtactcgggcggttcgatgaagccccacttgcggaatgatcggcccgtgctgagagcgcg

SEQ ID NO: 45434 - DNA, 576 bp, Arabidopsis thaliana landsberg
  unsure (1)..(576): unsure at all n locations
ttttgcttctggttgataatatcaaccggtgtgccccttgtatcacacattcgcttctgaagtttgatcttgatgcccctgtggaagggacagttttgcagccgaagtttcactacaggtttggttgtaacttgtatacagaataatatgtatttcaactatgatctcattttgttttacaatttgcagttgtctgaaggtcattcttgaaatgctggagaagcttccaaaccctgatataaacttcttactctttgagtttggcttccaggtgggacatactaatgccagatgataactatctggtctttttcagagaagtgaaattctatttggtctactgtcttttgtacacttaagttttactttttgcagcttttgtgtgagttgaatttggatccactaactagtggtccaaccatggatctattgagcagcaaaaaatatcagttttttctccaggtacaccagattttgcttcttcacataccaaaataatgccatattttttttgtgggctgcctcatccaagtcacanataacacttatttttactcgtccttactttctattata

SEQ ID NO: 45435 - DNA, 1262 bp, Arabidopsis thaliana landsberg
aaaaaaaaaaatcagaaaaaatatattttgaaaactttactcaattggcatgttacttcaaaatagttatatttgcatccaaattctttgtttttgtatgttcaacatgtttgtggttgatcatattctacaaacaataagttgattttttcttttttttttacttgggaaaatctatgtgggattccatgattacaaatcttttagggcagcatatcacgtgatgcagaaggtatttaatgaataacttgatttgttctttatgcagttgccgagaatttattgacatttttaattcatatttattattaaaaaaatacaattcgtatagaatgacgattgcagaaacataaaaacgtagaaaataaagggttgaagagacagtgttgggttgggtcgaacgtcaagtgataggatgtcacaaaagattggctttttgctatatgatttcaaaacatgaatcatgaagtcccatgactatatattattcacatcacctacctttgggtatcctttacccttttaggcttttactcctgtattatgttttcattttctaacatctaaaatgcaactggtcgaactacgagtcatgtctacgatggtagatagatagtgcaactatttcaagcttcgacttaaaaattctaactgaaatttggtcaacaaatttggtgaagcataagtggaaactttagagagaaaaatcccaacaaatgtcaaatgggttaatcagtggtacaaatagtgcggtctatacaaaaagaaatattatgaactcaaataacttaggtgtcgattgttttaaaattatttgggcttaaaggcccaatattactcatgataataaatggatattataccttataagccccagttattaattgcgctttaattgtaatacgacgtcgtagagaaggaactcgttcgtcatctaagccaaggactagggttctctgagggtacagaactaaacttaatccgttaaacgtagcaaagaactacactcagtggtgaaaatggagaatcaagagcctgatatcgagaaattgcctcgagacgatgttcctgatagagaaccagaccataagaagctcaagatttcgaccaccggccaggaaactgattcctcggctgttaccaccggcggaagcaatgtcgctgagcgtagagcgccgaaatacagaacgccggaagtcgcaatcgtgtttgcgttctgcggagtagggtatcagggaatgcaaaagaatcccggcgccaaa

SEQ ID NO: 45436 - DNA, 611 bp, Arabidopsis thaliana landsberg
catgacttctttggttgtagttgttatatagtttaccttactgtggatcactttcgagtgacacttccacttttgttacctaaattgtaacaccagcacacttagtccaagtaaggaagaaaaaacatagtagcaagacatagttctgccatatatcttgagaataccttttgggtttgtttcccccacagctcatatgtgtggttgaagatctaatagggatgataatcatctattgactattgcgataattttttccttgatttatagttttgggttttgtaggcatttgttggccttggtgagctgctgatatcatctgacacgggagccgcccttgacgccttcaaaatggtaaagtgtgatcttgataattgtatctcctcttcaagtacatgatggcatgttgtacataaagaaagacattaatttttctgagaaccattaatgaaaactcccaggcacggacgctcatgaaaaaaggagggcaagaagtgcctatagaagtcctgaatgacattggtgctctacattttgagagagaagatttgaggtttgtagtgaggctgttctgctcttagcttgatatttgctatggcttcatactcttt

SEQ ID NO: 45437 - DNA, 563 bp, Arabidopsis thaliana landsberg
tgcttatacacaaactgatatgcttaagtaagcttttgatgtagcatatacttggtgtttaataggataaagataagctcttttcaaagttcactttttgttattagggttgcagatcatgggatttgatataccggaaggaacatttttgaattatttcagaataatcttttattgcgaattcttatatacctcactctctctgctttgagtctacttgtttgatgaaacacaaaaacgttcggtaaatagaaagataaactcttaatattgatcacttgggtttcttttacacaacatgatgcatacaagcataccttagtagtttttctacttaccacacacacatatatacacctttaggactcttgacttaattttggttgcgacagcacaactttcttcttgtccttgtcttttgctctctaattgctacttcatcttcttcttcgtcggttctagctaagtcaccaaaaacaattgtttaagtgggcttagatatgttaatggcccaataacttcttaaaatcccaaaacaagcaaatttttcttcttcgtgacta

SEQ ID NO: 45438 - DNA, 563 bp, Arabidopsis thaliana landsberg
aattatgtaagaatatgagatgagcctggttataaattgtaatgtgttgtctcgcccacctcatctccatgccatttgtaaccagaatagcgtaatatgtgtgccttgagctgagtagcctgtcaaagtaagaaaatcgagtcacatatgaatatgattagcagattctctataatcttacgataccacaatgcagtcctaagaacttcaaacttcattggaaccccccacaagaacatgcatgagattgacagtttaccaaattgtctaatggagaagctaaaatggaaaagggcacaaagagatactcacttttactctcttcccaccgaatagaattgtgtgtaactgcttgaaaacttcatcagacttcttccttgataccttgtaagcaactgcagagataaatacacgttattaatttcatttaaagagcagataaactattgagtagatgggaccaatgaagtatttagagaatgtactcatgacaattaacttcaaagccatgggaattctaacaatttaaaccaggctctagtcactaaatcaaaaggaaaaca

SEQ ID NO: 45439 - DNA, 627 bp, Arabidopsis thaliana landsberg
actgtacgtaatcacaactgatacctcaaatgcaattatccactacacatgacacttttatccaatgttattatctggcaggtctatagaaaataactcctttaaaggaaaaattccttcagcgctattaaaggggaaagttttgttcaagtgagtatgctaaatgtcgacttgtcaaacacaatagtgcacagctttttagcatttgcttggaaagagaaattacccttttatcacagcttttcaacatgactgttggaacgttttagtgtatcagcgtttagaattttcatcttttatggagtttcctcttttagtgctaatgcgcagctataacatgttttccccagatataataataattctgagcttcagaacgaggcacagtgaaagcacttttggtagatactggggatatcaatagccgctgtcgcaattctgatgctactagttggaggaagtcttgttttactttgtgccctttcgtagaccaaaagagctgataaaggtatatatgcattgtatgttgaacaaatagctgttacaggttttccccaagtgttctaacctatggtttttcatgtgattccaccgagactaataaaaaaggttttgtatcttacttac

SEQ ID NO: 45440 - DNA, 534 bp, Arabidopsis thaliana landsberg
ggctgcagatttgacacaatcagctcgtgacaagaccgctgatggatctcattccgctaacaaatctgcacaacataaccaggaacaagccgctggtttattcggccaggtattgtatatacttatatgtgtaactaccaaaactagaggataaaatttgctaataaaactgatatatgagtccttaaatctatatatgtagaccggtgaatcagtgaagaacatggctcagggtgctcttgacggtgtgaagaacagtcttggcatgaacgagaagaaatgagaatttatacttctcaactattttatttaaaatatttatgaataatttcttgttttggaagttttgggtttctccaaattatgtttgtaataagattatttgttttgaaaggttttgtgatcatgtaatccgaaatctgagatgtaataagatgttgtaacatcacagcctttgtctattttaaaggaatgaaccaaattagcaaacactcttatcattagaacaaaccgtgtaattctagtccgagccat

SEQ ID NO: 45441 - DNA, 808 bp, Arabidopsis thaliana landsberg
  unsure (1)..(808): unsure at all n locations
atatttttaacttgggaatcctgcggatcctacaccattccaaaacatatccatttagagtcgaagaattatctaactatattatgtggctggccagaaaaagtttaattagttccgatttaatatgcaatctattatattgagtttatattagggcctgagatagttttctaataaaacaaaagtcaagtaagtaatcaaatgaaatatagcttcgatttactaaattatacgtcatttgtgatataatgaaaaacgtttcatggataagtggaaactattctctccaaatttagtgagtgaatttttctttttctttctttatgcacttttaaattgtaattagttgtcaaatatcgcttgactagttttcattcaaaaatcatgaactatcaatctatcactatcgttgtaagctaaaattcattatacatatgtacactaacatgagtaactatttaatcttctttttgttttcgaaaactcattagtcattagagttttaaagtcatgaaaaaaaagagaaagaatcttttattaaatttggagagaatagttgccacttgtccatgcaaagaaaacaaaaaatatcaaannnnnnnnnnnnnnnnntattcttcctcacccatactttcccctaatatattcgtgcagagtcgaaaattattttagtatattactaagattgacaaaatcgttacttgattatcatttagtaacgcccttatcaagaaaaatggaaagtagaatcgaacaaaatattaattaaatttaggaaaaattttaattgcccaaacatatacagtat

SEQ ID NO: 45442 - DNA, 466 bp, Arabidopsis thaliana landsberg
  unsure (1)..(466): unsure at all n locations
cagtagatatactgctagctagcttacctggcagccagtgcaactgcatagcacgtctccaatgcgctgcattataacgacgcgaacgcgcgcaggcttccgtggtatacagcagcagaagcagcatcacgatcccggcccggcggcgcgtacgtcgacgaggaggatgaggacgtgcgtacgcagagcagctgctggcaccatggctcccgtgagcatcagcgctgttccgttcctcccgacggcggctgagggggagacgaagctgcgcgcgtcgttcgtgcgcgaggaggacgagccnnnnnnnnnnnnnnnnnnnnnnnnnnnnnnnnnnnnnnnnnnnnnnnnnnnnnnnncatcgacggcgcgcggcgggccgagatccgcgcgccgtggtcgcggcctgcgaggactggggcatcttccaggtggtggaccacggcgtgacgcgcgctcgtggcgacat

SEQ ID NO: 45443 - DNA, 482 bp, Arabidopsis thaliana landsberg
aatatccatgcatgaaagtactcgaattggttcatccctgaaaaagttagttttatggcgatggccacagctttaacactcataacctaacacacatgagataccgagacacttacttataagcgagtaaagatatatacgaagagatggctaaagaaaaagatgaaaacatactgtaagagagcccattaaagagcaaatcccaacatatactatcatatgcgtcttcccataacgcggctcgtagtagaagatcaatgcaagcaccacaaccaagaccacagcagaatatgcaaggaaacctggttaaaacattcaagcaatagagtatgtttcagtccaataagaatctaatttttgtcaaaaacatttattgttctatacctggttcagtagccaggtgccatacttgcttgacggattcaatgccttgctcgtgaggagcatgtaaaacaatcgttgtagatccaacaacacagagg

SEQ ID NO: 45444 - DNA, 610 bp, Arabidopsis thaliana landsberg
tacatacaaatatctaatctttcaaattccacaaggctagggattttatcatttatggtagggtaaacctttttggctaattatgaggtgaatatacaattctaagcaatgatgagcttcgttataaattaatagaccgtatatttttggaacaaatttattatatacatgcaatccaaaaccgttaggtacggtggaatatttgtctacgacaaaaacgttttccattcatcgattagtaaaagatgtagtttacatccgcaattaactagctagcaaaagaaaaaagaaacaaaaaggtgaacaaacgagataattaactaaattacttgtatggacactacaaaccagaaaatcaactttgttaatattgccctattagctactaaactagcttatgtatagaacgacgatgcatttttcaatatacaaactaaaatcatatataattcatatacgcaacgatttagattaacccctaaattcaattgcatgcatgtaaaataaatggtcaacctaaatatatatgagtgggaggtcccatagcatatttacatagaacaagaataagtcaatgaatatgcctgaggctgatatgcacacacaaaaa

SEQ ID NO: 45445 - DNA, 468 bp, Arabidopsis thaliana landsberg
tcgacatctcggaaaggccaagctcggcatttttttagggaatcgatatagtccgcccgctcgcgcgcgatcgattccgtctcgcctatgacgatatcggtcgcgggcaggatggcgcagtgcgaagggtcgcgccccgcattcgagacgcggtccttgacgtcgcggtagaaggcttgcatgtccgccttgttgttctgcagcgtgaaaacgatctcggcccagcgcgccgcaaactgacgcccgcggtccgaagaccccgcctgcatcagcacgggactgccctgaggcgaatgcggcgtcatcaacgggccgcgtgtcctgacatatttgccggcatagttggcgtagcgcaccttcgacggatcgccgaaaatgccggcctgccggtcgagcaccagcgcatccggcccccaactgttccagagcgccgtgcaagcctcgaccacctcatcggcatggtcatag

SEQ ID NO: 45446 - DNA, 663 bp, Arabidopsis thaliana landsberg
tagctcttctttaatctcagatcaattttaatggatcttctagttgatagatgtactatagttcgagtatgtgctagggtttacgttatccctgaggttttagtaaatttgatgttggtcaatgctttggagaaaactatgatttgcttaatactctgttctaatttcgtggagatttcaattgattccataaacttggctgtttcttagtttcatgaatcatttgagtgacttggtttgacttttctatatgagacaatgttagtctgtgttgtatgttatagtttctggagtaatttatacatgcttcaatttttgatatcattacaggaagaatagagtttatcagacgatttggatacaaggaaataatcaaagcaacagaaggtttccgtaaggttatttacaccaactatcacgggtctgcatacagagctaaattcaaaggtggtgaggttgctttggtcaaagaactcactgctcttgatcttggacgagaaaggtttgatgaggaagttcagcttttgggtcgcttacgtcacagtcatctcattacacttagtgggttttgcattggacgaaagaggtttccttttacttgttgaaagtttttaccccgccccagaactaattaaatcctgcctgtttgtttgcttatgattt

SEQ ID NO: 45447 - DNA, 1446 bp, Arabidopsis thaliana landsberg
gaggaatgatgaaaacatgtgaataaaccaaacgcacactcttcatcaatgtgaatactcgcatatgttacgaactttgatgaatgtagccatgtaggtaatcgataagcgagtgaacagcaaactcacaaagtgacacaaaaactacactggtactgaccaattgatgaatgtgcatggatagaaaggggaaacacttcatactcaccttaccacattataaatatttcatattcggattgtatattttgaaggcatttattcgcgttcatctctctattatctagtctataagactaaaatatatacaccacgacctgatgcataatctggaatcacatgatataatatcttatatatttaaaagcatgaaactggcgataagtaattcttaattagtacatacaaaaagttgctaaacacaaatcaaacttgtgaaaaaattgacacttgcattgtacaattatgtatccactggcgctattcgacgtgaagctatgtcttggtgtttttcaacacatagttaatatgttcacatcttatttatactctttttctaagccttcgtttgattcatttggaatgtgaatgctttgtttttggggttaccggacttttttctatgcaggtgcgtaacttatgctgataattttaaacgttataggacttgtgattctgaatgggtgtttgactaaatgattaaattgattctatatcatgtctagagtttaattttatagagatactactcagcttcttgacagttgtggtcgcaacatttctgatgtcattatagcataagaaaggtggatttatatgtctttgtttcgagtgaatgtgtagatgatagatcatccatctgtaacatgttaaaaagtttcattaaatatgaagaaagtattatatacgaccaataaggaatggaataattcttatcatgttcaccaaaaagaaaagaaaaaacaattggtataatcacatatgctcacagaataaatatgtaattttgtaaggaattttactagatgatatatagtcaaaatatcttattgtaaagaaagaaatagaataaccaatagtgtttttgacgtggaaaagaaaaagcaaaggaaaactaaggtaaaaaaaacctagaaaaacaaaacagaagaatagttagagagatgatgtgtcggtgccgacagttgaaccggagaaacctgtaacccactgaaagagactcctttgctttcggaggcacgcaacgctattcaaccccacagtttcttattcattaatcacactcactctattatacttattttggagtcccataaatccaatattaaacagttaatatttagttgattcagtggtcaaaaaaaacgttttttatattaggtatggaaatgtccaacgtttggtacacatcggacccttatcgtctttgctatttgaatgtccaaa

SEQ ID NO: 45448 - DNA, 527 bp, Arabidopsis thaliana landsberg
  unsure (1)..(527): unsure at all n locations
tatcatctctctgttcctgaattgtcacaaaacatccaacctttattcgaaacgttatctctgttattggattaagcagagtacaacaaacaaaagcaaagcagagtagaacaannnnnnnnnnnnnnnnnnnnnnnnnnnnnncatgttttcttattgagcaccgatactatcataatagcagcagaaacaagccgtccacacgctcggcctatcccttggacggcacttgccatcaaaaaaagtctgtccagccctcgttttgaacttgatgcaactctccttgcaatcacggaaaggagtacaagcacctaatgggaagtcacagcttccatccacttctgtcgacacgaacagccacatacatttataacaaaaacttgtgtatctatgtagttagagatcttgattttacgtaccggtgggagataggaggaccgatagacaaacgactattgtagcaagaacaactgttctcaacctcaagctcctcattgctgatctctctttgtgatttatcagcaaaa

SEQ ID NO: 45449 - DNA, 540 bp, Arabidopsis thaliana landsberg
tgcctttcagtggatgcagcggtgcagcccaacaagtgcttcacgcatcgtgctagcctgtataagggcctgtacaaccaaccacaaaagagtgttgcagcccactagtctggatagccccttatgtaggcgaccaatctctgagcaccactttttatggtttccaccgtcgtcgtgcccccccccccccccacatttaaatggcaaaagagctaaaactgtccacaaatgaggattcgaacctggttgtcggctctaaacccacattcacacccacctagccaatatgccacacatgtttttatcttttatgcttgtaactagaaaccatggcaatgcacagggactttgctagtaagactaaacgaagactcatgataagcgctaacaggaacactaatgccttcttttgctcaacgtgtgtttatcttctagtccttctgaactctcactttgttggtagacctggtttactgttttactactgtagtttacgatccgccagttgatcaatattgagtgttaataattctgagttgg

SEQ ID NO: 45450 - DNA, 531 bp, Arabidopsis thaliana landsberg
ctgaataagactcctaaaatcagatgggctttataaaacatattgggccggaaattaaaagtgtaacagacatcatctttgtacccagcacaaaggaaaatggccataaactacaattaatgggcctcaacctaaatgggccgacattctgctttttaaaaactgatacgtgttgtcttaaaagacacgtgactttaaaagattcaagagacgtggcaaaacagtaatctcctctcttctaccgctatttcagcgtagaataacctttttcgtagacataacagattttggacacgtggatgatttatcaaccgtgaagattaaaaaaacgagaaatatctggattaacaatttcctgtgaataattacgatccacaaaaaagaatattaaaatcaaggaaaataaatataattgaagaaaaaagctcgaatttaagagaatcacaattaaacccaattcaggaaaaagatttcttctttgagtttttcattcatctatcggttgtttccattctcaggtttcaatcgaaa

SEQ ID NO: 45451 - DNA, 280 bp, Arabidopsis thaliana landsberg
tcacacataccttagttaataaatttttcacaaacacactttaaataaaataaattactaggccgaaccacttttgttaattataattactgtaactcgttgaaattgatattgttattactactaaatgattatggaaccaattgaatatgtttttgctcgattaaattgaatgtttgctactcaaattaaattatcattagaggtgaaataagtgaatgagtgatcttaagaaaaagtaaacaaaattagttccaggtgaaagtctaggaatttggaa

SEQ ID NO: 45452 - DNA, 666 bp, Arabidopsis thaliana landsberg
agacttgtttatagggttttgattcaattactttgcggtgttgtcaccgaggaaggcctcctttccgacagatcttttttagaactgtcacacacactttcatctccttcgccgcttgttcaattgggagatcaaaaagcttacaaacatccttcagtgtcatatttttagttctttctctctgttcttgtcctcggcacatagaagataaaccaaacaccggaaattagtgccttctctaataaaaacctacaatgaaaataatttcttgtagcacaagtcacataatacaaatgaaatgctaatcctaatgcagtctttgtcatctttgttctaggaagactagtggttgtaagtctacaataagataatttgaactactcttttcaaatcttaacgttcggtcactgttctctatatagtcagattacccaaagactttcttataccaaaactaccatgtcagcaacccaaaatcaaaatatatctatcactccctctatttttaaaagagttccttatagtgcaagtaacgtgtaaccctaacagatcatgtgttgttattagtggctatatattaaatggagacactagagatataacctgtgcagcaagaggtggttgtcgcttttccctttgtttcgcaacctggtggtggttcttcct

SEQ ID NO: 45453 - DNA, 467 bp, Arabidopsis thaliana landsberg
  unsure (1)..(467): unsure at all n locations
atagaatgcagtaaatcgatgtatcttctgctataggtatctctaatttattgttccgaccaccacaattcttttctaagtattttataaattggttaaccatgtatcttctgttgtgtaattatagctagtatcttcatttgaaatattgtaaggaatagtttgtctaattgcttatgatatttgaccatctaagtaagtttatgaactaattgtttttcaaaaaaggttgattaaccttaattacgtgatagttttaacattaaaagatttcaacactatgttctggatgttaacatatccatctcaaaaccatgataaaacgcgtacaatggaagggatcaagctaatttgacaaatctctattcacacctcaaccattcatatatataccctcgatatatgtcacatcattggttntagcttttaattgattctcataaaatattaaaacccatttccagaaa

SEQ ID NO: 45454 - DNA, 1336 bp, Arabidopsis thaliana landsberg
taaaaaaaatcgatatcaacgtgatattcttattttaaaaagttatattgataagagcttaacatattttcattgtcataaacagaaccacccatcttagtcatggtcatcatcattgtcatagtcatcatcatcaccattacgactaatattatacatggaccataacagtttccaccacattaacttgaccgtttataaaatgggaactaaccttccccatcttctcatatgaaaatccattttgtcctcattttccattgattagttgcattctctcccctaaacgaacaaagagtaatcatcaaaaaccatataatatgcctcttaggattgaacccctatctctactcttcctcattctcattatatgctcttcatcattaggtaaacatataattgatattcatattccatccttttcaatttatagtcttttaactttgttttaagggatgactatcaaccttgcgtcccaacacatccatcttagtccgagatcagcttttggtattatcttgttgaacattagtcttttcttcgttgttgaatctagtgccttaaactaccttaataccattgattattaattactattatattggtgaacactttttccattctttctccaaaattaaaacacatctaactaactagtatgggttgaaataaataagtcacttaaagaagaatgtatattccgctaatagattgttttcttttagccatagtggaaggctctatccagctcgacggtgcgaagatgcatgagagttccatgctttacaaggtatacatcatacatgtagatgctttacgtttatatatgttcttctcaacattagaaatgttgttaatgtccaaatattgacaagaatttatgtgtttataattaaaaagagtgaggaggtgggtgtgaagaagatgggtcataggaagttgatgttccactcgacagcggactacgacgacgcaggacccaaccctaaacacgacccaaggagaaggcccggaggcaagggttgaatcatcaacacagaactatctctgtcattatatatatagtagcatatatataagcacatgcactaatatctatatatcatatatgaatatgtatgtgatgtatcctccattctgactctttttgtttgaggatgagctcagtgtaaaatacccttcggaaacccgctagtgaaaggattagtgtctaataacaagacataataaatccttatttattatcatcttatttcattgacatatataatatagccattatatcctgtgtaatcgttatatcagaaaataaataaagtgttatggttatttttag

SEQ ID NO: 45455 - DNA, 797 bp, Arabidopsis thaliana landsberg
ccctttgtactttgttttcaatatataagataaaaccgtagttattattcgttaccgcaaacgttaaaaataaatatttgtaatctagaacgattctaaccgtgataaagagatacagaacagtttctataattagtatatatcaaacatatgcaaattgcgggggaactaatcgatatcatgatcacttataagcatgcatgttattgtagaaccaatcaatgatgagatgatcatcatatttaacacatggaatctttctccagagtctgtataagtggacctgaaatcttgtgatttctaaacttctagatggttgctgaccagaccaatgtaagttcattatttgttactaaataaagaagtaaatgtaagatatccttccaagtcgaaatttttgaaaattggcccatttcttaataacctaagtatcaagaaatctaatgttaggatcgatgtacctcatatgaaagtaaaaatatactcgatttcattcaataacctcgagtctcaagatgttgtaaagaaacctgtaagccattcgaaataagctagctggcctctctatctgatacctcaatagtgattcgaaatagttgctatctttagatctggttggttctgaattaatcaagtactattggtcacatggacaacaactaaccacgaccctagcaattactcaaatcctaccaaaatattgtcctattaataaaggcaagagttaggaaagagtctggtgacgtaattgtctaggaatgtcacatttcttgcttcttactaaaaattaaagaaaa

SEQ ID NO: 45456 - DNA, 715 bp, Arabidopsis thaliana landsberg
tttcaattttttaggtgtcaccctcaaatttttcactcataaaaattcaaccactatttcttaaaaatacattatgtaatatttattggtaattttgattttctatctaactttaccaaaagtgtagatctcagagcagttaagtcgttattagcttgatctctgtcattataaatggtaattcaataaatttgataaagataagataacatattaaattgatctctgtcattattaatggttcaataaatttgataaagataagataacataataaatccgacaagtttacatagcagtaaaacttacctaatcatcgttaacattaatttcacatgtgttatatatgtatatacacatgtcgcaaatttaatagtatgataaaagagtttttagtttttttttcttgtataatgtatagtagtgattaagtgtcaaaataggataatgacatccgcaagagatctgcgaccttccttagttacggttgttgccgctacaacgttaagctcaaggtaaataaaattgtaacttacttgcaattcttcattgggctctctctcaagtgtaacataaataaataacaaaataagtataatattacttgtgaaaattaattattatcgatgtcaaggtcaaatttattcaaatgatcgattgtttatactgtatttgagtaattaattaatttgataataaacaaaaacgaagagac

SEQ ID NO: 45457 - DNA, 468 bp, Arabidopsis thaliana landsberg
  unsure (1)..(468): unsure at all n locations
accaactcatgttgaattttaccatgcacgtaattccgtataagattttgaccttgtcagactatggggcccttgaatatgcataggggcannnnnnnnnnnnnnnnnnnnnnnnnnnnnnnnnnnnnnnnnnnnnnnnnnnnnnnnnnnnnnnnnnnnnnnnnnnnnnnnnnnnnnnnnnnnnnnnnnnnnnnnnnnnnnnnnnnnnnnnnnnnnnnnnnnnnnnnnnnnnnnnnnnnnnnnnnnnnnnnnnnnnnnnnnnnnnnnnnnnnnnnnnnnnnnnnnnnnnnnnnnnnnnnnnnnnnnnnnnnnnnnnnnnnnnnnnnnnnnnnnnnnnnnnnnnnnnnnnnnnnnnnnnnnnnnnnnnnnnnnnnnnnnnnnnnnnnnnnnnnnnnnnnnnnnnnnnnnnnnnnnnnnnnnnnnnnnnnnnnnnnnnnnnnnnnnnnnnnnnnnnnnnnnnnnnnnnnn

SEQ ID NO: 45458 - DNA, 494 bp, Arabidopsis thaliana landsberg
  unsure (1)..(494): unsure at all n locations
tacagtggcaagagtccgtaacagattaattacctttaacaattggaatcgcccaaagcgggggtaggtgcatcatcaaaaatgactttaggttcgtgcgcaagcgcccgtgcaatagctacgcgctgctgttggccatggctgagctgcgaaacttttgctccggannnnnnnnnnnnnnnnnnnnnnnnnnnnnnnnnnnnnnnatattgcgaatttgaaggcgtctttgcaaggtactgtgcaagcgacagattatccctaacggagagagccgatatcaaatgattacgctgaaagatgaaaccaagattttttcctctgaagtgatcaagtgcaggttcggacaatgacgtgatatctgttacgtctattaatattaacccttgctgggatttcagaatgacgcttataaggtgaaggagtgttgtttttccacttccataatcttcggaaaggagatattggccggctttcggaatttgaatatccgg

SEQ ID NO: 45459 - DNA, 575 bp, Arabidopsis thaliana landsberg
  unsure (1)..(575): unsure at all n locations
atgttgagagttttaactatggataaagagttgattgttttctaataactagtttaattaacaacagaaaaggaccacatgatctgtcttgcccccacaatatcattgtgtttttctattcaattgagagcccccacaagattgccaagcaactttttaatacaataatgcttagagatgtaaggtagttctcatatgaaatcacacctactcggaaattgaaccactctttgtcacagcaattaccaatgactatgagttgttaggtcaacttcttgtgctagagattaaacctgaggtaatgattggtgagaataaatattcacgtnnnnnnnnnnnnnnnnnnnnnnnnnnnnnnnnnnnnnnnnctccaagaaccgacaaccacgcataaatttttcgctttggtatgactctatcttacctgcacaatacatgaatgaatatcatcaaaatgggcgagttacacagaataatacttgaggaagaacgagaagtttanctgaaaaattctcataacaaatggagataaccccattttgtctcctgtgttgtcatcacggaagtgaacgcca

SEQ ID NO: 45460 - DNA, 323 bp, Arabidopsis thaliana landsberg
ggcgccgatcttgaaagtgagtcgacacgctttctttcgcggttgacgaatgccgatcgcgcacaagggccgggggtagtaaacgggcacctttaccttgagccccgggcaggccgtcatttgacaaccgagtctctcctcggggcgaaagccgcgttcttcgcgcgtttcgcgttcgacctcgcccggcggttcgagttcgggcggagcttcgatgacgctcacgcggcaactgccgcaggttccttcgaggcaagaggaatcgagcggaattttatttttcatggcgacgccgataaccgattggccggcgcggatgggaa

SEQ ID NO: 45461 - DNA, 700 bp, Arabidopsis thaliana landsberg
tcctatacatttccctatttgtacgtcttcctagatttaagttgttccgtatatgtagaatagacatcacaagattaacagaatttgtaactatctttatgtggtaaggtggtccaagtaatgaagttaggcaagcaagtgaaatttcaaatgtagacaccaccaacattgttttgacttccaggcactgtgattcttaaataataaatacttaaattccccagtctacaggttatatcactgcattaggactttactaagttttcaagaaagttgggtttcttttgtttactttctttgatattttttgtgtatgcagtatgtttactttctttgacaatgtgatcgatattgtagtttgttgtattaacttattttgactcgtcttgccttttgtgcacgtacgggtatagtaatcattgaaaagtaaatgtgttaaagtcattttttgttcaacgaaatcttataatttgcaacgggtaaactcagcaatctaaaacttccaatactactagtgtatgatttgtgattgcctaggatatatgataatattacttgtagtctattcattaagatttaagaattattagatgcatagagtaacaaattttaaaagatagaaatgagtgaaaacaatatgtgatagacgaaagcggtttttggtaatttagtacggttcttgaacgaatttttttcatca

SEQ ID NO: 45462 - DNA, 440 bp, Arabidopsis thaliana landsberg
ataaccaatattctcagcatcttcgtgtttcaaatactgaattgcaataccaacacattttcctttatcattaagatgctggaccaccagaattcccagaattaatagctgcatcaatctgaaaagacaaaaacagaaaacatttttataagtgcccttaacttcctagtcagataaggaaaaatatcatgtcaaatgtgttgtcgaacctgcaatcccaaaagctcggttgatccatgcacatacgacaatatctccatccgggaaacaacaccacttgtgacagagattgtatcaccaccaattggataaccaacaacagtaacagcatcttgcaaagctggtaaatcaccaaactccacaggagatactccttcccaaaactcattatgcgtaactgtcaacaaagctgcaatcgatgtgcataagatcatccccca

SEQ ID NO: 45463 - DNA, 750 bp, Arabidopsis thaliana landsberg
tgagggaaattaagattttcttcctttgaaactatctaaatttttttattttcaaataaataaatggtccactcgaaagccaatatcaatatattaaggctttcatattttatatcataacgatccatatcaaagagaacactaaaacttgagatgctttgtaattgttaagtcttacatcttatcacttatatcttccagaaggttcatcagtttctttgcaagttgctgcctgcggtattctggagagacagtgacggctgtcacatgaccatgccaagattcaccctgtccttcaactttacccataactgaaaccatgtagaatcttagttagacacatgctttaaaattatatttataagaacaagttttacatatgtcacttacgttggattctcaagaatatcaaccataacatttcaactatacaaaagaacatttcagtgacactgcttaattttcaaatgtgttaatatccaaaagcttagttttactctcagttctttcaatggtttcactatacttccaaggtctctttccaaactataccacgaaaagggagaaaaacaggtatagtaatagggcaccacgagaacagaacgtcaataatgaagcatatatcgtacttgaagaaaataaagaaagataaagccttgtataaatcacatttggaaccaatccaataaggtgtagcataattatactacaaacactgaaagacagaaaaatttgagccttgatataact

SEQ ID NO: 45464 - DNA, 500 bp, Arabidopsis thaliana landsberg
gggcttggagacttggagcgagcaaggggaaagaaaaagatttgttatgtgaaaattgcaatggaagattggatcggtgaaactcggcgctttaaggtcttttctcttattttttgggcttttttcctcgtttgttttcttggttatgtgatgatgatgaattattggggaaagtcttgaagtttctctatggctctattggatgattattaaaagtgaagaacaattgtttgttagtcaaattgctaaaatacatttaagttgacattcaaaagagtactattatttcctacatcattcatcacaagtttttgaggtttattgttatacactagtctgtaattgtaagttttaattgattcatcaatcaacataggaacatactggtctacctatttaatcatgtagtctgcagggttcaatctttcatgtctaaaatactttgtttattattatttataattaccgattataatattatgttagttataaaataatta

SEQ ID NO: 45465 - DNA, 464 bp, Arabidopsis thaliana landsberg
  unsure (1)..(464): unsure at all n locations
aatggtagttttgcatgtacgagaactatggaacacagacacggcttaattgagattttcttttaaaaatccagataaccactaaggttttcttgaaaaaaaaggcatgacgatgtatagttttaaacgaaaacagcaacaattaactaagacccatttagcagatcgtgcaatttggatgtggttacagataaaatcacccaacggccatggcaagagagatcgtcgggacatggagtcatacatacaggtgagaggcagtgccagtttatcagcagctcagcgagaggcaaggataaggtagttacgctgttaatcctgcacctacgcctagctgtcaccggatcattatcgtcaaaggcttataaaaggccccagccctgaccctgannnnnnnnnnnnnnnnnntgtcgcagcatcctagtatctcgagtacgccaagccaagctcagcgagaactcaga

SEQ ID NO: 45466 - DNA, 565 bp, Arabidopsis thaliana landsberg
atgaaattgagatgttataatgactaattacatccaaaaagaaagctcaaaaattgggaaatgcaggacattaccagcatgcagaatgaaatcagagctgtgaaatcggagaaatggcttcttctcactaaaatagactcatttcgtcgcccttatcctctccaaccgcaagtgggaaacgcattttcattccatttcacgttctctgcactcacacactctctctccttgatctctatctcacacacagaaagaacaacaatttgtctatctttttagctttttctataattgtggaagaaacccacctctgattcggtgttaaatctctcaaccaaaattcatcagatagataaattctgacgaactttttttcacctctctgaatctgcctctatcactttgttgtgcacagtgtgtgtaaacttattattggctatttctttctcttctcgtattttttctttttttcttttctataaattgtgtgctgtcaccaaaaaggcatcttcgtgtttttattttatttttccttcgttatactggaaaagtcattcttcatttt

SEQ ID NO: 45467 - DNA, 898 bp, Arabidopsis thaliana landsberg
tgtgaatagtactaagtactagccacataattttcaataatttctcgagatatatctatccgagaaattcgaattctaaaaactatttgtttgtactggatgcacagacaaacatagcgatattacgtgtgtgaatttgtttttgataagtacttatcaatctcatatatcaacttccatgtctcttttaattttgtgcatttttagtaagaaaaatatacaaacggaaattataaaaactcaaatctcattaataaataatgtaatcacccatttaatatacattatatagcctataacgtggatctacactgattttcggtaatcatgtggatacaataaattcccacatttctgcattcgataaaacaacacatttaagtcgaaaaattcagtaaataatttgaccatttttttgttacctgacgcaataatatgattttcagttttcaagatttaaatttaaaaatcatgaaaagggcttggaatctaatcaatatatatatattttttaatgagagaaacccaaaatctaagcaaaaccatttttttaattttcctctctcttacacacacacatgataaaaagtgtttagagacagctcttctcttcttgttctcagtttgagagaaacaaaaccttccaatacaaccagagagtcgacgaagaagaaagaaaccatgtcccaacatcttcttcttctcattctcctctcgctacttcttcttcataaacccatttccgccactccaattattcaaaaattcaaagaagccccacagttttacaattctgcagattgccccttaatcgatgactccgagtccgacgatgacgtggtcgccaaaccaatcttctgctcacgtcgagctgtccacgtggcgatgacactcgacg

SEQ ID NO: 45468 - DNA, 716 bp, Arabidopsis thaliana landsberg
acatacgtaaactcgatagagctttaaatcctgataacttgaatagtttataaagttgtactcttatgcatggtcggataaattcataggacggaacctatattaatcctgaaaacatgtacatctgtattgaccaacatgaaaacctaatggattacttatatgaaccaatcaatgatcatcaatatttcaaaattttaaatactagactgttaactataaaaatatatagtatcatttgtaagttacaatcgtatcaccttttggtctgacaggatttgtttttaaggtttaatattttgtcaagagaaattagtcttctgttctacattgacttgaccaaagctattattgtccaaagacttttcttacaaatgcattattgccggtcaaaacctaaatacattatcactacactctacacgtaaactaatcgaaatattgcccattaattaatatcataataggctaatagagtatatactattttctagttgtaaaaatttaaaccaacgatctgaatcatacatggtaaaatttccaaaaaataaacttaaaaatagtacaagatggaagtagtttcggctttgtattttttgggccttaacaaagattcattggaagcaaagagatcaatatttgttgggctatataataagtaggaaacttctgttgcgttcgtagttattttctcaacatgatagtccaatgttttg

SEQ ID NO: 45469 - DNA, 1599 bp, Arabidopsis thaliana landsberg
aggagatggtatttatcttcctatttctcatgtcggtgtaacaactcctttggcctttgtgagtgtaactcatttttttataactttttcatataattttaattcacatgcacgattatagtatttaaatacacatttgtacatgaagaatatagaaaagaatatgctctaccatgttcaacctctttttagtctttatattctttccagtcccgaacacgtgttatgtttggacgcatctttcaaaacataacatattacctatcttgacatctaagtaaattctaaccactaaaaaccaaatgtggtagtaaacgttaacgtatgagaactgtaaaatccacattataatttgcagaaaaacagttgaaaataaacaatatactaatattttacaaaaataaaattaaacttgaatatgtttgtacaagaaggtatagaaaaaatatatttttcggtacttacgtaacgatctcagccaccgtcacagcagcaaacacgagaaacagaactcctccgacataagcaattgcctgtttcgaaccaaacgacatgtaaacatttccgtctttagaacacactctctctcccaaaattgttttttaaatagtctaaactttagatcaaaacaataaaaaaaatggtcttaaatctttataaattaaattgtaagcctactatcaagtcataaaagctaaaatctaagccttaaaccataaaacataaatcatgaaccttaaaacctaaagaaaattatagtatatacttgtgatttaatttttatttccgcggctagtttcattagtttgggaataataacgcgttgttgacagattggatcggacataggaaagaataaaaacaataaaagatgttattttgactcttttttggggaggaatagataccaagtgatgtggaagacttgagatcaatgaacatagaagcttgtttttgccacttgcccaaagaataaaaaccttaatctctcacttttctttctatcatgttaaatctcagaacacaatacgagattaaaaattatatcctttgactaactaaaacaaaactcaaaaaggtggtttggaacttttaaaaccatgattaaagctagtaatttgccattagtatctggtttttgtgtaataaaagctgaatatatcctaggatatgctggcatttagtatattcaccctaaattttcatgataatctaaggacatggatttgtttcatatttcattaattgttttctacttttttaatgcaaccattaaagttttattcttcttaaccttttacttggtcaggatgcaggttaagacatgtaacaaaaatctaaacctgacactataaatgaaaaaggagtattcttcaagtgcttttgtgaaataatgattttctaaaattgatttgatctatatgaagtataaacatgtatatactgtctatgtgtatgtatatagagatagataaagaacggaattagttaccttctctgataagaaatttcctagcaaagaaccgcccaatactgcaagctgcgattaacaaaccaagcttgcaagtagagttcttgtgtcttccaagtttcaggaga

SEQ ID NO: 45470 - DNA, 544 bp, Arabidopsis thaliana landsberg
atctaatttgagtttgtttaagaaattatcgatttttattatggattatattatatgggaaaagtatgggtgatatgcttactatatatgtgttccaatgatgaatcaaaatgcactctaactgttggatattctcagggactctatccatgtgatcgtagagcaagtataagtactcgccgcactttttttcctgagatcgactttacaatggtggttaatctcaccgttgctttagaagctcacatgcattgatcttcttctatatatctatcaaattttagtaaattgtctcttctttcatatggttaaaatagatagagagtgatgaagacgctctatggcaagacaaggaaagggaaaaattagaagatgttgctactagaggtcttcactttgttaaatggtgaccaccaactttaattttttggactttatattatatggtggtccgatctatatccttagaaatatctgaacgtccagtatgggacattctaacatccatcaattggaaactacaactttaagaagactatatagt

SEQ ID NO: 45471 - DNA, 727 bp, Arabidopsis thaliana landsberg
ttaaggaaagtaatcgtgaaaatgaccgcaaggagtagaactactttcccaaagcccacgatgggaatattgcatcggagcagccgcttgagaacggggcttgtaaaaaatagataaagcccccgatcggaatatgagacagtaagtcccaactatggatcgttatagcagtccccgattaattggacgccggtggagctagggttttgatggatttccgattggagatccgatgcagcatcaagatcaaaccctagcgaaaacgatggtggctcaatcgaatccatgagaatgaatttagggtttggactaggagatgaagagacaacaaagacatggaattggcgccttggtgtgccgaagaagcttgagatttcgtaaaaattccccgcctagcgcacaatccatgattttaaaaaaatttcaagtgattctcaatttctcatgtattaattttcgtcgggatatttaccgtcgcagaaaataattattttggaaagaaaaaaaatcagaatgggccgtgaatatttcaaagttggataaagcccatatttaatttggtgaacggtcttctttttttttttttccggcaaataatttcattgatatcaaactgaaattacaaagtcagtttacagaacattagaacacaaattattacataagccgatatatgcgcctatgtagcgagaaagatgcacaattgagaagtgaatttgaccatgct

SEQ ID NO: 45472 - DNA, 687 bp, Arabidopsis thaliana landsberg
ttggatggacgcgttgttcaggctttaaagaaaaggacgcaagcgaagatcaaaaggttttgaaaaggacacacttccattaaaatagtaagcctttctgtcgataacgatgacccaaaggcaaacacattttcttgtttagccactgacctataacaacatattcactgttcgataatctcaccttttctataacataattatatcgatgaatgtatattacaatttaggtttgaaccacttagttttgtagttaaccaaaataccgaatagtgaatgatgagatggattaatgggtattggtgagctagaccgaagataagatgaaattgcaacaaactacaaaatgagattaacaagacaaacataatgttacaaaacgtataactatattacatttgttttttaatcaaaaagtttatgtcttcttaggtccaaaccaaaacatgaatcattcatccccaatgtattgattggagttccttctaaattcgattttaaaaagtacaaaccaaacgaaacactaaattatttaataatgtgttggaagatcggtaataatataaaggatttttttgctttatgtcagaatacgacagatataaaatttgaaaaatgtttcatgacaatgtgtttttgtcagaaccaaaattgattttattaccttaaagaaataaaatggtttta

SEQ ID NO: 45473 - DNA, 614 bp, Arabidopsis thaliana landsberg
aagagccgagactgaaaaggttaaaaaccctaattttactctctcttgtcttgtgctactcttcttcagtctatcgaccaaaccttggatttatttcctttttgttttatctatctattttatttattattattagtgtattcgtattctaaggtggtatgtattaatattataataggctttgtacatacaaaattagtattactcagctaaatgagacatatcagaccatgtcaactttttttgagcaatataaggaaattacgaattgtgagatatttataagttttagttggagtcaagctgtaaaaaatgtaaggctttctttttatcaaaaagataaaaatctaattttaaagattttatttaataatcttgtgctttaattaactgttgaatctcgctcttttgtttgaaataaatatttgtttgtacatccattttaatagtataaaacctggtaccttctctgaccttctgaatgtttttgaacataattacggattaatttaggagaagattatcaatatttttaaaataaagaacgcaggaaaagaacataggaaaccaaagcatttaaggataatctctttggattatagggcaaacacatg

SEQ ID NO: 45474 - DNA, 645 bp, Arabidopsis thaliana landsberg
  unsure (1)..(645): unsure at all n locations
aagcctgttttcacatgggatagacggcgccgttttggtgtctcagagcgtctttatatttgcgtttgcgtccataggtttggagttctgtgtcaagatgaatctcttaagaccatttcctagctctgactagattgaagagcaaattaaaaatgtagaaatgaacaaaatcttcttttgaagactttatttgtttttttttatattattaattgggggtctaaaatgtaaatgtttcatcctagatttttatgatctttaacttgtcacaaaaaaagttacacctgattttaaaagcatgatcataaggaatattgaatttagaatgatgaatccatacataattcaaattttgctataaaaaatgaatcagttgggataattctttcttttaactttgtataaaaagttatgaggaatatttatctttgtcaagtgatgaagtgattagtgacttgtgaacttaaccaaagaggtagatggggtcaaggccattcctagccattcattatttatagtaaagccacgtgtaataatcttagaagcttacagatataccacgtcagcacaaaacagttcttttgtctttcgatcgctctcaaatcgcgttttgtcgnggaggtcaactgatcagaaaaatatagc

SEQ ID NO: 45475 - DNA, 555 bp, Arabidopsis thaliana landsberg
cattttttaatacccctgccgtgcaggattcacttgttattgtttcgatcaatggcaaagtattcgggatccagggggtagacgaaaaagagacgctttactcaatctcaagacgatatggagcaagtgtagacgagatcaggcaacataacagcgccgcagcaagcggtctcgagatcggccagattctcaaagtgccatatactctaaaacagaagacatcggttcccttaggctcgaatgttcacaaagttgccccaaaggaaacgctgttcgccattgcaaaaatgtatggagtatctatggacgatattaaaagctggaataatctttctgataacacgctttcgataggtcaggaactgatcatcaaaaagaaaccgtctgccgcagcaaccacaacctctgtatcacaagcatcgaacgtttccactggaaaaaaaggttatcatatcgtggaggaaaaggagacaatgtatggcattgcccgacaatatggcgttacagtagaccaattgaagcaatggaacgggcttcagtccttcgaattaaaaa

SEQ ID NO: 45476 - DNA, 358 bp, Arabidopsis thaliana landsberg
cctcactatagggaacaaaggctggttccggtcccccactttaggtcgatgagattagctaagcttgttattttaatatctgcagcccgggggagacactagttctatagctggcgcgcctaccatagaggagctccaaatcgtcctatagagagttcagaatacaacgcactgggcgacagattacaacgaacagactgggaaaaccgtgtcgttacccaacttaagagtcttgcagcacatacccctttagggaggtggcgcattagcgaataggcccacacggatcggcctaaacaacagatgcgcacactgagaggtgaaaggtacgcgctctgcaccggtgtattaagcgcgg

SEQ ID NO: 45477 - DNA, 1389 bp, Arabidopsis thaliana landsberg
catgttaccaaaccgataaccggtacaagcccaaactaaaaccagtagatatatatatatatatatatatatatatgttttgttttcttctaacggtctacaaccatgttgacttataatttgcagtttgtctgcaatttgactaccgtttcccgcatagtcaaactcatagagtcataggtaatagtttccactttgatatttatttcatgaatgtcttaacttttctaaaatgtatttgtttccactttgtctttattttttcttttaaattattttcttcgaactattgctttctcatgattacttgaacagattgttaattgtttggctttcgtttccttatttagatatatatttcaaataggaagaaagtattcaagaatatcacctacaccaaagtcaaatacaggacatcaagtatgtatattcggcatggtcatatgtcattgatcttttgataaaagtatattaacgtgtaaattttgctgccagattaccagtagaatgattattattatttttgtgaaagaaaatacaaatgagtgcaagcatgtgtagtaaatcttaatatgcaatttcctggtgtagatgatcatatggtcgaggttctcgtcatatatgtatgtctctaagttagaaatgaaatacaagaaaattttaaaaaggatttagaagataaaacataatctatcgccaaaaacatgtaggcatgtaaagcaaggccaaggtccaagatgttaatatcaacttgatatagcgctagcttacttaatattataccatttatgtgtatatctcatcaattagaaaaaaacttttgagcatatattagcaaaataacaagcatgcgtcatcctttctttttgttaggttactacgtgatgaactgatgataggctacgaattttgttagctattgttgttctttttcttacgagtaattagagacttggagtgatgctaatagttttttgatcggagatggatggataaaaaaaatatcagcatcactccaaatctccaactcgtaaatattttttaatttcgagtagtctcaccgtagataaaataaattctaccataatataagcacattagctagaaagaaaaactaaaacaaaccaacatcttcacttttatatatataaataattataatttttaaaaatttatttgtgtattgagttacaaagaatatgttatggaattaagatactccaacgcatcactcaaaattttgttggccaacgattgagctttaaagcccagcctaaaaacgaacctaatttgtataaccaaatctgtaaaagctgaaactttgtgcaacacaaataccgcaattagacaagtctcaatagatgattcaaattatggaaacaaaacaaa

SEQ ID NO: 45478 - DNA, 291 bp, Arabidopsis thaliana landsberg
aatcatactaatggaagtcaaatggtattcttcgtcggccatatgattaccttgctctggggcctgaaatagaaggcgctggtggtaccataaccgattggactggtgaacgatttctgtgggaaggttcatccagtgcagttgctacacgtatgtttaatatttgaaacagaaaaccattgcttcattcatttgtggaaccaagaagatcactatacccatgaatgtggaactatacaacgtgtgtatgtacgttttcatttcgaacaggctttaatgtatttgcacgca

SEQ ID NO: 45479 - DNA, 570 bp, Arabidopsis thaliana landsberg
tcgtaaatgtggatttcacatttgttcgtccaatctaactcccctcctgaaaactatcataccctttttttaaagcatcattcagtttgtcttttctcccttctcagtttgttgtaccatattataaccagaccatgaataatctcttatataacttgacttgatcacaaccaaatcttttcttaaatttgatttttttttacaagtccttttctctttttttgagcatttgaatgtttttggaatgactccaataattaaaccgcttctttttttttgttaaaaatgtaattattttataaaataaaataaaaacagattagatttacagtcaaaagttattgacctatacaaatgattatagcaaaaaaaaacatggaaacataataaagcataattgaaccgctttccacaacctttcttagaaaaacattttccacatcgattaaaccgttccacaaatccacaaaattcattcatttcttactatgtggttactaattagaaacgtatatgttgattgttgaaaacatattttgatgaattgttctagctcaaacaatgaaaaca

SEQ ID NO: 45480 - DNA, 961 bp, Arabidopsis thaliana landsberg
tcaaactttcgacatgctcgaatgtctcaacctcatcaacttgaagctcgggcaccagctatgacgccttgttgctctattctctttggtctaattgatctcgatgttgctgtttgcctttgcaccgcgctcaagctcagccttcttggcatcaccatcgacactcctattcaccttaacttgctcttaacgcctgtggaggtacccttcctgatggattccgttgcccaacatagctacaatatattcatattttctatctatgttcttgaattggttttgtctaacatccaaatttcaaacctaaattcatgtataagcaaataacaagtaaaattaagacttttatgatgatgcgatatatatacatacatacagtattgtacttttttatacacactagacataatcgtttatagggaaatactgttaagggaacaaatcaaaactatatatatacttataattgtttgcacacaaaaaaaaacttcaagtacttgtctgaactcactacctaaacttttctaatataattttcaaaagaatatactcacatctaatatataattatcatagtcacataaattaaaaacttaactttagtttataaaattacaaaataaataatgtttgaaaagaatcagtaattgaaaacatttattattccaacctatcacaaattgacaaataattagcgaacaaaaagtttactgttcaagcacttaatttttactattaatgtttttttcctactattaatgtcttttttctttttaatttttgtttgtttgagatcaatttactaattgtgtcgactaataacgttaacaatggattccggtcatggaactaagaacgttgctgttgaacctttttctcttttcttgtagtcgatccatattttcgcccaactacaaaacttaatgaactactataattcatcttggctatcaattacatt

SEQ ID NO: 45481 - DNA, 301 bp, Arabidopsis thaliana landsberg
agcaagaatgacttggaaaggtaaatcaaaggagttccaactttggttgataaagaatgctatgggacgggattctatggtagagtgacacttatctacttgaaacttgaccagacggaggacgttagatacctcctactaaacaatcggtccctgcgtgccggtaatacatcaaccaaataaatgatatttgtattgctagaataacatgactttatgctctcgattctattgttcttctagcttaacgcttttctaacaccttagcgttatgaggatagaatcttttatgatgaaattt

SEQ ID NO: 45482 - DNA, 476 bp, Arabidopsis thaliana landsberg
cagaagtatggtgaccgagcagatctagagctagggcacggacgatgtgaccggcggcatcatctggagaaatcgcgatcacattatcagcttcggtgagcgccgttttggcgagagattgagattgagatttcttgggtgtggttcgggctcgagccaggagacgtgaggcttggattagctgacgctgggtttggagtgtggctcggtgtttggttcgaaatttggttaggcctcgttgagagagatacttaatcgcccagaacataaccaaggttaacaccagaattgctccttgtatgattgtttctgtagtagccatgtcttcttcctttttttgctctttttgaatctcagaagactaaaccagtcacactatatacactttattttctaccaacatattattttttcctctaaaaagcattacaaattgggaattttatcttctgattttagattttacacataagagc

SEQ ID NO: 45483 - DNA, 615 bp, Arabidopsis thaliana landsberg
  unsure (1)..(615): unsure at all n locations
gtattagcgttaaccgttttaccttcaccaccaccggacgcttttcaatgcaacgaccatgggaggattccactggttgactattttttttttttaatgaaactcatcaaatacagtattactgtgcgaaactgcaaaaacccaaataaaagaaaagaatggataaaatgataaaatctaataaaccttgggtcgtctgtatttcacccttttttagttttttttcttctttttttataacttttgtcacttattttaatttgaaatagaatgttttttttttttgcccttaaataagatttgtgtgttgagtacaattgtttacctgtttgcttcggtagaacaaatatccaactagaaagtaattccctctaccctcagaaaagaaaattttgataataatgtatggcaattcttttatatatagggaacaagttgaacaaaaattttttttaaattgggttaacggctcttttttttaaaagaaaaaaaaaccccgggggggggttttttttttaaaaaaggggggccccccgggnaaaaatttttataaaaaaaaaaaatattttttaaaaaaaaccccccccccccacaattttttttttttaaaaaaaa

SEQ ID NO: 45484 - DNA, 875 bp, Arabidopsis thaliana landsberg
actgcaatcatctcctcaagaagaatttcttagccttttgggtggtgctcgaatttgcccagcgcttaatcagtttttaggtaaggctcttggcgaagtggtaagctttacttgtttgatcttcttcagggtactagttttatcatattccactaagtagttctcttgttcagtagggtgtgaagcgtgttttaaagtcagtatgtggtacaggaaaagagcttcagcaggttgtccttgaccatcttcaggtacagtattctttacattcctgaaaatggagttatagtttttagactaagtagcgtttatttatacagctaatactttttagatagagttttgtcacgaattaagctttctttttcagcctgcagcagaaattatcggattcaggataggtgaattaagaggtctatcgaggtggcgtgcacggtaccaaggcattggtttggatgagatgctccttaatgaagccactgaaaatactggtctgctacttgtacaagtgcaacggtttatgatggttctatcttctgttgtcccacaggtacagaggcgtgcagttcttttgtcactgaaaatcatagttatttagtatgttggctgtcccatgtttcccacgcaatggtcatttcaatagaattataaactttttgtttcagttctcaaatttcttcatctggctcgtcagaagtataaagtatcttatgcaagaaccgaatgatcagcttttgtcatacaacaggtatgcacatgtgttttatgctgttaaaggtgttaaagccaaatctttgcagttacataatttgtttctgtgacagtgaactccgtgtggtattcttgaagttcttatagaccaagatcccgtagag

SEQ ID NO: 45485 - DNA, 454 bp, Arabidopsis thaliana landsberg
agactagaaccctgctttggcctttagaatacatcggagcgcaaatcggaatcttgttcccgatcgccgtttacttcgcggctgggaagcgctctccgcctgaaacgagttttctccacgtcttcggctggcttccgctcgcgttttttctctacacctcgcttcgcgcgcgcgtcgaaggcaactggccgatgatgggacacccagaaattctcgcgctggccttcatcaatgcgggccccgactcgaaggcgttgcgcgcgcagtggcttctctgggtgaccgcgacggtgctcatcttcgcgcaagttcttcatccgtggatgcccgtcgatcggcgtcgactgaagacctatgagttcacgcactttgacgcctttcttcccatcgccgagaagcggcatgatctctacatgggttcttaccaggccgcggccgcgcttttctataagct

SEQ ID NO: 45486 - DNA, 624 bp, Arabidopsis thaliana landsberg
  unsure (1)..(624): unsure at all n locations
ccactgcatgatttcaaattcataagaaaaagacgatacgacaactacctttaggcttattgacaaagtccatatgcagatatgagtaaaagactggaaatattgaaccaaatttgaaatcatagatttatccaaaaaagaactatgccaaaaatattcaagtctttcttctttttatttatttatttaacaagtatcaacaataattttatcactctacatactcctctatcttaaccaattgatcaaagtatagatgggtttgcactgcatatattgtttgcttttgaaatagttatcatttaaggtttttgcacaagaattaaattttttgtttatttatttattttacccttatttaataattttttatttttataattagttaagacgttaaaacaataaatatatatttaaaattttatcaaacatatacattgaaaatctaaaacaacaactattacgaaacaaacatttagtggtagaacgacaactaaagtaaaacataggggatactacatttgtgattttttaaaatcgttatatattcatgattntcatttgtttaacattacttcttctaccatcatttagncgttgcattgncgtagatgtcatgctttc

SEQ ID NO: 45487 - DNA, 537 bp, Arabidopsis thaliana landsberg
gatattagaaacctcacatttaaaagtaacgtcatttatatttaaattttgaaaaaccatgtactctcgataattggtttttgattgaagacttttgaacttaatctgataccaaattttgacaatcacatgtaccctagtggtttatcaaaaaaaactaatcttataacaacattctatggatatggtgggaatatgtcacatatataagaaaccttaaagtcctgattttgataaccgaaatgaattttaatttggatcatttggttttgagtttttctttttctttctaaatctaaaataactagaattgaaaccaaactaacaaaaaaaaaatgaagtaaaacatgagagtgactcatctacccaaaaagtcgaacaaaacgagctatatctagttcatggaacaagattgggtggactcatatctgatttaaatcaaaataaactgtaataaaaacaaaatgttagtacatgaaaagcattctcatagagaaaaagtcgtacacgcaagctaaatctaatttatgaaacatg

SEQ ID NO: 45488 - DNA, 722 bp, Arabidopsis thaliana landsberg
taagccaatcgaactaccaaaccaaaaataccgaactcttatcctaaattttaccaaaatgaactgaaatataccaaatttagccaaagaaaactgattgttttatccaaaagcaagagatcaaaacacatacccataaccaggcaaatccacaatgtaccaactcttattcaccaagaagtgatttataagctgagtcttccctgtttcaccaaataaaaatccaaactttcagatttccaaaacttaaaaggttcgatttttataaccaaattgaaaggaataaaaacacaaaccaggtttcttagaagtaagagcaacttctttcttacgaaccaaacaattgataagcgaagacttgccaacattagaacgacccaaaatcgcaatctcaggacgatcatctttaggacaatctctagcacgagcactacttttaacaaattcaacttctttgatttgtgaatgacccgcaaaaggtccgattacgatatttgaacccggaagaaccatatcatctgttagttcctcaatctctacaccaggaggtatgaataacactgacttagcgaatttagtcgcgtcggagatcgaccgattcgttgttgttgttggattgttcgtggaggctgagatttttgggatggagatgaaattagggttactaaatgattggagagtgtggaatttttgagattgggtattagaggagtgagatttat

SEQ ID NO: 45489 - DNA, 1607 bp, Arabidopsis thaliana landsberg
aacgttcaaatcaaaatctaagcgcatgaatcagaatcgaatcatttctttatccatacactcaacataaacagggtctggcgtatcaataattgaaaaaagaagatctaatgaacaaaaaaactttagtgaaaataagataccttaatgaagaataaagatcgaaaatagagaaactagaaaaagtaaatagtagaaaaaaatgggggagttaataatgtgggcactaatctctgaaacagtaacttctactactaaaaactcctgctttttggccaacaagtagccatcactaccttccttttgattccctctctctctctcgatcgtgcccaccagctcactcaccctcctaaatccacactttaaactaaaaaaccctaaatctcgagccttgacacaagagagaaaaaagaaacacacaacacaaagaagtgggtccgcatttgtaagaatcaccattccttagtagtggccatagtcaagtgtcaccacacacacaccaaaaataaagacgttccttttttctcttcgtctccattggtacttacttactagtcagacattaacgtgcctttgtgaaaaaccaacccatctctttccctctctctagaaacccagagaagaaaactcttgcttccaagcttttcccactcataattgcttattagaaggagaaattttgcttcttttcctctgcttcctcttaacatagaagaaattggagacacggaaggaagaagatcgcaacaatccagaattggtggaggagattgcttcgatctaatcacttcttcttccatcctccaggtatagattggtttttaaaaatctgttcttggagttattactagtaactagcttgtgggttcctttttactagattggctttggtacatgaagtgattcagatagagaattttagtttctaggtcactcctgagtaaaattcctacctttctactttttctctgttagcttgagttaggtgcttattcttcaaatgtttctttcgagcttggaaacttcatcaaagttttagctttttctgtgattcaattaatggctacatctaaaaattcaagcttttctttgattgtcaatattgtgtagggttcttcgtttttagctttttgttgcttttaggtaagagattaggtaatatttaaagaccttgacttttccgcaaattagttttgttagcattaagagtctcaaattcagcttctatttgaaacagtagatttctgtatagtacattttgggattctgcacaattttgatttttgacaatattacaaaatacaaaggttgttgaagatgtcttgtgtccaaaatagttaaaatcttgttcacttttgacttaatatgctcacttgttctgttcatgtttgtctttcagattacttggaacttggaagtggtctttcttcaatctgtataagaagatgggaagttgaaatttgctcggctttgatttgagtatagcgagcggaacgatgggaagtgtttctcctgatgctcagaaggatgatcttgagcttgaagattcattgaacattgatgagaatctgtctgggggaaatggcttattgaagtcagggaac

SEQ ID NO: 45490 - DNA, 814 bp, Arabidopsis thaliana landsberg
cacctacctaaccctccttaaaatatgaacgataggtatagaaattaaagtaaagattttgtttttacggtacgcttattatgctcaaacgggtgggcgaacaaaatccatctccatgtgactatggaagagaacttattaatgagtccaaaaaattttcttacaaacttcatgattcattcacactagacaaattaattgttcgtaagaaggtacgtacaacataatgagcttttattgcttctctttgcaaactaatcagctaaaacattacagattaatatgttcaagggaaactataactaagatttgaaggaaaaatctaacctttctactacaacaacaaaagtcaatgcaaggtcctttgaaacgaatcttgttgtcgcatgcatgtacgtaattttatagtcaaagtacgaatgatagatatatggggtcaaaacgttaaaatccagcctaagaaagacagaaatgtactctaaatcttccaaaccaacgttatcaattttgttgtaacattcaattgatttttctgttaattttggatcgtataatcgaattaaaatgaaaatacaaggagaaaacgagacaatagcgtgaaactgctttgcgtatatatcaagtatcaacagtttttgtttcgtttttgttggtttgcgttgggtaataaaccggcattttgtacatggttcaattttctcatatgtgaaccgatctccggttgggcgtgggtttattgctgctcgtaccagaaagtgttgggttaagttccgcaacgagcgccaccctcgtgtttagttgccaccgttgagtt

SEQ ID NO: 45491 - DNA, 523 bp, Arabidopsis thaliana landsberg
ctgtactaagtcgtattacttcgcataataaggattgattatgatttgtgtcttgtttataaaaaaaaggaaaaggggagtacacaacaaagttaagaaaattcaaatttattaatttaataagcataatttgaatataataaatcctaacactcaaactaataaaaaagtatttttttgtgtagtattaaaagatgcagaatccgaaataatgtattttattgtagaagtgattcgagggacctatcttgtagtcactcgtaacattattggtttaaggttaaaaagaaaacatttaaaactctgtatacatcatacatgacatctttgcaaattgcaaaatatacattttttaatcagctagtctattcttaaattccttcaattaacgaggttatacagtccaatacgtttaagcaacaaaaagttcgatgccactaataatttatagattgttgcagcctgcacgcttacagcataacgagttacatatgagctaaatattccactatatacaaaggcc

SEQ ID NO: 45492 - DNA, 495 bp, Arabidopsis thaliana landsberg
  unsure (1)..(495): unsure at all n locations
gagtatgattgtgaataaagataagaaatattttaaagtaaagggatcgatatcgtggtgatgagagtgatgataatgtgtaatcattatgacatcaattacaaatctatataatacacaagtaatatttatcattgtattgagctctaactttataaattcagcaaatgatataggcatatagctgactctctatatatataaacaagatttaaagcaaattaaaagggattgtagctcatcctaaacccaccacgtttctccgccgccatttcagctttttctgtgtgcttcccatccactttttcttacatcttttttttgctggtcgtgttatttttagtacttaaattcccaatcgcctttctgtgtngtgtgttcttcatctgtaagagattttaaccggattaataaaacgcggcataactggttgatgccttgatgggcagttgaaaaaatagatacaaaattgaactacaatgntatgtagattat

SEQ ID NO: 45493 - DNA, 529 bp, Arabidopsis thaliana landsberg
tatctaatatttaattagtctaacattaatccagacctaaatacatttacgatcaagacaacatattgtaacttgtgatgaattttgtttagctgcttgcttgtgaatgatgtaaacaactcaacgataaaggccataacatattgacaatatttatattgtttttcatatagtgttaatagattgggaattatattatcacgaacaggtgttttagaaatgtataaggaggaggataatccaatttaaggctaagatcgaaaataggtcaataaactataatatcgaaacttggtcaacataagccaatataacatctttgataataaaattaaatgggattttttcttttgatttttatcaaatgggtaagtaaaccagctggattatgatatagacaaatcaacaacttaacattctatatagtattttttctcgagatttgactattttggctaggcgtccaaagttctataactaatcttgacaattttgaaatagaagaaatcgacttcaaacaaaattacta

SEQ ID NO: 45494 - DNA, 248 bp, Arabidopsis thaliana landsberg
  unsure (1)..(248): unsure at all n locations
agcgaaacgcgacacaaggaaggaaaanccagggaccgaccccaacgaccccaccccgnaggaaccacgagaacaccccaaggacgccnacggnacccaggggncgcggaccgacgcgagaacccagaacaaaaaggggaangcaacagcngcccgcccgcacgaagggcagaaagggccggagaagggcaaacacncaancaaaaaaccagcaancaaaagagnnggggcggaaaagggggggaaag

SEQ ID NO: 45495 - DNA, 435 bp, Arabidopsis thaliana landsberg
  unsure (1)..(435): unsure at all n locations
ttaacttgaaaaagggatagaaatctatattttttttttattnataggncgntaaactaaggagaaggatgagcatgtcagctaaagtatttgcctatacataccatagctgtgaaaaaggccatcgaaatcagcgagggctatatacctatagattacattatgtaatcatataattgcctatatatgtgatgagcatatgagatattagacctgagctacgaataataatgatgatttatatgagctacgtatccctccaaaaaataaattaagagagaaattaaatcgatctaaaagttaaattaaaaatcttaaggaatactttcctctgtattatgaagcctgaagttttgaattttatttttgttccatgaagataaatgttgtagggtaatattattattatttttattaataattaatagaaagaag

SEQ ID NO: 45496 - DNA, 567 bp, Arabidopsis thaliana landsberg
gaggtatgagcatattctgggaggagctgtttatattttatatacagagatggatctgctggggttcgctgatgaggatcttgaagatagtttcatgaacaatgaagacagtagtcaatcagggagagaaaatatccatagcaatttcaaaaatcatcatcatagtcaaagtaatgaagatgttcctggtacgagtaagcagaaaaacactgaggaaagcagagaagctaagaaagaggttgaagcacaaggaatgagggagagggcaagaagattctcgagtttcacaagttggatgcctgatctttgtagagtctgggcaccaaaacaaacgaagaactctaaaggcaaggccgaccagcaacagagaacggccaaaagaaagaaggagcaaagatcagtggaatatgatagagtatgtgagacaccaatgacaactatagagaccaaacgaatacgaactggtaacaaagatgactacgaatgtgagactttgcctcgtagttcagtaccaaatgctctgtttcaggatgattgttcttaggtacacttacaagtgaatgaagc

SEQ ID NO: 45497 - DNA, 1122 bp, Arabidopsis thaliana landsberg
caaaatatcgtgtaatgtatgagttaagggtaaaggaaaactatatagctactaaattaaaattagattgagtaagagctttgtttacttgggtttaaagtttaaacaaagttatacttttagtggggatcttatttttttgtcaacttaatggggttttattaacaaaaactatatgtgattgtaaattcttttaattggtttttcttttctaataaattcactaaatttcttcgtcaataacataacttgtatcgtttcatgattgcaattcaaaagtgttacaccagcacaagtcgatatttctaagtaaaaatatagtttacaaataacttatatcatgttgtataataacatattatacacatacatcaacatatttgtatattaatagttacgattttatcgcatatacatatagtacgtatactaaaaaaagtattaataatctataaactaaaaaacgtatttacatagtcaatattaaagacatgtatggaaacaagaagatttatttttataatgaatattatattatttctgatgaatttgatgatttaacttgtacgcatgtgtcatatattggtgtactaactaacaaaatcgaaatttggattacaatatgaatgagagacccctatacagctgcggctcgacagtctcctcacgatcctctctgtaagacagattggtcttcttcttaatcacttgacttctatttttattatattatctctcaaactctttaaataatttatcactcaacatttaattacaaccccatgcataaatttaacaacacagattcaatcatagtaccatacgtgtgggaaccagagcaaaacgacacaaagttaatacgtgtggaaagctttcgaaacatcttctttatttagcatataaacatttttagtagattaaaaaaatattagtattatttttaagatagatagaataatagtataagccagtgaagatgatgccaactaaatgacttacgtgctccactttggggccagctcatgctccaagtgatgaacagagagatagataaagattgcgtaagggaggctgcatggtattcatctctcgaccctacctcgtattattcatccaatggca

SEQ ID NO: 45498 - DNA, 490 bp, Arabidopsis thaliana landsberg
ttatttatttttcaaataaaaaatcacattcattttatgcaattaattcggctatctatctagatgatatatagttttatgtttcgctaacctatacgatcgatcattattatttaagcaactggatcttgttgaaagaaatgtgaaaataggatcaaaggaaaaaccgaaaaagcaaagataaacgagatattaacaaaaacacaattctcactcgcacgaaaacggaaaatatgatttgtattaataaaaataaacgaaaatataaaaaacaaatggattgattaacacaaaatcgtatgaaaaccaagacacaaatatatccccaaaatcacccacatggcagaaaatcatgagtaataaaaaataacaatttatcagcacaaaaaaaaaaaaagcttttcatcacaaataaaaccatgcgagcattacactcatgacgcaaaacgacaccgcatcacacacagaaccaacattacgcaaagcaaac

SEQ ID NO: 45499 - DNA, 524 bp, Arabidopsis thaliana landsberg
cgagaactaacgataagataagcaaaagagatgaaggaaaaatgaatgacttttttgttctcttccaaaagtctacgcttactgggagggtgtttcttttgttgtcttgtgctattagtagatggagtccaagatattgcatccatgcttaaaaagatcaagaatacaccacatgtttttgggggaaaagtatattaaagcccaaaagaatgttttggaataagtatatatatattttgatacgatttttgtttcataaatggaaagccaaaaaaatgaaactatcatactaagaagttacatattaatagacgtatcttacatcttcataaactcccaaaaaaccctaaacctaagtgaagaaaatgtgtactagtatgagatgatagatgaacatatttagataagcattaaaaacatgaaaggaaatggttgtaacaatcaattccaaagaggggtctactacaaacatatataataaacacgagcaaccgtaatgtttgctttcacattcaaaatttcaa

SEQ ID NO: 45500 - DNA, 1059 bp, Arabidopsis thaliana landsberg
tacattgagaaatgaagacttgacttcaggggtggtagaaatatttccaaccatgtttggcagataaatggggccatcctcttggtaccactgaagtagtggtcttatgttccctgctctctccctcgctgttctcactatcactctccattttatttctgcttcttgattatctctttctgatagcaccaaacgtactacagcctgtgaacaaaagtaccaaaaaaaactatacttacttacaaggcataacagaagaaaggtaaatcacaaagcatgaccttacaaggatgttcttaaacgtgcacatgaatggatcaagaaagaaaatggtcaacaatacattggcaaagaattgcacgtcaataaaatcactgaattagaatttgattgatatactagattaacgtcagtaatgcaagtgatacgcagaaatacaattcatgtgcacatacaagaacaaccatcagtatcattcacagtgtcaatgacattactatattaaacatagattaaaacgagtattcaaagctcccaatgaagcaggtgaaggaaagatcatgcacagtgatcccatgcaagctggaaagagtcagaatttccacttaaatgtaataagataatcgtacttggtaggtcgaattgagaagatacgacgattccactgaaaatagcatttgatattcccacaaaattgaggttctaggtatagattttttgaaataacaaaactctattttacggcttctcgtagcgttaaattagggttttagaagaataaaggattgggcttaatctttatatgaagcaatttcacctgaaagattatatcagtcatcaatcaaaaaagcttgtcgtcgttgcggagaagaagaacaatattcgaaatctgatataaggtttctgaagttgtcataaacccggttaaattgtataaccgatggtttattcgctttattcgtcaatcaatcatcagaccggtaatttactggagccgttcaagtcaacaaaacccaactaccttatataatatgggcctgtggcccattaattataact

SEQ ID NO: 45501 - DNA, 593 bp, Arabidopsis thaliana landsberg
aaccttataatataagaaattaaggagacttcaaggttatataaagtcattttgtttgttatatttttaggctagtcgttttgcaaaatattcgtggtttcataaccacgcctaatggagtagattttacgaaccgaatgtaactcacgtgcaaacatgtgatgtgatgtgatgagaaaacttcactcgttacatttttcatttaattttgtccaatgtttgctatattcttttccactatacactatagcaaacattgtataaaactttaaacatcaaatataaaaaaaatggagataatattttaaattgtattttaattatttttcatttgtgagtttggtggaaataagtacatgaagtaagaggtataaccgattatagattttatagatttacatatttcatttaattttctccaatgtttggtatattcgcttccactctttcttgcactagaaattaagaatgcatgaaaatctaatgaattaattatccataagaaataagaatgcattggttattgctaaaattaatcaacgacgtcgtcgacggcctaactaattcaataaacttcgcattttaaagttaaa

SEQ ID NO: 45502 - DNA, 552 bp, Arabidopsis thaliana landsberg
ctaagtattggtttttgacactttgcaatgactgaactcgaaaaggattagagtttggcattgacacgttagttgtagtctcagtgaaattagagtttagcgttgacacgtcagtcatagtccgaattaaatcagggttcgacaatgacttataaaaacgcatggagcgttaacaaagaatccgagatatcatatcctcgccgtttaccaaaatgcattgacgatatattagactatctacaaaaattcactaacgatattatttaaaatgatccaaagttaacttttagagaatttttgatgatataaatttgtccagacataattctacttattggttttcttttcgcgagccgtactactccgcgtgatagaataatgagggaaaaatgctaaataggggaagacaaaacaaagtgggtaaggtggaaaagtattggtaagatactgctgagaagctggtgagaccatattggtttttttgggttgttttttctacgatgcataccttattgtagtccatgtattatattcgaattctagcgaataagc

SEQ ID NO: 45503 - DNA, 966 bp, Arabidopsis thaliana landsberg
gaggacaacacatagtacaaatttagtttagaaatatcgatctatggacttctttatttttatacaaacaattttacttgactaaagggataagatctcagtttttattttaaacagactatctaagaagtgaccacaatatatagtgacattcataagtccaccaagaactagcacaacctcactcaaaaaatcgaatctcttctatagcaatgaagtcaattgggctactgtcccattgtggcccaatttaaagaaaaatagaacctatctcattgaatctgtcaacaataaaactgttttgaaaacgtataatcccaactataaaggtcaagttccaaacaaattatatcatatgagcagttttgctaaagagagaaaaaagtgtaagaatgagcaaaaagggaacagatcaaatgcactggcagaaaaagaagctccatgctgcctcaatcatacctgcccccactaggtatataagctaatctcacatgtggtaacactcttctcttctatcacccgcacctttcttctttctttgacagtgaaaatagaaagaaacaaagacagctgttgttgcattctccacggcacactaaccaacctcgcacatttctcaagtttcttagtacaatcttataactaatggtgattaatctttaactttgactaattactacataaaagtatttcatcaaacgaaactctcgtgatcatcattgtcatgggttggttagagcacgaatcatgcaaggtttcaataatacagcaaaattggttaccaaaagattccgaaacagttcaatatttgtcgacaactaccttctgtatataaagtaatgacgcaaagacgttaataaatgttgcagtgcaataatctggtccggcctagtggtgtctagacccaacttatatcatatagtcaagtctcataatataatcgttgcataaatagacataaaggaa

SEQ ID NO: 45504 - DNA, 693 bp, Arabidopsis thaliana landsberg
cccattgttgcaatttctcgaaagcttcatgaagaagataacacagaaattgacaaaattgaatccgtttagatctacaaaatcacaatcggaaactgaaacttccgtcacaaacttctcagagaagagagagtacctgaattagctctgaaacttctcagagaagcgaaagagaaagagcggtgaaattaagatatgaacgatgctctgtatatatatatacagagaacgaggagagaggtgaggaagaagaaagagagaaagatagtatgcgggagagactacaagaagattgttacgctacttaatctagaccatacgatgagatgatctaaggatctgtttgagaagcgagtgtatttaattggataacgaattgcttcttcatggttaagtgaagcgtagaggaatatttctcacctactttcactttcgcgccaacttcagaaccgttaaagatttctatgtaacagaatattatttgttttttagataacttcaacaacaaaactagtgttaagttttacacatacattgagaacaaaatttaatattctatttatattgctgtatagtttcttaagcttaagattatagtgacaatattcaccataaaaaatgataaatccatttggtagatcatatttagtcaataacatgcatcttccagcgcaaagtaggtaaactagttcg

SEQ ID NO: 45505 - DNA, 811 bp, Arabidopsis thaliana landsberg
caaaaaaataaaattaagaaaccctaatgaataatatatttttccaaaacatctcattcaaaaaccaaaatgcaattaagtcgtacaaaaattgcaatgaaagggcaaaaagagaagagatttaacaactattatctatgacaaacacatctataatgataagcactgttgatagggtcatttccttcgactggaacttgctctgctctgcacttgtatctgcatcctctgcactcgttgtacgtacaagttggtgctgtcgaccctatcatatgcctcctccttgaattctgctttgaaatattttcaaattataatatgtattagtacattattatacagccgaattagctgtaaatccattgtttccttgcagtatttactgaaaaatgggaatttaccaggagatgtacttgtgagagaagggagaccgtattttcggtagaacgaggtcttgaggctggttcaaaaaacaagaacacacacaagcgagcaaattcaacaaaaaaaaatcattgttagtcttattaatgtggaattaatatattgaaattaggaagatagaatacaaaggggaggggtgaaagaatgagaccttgaactacataatttccaagaagcatagcacaaagaagaaagaagatggctatgcatcttggcttgatgctcatcatttcatgcttcattctctacttcttcttcttcctgctctaattcttaactcttcttcttgctttatcgtatggaccaattgttgtggagagatataagtttgcctggttggctgaaagttctgtcttttacttatatc

SEQ ID NO: 45506 - DNA, 588 bp, Arabidopsis thaliana landsberg
ttggcgtttatgatcagaatccaaattttaatcatcttagttttaatcaatttcaatatcaacaacagtttggatgtccgatttgggttcaagatggaatttacaatccgagtcaaattcagaatcaacatgaggaatggctggatgatcatatgatgaatcattctaaggaaataagtcatcctttgatggatgataacaacttttactaccaacaaccctagatatgtattctctatgtatttcatggatttaaagttaactagttaatcaatgttcgttttttatgttgttctaatgccgaataatttatttctctcttttttatatattcaatgtcgttttaaaattttatttattttcgcaaaactatcattttatattttcaatgttggtttttaaacaaatatctaaaataactttactacttagtttataatctattaattatatatataaaaaaacgtttaaaatcataatgtaatgcttagcatatgtgtgaaaatgaactagaaataatagtttctccatctttacattatcgataatagtttctagctcttggtttctgctgcttatactaatttc

SEQ ID NO: 45507 - DNA, 691 bp, Arabidopsis thaliana landsberg
atataaaacagcaatcacgaatggtcactatgtcatttgacttaattgttatacgtaatttcttacttactcagttatatcatatgtcatgtcatgtcatttgacttacttgtacgtaaaatattatatgtaatgaaaatatagaagattaacaagtttgctacatgagtaatgattgcttcatatgtagaagccaataagatcttgaataccttgggaggaagctctatcgatttcatgggggagaaactagctaagtatactatcgatatcattgaaacctgaagagttgattcaacatctactgatctcgttgataagcgtatcatcacacatattaatgagtggattgacgattatttgatggtgcaccttcgtggctcaacttagaaatgataggacacattatttgatggcgcaccacgataaaatagctgtcgtttatagagtcttactcttatcacatatttgagtccaaaagataacgaaaaaattaaagacaatattttgaagaattatttatatgaaacaatattttttattttgttgcaattagacttattcattacctcgtggcatgtacgtggactttgtaattgtaacagacacttctattggttattcatgtgtttgctatttaggtggtttttcatgtgtttgttatttaggtggattttcatgtgtctctcta

SEQ ID NO: 45508 - DNA, 711 bp, Arabidopsis thaliana landsberg
taacagtaccggagcaatagccgctcctcctgctgcaatctgcgctcctgccgcagccgcaccatttgcatctaccagccccgcaatattatatgcagcagaagcggaggatttggtagcatctgccacactgctggcggtttgcgcgccggccattacccgtgtagatgcattgttgctgctgtcggcagcttctttggctgcgttagaagcatccacgagtgcagcacctgtgcctaacagcccggatgccgcacccaatgaaccaaatgcttcagcaccacccgcaatcggcgatgtaaaatgattttccgctatggatttaccgatcacatttcctttcgaagccatatcggtaatgctggcacctacagtcgctgctcctcccaaacccatcataccatattgtgctccctccttgctggttacctcaccgtagttcttcctgcggccgtctgcttcgaattcaccaggcatggcacctggtgtaagctgatcgcccatggcgggatgttgtacgccacctttgtatacacctaataagggcttgctgagattctcttttgcgaggcccttgatcgttgatcctgcttctacagcttcgcctcccagcatgcctaccagcccgagcgatcctgctgttgccgctcctgacaatcctcccgtgcctgccagtgccggacctgtaagttccagtgaacccgaacccac

SEQ ID NO: 45509 - DNA, 550 bp, Arabidopsis thaliana landsberg
aatttatatgcggaagatcgtcgtgcagttccatttcaatttcaatggttatatatactaatactaagaatcgaacataattgtaaatggaaacaagcaatgataacatttaggaaactttaaaggatttttgataaaaataaaagaggcaaaatattttgttgtttatttattgaaaaaaacataacaaatgcataatcacgtaatgacgttgcagaacgaaaatttgcagaataaaattttttaaaataaaatgttgcatgcacaacatttctttaatttgtgaatgaatatgttatttctatttaattctatttttaacgttaaaataaaaatgcgaaaaaatgaaaaatcagatccatacacaaattaaataaattttatgtgcatgcatatgtagtttttgactttaattatattatattttctctagagaaagaaaaaccctactacaaattcatgcatttgccagattttattttcttgtcgacgcggtgaattagattcggacatgtgaatgtgagatttgattctttagaaaccgtcacat

SEQ ID NO: 45510 - DNA, 453 bp, Arabidopsis thaliana landsberg
ctgtgttgaagccgccattgttctcaataccctttcagatgtcatctgtgtgattctactcgttagtccatgtggttgctcggatgctgatgctcctaccgtaagtttgacttttctatcttcagttgaattcttgttaacccatgccattacttacgtgataatgctgccactcatttcaacattttatgtatcttcattgcaggtccaaatttgggcgagcagcgacataaacaaggaagcacggactttgatgggaaagtgggatgtacagtcctttattagatcttcgcctgagctttctggttcataaaagtctggtagagcacctaggcatataaaatttgctttcaaaaatcctgtccgttgccgcattatatggataacactgcgtcttcctaggcttggatctagtagctcacttagtttggacaaaaacatcaatctcttatc

SEQ ID NO: 45511 - DNA, 589 bp, Arabidopsis thaliana landsberg
gagctctttaccagctttaccatggtagtctcgtcagttccgtctgcagaaacaatgtaattatgcaagaccataaacttaaggactcatatttcaacaaaatagatagcaccataccattctgctgcaaagcagctacaaaggattcttcacttttcgtgcttgcgtaaatgatcgatggcttcgcttgatatcttactgaagatatataaccaagacaaatgaagcgatcaaaaaacaaatgttatagggacagtgtagcagaacaaaagtgctgcaaagtagatgttaatcaagaaattgcttcaccaaacttcatttagagtagggtacagatagtaaggaatggcaagactcgacatgcaatgatatcaattctgtttgaagttgaaaagttatacccatattgatcaatgtaaaatctgagcaatcttcttcccaaaattctagcacatgaagctggcgtacactacagtcgtagtaagaaactccaactctgagaagagaatgtttaagtgagacactgatccttacttaaacaacataaagagaagaatatgagcctaagcattcactcatatgctctttc

SEQ ID NO: 45512 - DNA, 391 bp, Arabidopsis thaliana landsberg
gaattagatcaatgaatttacctctaatggggtaaggggacatttttttttaactcggttaaggtcgggcctagggacgcgatctcgtcgtttgaactttcctttccaacttttctgtctaatcacatccatttcagatttctcagctcttccaccttcgtagagacaacatgagaatgccaccatgtcctaaaaaaccaaggctttttatttatcttgtctctctaaagcatactaatactaaactatcactaaagcaaagtgattctgtaaatcaaagacaaaaacttacctcctcaaatcgaaggtggaccgagacatactttcctccggtcgccgagcttttctaaaccatccgatcgactaacttttaagttagggtggatatagg

SEQ ID NO: 45513 - DNA, 280 bp, Arabidopsis thaliana landsberg
tctcttcgctaggtcggggaagaatcctaacgaatcgcactcccataggatattatcaaaattttctggcatgtgtattatgacaacattgtggtggcggtgacaaggatagattttacagcagggtacaaaacgtatcgtcaaatattcaatatgattctacataatgtatctgctttctgcatgctcactctagactgttaaacacctcttcacatcaattgatagactcgacttattgcactactgatcgcagattattagtttgactatcactcat

SEQ ID NO: 45514 - DNA, 882 bp, Arabidopsis thaliana landsberg
taaataatcgaactcttgttacaagactggtgatttaattttttactaaccatttgtgtatatatgtcagttattatattaaactatttgtctcgttgtgaaaaatattaatggcatgcggagtagtcagtaatcagttgcatatataatatatttgttaaagcttaatattagaattgaaaattatgtcgacgtcaaagaaaataactgaaattatgtcttaactaagttttggaaatttctgatgttaaattatttaatttcaatttttgcaacgaaatgaccacttaagattttactaatccgtcaacaaaaataaaaattccttaaattaggaagaaaatattgattttaaagtttattttcagggcatgaaattgtaacaagtaaaaatacaatgatatttcttaaaaaatatatagttcagtttcgcaacgaaaaaacccgacatgatatcaatttgtttagagtctacatccattcccaagataatatattatgacaataatgtgatgtgtgagcctatatagatattatttcgatattatgtgagataactccaacaacaaaaggttggttatcactgaagcctattcatcttcggttaatagttctttaacccttggtgtcttagtgataacgacataaattgcaaatctatatacgcaacctgccgttggaaatattaagtcccggtacaatgttcttttatataatatgttgattgcctttgtcgacttccttcgggacatatatcaacatctttcttattctatttgaaattgacttagagatattgcattttacgcctatatctcttatatattcgaggttggatctctcatctatttaagtttttttcttacatgggtgtttaaatga

SEQ ID NO: 45515 - DNA, 668 bp, Arabidopsis thaliana landsberg
ctttaacacaaaaggtcctaatcaagcaagattaatcctctttttttttcttgttttatccacaatctttttaacatcaatagtctccacttatgatatggtaagtcaccatctaagattcaagtttcgtttgacgtaagaatcatggaagaattttttgttcatgtaaatttaatttttattcgtactttaaaactgcattttttctaaaattgactctacaatttctaagcaaatcaaacggcgacgataagaaagtcggtctcattctcacctcttacgtgttagaccaaatgaactattataagaaaaataaatcttttctgaaaaacgaacgaagaacaccatcaattactttaaacacttttgctctaaagtctaaagactctgcctcgtcaatcttttgatgcaacttatttaattattcctttggtttgaaatgagtatgtataactttatcatggcatatcgtgggttcctttttgagttcgaaaccatctttttcgaatcagtctctcagccatataagtggttaggaaaattttgtgcatatatttattataattcgttataatattcgaatggacagtatggttgaatgtcaagtttaagttgattaggggaccttacacacaactgtcacttgcgaagttttttggtcatgaacc

SEQ ID NO: 45516 - DNA, 526 bp, Arabidopsis thaliana landsberg
aaacattattgtcatacgtatatatttagtagttgcgacggttttactttatctgaagatcattgcaatggttacaggggcaaggaagcagataagggtctaaacaataggagtggattcgccggaaattgcagaggtgacatcttatcagaagctcctctggctcagtcaagtagcatctgctgcaacctgaagctcgagtctgcaggagaaaaaaacaaaacacaatagaatgttgttgctatcaagaacaagatcgcgtagtagctcaatactctcggcttaccagtggattgagagtttgtctttgttcttcttattcagggagtactacaagaatgttatttgctgaagataagtcagggactgtttgtgagtatatcttttgatcggaagaatcagcgtcttctatctttgtgattgtgatgaaattggacttgcacagtggacatgttgatttctttctttctgaaacctgcagatataataaggaagttgcatcatttaccaatatggattttatgag

SEQ ID NO: 45517 - DNA, 566 bp, Arabidopsis thaliana landsberg
  unsure (1)..(566): unsure at all n locations
gtgcgaggtttttaggaccttaagcgagnngaattatatttataanngnnanggannggatatgagaaggggacaaaattgatagaaataaacttatccttgaaaacgaaaatgtgttcttaacaaaaacgaaaacgaaaatgtgtttcacactcgagatttttttttaagtacattctaaattttttgattatctcttttgaggtgtgataattttgaactaatacatttatatattatatctttgttgttttaagggtttcaaatttatatatcatatatctggaattcgaaataaattttctttaaagtaagcattttcattgcatataaaataactaaagaataaaattgcgaaaattcataaatttagaatattaataatatgtacatttacatatatatatatatataaatacaataaaatcaatcaccacattattatttttaggtttaaacggacctaaattttccttaagtcggtttgaagaatttgctgggccacctcacgccctttatggtcacatatcactgccaccgaacgcatttaataaattatgaaaatt

SEQ ID NO: 45518 - DNA, 404 bp, Arabidopsis thaliana landsberg
  unsure (1)..(404): unsure at all n locations
cccccccccccccccncccncccccccnnccccccccccccccccccnnnnccccccccctttcccccccccctcccccctcccccccccccccccccccccccctttttttccctttgtatgcccccncccccccccccnccccaacggaccncccccccccnnccccccccccccccccccccccccngngggcccctccccccccccccccccccctccttcctccccccccttcctccccccccccccccccctccccccctcctccccccccccctcttctttttttcccctccccccccccccccncccccctcccccccccccctctccccccccctctcccccccccccccctcctctcccccccccctccccccccctcccccccccccctcccc

SEQ ID NO: 45519 - DNA, 477 bp, Arabidopsis thaliana landsberg
cccgaactgcccgcagtgcgacatgaccaagaaggtgctggaccgcctcggggcgagctacacccccgtggacgtcagcactgacgccgacgcactggccaaggtgcgcagcctcgggtactcggcggcaccggtcgtggtggcgggggacactcacttctacggattccgtcccgacgcactgaaccggctggcagccgatcgcgagaccgcggccgccgctgcgtagtttcgcggtcgcgccgcgtccgtggcatgtcgcccacccctgctagtctctgttaccgagacagtgaggagtgttcgatgaaggttttggactcagcaattcctcccgccacggctgcggccgaccgcgtctacgtcgtcgccttcatcgacgatgactgggatcactgggccgctcccgacgaagtggccacctaccgaggacgccgcacgccgagtgggcgttggcgcatcgccgcactggacggc

SEQ ID NO: 45520 - DNA, 614 bp, Arabidopsis thaliana landsberg
gccgatttccggagagctttcgaagagtatggatgctttgaggccttgttcgataaagtccctctcgaacttcgaaaggcggttttcgatgcttgtgaagaggttttccaactacctttagaaaccaaaaagagagttgtgtcaaagagaaaatacagaggatatgtgggtcaaatcccaacgttacctttgtttgaagtcatgggcgttgattttgcagaaaatccagataaggtcaacgcctttactcataaactttggccacaaggcaacaacaattttaggtatttgattttggtttttcaaaattttgatttgaaatatacaaactctaaaaattctcttgtttctgcagcgaggcggttatgtcattcgctgagaaagtatcagaactggacttcatgacccgaagaatgattatggagagtttcgggctcgatgaaagctacataaaggaacatctgaattcgacgaaatgtctcgtgcggttgatggaaataccaaggagttgaagatacagaggaggagttaggcatggaggctcatacagacagaaacatgctcactatactttgccagaacgatgtaaaagatggaatcgaggtgaaaactaa

SEQ ID NO: 45521 - DNA, 650 bp, Arabidopsis thaliana landsberg
ttctgattacatttttcaaataactaaaatgcatgcaagactagttctaaaatcttgatttaatagatagatgagtaaatgcatgcatgcatacgaaattaattcgacacatatactaaaactcatcaaatctgacctactaattaatcaactcaaataaatagatttctttaacatgaaaaatatctgatttttttcaagaggaattctgtgaaagtaatgtatgtgtctccaatctctcaatgcaatttacgaacttccatcacgcgtctttgttcttgatattggtttccagctgaaattgagaaaaatatagtataaaacaaataaagtaactagcaaataaaatgagacgaaaaagtaaattttcatgggagtagttagacttaatttagatgtgcaaaaagagaagccttagaagtcataagcacagctcacaacgatccacttattattaacaacaaacatgagaagggccgaccataaaattaaagattagttgcaaaagtacacttaattatcagaaataggaacatgacaggtcttgtaatgtacctcacgaactcttttgacctgtaaacaatgtattaaaagagtattgtctagggaaggagatagtaatagtgtctgcgagctaagattaggaacat

SEQ ID NO: 45522 - DNA, 467 bp, Arabidopsis thaliana landsberg
tttttgtgccttcgcctgtccccatggggccatgtcagttctggaaaaggttggtagcgaacatgacaaggttgtggttcagccaggatatcgctttcagccgacgatattaaaaacccttcggccgaagccactgctatgagcggaaagttttattccggagtatggttgaagggtggccgagagatagctgacgaagctctgagaaggcaagagatacaatctcatgacaccttggaagaggccagaagagctgaagtagccgctgagcgtgctaggcgtataggtatatctttcatgatgtagcttcgtggactatgttagatgtggtagtaacagacacttataccatggtagatctgagcttactccccctgctggagccagtcgaccctgaagctgatccatctctgaagggggcgctcgatgtaatgagaattgctactgaagttgttgacgaaactgtc

SEQ ID NO: 45523 - DNA, 603 bp, Arabidopsis thaliana landsberg
cttaattcatcgcgaatattcaattgcatgcgagtgtggtttatagtattattgatattttctttgtttatttagttaattattatgggtttgttaacaagtctaattcaactacttcttttcaagctttattcctcttggaaaaaaaaactgcccaaaagataaaatagaaattgacttgtaaaataacataaaatagacattgacttgtaatgagatgaaaatagaattaaaaatcatgattttcacaattaaaatatgaaaagatacaggtaaagttaggttttagggattaactcaatgtcgatcatgtaggtcatggtgttatttgttaggctttcattcataaatttgtttttgaaaaaaaaaaacagtgaaataaatgaaactgatagatggaagctaaattaagtgaactaacacaacttatgttacattaagtttagttacactgaatcggtagaacacatgatgtgtgtgggactgaaatgctaattttccggagatttggtttggtaaagttaaatacgagaagaaaagaaattagagttggagaaacaaaaacaagaacaaaagagaaaaagccgaacaacgtgccgtttt

SEQ ID NO: 45524 - DNA, 797 bp, Arabidopsis thaliana landsberg
gataaaaacgaagtactaacaaacaaacaaaaaattctggttatttgccagaaacacttgcatgagagaggactgaaaagtggattcgtatcaaccaattttttcaaatatcaataatcaaaattctaattattactctaatgtagaaaaatcaattttgcaattttttgtttgttccgctacatcaatgcaaattttataatctagccaaaaatattacaagttgttcataagataattttggtgtttttattaataaatcttgtaagaatattttgatttatatatatacataaatttagatgtaaatttccatccaaactgctttttgtgtgtaaaaacataatagatacaaacaaaaaacatcctactgaaaatgttaaattgagcaacaaaaaaaagtgtttaaattaaaaaaaaagaggggtgtgttcaatttacgtagttttttaaaaaaataataaaagattacatataaattatatttaaaaaatgcataagaaaatatagaaaataagataaataagaaatgagtgacaatgatgagttagattccgagcaaagcatcacgggttgaagaaaaggctgacacataagagtaacaccattacacttaattcgtttctattctcacactttccgccaaaactaatttttattaggtatctcgtatatgtacatctatataatccgtgacgttttctatattcttttttttttaatataagatgatataatactagaataaaacctaaatgattgtccatgttgtgacaaaaaaatataataaaattttt

SEQ ID NO: 45525 - DNA, 416 bp, Arabidopsis thaliana landsberg
aactgatgtagtgcttccacgctggcttggcgccaccaccgccaaccacaacatgcacacggacaactgccctcaacagcaccacacctataggtgcccaaacgggcggcccggcccggcccggacccggacccgttagacctgatgaataatcgggtcatgcccggctggcccgcgtgtcgcagtcgcggcacagccacgacacgccgatctggtagtcgtgtcgggctggctcgttaactaccacattttcccattaaatcaagaaaaatagcaaaaaactgtgtgtgagtgagaatttaacccacgacctccctctacaaagagaaaacactaaataaaggagactaaccagtagaactctagtgcatttattgtaaatagcaaatatagaatgtagatatatatatatatta

SEQ ID NO: 45526 - DNA, 769 bp, Arabidopsis thaliana landsberg
ctcccaataatgatgcgatataaatgatagtataaaccaaaatctttttacttttacactttcctatctctaacataatggcttgttaatttcccccattcaaataacacctaagtattattttacctggtttttactttttaacacaatttaattgcaaacaagtagtgtgttttattagtttaaactttaaagtctttagactagagagaggaagtggcaataatactaatccggttcagtcactaaaccagtgtacaatatatggttggtcctacaaatgataatttttgataaacctaaaaaaaatggtgtattatatatcacctgaggatagggatacaagtttcttttagggtggaaatccttatatataagtgtagggactactcaccaaaatcaaacaactcacttcaatttgtaacggtttaaactcggtacaatatgcggattttgattcggtataatgacattaaaacaccactttaacaaaaaccactagacaaatattagtcatttcggttcagtttcgtttaaaaattacgaattttcgtataattgagtttattattccgtttggtttaaaagaaaccatacaaaacaaaacaaaccaaactaaaccaaattggttatgtttcaaagattctttctaagtctctcaataaaatgttatttgttttgtaatgtcaagaaaaccaaaagaattgcagaaaaagagtgaatagtgtataagaggctgatcacacaagagccacacacccattaagta

SEQ ID NO: 45527 - DNA, 738 bp, Arabidopsis thaliana landsberg
gtaaccggagactcggctttagccggtaaagttgaaaactttccggtcattgaaacagcagcaccgatgagaatcgctgatttggcaaaagatttaaacttttctggaaaacaataaccagaactattctgattcgagctagctctgatacgaatagaaagaagatcgcgacggggaatcagaggtccggtgaccggagtcgctttaacggcgacgaaagaagaaaccaatgaagaagaagctgagagagacgaaatcatgtcttcctcagagcttcagagagagtatcaaaggttgcagaagcacaatcaaaatcaaaagagacgatgaacaaacaaagcactaagccatggcgatatatcagacacgcgtagcttgtgtgaagtatatttgggcttggtttttatattatgggcctttaaataattgggtctttggccttttagttttcttaaggcagatctccggcgaaactttagactgagatacggaagaatcagatcaacgcatgcgaccaagtaaatcaaaatcgggttgaagaagaaagagataagctttcacatcagtaagttgataaattcatgttttggttttgaaatcagtatcatcttctctgaatcaactgtttatccgtattaatcattaaatttcctgagttagggatttcatcgataattaaatgggttgtgatgattcatcagatttttgaaggcgcgaaatggggaatacttcatcgat

SEQ ID NO: 45528 - DNA, 228 bp, Arabidopsis thaliana landsberg
tgatcaaactaatcatattttttaccaccgtagattttgtatgtgtcacacactgactgcaataaacaaataaacaaaaaaggtttccctaaataaggaaacgaggactttgttcctatattgatctaaatttccaagtatccaattagatctcaacgcgtttagattggatcgaattatatcacaaagttatttaaaaaaattatactctgaatttatcgcaaatat

SEQ ID NO: 45529 - DNA, 984 bp, Arabidopsis thaliana landsberg
agttggacactgtattggggccaacatcagatgggtaagtagttaggttgttccaaagttgaaccccctcactgattgacgggtatcttgattagtagatggtggcataaagtggaagacatattaaattgattacaattgatgtatgtctactttttctttggttaataacaatgaatcagaatagatattaatttgtagttttgtattaatgaattagatattcacattggaaataacatgctacgaaaaacgtttcatctatttcacaagaatgattgaaactgcaaaatcgtttaaaaatcgtccaacaattaaaccaaagagtattttgcttgctctctctatactagtattttctaaattcagaatccattttgttgttattggatatagttactctattatattgcatctgttatacgtcattgtcccttggtctgacaccacaccaccttcccccacactcatcggttagaatctaggatagcaccaaaattttgtggaccgtttcaatatagttttgttcagactagacggaagtgcttttgtttttatttagcggtttttggcaagagacattaagagtttcgtttgtttgagtcgagtccatatgaccataaaagaagatcaagctcacgaatcaaatccttaaaccgattatacttttttgtaaatgatacaactaaccgcaaccgggctcacaacaatatgatgaaatcggatcggactagacttggacattaaaaggtcaggaccgatcgaatccgtgtgaccctattccttgaattcaattttctctggatgttattatgagttatgaccttttccagattagacaattaattttagatattttgatcctataggattagtatacatagagttgatttgtgggttttgttttagagtacgagtaatatcgttgttaatttggcttaaaataaccttattattcggatagagtttggtgacccagtgata

SEQ ID NO: 45530 - DNA, 537 bp, Arabidopsis thaliana landsberg
ggtccagcagcccgtgctcgtcctgcggccagacttttacttgctcgtcgccctcgagctcgtcgggggaggggatcgaggagcgtgagcggccgccgtacaacagctgccagtccgcgccgcgggccttcgcctcccgcaccattgccaggatcggcgtgatgccgatgccgccggcgatgaactggtagcgcggcgcgtccgccagctcgaagtggttgcgcggaccgcggacctgcagggtcgcgccctcggccagctggtcgtggacgaagctggagccgccgcggccgtcgcgctcgagcagcacggtgacggtccactcctcggggcgggcggggtcgccgcacagggagtactgtcgggtcaggccctccccgagcagcaggtcaacgtgcgcgcctggctgccaggtgggcagcggctgcccgtccgccgaggcgagggttagcttgacgaccccctccgtggcggttcgacgccgcgcgaccgttacgttgtggagctcggtgccggggcgagccgggcggtgggtgc

SEQ ID NO: 45531 - DNA, 765 bp, Arabidopsis thaliana landsberg
  unsure (1)..(765): unsure at all n locations
tagattccctaaaacaaaacaatccacaacttcaattttgtattttcatttatcattttgcaaatgtggatatatgggcgttgattgaaaagtgaaatggtaaaatatgatataattttgatcaggtaggaaagttatggtgataatatcttgtccaaaaataaaacattgtaaagtatatttaaaggaaagggcccttgtataaagcttgaccacatcatatttttggtgtgctttataattaaaattttaaataaaattggattgtgtctaatgagatttgaaacttaattgagggtaaaatagttctggaaaataaaaaagtgcaaagcaatgaaaaaacaatataattatggggttttaatataaaaaaaacatgtgttaaaacttatgttttgagttgattttcgtattttatacacacaagatatttagaggaaaaaaaacaaaagagatatataggttcctcaagtcaaataacgataaccacaactttgatgaacgagatactctcttcttaaaacctcatccacccaaacacaaatgtcttgtaatccttctcttatctttctccttgngattcctttttatattcctctgatattttctctcagtttgatctcatttgctctgcaatggcgactaccatgaatgctgctgtttctctcacatcttcaaactcttcttcttttcccgctacaagttgtgccattgctcctgaaaggatcaggtttactaaggtactttataagcttttctcaactg

SEQ ID NO: 45532 - DNA, 354 bp, Arabidopsis thaliana landsberg
gaccgcagaagaaaacagcagaggcaactgcatctgcctcaggaaaacggggtagggatacaggaagcacggggaaggacaataaacagccaaagaaaagaatcagaaaatgacaattcaaaacatgtttgcccctttagtggcatttcttaagagctcaagttattgtatatgctttggagttttttttttaatcttaattctaacattagaagtcctattctcatagttatggattagagaaagtgtattttggcttgctgtcatcagtaatattcattccttcttttctgttaaattttgctcatttcaccattttcgagtccctgcaaagctagagctacaagtgcaata

SEQ ID NO: 45533 - DNA, 915 bp, Arabidopsis thaliana landsberg
tgaaaactacagttgctttcaatctttaactttaaagtaaaggctaaaataaacagtatttttgtctatatcttcaagacaaagaaaacagtaaactccattaatgtatttatcatgaaaatttcatgtaactcatctaaagaaataaagtgtaattagatcaatcaatgtgattttttaaagcagaaatttaagggtgtttactatttaagttacatcataattttttttataatcaaaattgtagattaataagccgaaataactcaaatggaataagtaataactcaaatcaagattattattcaccctaatcctaaaatcaaggatgttttatttcttgatcgagaaaatcttgacccggctcgataatctaatcaatcccaaattaattaataaataatctaaattaaaagaaaaaaaacctaacctttcacacttctctaccatatgatctggatcggtggtgccaaaggcgttaataagctggccaaagattagagtcatgaacggctgagtaaggccgttacccgcggcggcaatagtcccgacggtcatcaaaactacgtcggttttgtcggcgaacgaaaagagtttgaaaaacgacactttctgatttccaccatcattcttcttcgaagatttctcctccattgtttcttttctttcctcctcttttttcatagttatcctagggaaaaaaaagttaggtaatataaaaactttcacgggatctataaggaaggagatggaaataaaaatagagaaggctttatatataagggaaggttattgcgtagcaagagatatcaaaatttgatacgcgttcttgaaaaataacaaattggtaacaaaataaaatccagactgtaaaattatgagaatcttaagagagtttctagaaggaccaaaaga

SEQ ID NO: 45534 - DNA, 396 bp, Arabidopsis thaliana landsberg
gtccaatacatctcctctctacccaaaagcttataaattttctcattcaaattcgaattcgaagagattttcctctgtgcgtgcttcgtttcctgtttctgataacaagcttaaatttgaatacacaccatggctgatcgttggacttgttaaccctggattaaagtattacggaactaggcataacgtataaatttcactcttttacattcaatttttgatgtttatgaatcaaagttctcttcttttttgtgattcttgatctgtttttgttatgtctagattggttttgagatgattgatcatatagctcgagcaacggatatttctatgaacacaattcagttcaaggctttagttgggataagttctcttctcaccaatttcttgcttttg

SEQ ID NO: 45535 - DNA, 514 bp, Arabidopsis thaliana landsberg
atatatgaccagctaggggtttgttctaactacaaacaacacaaaatgatcactgttaaccacatgtattatgagggattgaatagtgatgatgacataatgataagagtagtacaaatctatgaattacatattatggcttggaatcctaaatattaatcagaaaactaaacaagaaaaacgtagtatgaaaattgaaatggttcttggtcatagaaacagacaataagttaaaataaaagttggaaaagaaaacgtaaaataaaagcaccaccgcttgaaccaaccattaacagaaaacctcccgagtaatagattaaaaaagtataatattagtacgagaatttttttgctgcttatacatagtataacaaagtgcatgatcacatatgtattctattatatacctacttatgggttatggccactgtttaactataaaacacatggatactgttatacagtataaccccccctcccccctaccaatattaatacaaattgttattgaact

SEQ ID NO: 45536 - DNA, 613 bp, Arabidopsis thaliana landsberg
caaagaccgctcgtactcacatctcccatcttctccgatatccataatttttccttctttcaatctccaatttacattgggttggggaattgatttatagagataacagaaatggctattaaacgttgttttctgctacttcgtcagctccaataagagagagagattctgtagttttcttccattgctctctgttcgagattatctgaccaaagtaatcttcctatacaaaatattggattaaatataatcaaaattgtggatctttgggaaacataagcttgaatgaaacacacatgccagcctttttctgcttctggttcgctttaacttcacgttttcccgctctgtcttcatatagaatcaacaaggtacttaatttctatcaacacccattatctctttctcaggaaagtttaaatcttttttattttccaagtgttcttaattgtccttatacttatacatgtaactgtatctgtcctttctttttacttctgcttcgttttcttttatgttttatcttgatgggtctctcttttctctctcttgggtttatatcacctagagtggagagaaagcaaacgtttgagacagacatagagagagagag

SEQ ID NO: 45537 - DNA, 802 bp, Arabidopsis thaliana landsberg
cataagggctagttcatacaactgatctctgtaaacatttttcaatcttttaactctataacgaattaacgaaaatattgcgataaacaatattcactgaacaacaagaacatacagattattataaaaaaaatgtaataacatgttatagatgaaatacttgtagctataaaattctaaaaccctaaataacaactgtgaaagcactttaaatcattaccaacagaaatctccactacagtcttaattactagtttttagagtatatgaataatgcactaaatatatggcaagaataattagaaagaataacaatctatttttaattttcaaaacttttttatttgcaaaaagaaaagaaaaaaatacatagtcaattacctaatttaatctccccatactaccaatctaccgacctcaccatttttattgaatttctacttgtatacactttgtaaatatagattagatgatcaaactcgttagtccaatgttgagacttaaaatgtgtaataccaatctacgtacctagtgttctacaatatttaacattttaatagaaatgtatatatcttcatttcagaataattattctgaaaatgtcaaattaatatgtaaatcatatatataaatacttaaggataacattatgggattcattttgcattcaatcatataacaataattaatggtctatatagaagaaaatgggtaaatgaagatcaacatcacatataacagttgttgacatccttaggatactcacaacgaaagagaccttatttgtccatatatgtgaact

SEQ ID NO: 45538 - DNA, 539 bp, Arabidopsis thaliana landsberg
  unsure (1)..(539): unsure at all n locations
ggacatgaacaggttgacacgcccgaggtcgaggatatagccggcgaaggtggtggccagcccggtcagcgaaatgacgccgatgatcaccccgaccagcgcgcaggcgataccgaccggcacggtatgccgtgcaccttcggccagtgccatgacgcaggcccgcagcgtcgcgcggccaccctggacgaaccagcaggccagcgccagtgccgcgatgaccagcaagatgacgccgatccccatgcggaagaagcccgaacacagcagtcccagcgcgatccagaacgccgcgcgcaaccagccttggttggcacgcaggatgatcgccgagccgagaatcacgatggcggtcaacgccaagccaaccatgcccgagtacagcggggtccgccccgagaacagcagggcgaccaggaccaacaggcggatcagcaagaaccagcgctggcgcagtgcggcccaagcgcatgggcactggtcgcggngtaggccatggagctggctgcgacgtgccttaggtgcaccatccattcacc

SEQ ID NO: 45539 - DNA, 223 bp, Arabidopsis thaliana landsberg
caattaattagcatagaaactgtttatagaattaaattaaccgacccgagcgaaccagctccgaagacccgacccgaaacttgacaacacgagagatctaaagaccccaccaagtcacgtctaagccactaaacttctttcttgtctctctgcaaaaaaatccttgggaacaccaaacgacatcaaaacgctgtcatttcatctcctctcagatccttaaatt

SEQ ID NO: 45540 - DNA, 540 bp, Arabidopsis thaliana landsberg
ctccccgctttctaaaaccctaaaaaattctgttgaaccccaaacatttaagtttatctttctttttcattgttcgggctcagggcacagatattgcttaaacctaattgtctcagttcttttaaaaacagtcatctctcacaaaactctcttaaccctcttcatatgctttgagaaaaaatgtcaaagataaagcctttgagtaaatcatcgcaggacttgagtcttctcacatctgatatcgcatcattcgcttcttctattggcttagcttctgctcttccttcttcgggtttcaacgacactgatttccgaaaaccagctaaatccaaaacccagaaacggaaaaagcctaataaggatcagcaacacatggatgaagatgaagaaggagagccaaaatcgaacattgggaatgaaaagggaaaagattttggagcgaggaagcaaaacaaagatgcaccggtgaagcaaacgttacaaccgaagccaaagcctggattcttatcgattgatgatgagagtactgggtacaagaaa

SEQ ID NO: 45541 - DNA, 295 bp, Arabidopsis thaliana landsberg
tctaagggcgaggaagcatgacctgggttttcaacaaactgcatgaggccactctggccatgagcagactctctatcctcaggctcccagtaattttgagttacttcctctcagccatctgacttatatgtgaggcacaactgcacaaaaatagcaattcttgacgcttttataaacacatctacagagaatgttcccattattgccttaatatagcaatctgagataatcaggtctggaaacataccacgttttataggtaaggaaaccaagcataagtgatctaaaaactaac

SEQ ID NO: 45542 - DNA, 228 bp, Arabidopsis thaliana landsberg
cactggatcaaaccaagggaatatgcagccatctgtttcacctttgtccaaagcccttgtcctatctcaatcccttgaacctccacaactattgacccatctcccaaaacgcttactcttcccggtgttgatcgcatgttcactgcataaaccgcaggcacacgtgaaatcgctctctttctccacttgtttgatgcattaaactcctcaaccaccttcctccgcttg

SEQ ID NO: 45543 - DNA, 547 bp, Arabidopsis thaliana landsberg
cattgccactactgtctacgtgtgggcaagcttataaaaccttatttactaattttattctcactttagtgatctgcctgaagcttcgatgaaacttaaaaacctagtgttaaatatatgaatagtggttccaattttgtaatcgaaaaagaaattgtaattgtttgtcgtacacactaactaaggaagaagtcggtaatagaatacgcgtaaagaggcgcgtggagaagaggaatcttcaaagaaacataaactagaaacgtggactcttcacaccttcacaataagcaaatgtctaaaaagggcaaaagtgttttgcttttctgttatgtaatgtaatggaagatttaatggaagcctgtaagtggaaaaaaaacaaagcttatggagtttaatggcaatgtcaagtggcttaagcttcatttgtatgagtggatataagagtgacaagcctaggatcatcaattagatgtgtgtgggggaccttgagagaaggacacacacacgcatgtgactatgtgaccccaacaactaattacgtgtgtaa

SEQ ID NO: 45544 - DNA, 469 bp, Arabidopsis thaliana landsberg
gataaccgacaaccccatacacggcgcctctctttccgcctgctatcagcatgcttctgccgtctgaccggatgatgtattcttccgtgccgaaatccgtggatttgagaccctttacaatgcgcgaaggaacgccatccaagcctacataaatgagcttcgcgtcgtcagtcacctgatcagtgatatccatcatgcagccgctgatcctgaacagatatttctgcagttcagcagctgcatatttttcctgttcactcgcttttgatgaaacgaatatcctgtaatcactgcgcccatccttcaccaggccgttcctttgcgagcaggacgatgcgagcacagtcgtaaaaataatcaacaggccgtaagcgggtcattcctttattaaatctggtcggacaataatttttctgtttgccggcgatgccattattgatgcatcgccgaaaatgtaaaaccatgtttt

SEQ ID NO: 45545 - DNA, 738 bp, Arabidopsis thaliana landsberg
ggttggaaagcactattcaatagattctcgtaagggattagtaaaccctcaaagcatggtttcataaaacagtcttgccattgtcacataaatagccacaaacacaatctatgaatccatcaatgagctaaaaggatcataaaaacaatccaaaatcttctaacaatacacagaagctgaaactccaaattaggactacctcgagacattgtagccatttatcgcttttaccaagctcttcaaagagtaagaaacaatggtcacatcttacgaccttcacgtacttatcaagcgtcttcaccaatggctctctgtcactaatcctcgacataagactccgaaccagcactctagggtctctctgggcactctctctctcagcaagtttcctccttgacgaaatcgcaccgcaagttatcctcgtcctcgtcgacctcctcgcatcgccgagatttactgagaagcgaagccatttgtgatcggtttctttgggaatcgaagagatgaaatcggagaatctcagtgacgaaggtgatgtcaacaagtagtccattgacgaaaagtttttttcttttcctaatcctttaatggcggataaggtttttacagttgcaaccaaaaaagttttgagggtacattcagtgaagcagcaaacaagttgggccgctttgtaaatacagcaaaacaattgggccgcttctataaatacaggaataaaaaagttaaggatcaaatttt

SEQ ID NO: 45546 - DNA, 1184 bp, Arabidopsis thaliana landsberg
caaaatccaaattttgaaaaaagaattatcgaaactacttagatttatctagtactatttattcttaatatatcatttgtttacaattttactaaatataaaagtgaccttaattataaaataatttgtgaaataaattgtgtttttgataaataatttactaaaatagggaattattttattttaaaatagatactagtagcgctatccttctttattttattgtatttacttcctttttctgtaaaatcaattcttactttttcacaaatgtccctattttcagcctaactcttttgtaaatgtttttctctcttgccttttcttgacctaccaatatcctttctaagaaaattttaaaaagagaaagtggtcatctgaagtttcatagaaatgtgaatgattatttcttgtatcatcattttattaactgaatgaaattcaaacaacagaacatggtcctagattgcattttattttggtgtatcgtaaattgattccatcggaaaggaaacaaactaacaaagattgtttttgatattttggtatgtttttttacttttttactttttgacaactttgatagtacattattctagatttgccgcacggcacatcacatggaaggatgatgaaaatagaaatatatcccaacttggggaatgttttgaccaatgggcaaccttatcttgttcatcaaatcataatacaatcttttctctctcttattgctgttggttaaacaataatcaaataaattacccaacatggcaacttaagtgaatacccatagattcgctatttctgcggccgacgtatgagcaaacccgtgaattaaaaaaacaacttgtacatcgaaatactattttaaacaacatttcactaaccttggccaatatattaaaactacgttaacttgttgtatatttataataattgtaatgttgttgaacattgagaagcaagaaaagtagaaaactgcgaaattgagtgagaaatgaaaagaataataataatggtgatggtaactaattatagaagagcatataatttgcgacccatgttgtctatgagcgaaataatttttgattttataactattaaatttaacatgaaaaaggtgtatagtatcaaatctaaatctaaatgagtatatgtgattttgggggaaaacacacaccatt

SEQ ID NO: 45547 - DNA, 593 bp, Arabidopsis thaliana landsberg
tatttattattaattaaaaaagaaaaataacgaaaataaaatgataatttaaataaatcaagatattagctaagagatgtgaccaacgagtctttaattgcgcatacacttggagatgctcctaaagatagttcaataataatcaaatgaactcctattcctgattccaatactaaattaagaagaaacaaaacagaacattagtatgcaattaaagaggtagactagatcagattatttatagagataatgtagcatacgataaaaacaaagaaggttatatgtaaatgtgaagtttctattatttatcaaatagtttagatattacctcttgtcttaagatatataattcgatcaagccatctaaaatgataaattctacctcttgttcatgacacattatgatattcctacatcaatatctttcaacacatgctccatttttcaacttttaaaagccacatgtgacaaaaagaatgtaatggttctaatgcaacggttctttttatcttcaagtaggtgtctaatcaaagagagataatgatatatcagctactggttatgaaactgttgcaacaaatcagaactgaaat

SEQ ID NO: 45548 - DNA, 228 bp, Arabidopsis thaliana landsberg
ttgttaaaatatactattgtaggattaaaaaaaatcacctgtctcttagatagttgtggacgacaaacaagtgttgctccgtcatgatcggtcatgcacgatcaaactctttgtttattttgttttccagcaaaaaaaattatatagaaaattacaaagatgaatttcgaaacgattatagcaaagaaccttcatagtttcgtaacgttaattctatcatttaatttg

SEQ ID NO: 45549 - DNA, 205 bp, Arabidopsis thaliana landsberg
tacaaattaactaaatccaattttgaatatacgtatatttttccatatacaggaacagttccgttgacaagttgagacaacctcgaagtaatgcaaacactttaaggccggatccgattcgtgacccgaatagtttccggattcggagcccaggtgttgtttctgtcttcggttcattgggaaggatgagtacattgttaccatt

SEQ ID NO: 45550 - DNA, 606 bp, Arabidopsis thaliana landsberg
aaaacccatcaattaagattataatgtttattaaaatgtcgaaaatttataattttaaaaattattaacccgaacctaaaattttataaattttggaaattgtttgttttaactgaatttttgaattgaaattaatatccctcaaaaaaaattgggttaatgcaaggcccatacttggttcaagaaaatctccggtggaatttttagataaattctcccaagaatccaaaataaatacaatttttgtgattcttatagtatatgtcaatatgaaaaaattaagggaatatagctttaaaattctttatttaataaaaaaatattccattaatatccatatgtttttagatattgtttcattcttttagaagtagatcacttcacaaataaacactaagcttttttaaaaagtgttattccattaatatccatatctttgatgttggtttcgtcaaatgatccaccttcattttttcttagactaccatagaggtaaatttgttttcattaggcaacgaatgttcaattattatctatatgtttttagaaaattaatgtttcagtcttttacaaatagatcacttcacaaataaagatcggactttc

SEQ ID NO: 45551 - DNA, 207 bp, Arabidopsis thaliana landsberg
gagaataacaacaagagcatttcatcaaccggagacgccgacggagcatttatcggaaagacgagatcgagagttattcacggagtagtaactcggaggaactcactgagtcatcatctctccccaccgtcagatccagagttccgagagtccctaaaccaccgccgaaacggtctatttcattaggtgattccacggagaacagag

SEQ ID NO: 45552 - DNA, 619 bp, Arabidopsis thaliana landsberg
gaacagaatggaataatgaagaaaaagaaagataactaggatcttgcgataaaaaggcaaaaacattctatcaacatgctagctatatcaccaatttcctttacttttgagatatttgatcacttgatcctactataatttatgagattttattttaaggcaaatggataaattgtgtagtttttcacacacaaaaaaataaaaaataattgtgtagttcttaattgatacgagttcttttcactctatggtaattcgacaactaaatgaaagcaattgagtagttgtcctttaatgtttgagactttattgttttagcgcttaggtttcgccgcgtattgaacggcatcgtggacgatgggattgtgagtaatagtgagtgggacaaggcaacccacataagtttcatatggtagattctgacatatttaatcgttttatttattagactttgggaagcagttgaatgattgattgatatgtgggatatatatgggccatatggctcaacgattgagtttttttttctttctcttatgtattctgacatgtatgtgtgttattactactaaagatagttgtaattgctacattcgttgattgtctttctatggtagta

SEQ ID NO: 45553 - DNA, 879 bp, Arabidopsis thaliana landsberg
ataattaaaaaacggcaaaaaaggaatttatttaaaaaagaaaagagggggccaaaggaaggcacaggtgtatgtaaagttgtgtatggttgaatggttaaagaaagcacctgagctgtttagacaagactcatggaaagaacaacttttaatgcttttttatcattcattattatgaacgccttcctaaaaccaaagaagtatggacatcttctttatcaattcgtatattttcatgtcgctacaaaagtcaacttcacatgcatgatgcacatatgctaaacaatgctaacatatatagcttatgtaataaatgtgttttgtgaattgtgataaaaagaaatccactagctattgtattaattagttttagaaatttggtgttagttttctcaagtaaatcaattgccaaactgtccgatgattggttttgggacaagtgatgtatatattaattccatctagacattatatatttcatgaaaatcatcaggaatttttcgaagaatttgtgatctatagttgctaacgataaggaagcctactaacacgagggttgcaaaagctttttctatgcatttttgggttttgttatctaatcattgatacatcgatcaatgaatttaagttttgtaatagtaatagaaatatttaagaaaacttgatttgactatcaaagcatatctaaaacaattaacatcaatttagaactgaaatcctaaagaaaacaaatatgtgatttctagtttattatcttgtaaaaaaaagctactcttataagtaacgttttgacccaaaataaagtaaagtttcgacattttgcatatacattaagaaactaaataaatatactatgatccccttcgaaacatgtcattc

SEQ ID NO: 45554 - DNA, 619 bp, Arabidopsis thaliana landsberg
  unsure (1)..(619): unsure at all n locations
tctatatagtgaaaaatcaaaagattatgtatatgtataagggttaatacataacatttataaaatgaacaattaaatttgatatatatataatattaatcaattttttcaaaaaatagttaattttatcttttagaatttgttttgtaatcttcaagatctttattaaaagattttatgaaaaataaaataaaataattactacttcaattaattattttgaaatacaattatatttattcctattttactttcttttagttattagtaagggtattgtgtataataaactacaagtaaaagatatttttctaatgatgaaaatatgcctttttccgtcaaagttctaccctttcccacctcanttaatggtcttgttcttctngtaaattttgtttataatatgaggctccataattttcgtatataacgtttccataataagttaagtcaaacatttatatttactttatctaataacttaccgaaacanaatatatgctattcctattattgattttctcttcttgacatcataatatatatgtatgtatataataagttaagtcaaacatttatatttactntatctaataccttaccccananaaatatatgc

SEQ ID NO: 45555 - DNA, 775 bp, Arabidopsis thaliana landsberg
  unsure (1)..(775): unsure at all n locations
tttattattcctcaagtacttaccaccatcgtgtcccatatcaagtgcatccgttcctcaaggcttaaacatatggacaagttcaaaagtatttacaggttagcaggggcagtgagcacagaaagcaagaaaccagtcaagtcagctattaccattaacaccattaggtattgtgcggaaatcatcaagtcctagagctttttgtgtagaattgaaagtgcagtgatcagttcctacaagctgcagagattatcccaataaaaggagaaaaaggtgtttagaagatcttaacattttgatgctacaggtcatgcaattctctagtttatgcacagcgaggaaagaaacctgaaggattcctgtggaaagggcatcttgtagggctttcccatgtcctactggtctgataggtggactcatgacatacctgaaatattgagaaaaactttgaaaatctgaaagaataaatgggaatcatttgattaacagaactgaaggatttattacttggacgcaattgtgaagtcaggatcccaaagccaatgatcatcaaggattaatccagacacaacaggctctccaataaccttctgtcctgaaatacataacaaataaacttttcatatttattaagccanatactaagtaaaaatttgaaaggtacttttctacacatatgttattgcactagtggatgttcggataggagcatgatttctaacaggatactgtccatacattgagaaaagcaaaaggtagtcctacatgagttgta

SEQ ID NO: 45556 - DNA, 929 bp, Arabidopsis thaliana landsberg
caaaaaattcacaacaagtcagattttaaccgagaaaagaaacgccagctacttaagtttgaacaggctgggagttttgcaaaaccaatcctttttttaaacctctagcgctcaatacccttactgagaaaattccaaaaataattcagaaacctgtttaccatgcagcgtctcgagaactttaacagcttcctctgtttgataaccctcattggcatccaaaatgaaggatcacgttgggtggactgcacgtctagcctggagaactggtatgtcagtcttaagattcttccccaccttgagcttcaaggtttcaaaacctcgttttctatactgtagagccaaaattgatgcttcctggggagcaactatcggaatctgaaaaccacaaacatcttttagacccacatctttgaaaatcacacaaactttcatacttgagtgatactcaaattccagtgctttcaagccattaacattctacaattccatcttcaaaaactacgcatgcagtgttcacacatataatctaagtaatactcatagttacttcactgtttgtttgcaaacatacagaacatgaatcgaaaattgtaccaggaagagctaaggttagaaccgaactgttatatcggtagtaatggtacttgaagctccaccaaatagtttccacaaaggtactcctacgctcttagctgcagcatcaatcatagccatctccatcccagctcttacctaaacccatttcacaactttcttattttcttccttgagagaaagatcaaagccaatgtaagcctaaaatttgaactttaactcaaaatcacaactttagcatcaactacacaagatgtgagactaacagaagcaaactgatgaccaggaagaaatcttccgatctcctgaagaacactcccgagatacatctc

SEQ ID NO: 45557 - DNA, 606 bp, Arabidopsis thaliana landsberg
agttattatcctctgtgtgttctaattctgtaggcttattttggtatgcttggtttgtgttacaggtcttctcaataagatggcagaatccaatgtagaatcaataactgcagaacttgccacaatctatcgtgtaagctcaaatatcttgagattattataatcatcctagatttcattcttaaagttgcttcaactccattttgttattgtttacatgttacttttacatcttgtaaccctgtaacatttgttaatgcagtctgttgcgagaagtgtgtcctctcagattttctgtgaagaggttttgacaacttatgcgagaggcaatgaacagttaagatctgtacaactttctgattgtccgctcatgttaatgctagccctatagtcatgtgtggaactacatgactacattgacgcccttattagtcaatatattgctgaacattattttttccttgtaaaggtacgctgtatttgcttctttcatagccggcatggcgtgtctagttggaatggattttagtgcaaagctaattgcatcacttgcttaatctttcgaggtatgtccctgagtttttcctacatgaattgtaagctaaa

SEQ ID NO: 45558 - DNA, 398 bp, Arabidopsis thaliana landsberg
atggtattaaaaaagaaaacggacacacacacacacacacaaatctgaaatctctctcgtccgccaaaggtcgagttttgagagcgagttcttacttgtgatgtggttttgtctcgtccacccaaagaaaatcaacacaaaaaaaaaaagggatcgattcacaaacttataaacttcttgtcttttttattttttatttttctgaaaatttgccatacacacacccaatctctctctcgtgagccaaaaagaaaaaaacttaacattggactctcactttccgaagattcttctctttggactctcacattgtgaaacttattattagccgtctttttttggcgtggggttgcctaaaagttgccgcacttgtggattttggtccgagaaatgatgat

SEQ ID NO: 45559 - DNA, 622 bp, Arabidopsis thaliana landsberg
cataaaaggtcgcatgcaatagacataacctcttttcccttatcagagaaaaggtaataaagaaagtgatgggagagagaagcatgaagagaaggagagaacaacctacatcagttacctgatctccccttgcacgaatcaaggaaacatcaggaatatattcttggagagaggatggctgatgcggcttttccacattcccagaaccaccttcaacttcaacaccttccccctccgctatgtttccagaagcagcaaagattccatcaacattagatgcatcgtcatgtgtaactcccttctcagaatctgcagggtcagatatcaaagaatccactgtgccagccactccactgttgatagacttcacattctcttcttcagtggataaagatttactgatatcattttcagaattaactacttcttttctcgcttcagatccatcattagaagtggtgtgtcctggctgaagcgcatcaggctctgatgaggaaccatggactgaaacatattcgtgagcttttgtatctaagccgtttgtgcagaatcgacaacctcccaacaacattcacatagatgtagctcctcctcagtcacaggggatggagcttgtgcctgt

SEQ ID NO: 45560 - DNA, 1683 bp, Arabidopsis thaliana landsberg
taaaaggctttcccccgttgaagccccgtgaagcgttgcgttttggacaatcgttgattcgttgagttttaagggatcgacaagtcgtcggtattcagctttttgcttattcaattttttattttttcagtaagtgatgatatcaatgaatatcaaaggtctacacaaacaaacaaaaatatcgtttatagtagaattgtttttaagatgctatggtttacttattttgtatacctagttataatcatctatagatatgccatctttagtatatatcaatcatattgttgatcaaaataaccgctaaaacgtttggttttgttctagagattatctataatttaaacataaaatcataactaaaaacattaagcaaacactttgaagtcattaaaaatataattaacatgcagttcataccaaccaagtttcgaactagtaaatactgacatgcaatccgtttaactttcttgattactatcgcggttttgtgggaaacaacaaacgttaacccgcacatccatgtggtactgacatgcaatccgtttagattctatattacatactacaacaaatcatacattgatacacgcatactgactttttttttccccaaccttaacttttcatatacatatgataattatccaacatatgtcgattcatagtcttgtcacatgcatcatataagtacgtcatttaattcatgcagtgataaacacccacaaaaccaagctttttaaaatacgaatcgtaaaataggcatcacacacacacacatatatatacatcaaatcaaagagaattcacgatatataaacaccaaacctaagtcctaacatacaagaaataatactatctacttcacttcaacgtacgactacaaataaaataacaatcgtacgtgattgaagactggtgtcaatccgatcattggtgtgtatgaggattcttttgacatacaaaagaatactcgatcattggtatgcataaggattctttttctaatacgaagaaaatttccaaatttcattttcttgttaactttttcttcaaaccccactttttatggcattcgaacccgaagtcatagcttatgggtggtggagtcgagccactagccaaagaatttaaaatattattctttatttaaaatgtataaaatattatattttaaaaaaaaaacaaagacctgcagctgattgaccaccgtctaaagagtcactcaaagtccgctcctcaaatccaacggctgagatcgaagaatcagattctttataatttataacgtggatttgaaacccgtattccaaaacgcttaaatataccctcacgcgcccgccaccttctaccgctttatcccgtcacatacgctgcagagctctttaacctctttacactatctctcaccacttcttccggtcacaccagttaccctctcatccgttttcgttttttttttctctctttcaaaaatctctcagctgaggttgatcgatcttcttcttcttcttcctcactctttagatttgttccttttgcattttacacttttggatctgaaaatgtggttctctgtttcgcccgttaccgtttagattcagttctgttttttttcttacccgatcgcttgattcggactgtgatctttggtaagctttacgtattagatttgctgaagaa

SEQ ID NO: 45561 - DNA, 470 bp, Arabidopsis thaliana landsberg
gagggcgagacgagcaggtaagcccgcccgggattcataaccggagtccgtctgcggagcaggcgatgagggcgtcgggcagggccgggtgcggacggctcggggcgttcggctatgtccagggtgttgactgtccggttttactcttcgtagagccgatcgaggccgacgaggaggatctgcgggtcaccggcggccgccgtgcggagttcctcggtgaagcccgcgccgctgtagcaggcaaggaccgtctcggtggtgtggtgacccttgacggagagcaggtcgcgggcgcggcggagccggtcgaggtggggcaggccgatgacttcgccccacttggcctccccgagcgagagcacgcgtttcggcgtgtcaggcgtgccggcggagagcgctgcgacgtcaacctggatctgggtcctgcgggccgggtcgcttatctctgtggcccgtacctgggaggggaa

SEQ ID NO: 45562 - DNA, 579 bp, Arabidopsis thaliana landsberg
aagatcgtttgtcttctctggcgccgcgccatcgccctccaggaggagctgtttagttcgctcccaaccttgcgaacgttcgatcttgttatccttgagaacacgccgcgcgatagtccacggcattctctcttccatgcgctgaactacttcagaaaagtcgaccactgcgtcccctcaatgcaactctgtattgttgttgctaaacgaattcaggcgccgggaaaaggggcaacatcggccgttggcgtcggaatgtcaaagcccgtcctgcggacgggtccacgcgacctgaaggtcgaaaaggtcgggctgcgcccgtcaacttgtcttgattcgaatgaaagcatgccggcccttcgccagcgagaggacacgcttgttccggcatgcattcgcatcaaggaaagcggtatccgcctagtcggcggatgcttcagtagggtaaaaaaagaatagttgaaaacgacgacatcaaggatgtctacggcgaagccaagggcatgggcttcgataccaagatcctcaagaaggtcgtcgccctgcgcaagaaggacgagcaggaacgcatggaagaag

SEQ ID NO: 45563 - DNA, 1051 bp, Arabidopsis thaliana landsberg
taaacaaggatgaatcttttgacgtacgcaagttaaaagtcaagcttcgttgacttgctttcgtatgaaataaaatgaagaagaagaagaagaaaataaaggataaagggaaaaagatagccgacgtatatatgaccacatatctcaaataatacaatgtgtctgaaagaatttaatttatgtataatattcattgcattattgtcttctaaattcagtatttcccaaaatagaaaaaaatctgagttttttcccaaacaatgtaacagttttgtttttctaacctatagtatttcctcttttaaatacgtgttccggaaatcgttggatcaaaagtagatcttgtcaccactatacttctccactgaatttaatataccaaaaagtccattttcatttctttataacaaaagaaacaatattaatatctcagcatctttgggagtgtgtcatgcctttattgatcatttatatagaaatactgaaatagacaaaaaaaagcttgccaccaactaattaataattgttgttacttgttatttctattttataaaatacttgaaaattaaatgatatttaacttttgaagaatgttgttatctataaacatattacaaaatgaataataaatatgatttcatcattagatatagaatgtaaaacgagctaggcactcttcctaagtattattattactatatcataatcatatttattagggctattcatgatcctaaactaaaactaatccgtgatagaaagaacttttgaaccaagaaaaacaaaacaagaagtttgattatccactgtagaatatgaatggttttaacaaaaataaaaataaaaatatgaacgaaaaaaaaaaatgaatggtctttcaaaagtacataaatgatcactaaattcgaagagacgaattacaaaatccagcatttaacactaaaattgtctaaatttgactaatgcatccctgtgatgtgtatgtacatgtgtatcaaaaggacatggtgtgaattgacttaaacatgcaactgatctgagatggatgttc

SEQ ID NO: 45564 - DNA, 562 bp, Arabidopsis thaliana landsberg
  unsure (1)..(562): unsure at all n locations
agtgcagtcttacggccgcacgcgccgcgcacgcgcaaggcatccgcgtcgacgtgcttggcatcggcacgtccgcgggtgcgccggtgccacgcgcaggtggcnnnnnnnnnnnnnnnnnncagggcattgtgctggcacgccgtgacgatgcggcgctgcgcgccgtcgcgaatgccggaggtggccgctacgcggtattgcaggcggatggcagcggcaccacggcgttcaccgcgcccgtggccgaagccgcgcaggccagtcatggcgagcatgccgagctgtggcgcgatggcggcgcctggctgttgccggtgttgctggtgttggcggccttggcgtttcgacgcggctggctgctggtgcttgccgtgctggtgttgcccgcgtggatgcctgcggcgcatgcggcgacgtggtcgtcgctgtttgccaatcgcgaccagcaggccctggcggccttgcagcagggtgacgcgcaacgcgcgcagcaactggcgacgactccggcgttgcggggcgcggtgaagtattgcgccgggaactttggcggcgcggt

SEQ ID NO: 45565 - DNA, 1385 bp, Arabidopsis thaliana landsberg
tctctctaccacctttgctcgccgctcgtgttctttccatttcgttccctctgtcctgattctgtctgctctgatgaggtgcattgttatcgcactgtttcctattgttagctggtcgagaagaatgcttatcttgaataacgtcctcttcgtgctgaaaatgtctgtgacttccagatcttgctttgctgctttcactactcctctccgtctttgactcccctccatcatcttctggcactgctgactgaggggatgtaaaactcattttaagctcctcccccatctcagcatctttgccagcttcacctcccacatcttcgcggtcaacacttgatgaccttgtgcctctgtctccaacaggagacgatgaacgaaaactctggccactatctgtgcttctagagatctcatcgtcttgctttttgagaagatttttatgtggctcatcctgcgcaggactatgttcagcagattccgtgtcaggtcttttgttgttaacataactagtctcaactggtacattttctccaggaaggctactatcagcttgatctgtgccattttcacccgagggttcatcctcatgtgaatcctgacatacaatctagcaaaaaaatcaatatcagttagtagcagtcagtatacagtatgcaaagatgcctcaccagtaaaccaaaatcaagagaaatttgaaacatgttcaacctcaatgatagcatctagatcacgcatccgaggagcacgtgtatcaatggacggaagacgttcaccagaaccagtctccacaggtattggtcttccagggggctgagagaaaacaaattcaagaaatactcttaagctttgaaaactaacaagataatgtctagcgactatgttaccattgtgatatacaatataataaaccacatattgacaatgctactttaaaatgaaagcaaaggaaggagaaatcatactagtgtcggtctaacattggctggcactttcgctgaatcaccttgaacagagtctggcttcactaaatttgaagaatcaacgggaacaccctgtgcccctgttgctgcagctaactctgggggtagatctggatcataaccctatcatttgtacaagagaatgattaggaatacattgtcaccctttggtatctgatgtagacaaatattgtccagctgcaaagaataatcagctcgtaaacaccacaatatgtgccaaaatccactttacctgatccgttctaccgctttcataaacacgtattctgctttgcatcgtagtctgtatacggtgttggtcctgtacgaaattaaaagatactcctcttagtactcttcattcgctaaaataaggatatgaaacacagttattaattaccagct

SEQ ID NO: 45566 - DNA, 1787 bp, Arabidopsis thaliana landsberg
tgtttctgcggtttctatgcctgctttgtcaccttcggtagagatgtcctctttgtgtgtggtagaacagtcatcaaatgctgagcaggatgacaaacaagagcatgcaacacacctggaagaggatgaaaacatgccaacacggcatatatcatcctctaggtgggctgctggtaatagttctccaactgatgaagttgaaatagtagaagaagttggggaaaagaaaaggaggaagaaaccatttcccgtgcaggggagatttcgcaatacctctcaaacacctgaggtcggggagttagtgagggaaggttatagatcatctgattccgatgaaagggggcaccattctttaccgggaagcagagatgattttgaggagagagatgctgttaagagtgacaagatggaaatagatgaggaggaacacagaagagaaaactctgttgacagccttagtgaaacagattcagatgacgaatatgtacggcatgagacacctgaacctgccagtactccactgagaagtataaacatgctccagggttgtagaagtgttgatgaatttgagaggttaaataagatcgatgaaggtacttatggtgttgtttatagagcaaaggataagaagacaggcgaaattgtggcattgaagaaggtgaagatggaaaaagaaagagaaggttttccattgacttctcttagggaaattaacatcctcctttcttttcatcatccatcaatagtggatgttaaagaggtggtcgtgggtagcagccttgatagcatattcatggtgatggaatacatggaacatgatcttaaagcattgatggagacaatgaagcagcgttttagtcaaagtgaagttaagtgcttaatgcttcaacttttagagggcgtcaagtatcttcacgacaactgggtgcttcatcgagatttgaaaacatctaacctgcttttaaacaatcggggtgagttgaagatatgtgactttggtttggctcggcaatatggcagcccgctcaagccttatactcatctggttgttacgctttggtacaggtaaagtgcgtttttaccctattcttgtttataaaaaaattaagtggtgtttacatttacgattgttatttgaattctggtggactttcttgtttttttttggccattgttagtataacattaggtgccacgtctcctttctggtatagctgtactacaccgtactcccttttctatttctgcacattaggatcaatgattttaaagtcctgtttttaaatggtggtccaaggtatctgatatttgttccaatggcaccacaaacttgagttttgtgactgccttggatccttatctttcctctatgagaatagtggtcataatatgccagcttagccattagatacttaacacttttgcggggtttgcttggacaccacgttccatgaaccaacggaatatgggcacattaggaaagatacgggcttcaacttccttgacttgctttgctccttgtgttgactctcccttcttgttttagcaataatcactttctccggggccaagcccaacgactgcatttgtttttccagggcacctgaacttctcttgggagcaaaacattattctacagccattgacatgtggtcactgggctgaatcatggcagaactattaatgaaggcgccattgttcaatgggtaaacggagtttgatcaacttgacaggtattttaaacatcggttttgatttggatctccagccatcctgggaccacatac

SEQ ID NO: 45567 - DNA, 856 bp, Arabidopsis thaliana landsberg
tatccagactccataaagaaacatgtgctgtttggtaaaaccttctataacacatgtataagatataaatttatgggtgttagactatattcaacaaattaaaatgtagcaaatatgtttttctataatatattagtaaattatgagaactttatgaatgcaaaacaaaaacaaaaaacttgatccagatagcaaatgcattttgatatatagtttaaacgcaatgtagaccattataagaacatattaacaaatggaattgatgaaatcatgtttgtatatataatcacaaactttaaaatgtttgaatgtatatggatataatcgtacactttaaaatgttttctgataaatatttttgttaaatctatgtgaaaccatataaaatcgtaattctctatgaaattgattagtcgaatttatatatcgcaggaatagttttcacctgacccagggtttgttatgtactcccagaccacacatttgtattcaagagagaagtaaatgcacaaaacctacctcacgaacagtattttgaattgctatgttctgcaataaatataaagtttgactgtttgtttccttttaaattggaactcacttatttcgactttactattttcacctaaccaccctcaacacctttggattaattttctcgaaaattttattataattacacaatcgtaaaattttcaagtaaaagatgctatgtaagtaagttaacagtctgataaatagtatactatattgcttttgtttgctttgcttcttattagcttcatttcttgttaattttattacttcttacttacatctatcaaatgtcatatgtattacgacaaacctcaatttc

SEQ ID NO: 45568 - DNA, 680 bp, Arabidopsis thaliana landsberg
  unsure (1)..(680): unsure at all n locations
gctgaacctttgttgttaatttttcttgcgtttctgaagaaacttatgttcacattttcaatttatccatgacttctttttatatctgatctatttttacagttccatctgataaaaactcttttggatgtgttaggatttgtttatcttcttatcttgactgaacacattattataatgcggttggtatattgccttaagcatcactgtcgataatgtgctatggcagggacatagctgaagccaaggaacaggagtacagggcttgggctcatgttcagagtttgaaatcatcccttgatgagcaaaatctggagttgcgcgttaaggcagcaaatgaagctgaagccgtttcccaacaaatgttggctgctgcggaagcagagattgctgatttaaggcagaaaatggatgattgtaaaaggtaaataagtataagtagaagtctgcaatttatagatgcaatcacgcagttcttccataggaattctttgagagttttttgtttgacaaggataagtcttttctgtttcagggatgtcgccaagcattctgatatctngaaatctaaacatgaagaacatggaacatatctttctgaaatacaggttggcttatgaaatttcgtgtttctttcgtctttacatattttaaaaaccttgatgttgcgtatcgattta

SEQ ID NO: 45569 - DNA, 1667 bp, Arabidopsis thaliana landsberg
tgtcatcaacggcaggtctgaaaggaggtttctgagttttaacagttgcgttcggtctcgccggagtctctgtagatttcttcatcgttttctctttctttttcgcccggcgaatcgaaatatcggaaatttcacttttaggggatttagtggcgattttcacacgtgacggaaccactcacgtgcattagttgggctctgaatatagtaggcccattgattggggttacaattttttatatcataaaagcccattttgttttctcttctagaactttatatacacattgacgagggtcgccgtaaaacctctgctacttctgctccagaaaaaccctaatcagcttctcgtctccataaattcagaaccaagaaacatctctgaggtaccatcttggtttgccaatttcttaatcagctttgttactttttttttttctcttgtcgtcagctctaacttgaattatctccacagagactaaacgaagatgtatcttcagtgctatatcaacgagaagggtgagaaggtttacacaactaaggtaccttcacactgttcatatcttcttcttcttcttcagtattcttaattcgtattttataacttcgttcatgtgtttctgtgattcggaaataaatctctgtttttgttcttgaggagagttaccgactttgttataggtagtttcatatacattcaattcaatagttcttgaaggttaaatttcgtagatacactgaagctttgttatgtttgcttaatcttaaaatttgctgtttgatatatcttaagctaaggaagatagaagttctttcggacacattgagtttggttttgcttgtttaatcttcattttagcagatataagttccgtttcatatacattgcgcttggttttgacaccttactattaaatttctatgtttcatctcttgtagaagttaaaaagaataagactatatgcttgcttgttgatactttttctgtgaatttggttttgcttgtggactctcaaaagtcactatttccgttaaaaaaagtgtgttgttattttatattcttactcatgaattaaactctattgtgtagaaggaatcaccgctagggctagccactgaatctgcccatccaggttagtctacccttttgagttgttttagttatgattcgtgaaagtaacaaaacctttaaaccaaatgttttgtgttgtttgcagcccggttctcccctgacgataaatactcaaagcagagagtattgttgaagaagcgatttggtctcttaccgacccaaaacgcacctctccagtactgatgaagaagcaaaccacttgcctgtgttggtttttgatgttcctttttaatttgctatgttgtctcttaatgaaatgttgacttgaaccgtctttgtaatgtcttcaaatagtgtgagttaagagcaatttttacctatcgtcgtcaagcctgccacttaaagattaatttacattaagaatttgtgagtgcccatttatgttgctttgtttcttgtcaactagaaacttcattaatggctcaagtaagaaaccataaacagagtatcatatcaaaggtaagtaaaccagagagaagatcatcaacaaaataaaaatttacacctgtaaaacctcaaattctcgaattgaaac

SEQ ID NO: 45570 - DNA, 249 bp, Arabidopsis thaliana landsberg
taaccagctgagctacgcgcctattgccggagcaatgagggcgcgcagaatacctttgcaggccatcggatgcaagaaaaacctgatcctgccggccgtttttattgggtgatgtggagatattgattgcggcgatgatcctggtcgggagcttcctggcgactgcgtgcggatgtgctggtccagcaggggataatgtggatggcgaaatggacaggaccgcgatgcttcggtttgatccggtggcgc

SEQ ID NO: 45571 - DNA, 1219 bp, Arabidopsis thaliana landsberg
gcgcttcatctaatggaagggaggaatggagatgctgtatcactacttgaacgatatctcaaagattatgcggatgattctctccacgtcaagctagctcaagtgtttgctgcaacgaatatgctacaagattctttatcacactttcaagctgcattaaggtttatgaaattctaagccagtagtgcttatagttcttgttgctcctatgcgaaacaataacgatataacagagtgtaaataatgtaaacgcagaataaatccacagaatgaggcagccaaaaagggactagatcgcttggagaaacaaatgaaggttgggaagaatcaaatcgaaccattttattatgaagctcgaacaaggatgatgtttagtgtattcacaaaattggggtgtttgttgcagggaatagacccagatgcaacagatgagaatgacgagaacgatgttgaagatgttgatggagacaccgaagaagctgagctcatgtgaagagtagagagacagaagagtgtgtaaactgtaaaactatcgaatccttaacattaatattaatagcaaatgtcattccttttgtttcctataaacaaacttagaatatgaaaagaaacgaaaaaaaagaccaatattctacaacattggacgtcgtgacgtgtaaatacgccattggttaaaacacaccaagagaacccattaccaaagtctcacggagaatcccatctctttccccacgccaactcaatctttttcgtcgtcaaaagccaaagctttttgcttttttgtcttaatgggtttcatctcttgcatctcatttccgacgatcaattcaagaattctatcgactcaccacttttccaagcactcgacttcagcgtcttcttcatattcacttaagtttgctttgagacgtcaggaggataaacccaaagtctcgtttttttttccattaacgtcttcgttaatggcgacccctattcaagcctcttcttcctccaccattggtatcttcactctctacttcttcaattcgactgctttaaggattagcgaactttgacttttaagataatcctatgttaatcttttatgcttagtgaggtaattagagctttcgaatgatttacaatttctgattacattgatgaggaagctaagaatatggtaaatgaaggtttagtgatctgcctctccaaagtagtgacctttttaatatgttgt

SEQ ID NO: 45572 - DNA, 1006 bp, Arabidopsis thaliana landsberg
acttaccaatttgtttctatattttttcatcttacttggtattattttttaatctcctccatatttaggcatggtcctgtaaaaaaatggtcaatgcatacttttgccaaacgtatcaatgtgtcatcctattcttcatgttccgattcacatagcctatgcttttatgtttataaaaagatacttggcgtgtacacaacggacagctttccacaaagagttttgaattacgtcatatctttataggattcacatctattctatcaattcatacgaactttttcacattttatttcatttgctaatctccaaaaagatttctaatcacatgatcatttaagaaatgtggtttttatttatttaatttgaatcaaaatccattttcttcgtccataccctaccaaaagaatatcttgatcgaatggctaatttaatgtagagtgttattcaaggaaaattagccacgattatcgtaatctcaaaattctgttcacacatttatattatctaatatagtagtactccatataacttcatttattatatttgcttctttgattagccttttcccaatgtcttccttatagaagcaaagaacaaaggagttccttcacaccaaatatcacaaattactaaaatatgttaggatttagtctgttctttaatttcttctattatctttctatttcttacccatctctctctttcaagattccatggaagatcttaacgcatttgcagctgattgcgttgttgtatcatgttgttgcaactgtcttgtgctccagatcgcaatcttcatcttccttggacttcctcaaaagcttgtcaagaacacaagaaagtgttacacaaaatgggggataaatcgaaggataaaaagaatggggctttgttttgaatgtcgagaaaataccgaggatgattcggaatggagaaaagagtctatgatgatgagtatggagatggaaggttttgggtgtattaagaagttgatgaagtgtta

SEQ ID NO: 45573 - DNA, 1369 bp, Arabidopsis thaliana landsberg
  unsure (1)..(1369): unsure at all n locations
caaatttttgtgcttatataagttataaaaatttttttataagtaacactgtgtactgggaaagttggaatcagttaagagtagtgattgcggcaaacgagagaaaacaaactacttaataacttaattatacattaagtcaagtaaagagtttgcagaaactgaagtcttacagaaatctagagaaaaacagtaagacagcaagagcagaccataatgctttcaaaatgaaactctaaacccagcaatccggcatacaccaaatcactatacccagcattgactacattacgatctcatctccgctgtggaccaaaacgattgcagaacctagaaacactaccgacgacctacgtagtacccttttatacatactgtttcagaacaaactatgcctttcggataaccctataagacattaaacactgttaggaaacgtctttataacccagagccctaacagtcctaactttcatatgatcattctccttgaagtggcttaaggctaacccctaaaccctcctcagttgcatcagtgcttcctccctgagttgcgtcagtgcttcctccctcagttgcatcagtgattcctctaagccgcttttccggatttccatcaccctgctccaccgcatcaaacttccttttagacccctcagatgaaattccaaccatttcagaatccacctgcgtagcattagcttccnnnnnnnnnnnnnnnnnnnnnnnnnnntgctcaccatccccaacaggcaagtcctgaaccacacccgccaattcgagctgctcaccatccccaacaggaaagtcctgaaccgcatccaccaattcgagcagctccaaagtaccagaagaagttccaccatcaccacagttgccctcagcagaaccatcagagttagactcatgaggcggtggtgaaagagaacgttcataaggatcaggaacatcaacccaagggatcaaacaattcctagcctaatgattcatatccccacaattaaaacagaacttaaacctcgctttactcataccaatatcctcatacctaaaactcacaatcttaacctctccagaatcaaacctcgccactttcttaaaacacaaacgtgtatccacacaaacattcacacgagcacgcacagaactcaaatcaaccattccatcatctaattcaacttccattacctcacccatagacgaagcaatctcacgaaccgtcccatcacaaagatactgaatcggaatcccacaaatcttcaaccacataggcaccgacttcaaaaactcaagaccttgctcatcttcccatttctgcaacacaacgagccatcccataaacgtgttaggaccagaccaaagaaccatt

SEQ ID NO: 45574 - DNA, 630 bp, Arabidopsis thaliana landsberg
acgccatgcccatgtcgtgggccgccttcgcgaaccgcacgacccggtcgcgcctctccgcttcgagtgccgcgaggccacggaggcgcgggccggtctcgaccttcgtgccctcccggcccaccgcgtacgtcgggccgaccagcccgtcgacctcctcgtcggcgacctgcagccgcagcagctcgccgtagatgtccgcccgggtcaccgcgacccgcagctggtccatgaccacccggcccgggttcagcggcgccgcgtcccggccggcctcggccgaccaggccagcaggttcgcctcgccctgggtccgcgccaggtcccgcgactgggcgaggtgcatccggcaccgatccagcccacggaccgacaccccgtggcaccgagactgcgaacgcttggagtcccgagcgcactcccagcggtctgtgcttggtgcaccaggtggcgcccgagcgacgcatcgggtcgtcgtctcgcatggcccgggcggtcattggtggccgttcagggccgactagagcgcggcgcggtcgcggagccggatgcggccgtggtgggtggagattcatcctctgcggctatcggaaccgacgtgtctggtgatgggggtgggtgccaggtgtg

SEQ ID NO: 45575 - DNA, 558 bp, Arabidopsis thaliana landsberg
atctttatatgcaagtaaatgatttattgagtgttctttgacctaatatggatgagatcgagaaaaaatatagactactgactaccaacataagattctggttattacaaagattagtatgtggatatggtttgcacagcacgtaacttgcaatttgtatctcttattttatccaatatgtgtatcctatagaaataccaactccaactacaagatcaaaattgaaacatgtcaaaagaggaaattgacaactcttggtacatgcttaagatttaagaagagcgtcacatcaactaaagttgtaaagcaaaaattatgttaactaataatgctattacttttagtatgaaaatgaaactaatgagtttaaatcaattggcacatttctatcaaacttatagtatactcgtatctaaacaaacgttaatcaaataattccccgatgcctttgatatgaatctttatttctatcaaccgatctgcaatcgaactctaacagaaaccattaatttacttttaattttctgttctcgttactagttactacacaaaattcaa

SEQ ID NO: 45576 - DNA, 492 bp, Arabidopsis thaliana landsberg
aaatacataacgtcgcccgtacagtcacgtacaaacgttagccaatgataattcgaaaacgcacctcttactttttctcatcaatcgaaaaatcccgagacaataataatatatttattattttattaattacaaagataaatcgtgctccacactttagtcttcatgggaccctcacaaaaattgccatatctccaaataataaaattctacaatatagctattatatggtcctacttttcttacctcttataacctctttacttcctcttttaggttaaatctatttttcgctcctttgttttcattttcctcatatgtatatgcctattatattcacttctttagggttctttcatttcttcttttaattcatatctttgtatcattatcttatcaccatctacttaatgctagcgtatataatcactaattcactatattttgaatctacatgctaattgatatctacttgtttgttactgatttttt

SEQ ID NO: 45577 - DNA, 588 bp, Arabidopsis thaliana landsberg
gcaaagtttgagttctaatgatttggtttgcattttgccttacatatatccagcaatagtttggaattcattgatgaccccatcattgcaaatgcatcttgagtctatatattaaaagatatataagcaacttcatcgaaaacggaaatctattctaagtttgagatcaatcaatagaatcgttaagacttaaagcccatgaggtgtcataatcgattcggtgtcttgatagtgcttttgaccattattgttaatatttgatatttggacagttataattaatattgaacttggaaattttaaagaagaaaataataaactacacctatttctttttctaccttgtgaagtatttacaaactctgaaactgaaactacatcaaacatcgcaacgatgattgtcgatatattataatcaataagaaagaaaaatatcagagtttgaaattttttatttattttaataacgagtttgaaagttaaaaacacgtttaggtttagctagcataagtatatgatcagaccaataatgccaaataaaaacacgggtttgattttttttgtttggatatattggcgagaaaataa

SEQ ID NO: 45578 - DNA, 535 bp, Arabidopsis thaliana landsberg
caatatatctgctcaacagactattgtttattttatttaaatagttcacctttccccttaaaaaaatacatttatgtgtgaataatagattaaaaaaatagcatatatattattcttaacttttgtacgaacatggcaaccaccgttttcatatttttgggagtgtatatatcatacttaactgtcaaaccaactggtgtcgacctttggagttatatgatttgatttcttttcctcttatgtcattttctccctcttcgtatcgtattatacattgcaagaaaatgtatatatatggatatgtccgaaaatacttgtcgcatgcacaaattcatttatgtaattaagtacacacaacatctcaaactaaatcaaagttgagtgatatattgtatttgtacgttcgtttattagtaaaacgacaaatatagggcttaatttgtggtgccgattgattactatatagtgtaaccagtatacttatacttacttgagtagttgagtttggcattgttctcatgaattaatcgagtca

SEQ ID NO: 45579 - DNA, 401 bp, Arabidopsis thaliana landsberg
ccgccggaagattgcgcgtctgacttatgccttgccggatgattttttcttatttataggactgactggtcagtgcgataagtttgtcttgaggatggaaaaagcccctcgccgtcgggccgcgccggaagtgcgtcaggtctgatattcttacccgccgcgctggaggaattctcccggcatggcttcgagggcgcgcgcatggaagatgtggcgcgcgtggcaaaggtgtcgaaagggcaccggtctatctttattatccgaccaagcaggctttgttcgaggccctggtgaggcgcgatatcgccccgcgtgtcgaaatggcggcaggtttcctgaagggttacgactgcccgctcgaaccggccctgatgcgcatggtcgagatggcgggcatggcc

SEQ ID NO: 45580 - DNA, 851 bp, Arabidopsis thaliana landsberg
atgaagagagaggtaaaaaaagagtaaagaagccaaagaagaagagatgagataagctttttaggtttggggattaggtttttaggtttttttcctaagaggtctagattggtgcttggactttaatttggttttcgtctctcgttctcgtatttatgcattttgaaactcaaaaaaggaagagagagaagaataatatgattttggctacttggtttggaaataagttaattaagtaaaagtgtattgagatataattcaatggtacgtgtgtgaatccaaagtcgtgttaatacttttatttttctatcaactttgttttttcttgtttcttaactaatctcaatttaagttgtgtaattttttcctatgcaaattaatttatatgttaaaagctttcataatatttcttcctcacgttattttatcagtataattttgaattcatatacaaaaaggttcaaataagtctttttaatgtttatcagtcaaatgtacataaagttaattataaattaataatgtgaacgataagcaacttaatagataggtatatatatatatatatatatattcaagaaataagatatagaagtagatgataattttatttgtgatatcatgttatgccttttgaatgactctttggtttcgggcaataagaactttacgtaaagctaagttgacaaaaatagagctgcaaaactggcttctagtgaggaaacatacttaagcttctatattcttaatttagaatatccttactttgcagtatttctataccactaaatacatttcttcgagtctttgcattgtatctttagataaaatttcctaaaaattctactttt

SEQ ID NO: 45581 - DNA, 604 bp, Arabidopsis thaliana landsberg
ctattgtttctaattccatttttaaagtcttaaaacattttaattattatcttcaactgtttatttgttttttcctgtatttcttaagggatttattcgtttcctatttaaaggtctccatcatcctaataagattggattttaagtcattttctcgtattttgattgtgttaggatatccagggcatgctgtagttggataggtatgctttggaggagtcatgttgccctcaatcttgttggtgctctttcaagtatccttagcaatatacactggattggtcctggatcttcttgttgtaggcagtattgcgaggaagatgtacatcaacgggcatggtatgataggcctctgatggatatctttggtctgtgtggttcctgacctacatgtctgtatgattcaggaacatcagatccaattaacatctgcagagaagtggcacgagattggatgtccctttgtatgggagtgaccttagctgtgacacactattttggggatatggaatctgaagaaactaattcctatatccagaaacaaccctggtggagcaatagaaattccaacccacctacaaaactttcaacccaaactttttct

SEQ ID NO: 45582 - DNA, 535 bp, Arabidopsis thaliana landsberg
ctcttctgagtgattcacacacagagactacgtttcttgtccctcacgtaaaacccaaacatcaactcgtagcttcagagatgctctgcaatgatggcctccatgtttttgatctcgatgaagctgaattcgttaacactgaacgttgcttctcatctttcgtttcctatacaaagaaaaacacaaacccattaattttcataattttatattaatttggggaaagaaatagagtaaaatctttaaactaattactttaattattcgagtgaaaattgattcttgaagctaaaccatatcttaaattctaagtaaagattccgtaccagattctgattcttgtcggattcttcatcaatcttcttctccgatgatggcttcttcttctccttactcgtttcactttggtgcttctttgctttcgcgtacttcttggctcttataaccttcataacctctgaaaacaaatcaaacgcttatttaatcagaaacccattacaagaacacaaaccgacccagcttaacaaaaacaaat

SEQ ID NO: 45583 - DNA, 931 bp, Arabidopsis thaliana landsberg
gagggcattgaaatcctatcacttcattatctctgaaaacatatatcatgctgtggtgacttatttaaacattgaagctcacacacattacaaactggaatggtttaggctgctcggttagattttgccttaatacaaaaagctaaactagcaaatggttttaatttgattcctgagatctttccacagagactacataaatgaaaaatcatctatttctgaatctttagctaagtctattttgtatccgcatacaccaaatttcccttctagattatgaaaccgataataaattctcttccaatgtggcccgaggttttacaacaaaagagaaggcaaacaaaaccccccaaatttttacattttacaaaaggacgaatatattgatccatgtcttaacatgttactttgtcatcatatgatatgaatctattatatattttgccatttgttattgccgaacagtatggaaaacccacaaataattaagagtcctatatagagaaatctagtgaaaatctgaaaaggcaaagtcatgccattacaaagagatagagagacaattcgccaaaaaaaaaaaccaattcaaaccatcgagtgtcaggaaatgcataatgaaaaacagatgcaaaactaacatgatcaacacaacgagataaataacttaaacatttcaattaacattctctaagatagaacaacatgtaagaatatgatcaggccttgataatgtggaccttgatttcgtgaaccaaaccgtgataaccattgaccatcttaagttcgaataccacttcattacctggcttcacatgattccttcggatgatactactgattccatttagatacacggatctgttcttccaaatcacgattcttctcttcaatatgccaatcttgtcacgcatgataaccatgttgggaaatg

SEQ ID NO: 45584 - DNA, 539 bp, Arabidopsis thaliana landsberg
agtgtatgtgtgaatagacacaaaagggaataaaccagttttctttcacttgtctcatcaaacgaagtatctgacttgaaatttctagaaaaagcagtaaatcggatacatggtgtagcagctttctaaagagaggagaccagttttttcacggtttagcaaaaaccggccctaacctcttcaaacgaatactcaacaataacgtcttcctcatccattctcttctccacagcaggagtgaacggcgttgttgcctctgtcatagcgactgaagctgcaggagttgttggaacagctcttttcttttcttcgttggttttaggtgtcaagattctctcctttgttgtgtaagcatccttgtgatgatcttctggggaattcaagatattggaagtgacaggtgaaagaggcttcctaagcattggagatctcgcagcttttcctgcaacaggaacgttctttgatctgatacgaccaggaagctctgagtttctcctccctacacatattgacataattctcttaacacaaatctctct

SEQ ID NO: 45585 - DNA, 677 bp, Arabidopsis thaliana landsberg
  unsure (1)..(677): unsure at all n locations
agtgaatgcaacgatattgctttgctattatcatttcctcaacctagccaacaagcaattctatacaagataagtatcatattgtagaaccacacaagttgcagtttttattgaacaaaaaaactttaactatcannnnnnnnnnnnnnnnnnnnnnnnncttaacaaagatgcaatctttatatatatatacaacagcttaaggaatcaaatttcttcacatgtcaacctaaataagtaaaaattgagtttttaaagattcccagatacccaaaatcaaaatatcaagatccattgaagacactaacctcaggatgactaaaaaaaaccatcaatttcaatacctaaaccatgatttaaccggaaaattcctacaatgcaaaatgatctatatggaagcagaatctctcaccttagtaaacacaaatctttatctttctcaaggaagcaagagatattaattttgagtagaattgagagaattagggttttgctctagagagaacacaaaatttgaccaaaagagaagaagaagaaaagcaaagtttcaacatttgaagttatacagctattttccaacaaaacccagccaggaatttttttgatgagcaatgcatgcaaattgcaaagaatcgagaagaagcaaatctgctttgtttcctaatggttatgttgtt

SEQ ID NO: 45586 - DNA, 613 bp, Arabidopsis thaliana landsberg
cttctaacaacaaaatgaaagatgctaattaataataatggttagagaagaaggtgaagaagaagaagaaggtgggcggtggaagtggagaactttcttgaaggggaaagaaagagagagagcggcggatacacagctgtcttctcttcttcttccccccactttcacatgcctctcctttttcactatatttattacttattacatgtgatatgttcttttttttcctaattatacaactttaatattagtacaagtataataagaatataattatacgaggtggtaagaacatgctcacggagtttccttccttgatttctgactgaatgaatctctctttttacataagagatctagatctcatgagggagttttgattaagactttgattaacacactaatcttaaacacacaaaagcaacgtctctctctaccaataaatctaatcttattaggacacaacaagttgtcaaactcattactttcccaacttgtgtcatacgaggacttaccaaagataacgagtcaacatcattttgacggggtcacaaaacaaaattatagttaaaatggtccagcgatatttttttttgtattccatgaattttca

SEQ ID NO: 45587 - DNA, 724 bp, Arabidopsis thaliana landsberg
cctttgaagaatctcttatatgggcctgaagacttaaaatttgaggcacttttacttgaatcaagggtgtgggtgcagaaaggccaccttaacttggtgatgctgtgtgatgtatcaattcagagataactgctaagttgaaaatgaaccttctctattaaaactctaataatgaattctaaattgaaggaaacattggcttgtaggttgaaaactaatagaaggctattttctatttgataaagaacaaaaaaattcctgctcattataatgaaggtgaaaaaaccatcttaaggcaatgcagtatacacccaacacacatcaaacactaatttccaaaattcaacaagaaaagcttaataaccaatttctagaagctcaatttgcaaattctcgaacttcgcatattccaactaagagataacaggtatgctagaaatttcgcagctcccatagtgttccaataccagaagatatcacaaaataactcatccataaatagtgtctattcagtaaagatatttcaatttacggggaaaaatatatcaatgtgaagtatcccaagactctaaaggcctatgtatatattagcttttccaactagtataccattaacagatgcctctgatagtggatcacagttcaaacttgagagagctgcatgcaccaatggatgacaagcaagcactgttccaggaatcctgaaaaagaccaccccaaagtt

SEQ ID NO: 45588 - DNA, 594 bp, Arabidopsis thaliana landsberg
  unsure (1)..(594): unsure at all n locations
tcagcggtttggccgggttaaagagaaaacggtccatatctgaattaacgcgatacacggtttgtttctgttctatcggcattttaaaagagggcatatcgaaccggtagaacggataaaacagttcattattcacacccggcggcactacccggaatttagcaggctggtaatgttcgtaagagctgtactggctgttgatgatatgccgcgtgcttacaaggatgatatccgctttctgcagcacatcttcttccacttctatgcgccgctgcatgttgaacttctcattgatcttttcttccgtcatcccctgctgcagcaatgtattcttcttgttacgccccaatgaatggccggtggccataaagggaatgccatacatttcactgatctgtcccgcgagataatttccatcggcataatgcccgnnnnnnnnnnnnnnnnnnnngtgctcctttttcataaagcggacggtcttgtctacgaattcgtacaggtgttcccacagagattcttatcgtctgtaagcatttccgacgcaggccatacgtacgatgcgcgccttgtcattaacgttttctatttattact

SEQ ID NO: 45589 - DNA, 495 bp, Arabidopsis thaliana landsberg
acaaaaaaaactgatttattcgtctttattttgacaagaaggaagatttgttttagttgtttaaaaggctttgcccaaaaaagggttgtttacaaaggaaaaaatgccaaaaataccaaagtttcagaatttgtcaaaaaatcaatgttgttgattcttttgacaagacgatttgttcatgatgaagcgcagcaatgctgtggtaaagttttggtgaaattcgaatgagcaacaaaaatacctttagtggttggaggcatgtaatcatatgtctcaaggcgagtcagaaggtggaatcgtacttatgtttttgctaaggtttcaaggctgatgttaacagaaatataccgaatagatccattaaagatctcatcaacatcttacgagtgaagtaggtttacatcggctacatttctggtgaaaaagggtatgagttaaatatttggttcaaggttatttacatcagtttgaaatgattccttgataccaaatagt

SEQ ID NO: 45590 - DNA, 992 bp, Arabidopsis thaliana landsberg
tggaccgtccaggctcctcggctccgaccctatggtctttcttatagtctttatgtcgcaggcttctcggtgccgggtgcattcttttctctcctcatatttccttgttagggcacagcaacatgccaaattggacatattcaatccctctctctcccattatatgtattttctattcttgtttcattattgttatgttattaaatcttttgatgcttaattattattcacgtcctacatttcagcgaagcctaatcaaaggcaagaatgcaacatatgactagatgagtgatgagtcccgattacaactctgataaatgaacttcgaagtacgacctgcacttcctcttttgatataagataatcgagaattgcacctcgtatatcaatcataataaaacctcattagtttatggttaatagtctatatatcttcaatttaattatttactaggataatttcccattaaatactttaaatttgaccatactatttcaaccacattaatgtgtatattgcactgacgatagcttgctttaactttttggcatttatgtatgtgtttacctctttaatattttgtgtttaattacattaaagacacatttactctttgacataacatcatctgcaaatcgtaactcaaacgtgatgtgatacaaacgaaaaaatataccgctaaaatgtaaacaatcataagaatgttgttgcatttaacaatccaactcaatattaaccattacaaatctcagataaaaatctcggtaaattatatacgaaaaaattatgagtcttaaaccaacgtagacgaagaataattccatgagtttcataagtccgattgttcctaagggtttgtataccccgatccgtgagtaatcgaatatcggtgatggttcaatggttgattagtgtactatactatagtctatagacatcacatatcaacttgtcttacaaaaattttaatgattatttttttcacttttaa

SEQ ID NO: 45591 - DNA, 1326 bp, Arabidopsis thaliana landsberg
cgcaggattgtattatcgatttagttcttataaatacaattaaacaatatcttaatcagtagcccatcaaatttaggttatttttacttatgtttctatatatctcaataatattatgtaatcatttttctttaaacgtggtaagttcagtcgatgggaatatatgctttgatttgagtacaaagacgagacttatttgtcatcccaaatttcattatgtccgagaaaaaacaaaaacttgtactgtattttaaagcatcgaagcatgacgaaaaaccgcgtctagtgactcgtgtgaacactttgaaccccccaaaaaaaaaaacccgttagatatattattatgctcgaacttgccgaatttttaatgacaaaagtaccctcaaaaatctcacgttattacacttttgccattgagacgaccaaactttttcccaccgttttaccaatctctctctctctctctccgcatcgtaatatccactctccgtctctatctctatctctcattctctctcatccaacgctatgatcggagagaaagatctcgccggagatggagagtgttctcgaaccaaaacatcaaagcctcgattctctaatctaaacaaccaaactcatcaagacgacaaaaccggtcagtatcatcagaaaggcgtcgactttctcaacgtccggtccaacaatctcgatggtgggttttcttcaaaatcatcacccagatcaggaaacgagctcactcttagctatctctgtgaaaactccggtaaactcgctgaaagtcttggtcaaaaggggaaagaagtagtcaccttttctgagaattcaagctacgatgataaatgggtcgagagagatttcttcaatttgagagaaatgaatcctaattcttctaaacgtaaggctcacgaagaagaagaagaagctgaagaagaagaagataagaaaagtaacaaaatcgaaaccctaaatctctctttagctttacctgatgtatctctgtctttaacggcgtcaaacgccgtgaaaaggccgagagtggtgacgagcgagagaacaacgacgtcgttttcaaacgatttcacggcgacggcgccgtcgatgtcttactcttactctcatcctttctctcacaacattagctgctcgatgactcgaaactccacagatttcgattgctccgttggttaagacgatcacatctggtgcgccggcgatagaaccaacggatctgttcatagccgattcagaccaatcggtgacggcggcgtagcgctcgcgaacaatccacttccggtaaacctccagctctgctgttactctttc

SEQ ID NO: 45592 - DNA, 527 bp, Arabidopsis thaliana landsberg
aatgcaattacctccaccgataataaagagctaaacgaatttgtttttgcctctaaattgatggaaaccttgcttaaagaatagtgcaattgttagttcattcaaaattcaatcattcaaacttcactcattcaaacttcactcattaaaattaaatacgcatgcagccaaatatacaagcacttactccgcaacattggaaagattacgaactgatagactgcggagattttgaaaagctggaacggtttggcgatttaattttgataagacccgagccacaagcggtttggagtaagttattgcccgaaagcgagtggcaaaaaatgcatcacattaaatttaaaggcaaatctgcaactagtggcgagtgggtaaaaaagaatccgaagacaccggaccgttggcatatcgaatacaaaaatgatgacgttgctataaaattccgattggcgttaacatcttttaagcatgtcgggatttttcccgagcaatcccgaaactgggacttcatttcttcatctatc

SEQ ID NO: 45593 - DNA, 706 bp, Arabidopsis thaliana landsberg
atcgccactgcagcacagaagtccacgatggctctgtgccctgaaggcaaggtggttgggggcgtgttggaataattgggagtggcggcctcacttcagggtcacatcacaaagtcctagattgaaagttgaaagtcctagatgaaatcacatgggatataaacccctaggaagctctcaccatgacaataacaataacgacctaatattatccctttcgtcggttggcaaccgacgaattcattttggtgggaaatgaaaaggcgctagcatgacatggggcaaccgacgaattcaaacaggggtaaccgacgaattccagtttacccatttccaatggccctatagggccagaaacataaagtatataaaaagcaggtctataatttccataatataactttttatataataatattaagtctttattcttatttctattgatttattataatatctggtttcttctattctttggctgacaggggaggcctgcatcagctgtccaataagagattacagcaactgctgcaaaaacgccacggcggtcgcacgtataggagccttcatcaacagagaaaaagcaactttatgcgagagaagagtaaaaagggtctagagtcatgccagaggactaagagttttctccaacttattattatatatcaccatttgaacagattatcatggagtactttatttactt

SEQ ID NO: 45594 - DNA, 737 bp, Arabidopsis thaliana landsberg
atttttattttttaaaggtacatctttatatctataaggtgttttgttttcttgcatgcattattcgtactcgtatgagaactccatcataggtaagtaaacaaaactaagaaaagatctaagctctaagctctgcgtactttccttcgctttatcttgccagtagcactaggcatttgaaactatggaataaagccgttttgatccaacttagcagcaaccaaattgcaaacgaatagaaagaatggtcagaaacaagattggtaggtggatccaagatagcaaaaatatctcttcctactcaagatgcaacagataaaaacaaacttttgaaccaagaaaagtcaatattatacatttattaagaaatcgaagagcaagaatgcatctcattctcacctttgtgatgttcttggagtgcacaaacatttattgggccaaaactcctacgcacatgataacatgtcttagtagatttcttatggataatacatgataacatatcttattgttaataatattaatttaattcactgacctgttaaaatttagacagaatggcaataacttatatagtgataattattatttttttattttattttttagactaacattatataagtgtaaacatgatacatcatatctaaacttcaactctcaccatttgcttttttataacaaaatagtaattaaattaataatcttggatctataccgaccacttactcttctat

SEQ ID NO: 45595 - DNA, 860 bp, Arabidopsis thaliana landsberg
  unsure (1)..(860): unsure at all n locations
gggtatttgtaggagcctttttgtcaatgtcatcaactgcgggggaatttcagtgaactctataatgcttatctaaccatttccatagcgggctttctttttaatattgttggttttatgttcatcatgcgttcctgnnnnnnnnnnnnnnnnnnnnnagtttctcatggaaaagaattcaactaattctcttcatggccaagttacgattggaatcctaattcttcaggtatctgattgttctcatctacatgtaatgtccattgtctttgtagatcatatagtgtttattcttgaattccttttcaaatgatttggaggattgattttagcatctgtttgtaggactgtgctgtgggtttgctgtttgctttgcttccagttctcgagggaaattctggcattgttcatggaatgttgtcaataggaaaagtgtatggaaagactggtagactttttgctcctaaggcgtattctgaagatttgatgttaatcatgcttttactgtcttttatttagggtggttttgttgctttcgtttttggctgttttgtcaatattatcacggacatgtattccttggttgctgaagctaatggtcagcttatcgtcacaggtacatgagtttcctctcaatattattttccctatcatctgatctaatgaaatcgagtttgtagattaacctaaaaaatttcttcatatcagacaaatgaactctatcagttagcggctgttgcgttttgtctacttgtagcctgngtgagtcctacttagccatcatcttcctcatattcttccttgtagtatccatcatatgtaatgcgttcatgaagattctcatatgtgcgttccttctc

SEQ ID NO: 45596 - DNA, 615 bp, Arabidopsis thaliana landsberg
  unsure (1)..(615): unsure at all n locations
ggaatttgaactcctataactgttgttatttaattgcaacaaataaaaacttattttattttgggtatacattatattttgccatagactcggattcaatctaaaatactaaacgcattgaaactcaataagtttaaaattattccttacattttgtgtgaaaactattactaatctagagactaactacctctgtatagacatcactattttcacattatttttgaatgtgtataacagttctaaattgatatttatatttttcacattttctagtgtttatgatataatttgaaaagcagaaagcattcttagttagcccctataatgattttttacattttttatgaaggctaccatacaaacagaattttcaataaaaaaaaatgaaaaaaataaagagaaagcagaatccatcaaaagggcagagatgagaaaacattccagtcgtgttttgtaacttttgaggaatgtcccgaatattttaattaatgtgaccaagacgactcctaaaccaacacacatactactatattctatnttaattaaacagntaagaaataaatagttgttggttaatgacatatcattagatcgctttaacatgcatgcatg

SEQ ID NO: 45597 - DNA, 407 bp, Arabidopsis thaliana landsberg
aaaaaatattatataaataactatgctatgccatgcatattttgtatattatatatattttgtcagggggttcggttatagtttacatgtgtattgacatgtgttgtccactcctcgtgtagaacatgaaggcatcgtatgattttttggttccaccgaaaaaattaataaggcatgacggacctgatccaacacaattcataaaacatttccccaaataatcttttatttctgacaaacatttgatttttcttccaggacttttctatgtaaaagtgcgggcaaccaattatcttgtcctcactgcttccctattaatgatttttctcacatagctccttatgcaatgaatctatcttcttaaactgtcgcagccacatttttaagtcattcattcgtagctgaga

SEQ ID NO: 45598 - DNA, 661 bp, Arabidopsis thaliana landsberg
aaaagcacgaatgaatctgagatgcacgatttatcaaagggaagagttttcgtaaagatccctagtgagaagagaattatttgttacctcatgtttactggaaaactgtagaagaaccctagagaaaagaggaaacacgaacggtgacgcaaagattagatttttttttttacttggcttgatcgaaagacttctcctttagatgctccacatagtttgtgtttatagtgctcggagcatttatcttgtacaagctagtgtattgtagttaagtgggtcacgaagaatcaaacggtgacgtttactgcggtttagatggaaggatttcattttagggtttaagacttttaagtggactgttttcttctgattctgaaacatctctcttttcttttcttcttttagccaaaatttgaggtaactttttaaatcatgtatgtaattgtaatcacaattgttaatttgttttttcacgagaagtaatcaaaagaaaatgaaattacctgttatagactaagacaatttacatttacgattgtagttataaccgagtgttcctcgatgataattctaaggattctcacatctaaatacgttgagactttagagtgttcatgccaatgagatggttgcatcatcatcatcattgacattgtcgtca

SEQ ID NO: 45599 - DNA, 466 bp, Arabidopsis thaliana landsberg
accgatgctccaaggtatgtgtccattgcaatacaaattttcatgtcttcccgatgctgacggttttgtgtttgctgttcacagcgggcagtggccctcacagtctggaggacgtgggagcttcccaaatcaagggcaagggcaagggcagtcctctgatcaacagctacagctacaactacagcagcaacagactctgactgtccctgtctcctctggccgcggcaagccacaaaggtaacgcgtgcttcgctgaccattcgctatgttctgatgatggcctgtctcttgtcacttgcttactactgtagtggccctcaagtgatcgagtatccttttggtgcgccaaacaccagaagccagcatggacaacagttggttgactacagagtgtatgagcagagtctgccctactcttctgcaccttcccagcgatctctacagccaggacagggacaaggagatt

SEQ ID NO: 45600 - DNA, 870 bp, Arabidopsis thaliana landsberg
gaaaagcaactctcctagtttttaaaagttttgaagctttttcttgctgtatgtgagtttatagcttttgctccggacactgatggaacgaataacatgatcgacattttgtctcttaagtttccggaactgcgggtaatcatcatcacgctttcatcttatgctgcattcttcatcgatagttactattcatatgtcacacgtttaatcgaccctgtgtcttctgtttgcagctagttactaaaatttttaaagatgacatagagctggaaacttatataacatctgcgcattatggtgtctgtagcgaagtgaggtatgttttgttcttttttccagctaataagaaggcaatttcatccctagtttcttgtcgccttcaaactttttcttgtacatctctctgtttattctgtgaattggttagcatttcttgaataatggcagtatctccttgggttagttgttacaaatttgctacaactttgatgattatactacctgaacaagactggtatcttttctatgttggaaacagggagatattttggcttcacatgcccagtgtgtctgcattttatcttcactagtactatcatcaaagttataactagctgtctatgctttttcgttttttttttttttaaaatgttaaaactgattaagcctcatcatgtttgcttaggaattgttcgaatccaaaaataaaaggagcagtggtattccatgaacaaagacctcatttgtctgattatagcatccggttgaaccacacatgggctttctccggatcccccaatgtaaagttcaacatgaacccaaatgggccttgctttaatgagccagaatgggggattcaatgccctacca

SEQ ID NO: 45601 - DNA, 598 bp, Arabidopsis thaliana landsberg
ggggggaatttaaaagaccttcaacttatgcaaacgaactaagtttgtcatatagtaccttaaacttatgcagaggtacaacgcatgcacactttacaacttcggccccggcacgctctaaagtgcatagaagagactcacttttagttcaataattatactcagatataatatacaacttcttaagcgtaaatatataaatcatcttgtttagcatgtagcattcattttctagctaatgaaagtagaaagatattatttacccaagaggttaatggaagcagagagtgtcccaccagtggcaactaaatcgtcgatgatgagagctcgttcctccgatttgacggcttctacactcatctctagacaatctcttccatactcaagttcgtactcttcgcttatcactctcccttttttaacatcacaatcaatagtatccttcaataacactttttctattccatcaaaatgtacgtttttgtctgagaagtgatatgtatgtatattactaatcgtaccgggtagttttccccgtttgcgtagtggaacgaacttggcacctatggctaacgcgatgggaggtccaaatatgaat

SEQ ID NO: 45602 - DNA, 1914 bp, Arabidopsis thaliana landsberg
cattttaactcttcctctcgatgatctcgctcttataatcctttcttctagactgagaatcaaaatggaaaagggggcgttaaaatcaaacaaagaaaactatgtaagaacttactttctttaccctcttccgcatctcaacatctctaggtctctgttgtagcagaacctcttgcgcgtcttctttagagtcttggtgatcacgaaactggcccacttctttctcctgagaaattcgtataaacccttgtctcagcataatccaaagtaacgaagagaataagttcttgttctgtttccttaccttattctctggccatgatcttgactctgtattgtacctcctccctgaatcattccttctcaaatccggagttctaccctgagagccaaacttaaaacacgttacatcaaactaatatagtcatggcttctaaccctggagaataaactcggtttaagttatcacatttgacaataaaacgttgctaagactaatataatatccgcggtgaaattacctgaggcataggtaaactatcaccatccctttcctttgggtgattaaatggacaatttgagcctctcttacaagctcctgccttaaaaaactgcaacaaaatgcatatagaagtttggaattcttgttacttgacgctcaagtcgaacgcattaaagcagaagaaaatctaggttttttttactctttataatccgctcataccacaacaaccaatcgaattaatcaggttttgagataataacaagacatccaagaaatgtaccttgcaatccagcttcttaccaatcctgcacggaatctcctgtttgtagtaacaaaggtataagaaatgaggaaaactgcaaattatacttagccaaattaattgagataatgttttctttctcacttgtagaggaggatgattgtaacaacactcgcttccccattcacacagatggtttttcatataaaacagacaatcatcttcaccggggcgaactggatacgcactcgatagcaccggtgcgtgactccactgagttctcccatcaaacatcattctggattcacttcctctcctatcctgagttctagcctaatgtatcaaatattcaaaagaaaacgttaaatcaaacaaagcatattgtgtaagagcaagactttagtttctttaccctttgccataatctcgactctgtttcatggcttctcctctgcatcacaacatcactcactctctgttgttgtgtcagatcatcccgcgcgtctgagtcagtatttgacccttgttgcaaaggaatctcaccctcttcgcttacactaaaacccgagtcttctttctcctgaaaaaaatcgtgtcgactcttgtttcatcacaaaatacagagtagataacagagtaagtttttgttcagtttctttaccttcttcttttgctctgttccctgtctcctaccatttctctcatcagatctacccactaatctactcggcctcaattccttattttgttcctgagaatcaaaagtaaacgaaacgttagccatatttcttggctctgttttatgagattgtaaggaccaaccaaactaaataaaacccgaaacgtaaaatcaaatgagaaatcacagtaataacatcgtaagtggttagcaaaaatatggattagcacgttaagttattgttcattttcttttttacctttgtttcttccatggatctagactttgttcttccacaacaacttttgttatgagtttttctagtctcctcagatgttttttaattgcttatattctcaagaaataaaatcaaagaatattttggttcttcatattcaatttgaaaatcatgtttccataacattgattggtcgcgaataataataataataataataattttcatac

SEQ ID NO: 45603 - DNA, 774 bp, Arabidopsis thaliana landsberg
ctcgtgtagttttatcaaacgtagtcatgtaacaccttttcatttttcaaattttatcgaaaccgtatatttggggtctggtttgatttgtcttaagagattttattaaacgttgaagaaaaatctttcgtttgaccccagtttatgataatgtctaaagtaaaagagttgaatatttttaaaataaagaggagacttgaatgaattattatattaataatatcaactattttattttcttccctaaaaaaactgtaatattattctttgccactgcttggcgttgtccatctaatgaggcaaaaaaggacgagagggaagtggagcccgaaagctgggacctttgatgtgctggctccgacctcgccatcgttggtcttttatgggtcttgtctggtaagaatcactcttagtcttaagactatagagagagataaagagagaagataaaaaaaacaactccaactttctttcttttttttacataaaaacgtcaaaggaggatgtctcgttcggcgacttgacctctctctctctctctcttttaccttcattgttcactgtttccagacattgaaagaaagatcattagtttctgaggggataaccatttttttttcttcttaaaaaagtttttttttttgtcaattggtcttctttccttcttcttcttcctcatccgctcgcttatatttaatttaataataataaaaatcggtgttcatttttattaaaagtataattttgtgtttggttgatcatccgtagtcgagt

SEQ ID NO: 45604 - DNA, 522 bp, Arabidopsis thaliana landsberg
aaagaattcaaacttcttttcagattttcttcttctaacgcatgggtcgaccgcatgagttttacttttctcgttgaaccacttaatgaccaaaaacagtacattgtaccagaatataaaatactactatttaaacttattaataacttataatgatgttttctttttctttttgttaacttaatagtgatgatgttaatgaggatgttgagagagtatcatcatataccataagtccataaacttatttgtctgaatgatttttgagttttatttggttttataaaaactgatgttttgtattatgatgataactttcatttctcacctataacaagtggaaaaaagaaagttaattattattattaagctaataaaattaattaaaaatgtagaattatgtgcatgtataataaaaatattaaatcatgcattgatatatacatgggtcttattcgactttttttaatgaataacatcatacattacgcatggtttgatgttattgtgcagcgaaaacta

SEQ ID NO: 45605 - DNA, 484 bp, Arabidopsis thaliana landsberg
ctccgactcgcctgtatgttccccagacttgctcctctctcctgacaaattgtcctttgctcccctctcgtgcctgttgttgggactactgagtcaggctgaagagtaactgagcagtgagctacccagtgctgtgatgctctgctgggtcaaggagcctctgctcactcatgctccctacctcggtgttgattggaaacgctacctaacagtagagtttgccttgttctgtgtcctcgcaacctgattttagtttgaaactcctgtcaatgtcactacctcagaaaaaatcaagcctaaaacttgtaaagtaaggttccagattttagcctcaaaggaaaggtgttttggagcttaagactatagggcagaacacatgtcattatgatatacccagtatgtctttaacatgtcacaatacaacatagcaaatactcttccctcacagggctggaattttgatagtgaccttactatccaaagt

SEQ ID NO: 45606 - DNA, 664 bp, Arabidopsis thaliana landsberg
aaacacaggagaagtgggagaagagataagatcaggtaccaattttttttcttttgttgtttttaagattgaaagttttgcttatgggggatcaatggttgctagaatctgttacataaacattgaactatcacgcatacgaatcgttaagtaacttgacttatgttatgtctttgagtgattcctttttataatttacatcaatggcagattcggaggatgatgactagggtttgctagaggtcatggtgaaaaatgggtttcagatacctcagaattaatgacactttaagcattgctattactcagatatgtcttctcttttgctctaggttaatgagtaatatatagcaaaggaatctattcttattgtaaatgaaaattaaaccccttttgtatgggtaatgggttaatgtaatttagttgagagtccctgaaaaagaagattgtcttctgtgtgcgtgtgtgtgtttaaactcttttgtcctttgagaagaagattaaccaaagtctgagtggattgatcaaaaaccatcaaaccacaataaaaaatcgattaaaccaaattgttgcttgagttgagagttacttttatatatagtctctcacatatggcaaaactgaaaatggaaaaaaaaaaaaaaaagcaaagaaacgcgccagg

SEQ ID NO: 45607 - DNA, 518 bp, Arabidopsis thaliana landsberg
ctagtgaggcagtgagccagtgaccatacaaggcgcggaccgcgagtccgccggactggagacagtgaagaatcaggaagggaaacacgcacccgcaccgcacggagcaccaactgaccagctgtcaagctacaactcgattcgaggaggcgaggagcaggggcactagtgaggcagtgagccagtgaccatacaaggcgcggagcgcggaccgccggaccggagacagtgaagaatcaggaagggaaacacgcacctgcaccgcacggagcaccaaccgaccagctgtcaagctacaactcgatccgaggaggcgaggagcaccagccgaccaacgaggagcaccaacgatgaacgagcatcaccaatcaccagatccgaatgggatcagggtgagggttaggaatagggagacggagggagggaggagagggagtcagggagcaccaagacgtcggaggtggcgagccgtcgcgcgtcgacggtgggaggagcaccgaggcaggcactgaggcgac

SEQ ID NO: 45608 - DNA, 596 bp, Arabidopsis thaliana landsberg
gttgatagctacgacgtactcggcgtttagaatatactacacgttactttcatcatctagagatgaatatttttttatgtataaaagttgatcatatgagaatgattgatagaactagccatattaatagtcaactacatacatttttttggtttaagtaacctacttatataaactctaaccttgaaagtaatgttgatagcgacaaagtattcggcgtctactcttaaaggaccactcgaagcagatagtcctgcatcattgtattgaattatcacttttgatgcgtcgcttccttgcattattatcttttgcttctccctcggaatcactatcttttcgctgcattaatatacacacacaaacgttatttatgtaaaaccccaacaaaataaattataagaagtcaattgattgattcgtttttgagttgtaactcctataagaaagtcctaatgcatctcataacgtacatgatttggtttgatttgatttttggaccaccgaaccgaaccaaataacaccgaatggtgatcaaccgaatcttaggcgtgtgcatataagtttcatttgagagtggtaagtaaattgaaaac

SEQ ID NO: 45609 - DNA, 901 bp, Arabidopsis thaliana landsberg
agactcgtccccttagttgaagggtaagttcttctccttctaatgattctctgcattgcctttctctctttaaccaatttttttggctcgtggatatgcaggatggcgaagatgtggacaaacatgtgtatacaccacgacacccaactaggtattgttggagagctaaaggcccttgaaatctcaacttctctcaaagaaaccacaaaacagcatcaccatcagactcgccagttctgcaccgtcttggaagaatggcatgttcagttcgatacacttgtcacccatcagaagcagtacattaactctctcaacaactggctgaagctaaatctaatccccatcgagagtagtcttaaagagaaagtttcatcacctccaaggcctcagcgcccgccaatccaagctcttctccactcatggcatgaccgtcttgagaaacttcccgatgaagtcgccaaatcagctatctcctctttcgcggcagtcatcaaaaccatcttgctgcaccaggaagaggagatgaaactgaaagagaaatgcgaagaaacacgaagagagtttatacggaagaagcaaggttttgaggattggtatcaaaaacatttgcaaaagagagggccaacagaggaagctgaaggcggggacgacgcaacaacaagctccagagatcatgtcacagagaggagaattgctgtggagacactgaagaaaaggcttgaagaagaagaagaagctcaccagagacattgtgttcaggtgagggagaaatctctaaacagtttgaagatcagattgcctgagatcttcagggcactgtctgattatgctcacgcttgtgctgactcatatgagaagctcagaatcatatcgcagagtcagaaatcaaacggtggagccg

SEQ ID NO: 45610 - DNA, 626 bp, Arabidopsis thaliana landsberg
agaacctaatgcccttaagtacaaacaaatgaccacaagatgtgaaatctgttcctattttatcagccaaaaattaaaattaaggaatcgtgtcaaacagaaaatcaccttcatgttgtagtcgcatccataagtgtaatgaatgataaacttccccttggtagacaaatcccacggaggctgaaagatattgtgagagaacttaggaatatggagcagagaaacaacttttgtaactttgacaaaacaaaagtatcttcgacatagaatatgttatcactaaggtatcagcacaaggtcgattcttacctgaagcatgaaatccttccgaagtatgtgacgcaccccatgtatagcagatgcaattgcgtaaccgtaccttatcaaacagaaaagagaagaataaagtagtcagttaacaatgatgggattcaaaaggtggagagccaattcatgatttaagattcttgttttttgtgctaacattttcagcacccatccaaatgccttatcagtttctggatcgtttttcattgtcagcgagacattcattcatgtaggagcaatctttcaagtgattcctgcatcagaaagtaaatgcatgtcaacatcaattttaatgcatg

SEQ ID NO: 45611 - DNA, 793 bp, Arabidopsis thaliana landsberg
tttataaattatataatattttatctctagatggattttaatatttgtaaatgtgtgtatacatatatatatgtacacgtgtatatgtatgtatatattggtttccaaacaaatgtacgagtatttatggcataactaaaacatttgatttgatttgaatgtcttaagcatatggtatttactggttacaacatttattaagtttttgaattgtgattccagccatatacaatgcatgtattaaaatataataaaaatttaaatttatttatctaggaaagtctactctctattttataataaatgttgttttagattgttttcactcatattaattaaatttcatttttactcctatctaatagtgtaaaatatatgactttttatttgtcaaaacatgaagatagtaaggataacacataatattttatcaaaactttactttgaaaatataaaatgacatgtattatgcaataagattcaagttgtaaaaacgacacgtaatacgaaacagaaaaataacattttagggtgatcattcagtaggaaaaaaagtttcaccttaagtgatttcattattttaatatttagctatttgcatcatttcaatattgaactgacaaatcaatttgttttgttctttgatgatgagatagattattcagactgatttccgcacatgtagatatgatatgaaataaaatctagtacattaaatattgcgaaactgacatcctggctgtgcagaatacgaatacatggatgacaccaattataccgtttaaagcaataa

SEQ ID NO: 45612 - DNA, 702 bp, Arabidopsis thaliana landsberg
  unsure (1)..(702): unsure at all n locations
nagttggtagttgagaagagcaaagtcttagaggacgagagactaactcaaatgtttcaaggagaccaccaatatctcacccaagatgaaaaagatgacatatacaaagaggtgacacttttgaatttttaaaaattatttattttctaacaataattttataagttatcaactaactttcttttaaaagtatttttttggggtttttaggaggttcaaataaagaaagacaaacgttttgcatatggatcaatgaaggcggttccatctttgttttacgaagataagtatctcgagacacaagaaaagttgaacaagctggagaagaagattgaagagatggagctgaaactcaaggatgtcgacttctggactaacatgatgcaaaacatgtttccagaccaagtacctccatctatgagagcaaaccaaaccgataacaacaaaaacgacaaactaagcctttaaattttatcttctatctagttgttctattcctatggtttgtaagacactaaatatttacatttaagttatctttgaacttatgttttcgaatatttaattagtttacaaattatatttttgtctacaaattgcatgacaggaaaaaagagagagatctaattccttaaaacatatattcaaaataccgatctatttgataaaagaatagaaaagttgatcaaagttttattttaa

SEQ ID NO: 45613 - DNA, 565 bp, Arabidopsis thaliana landsberg
tctaacgacggggccgatcgtcgtgcccggcgatttccggcgtttgaagcaggccctgatgatcggcatcgacattgcggtaaagcactcgccgcccggcagcacgatccgtattgcgacgactaacgacgaccggcgcgccaccgtccgcatcgccgacgagggtcccggcgtctctgccgaagacgagcccaacgtctttcgccgcttttatcgcgggcgccaggagaacgacatgctcaatactggcttcggcatcgggctttccatcgccaggcagatcgtggcacagcatggcgggaccatcgaactgcgcaatcgctcgcaaggcggcgcgcttttcgagatcgtgctgcctcttggcgaaggaccgggccgatgaagatactcgtcgtcgaggacgatcgccgcatcgcgtccttcctcgaacgcggccttgccgccgaaggctaccatgtggccgtcgaatacgacggccgggacggtctcgaacgcgcccgtgcggaagccttcgacctcgtcgtcgtcgatcgcaccctgccctatgtcgatggccatgaaatct

SEQ ID NO: 45614 - DNA, 606 bp, Arabidopsis thaliana landsberg
tcttgctctgttatttatcgaaagaagttaaaaaggttgattgttttggttcaatgatgtgcaggaacctctgtctagtttagctgcagagtatcaatcagggagtcccattttgctggagaagattaaggttactttctgctctgttatctttttcgtggtttgttgctttcagtctttttgaattatcatgtttgcaatgcttgtagatactggacagtcaatatatcggaatccggcgaacaagaggagatggaaattgcttcttccgaagttttatgttctcttaccttgtatgttctcagaatgtcttctattttgcctagctcttgtttgtgtagttggttttgaactttgttattttggttagacgtggattgtatctttagctaaagttgctgttgttttctctgctttgtttcgtaggagcatatattggaatcacaagatcgtgctgaagtcgatcgtatcaaggtcaatgttgagaaatgtagaaagactctgcaaaacttaggttatacagattttacatttgaggacttctttgcggtaaatcgaccacctttctgttttctattgtgtctgctttttaaatctggtaagatc

SEQ ID NO: 45615 - DNA, 503 bp, Arabidopsis thaliana landsberg
  unsure (1)..(503): unsure at all n locations
atgaatccccaccgttcgatgatggaattcatcagctccggcgccgcaccaggccctgtctccgaaattgcaccagggcccacctccgaagaagtttcatctcctgctctagctccggcttctatgtaaaatgttcattaattccacatgtgtttaatactttatattaatattttcgactgatgatgatccatatataatggaccgtatcttacattttctatgatttgatacggatatcatcaattggttcatatgaaagaagaaggatacagagtgagtttgatttttgtttatgtttcttaatcaacatttcactgtataataacaactttgtataccagtgtgttgtcttgttcgttaaataaatatatgtataccaagtgcaatcgcatatttcannaatttattggttcatattttcatactccatataattctgggaggattcaatatgtagtttctttctcatcacttacgacttcaataataataaaagagag

SEQ ID NO: 45616 - DNA, 534 bp, Arabidopsis thaliana landsberg
atgtggaagtagttattagagtgaaatggttaaaactatttttttttttacgaacgttacttagaatttaaatgggggggaaaggcttcacgtggtaaacacaagagtaatacataaggttaattaagatgaatgttgaaagaaactaacatatacaaaaagtaaaaataatatatagaataagttaagttattggagtgaatgacaaaataaaataaaaatacatgggacaaagataaacaaaattaatctagggggaaaagaagttacgaacagtaattagaatttcaaatcttcttctcagatttcacgtggtaaacaaaagaagaataaacaagacaaaattgaataatttaataaagaataaaaaatataaaattatattattgtggaagtgaatgataaattaagaagttacgaacattaattcgaatttcaaattttattcaggcttcacgtggtaaagtaaacacaagatataatatttaatgagataaaataaacgggaaaaaggtcatttaaatcaccatttcg

SEQ ID NO: 45617 - DNA, 847 bp, Arabidopsis thaliana landsberg
  unsure (1)..(847): unsure at all n locations
atatatatatatatagtttatattaaataaaagaaagtattttgttttatacacatgttaattagtatgtaaacgtaaatgttttgttctatttttccattgtgatttagaaaacttaagttaaaagtctctgtggatatactactagtaaattagttgatgtaaatgtatatttttctttgatttttttgttaatattgaatcgaaatgattgactgacatgtatataaaacattttaaataattgatacttaatcgaattttcgtgaaatggttcaagaattatataataagatagattgtttgtcacgtgttataatagagtccgttctaacaattttgtttttgtttttactactatcttttaccacttctaacccatctttatctaaccgggtttttgtaagtggtcttaaaactttgattaaacaaatctgcttattttaagagttacaatcggattctagaaaaacaaaataaatgaaaatggagatggatgcataataatgttcttttagatgggaaagtgattgcaactagctagtactccaacaagaataagaaatagattataaagctattattgtacactattggatttcgaacatttctgaatcatttttacattaactttagagattggcttcaccgtccgtctctgccggcagctcgccgtaccattccaccattatttgttttctaatcattacactccagtcaccaaaataacttatccaaaaaatttttaaaaataacgaacactctattataaacaattaataaaccaatcatggcttcacaagtggtcctcagatnggatgactgaaatacaaataaatagcattaa

SEQ ID NO: 45618 - DNA, 568 bp, Arabidopsis thaliana landsberg
aagaggaagaagaaggaggaaaagagaaaagagcagaagaagaagcgaaaagtttctcccttgttagagattttgatttgtctggtttgaactgcattagggtttctaggaggaattatattctcatggatcctcataaaaaggttcgtttttgttctctatgtaaacgttttgggtattgcttgctcatatggatctgtcgtttcatttatctgtttgatttctccagatttagaattgatttttggacctcgtaggttttgttgccttttgtgattatgagtttctgtttaatttctccaactacattggacggggaactgtagcaaatcattgtttaattactgggttttagttattagattgaaaaggtcaacactttttgtgattcttatccaaattttctggtgtttatttgcttgggaaatggtggaaaatgcaaagccatctctgatcatttggatcttttatgtggatttggttgcttcatgttcatgattttgcatttttccgcctcgcctttacgccctctgcaattatcttactcctgcggcaacttaccttatat

SEQ ID NO: 45619 - DNA, 570 bp, Arabidopsis thaliana landsberg
gcgactctagagtgctttccaacacacaagttgagatttgctctagctagttgtcgcgcttccggtactggtagaagcaggcgcttttggccattatttgtcacaaaaaaagaatacattgaattccttggattaagtctttatcccacctttcagatgtaaggtcaatgagatcaacaaccttgttgagtaatcctctagatatggtagtttaaagaattaaaaacatgtatttatcaaaattgttaacatacacctaatcttcacggaacatcataaagctcgtatgaataagtttcaaaataataggcatcttgttgcaagccttaaaagctacacttccgtgaactttcctctgttcatcctaagataatattttccaagctccaaagttcaaaaggatggcattgtcagaagcctaacgattgtcgtggcttctctcgaactggtcatgactgcagaatcagttagcgaagtatttcaatcctaaacagaacatgatttctaactccctaaagaatttagattgccatggtaactcatagtaaagtagatagaagtttggggcat

SEQ ID NO: 45620 - DNA, 527 bp, Arabidopsis thaliana landsberg
catcccctcccatccgatcaaaaacctacgactcctggcgcaccattccaacatctaatctggaccaaccctacgcgatccaacggtggacccgattcttcctccccgacgcgcccaggcaagctccactccacgtccttctccattgcattggtggccataggagcatcagccgaggacagccaccagtgcgaccccaacatcctcgccttgcctctctcttagccggcggcccagtgtattgcgcaccccgctgttctgacacagtatgttaccacccctctgcctccatcgagcagtccacataagcagccaggaagaagggagcctggaagaagggagcggcgtcctaacgtccgactggtgggcctggaatgggcgtgactgtgcgccatccgtcgcgtgtggctgtgtgtgtggggatgcgtcccatggcgtgtgagctgaccgcctgtaataaccagcaactctgtcttggcgtggacattattcatctgaacaacagaaaactctgaatagagctctca

SEQ ID NO: 45621 - DNA, 1247 bp, Arabidopsis thaliana landsberg
tgtcaattcaatgaaaacaaatgaagaaaagagacatgcaatatgtttccaaattcttacttagaagaattagaatcaaataatacaatatctacatatgccataagagacatatggaaaaccatgttttcggatgataaacttccaaattgatttgatatatactataaaccggcaaattaacaaattgaggttaaaatataacaaaccggtccggtctgatcgaacggctgatgtcataaaacgtggggaatattcgattaaaataacaaagactccgttacggtcgtaaataagtggtgtgagaaccgaaagtcaaaaacacgtcaatattggtggggggggacgaccgtgcacgtgaccacacaggaactaaacccggacgtattgcgcgaaaattaaaccggatttgataatcggcgactcgtccggcaacccttgttttgttttcgtctcggcggatcgatttttcttcgtctgggtttggttgtctttttattttcctcttccttggccaaagaaaatcttatcgtagctgtgaaaaccctagtttctaatcatctcaattctctcattaacctatcaatttcgatagggtttgatcaagtatccgatttcatggtttgtattttccgtttaatagtctttaaaggtcttgtcttttggaatttcaagggttttcgtttcagtaactccttctttttttctgttaatttagatcggttgctgtatggagactaattgctggagtttaggttcgtgtgttttgaactgagcttttggttcttgtttgtgtctggtgttgaagacatggatttggaagctaattgtaaggtattattgtctgaaagatctatggatgcttgttggtttataatttttgttgatttgaacttgttatgaatgtgttgattggtatatagagtggatgtttcaaaaaagctttgcttttccgttttgtttatgatctagattgtattgctgggagtaaaaaacgatcctttatctcataagggttttggattatggttcgtggttgctgttattgaatttagtcttgctctagttaagcttaacgttgtgtttttgttgtgggttgcaggaaaaactttcatattttcggataaaagagctcaaggatgtgctcactcagctgggactttcgaaacagggaaagaagcaggttagtatcgttctctaatcttccattggtcgtgattatgtttgtgagttgcttggaacgatta

SEQ ID NO: 45622 - DNA, 659 bp, Arabidopsis thaliana landsberg
gttaacaccttctttgccgattgattctaccttcaatcttccttctccattaccatcttggcctttaggttcatattgtggttttcacttgttgtttttcctctgtttcagctctgttttagctctgtttttttaatccttatgaatttttgttttaattttacaggagaaggatttgcgaaagggagaatcgatttgggaggtcttgaggtttgccaagtagaaacgtttgaaagagtatggactgtatacgaaggaggacaagataatctcggagccactttctttgaaccgtcttcagtacctgaaggctttgctattctcgggttctacgctcaacctaataaccgcaagcttttcggatggacacttgagggaaaagacctctcaggcgactctttaagaccgccggtggattatcttctcctttggagcggcaaatctacaaaggtagagaacaacaaggttgaaacaggatacttttggcagcctgtacctctgatggttacaatgcagtgggtctaatcgtgacaacctaagatgagaaacctcctctagacaagatccgttgtgtccgttccgacctgaccgaacaatccgagcctgactctctgatatgggaaactaatgggtttagcgtttccagttctaaacctgtt

SEQ ID NO: 45623 - DNA, 704 bp, Arabidopsis thaliana landsberg
ccttaactatgatgacatgcttaagatgtagtatacaatatacctttttttgtcgactacaggcaatgatatttatacatacaataagagtataaagccatgactcaaataacaattggttctattaggtagaccgatatttttatagtttcatcatactctagttcatacatgcagaaaaaaaaaattatttgcacaattttattaattattatgacactgtagcatgaagatacgtgttgaaacaaaaccccataattcgtcggtgtaagtaatatgaaaagagaaaaaaagaacaaaaataaagagaaagtgaagtcacatgaggagagtggagcaatgtacaccaccgtcaatggctctcaactaataccagtaatgacaaaacgtgagtgcacatgaaccttataaagtgagagtacgaagaataagtcaaaaacattgtcgcactgtacgagaagaagtcggcggatttatgaccacccacgaggccacgagcttatcatatatattttcacatttgcattcatctaaatgccgttctaacaaaatatttaaatttcaaattggtatttttttcctttaatttattcacaaaactgtaatcgtacttggatacattccgattatttcgctacaaataaaatattttctaacatatacatcaatatcccatattaatcattattctaggctctttcgta

SEQ ID NO: 45624 - DNA, 466 bp, Arabidopsis thaliana landsberg
atattagagaggagtgatacattgaaaagtactctaaacacaaaaaacaagaagataaatgaagatgaagaccctttacctgcatagctgctactcttgataagcaaccttgacatctttcaagcaaaaccttttctttagcagttacattcacggcttccaccattacagaattcatctcatccacctaaatagacataaatgagtttaaagtaaccattaaagataagggttgtgcatagaataactcaagacagataacatatcagacccaaaaggttcaatagactcaacagagcttcgaaaaatctgagagagacaagatcatttttttaccttccacgtcagtgagaatatggaagatgacatagcttgcattacatcgacggctgaactaacagcatgctagaagtgttgatatcatcctaaacaattcgagaagcatattaaaaaaaaattaacctac

SEQ ID NO: 45625 - DNA, 507 bp, Arabidopsis thaliana landsberg
agttagctcagggtcgtgggacggctaatgtggtgccttttcttatgtgggcggttgcgccagggactacgaggggaggtagtgcgttctggatgcttccgatgagcggttcgggtgggcgggagcagatgcagcagcagcctggtcaccaaatgtgggcgtttaatccagggaattatccagttgggacaggacgagtagtaactgcaccaatggggtcaatgatgttgggtggtcaacagctaggattaggagtggcagagggcaacatggcggctgcaatgcgtggcagtagaggcgatggtttggccatgactctagatcaacatcagcatcagctccaacatcaagagccaaaccagagtcaagctagtgaaaatggtggtgatgacaaaaagtgatcaatccttttctctagttccacctcatgacattgtaatgaccacactcgagtttgaagattcgcaatctgcggcttggctattagcaactccatttgtaaaacat

SEQ ID NO: 45626 - DNA, 483 bp, Arabidopsis thaliana landsberg
attaattgaactcgaacaataaaatatagctctgtgagttattacctttttaattattaaaattacaaagaacaaaattttaaaaacagatgagcccaagaaatatatatataaacaaatttgtatgtgaccatatatatctactttcatatatagtttttgttcaactgtgaatcgcaaatatgttacaaaagtattattctaaaatcattttttctagaactagaagagactagacatgctgattagtaatcaaaataatgtccaaacagttgggctatcatggccaatgagacataaaatttgattacgatgataataagcagacaggtggagttttatttcaggcaaaaatgatacgtccgtttttttttttttttgcattgatagaaattgtgtaagcattacatgtattgtttactatatttcctttctgttatgtcagtataaaaatatccgtaattgtattgctatatggatccg

SEQ ID NO: 45627 - DNA, 630 bp, Arabidopsis thaliana landsberg
tacatgcttcctttgacttatgactgaaaataaggtaaacttttaaatacgcacatacatttatcatgattttattcattttgtttaatttgcatataaccatcttcttcttataactaatttgttttataaaaaaagattacaatcactacacactaacatttcgccaaaacataatactaattgacttatagtgtgccaattttcctaattctagtaatcaacaaaaggattgctagatatttgcaaaacattacaagaaaatcaaggaaataaataattttcagttccaaattaaaaaatagtatagtttttgtttttttgtttttttttgggtgtgttttgctctgaaacgagttcacatgaccgactcttttcttagtgctcaggttgtccaatcattaagtatattgtggatttttttggaaataaaaaatgaacatctcgaatgtcgaaatttcatctgattaattcagaacagaggattacagaggagaaatataaaagtacttaactaaagattactaattcctaattaattaatactttacttttaatcatgccgatatttttagcaaattataaaaatttaataaagtgaaaacatttcaaggaagaaagcaggaatat

SEQ ID NO: 45628 - DNA, 685 bp, Arabidopsis thaliana landsberg
actcattcatcggtcattaaggtataatgtgtttttcgtaatatttctagtaaaggcattattagtccaagagaattgaaaccttagttaatttaccttgcttcagcttataaattaattaacttacttttcgaaaacatgtcaataattagtttgtgtacgattatatcaatttaaaaatctagagaatactcattttacattcaatcggttcatatgaattcttaaaatggttcgaaactctttccaaactagttttcttttgtttgacgttctttttccaatttaatttaacaatatataaaaataaacttataccaaaagttattctgtcgagcgaacttaaatggaaaaagaaagacatcaaagtgatgacaagaatcgccacaacgaagaatttatgaagtggaaagatagagacggaaaaagacttacaaaacggaatatttattatataaaaaaaaactctttcgtaagctgaatttttctttctaaaattcattaagacaaactaaaaaatgatttatcattttaaattatagagatgctaaatttatagagaacaccataattgtattccaaaacattcaccggctaatagcaaacaaaaacaatgtatatgtatacacaaacgggtcaaatagggaaactaaaaacaaggtccacattcagcaatcatcaatca

SEQ ID NO: 45629 - DNA, 580 bp, Arabidopsis thaliana landsberg
caattttgataaaccgttagttatttttctttatttgccttttgtaaacatgatcaccattcaccaatggggtttgaataaagtgaaacgcgatccttgatacaacgtcgctctcatatggttgtgtgcatttgtatgatttttattgtgttttgattatttaaatttagattatggaattcatggagacttcaaatttgaacttccaatagattccaagtttttgtttttctatgtttatataatgccaagttcttatcatcttatcaacatcttctttaagaattctataaactttttgttttggaaaaatagtattgagaagaacagttaacaattcatactacaaaccaaacattgatctataaaaacatgaagatcacaattgatatttgaagaggggtaaaaaatgcaaaaggcaagtgacacctcttggaatgtgaagaaacttgacatttcccatctcagaaatggatcttggttaatgttttgctctcaaaataaacttaaaaaatcctatttatatatacttaggaaaaaagggaaaaaaaaaaaaacatcaagagggataaataaacca

SEQ ID NO: 45630 - DNA, 703 bp, Arabidopsis thaliana landsberg
  unsure (1)..(703): unsure at all n locations
gtataaggtaggtgaggtcgttgttctgatttacgggtccttcaataatttagaaaatacttaagataaaagttatataaaaacgttgaatattgtgtggaaattatattttatttacgtggctgtgacctgtgagtattttgggttcatcttttgacttgaatggtagttttcgttgacttacaagtcatttaaacgaaatcgatcacttcgaaaccaattaaagcaattagagaatcactattaaatgcaccaaatgatctcttttgtcaactagagtaaaaaaggaattcccctagttgttcaaaaggattaacaaatgtgaacatagtctactatagtgctaagaagtaggttctaattaattacataataattaatgagcggatttattggccggacccaaattacggcttctcaaccagaaaggtcgccggcaaatcacacgtagcactttttaacgtaaatttgaaacaaagatattgacaattattacttttaaatatcattagaaagtgacagtaaattatacataagaaaagccacactgcattatccgttacacttacggaatgagtgaactttctccctaaataaaactatacaaaaatacaaaattctgntgttgnnnnnaatatacntatgcccggcgatcacttgtaaataatgaccaaaaaaacatacttattacgcttttactttt

SEQ ID NO: 45631 - DNA, 599 bp, Arabidopsis thaliana landsberg
ggtcgcatgtgcccgcaagattgtcgaagcggatctcgggcatcctgtctcggagctgttcgttgaatttgagtccgagccgttgtcggccgcgtcggtggcgcaggtccacggttgcgtgctgcgcgacggccgcgcagccgtggtgaaggtgcagcgtccccgcatcgcgcggcgcatgctgatcgatctgcgggtggcccacgccttcacccggctgttggaacgacgctcgcccacggcccgcaccagcaacgccaccggaatcgtgcacgatctgtatcaggtcaccatggccgagctcaactccgtggtggaggcccacaatcagggtcgtatccgggacaacctgttcgtgttcgacgacaacaccggcgtggcggttccggaggtgtactggtcgtattgcgggccgcacaccgtgtgcatggaacggatgtacggtgtgccgctggaccggttcgacaccatccgcgacacccacgccgacacccaggtgttgatccgccggctggtgaaggcatggctggagggcgtgacggtgcacggggtggtccatggcgacgtgcacgcgggcaacctgtgggtgctcgatgatg

SEQ ID NO: 45632 - DNA, 589 bp, Arabidopsis thaliana landsberg
ggttataatcaaaactcataagtaccttatacaactgcatttttattataagaaatcaacttaatgattaatggcgatggagagttagtacaatgtaagcatacgcttttcacgcaacccgaaaataatgtgtgttgaaggtccatgcgtttgtgcttaaacacgcttcgctaaagcatgccttgtaattgtaatcaaaacaaataatcccactaacgaacggatgatgactaatgaagattcatgtttggtacgaaatgttttaagcccttttgaacaaatacaacagatgatggacacacacacacaaatcgacgacataaaacttgatttggaggatatccggaaaaataggctattcacatatcatccgactcagccttaatgattatgttgtttttatgaatgggtttactctatttaatttgtctttaacttatttttaatacgatgttgaagtgaaataatcaacaaatagttataaacgtgaagaaaacaataaaggagtataagaaagaacagagcgagaaacacgaggggcatgcgtaaaacaagttaatgatgggatgagggtaaaatgggaaaatta

SEQ ID NO: 45633 - DNA, 436 bp, Arabidopsis thaliana landsberg
tctccaaagtttcttaaaagaagaaaagatctgaactttttcaaacaacaacaaacgggtagttctgtaataacttgtctataaaagggctaaactaaacatgagaggattatcacatcttactgttctagcaacaacatccaaagctataaacttgtaacaaagcaaattcaatagaaagagtctaagaacagtgagtaaatatcaaaggaggagtgagtcataattgaagttaccatggatttagatttccaagtttgtcctggagagagagacttccagaagcaaggcttgctcacatttgcttggatcttctcaatagcattcttaggcaacatttttcttttcaaagctggatcagttctgcaaaattagggtttgtatgatgacctacttgcatttcttcataaaattagagccaaaaaattggaaaagt

SEQ ID NO: 45634 - DNA, 839 bp, Arabidopsis thaliana landsberg
  unsure (1)..(839): unsure at all n locations
ggcaaggccgtgagggaagccagaggatccgtaagtagcacttcgtttactttctatttccaaccattgagtaaacctataggctggggcagatgctatatctcctaacatgtacaaaacctgcaaattccaaaagtcttccaatttttaagacgagactattaatataaccctaaaacctaaaacgaatttaggatcggagaaatttacacgagaagtgacggtgagaggaagaggagactcgtgctcgtcgtgaacaaggtatacatctttctcttcgtctttttcctgcgatagcaccataatatcagatcagagaaaaaggggaaaaaatcaaaatcaaaatctggctctgcgaaaagagggagagataaatgtgggggtaatgatgaacgcaaaaggtgggggtgataatgatagattattaaatttgtgggggaaaaatgaaggatgattacttgagaaaaatggttgatctcgcttcttctcaggttccgacattgcaaaagcttcggttctgtttaattttagaaatgtctttttcttcaaatgtcagctttgtatctgagaagagganagtctcaaggtatctttaattaatatgaacttgtcggacgaagaagaagacggatatttattttcataatttattattgtaatanagactctgatcattttattctcattattcaagattttaaaaaataaacatattaatttatttacagaactgtcttctaattttattttatttccgttctgtgttattatttanaactatattttgtatgaaactatttcggtcgaatatagaaaaatggttctagattttaaaaata

SEQ ID NO: 45635 - DNA, 515 bp, Arabidopsis thaliana landsberg
tcgctgccagagtcgaagaagatggacggagtgtattccgagttatcgaagtcggaatactgtgaatatggctctgaacgttgctcagatgactcatcatcgagagaatccgaaacctcttccgagaatttctcagagcaagcgagatcagagacgcatccgactatctcaagctccggcttcaattccttggccgatccaagagaggaatcagcttccacgaagctgctcggcttggagatttcaatttcttcgttatcagctcctccggtaacgctcccgaacttggaacagtactcaactccagatatgacagaaacgacgtcgctctccttattctccgattcgaaattcaaactccggctgttggagacatgtccggcgaaggtcacatcggatcgtgagaaagagatctcatcgttgtcgttaattttatttcccttcacattcaatctccttaatccagcaccagaattcgaatcaacacaagacgattcgcttacttcgatctcatc

SEQ ID NO: 45636 - DNA, 669 bp, Arabidopsis thaliana landsberg
  unsure (1)..(669): unsure at all n locations
tagaaccagaactggcgcaaaatgtaaaagcaaaagagagattcaatgggagattttagacttcagtttcatgtgtcggcattgccgtctttcaacatcacctaaaatcttcagagaagtcaacgaggaaatctcgtccgtaggatgatgaaatcgtacaaactctgatgatgcatgatcctcaaagtcatgggttcacacaatgtggttaagtttcttctttcgtgtcagaaattatcaaatgaaaatgcgtctcattattctcgcctacttttgcttcttcttagaaattgcctcctccatgcatgttatttcaaaaaagttcttcgtcatgcatgtctatagaattacataagcccaaaattattcctacaacctatgaaactttgttctatgtctatggaattaccaaaagcccaaatcaaagcccgtataagcccatttgagatactttttgtgttcctcattttcctctcggtgcatatccatattccatctgtttctcttccttgattatcggccaatcatagaacangaagtagagaaagcagaagatacactacagagacagagagaggtaaataaaaatcaatcctttagatctctcttattacgtgtctttaatgattcaatgatgatcttttttgggatcttcttgctcacatttaa

SEQ ID NO: 45637 - DNA, 655 bp, Arabidopsis thaliana landsberg
  unsure (1)..(655): unsure at all n locations
ggtaccaagcaattagcaagagaaacacaaggtcgaggtggtgaggcatggagctcgccttgggggccatggccagcttggccctaagctaggcgacctgctcaaggaggagtatgtcgtgcagaagggcctcaagcccgacattgagtctctctccagggagcttgtgatgatgaacgccgctctcgtcgacgcgtcccgggttccacctgaccagcacactgaggtggaaaagctctgggcacgcaaggtccgggacttgtcgtatgacatggaggacgccatcgacgatttcatcctgcgtgtggctggtggtgacgactctgccgccgactcaaaattcttcaagaagacccttgccatggtcaaggacgtgatgtcgatgaagaaggtcaaggaccggcgccagatctgcgacaaggtcaaagacatcaagaaactctccaacgagttagctgaacttcgtgccaagtacacggtaaggggtgtgggtgctgatcttgccgcgagcaccggcatcgaccccgtctcannnnnnnnnnnnnnnnnnnnnnnnnnnnnnnnnnnnnnnnnnnnnnnnnnnncaaagtcaataggatgctgtctatggggccaaagattatgatcacatgagtccatcagctctaaagatagt

SEQ ID NO: 45638 - DNA, 507 bp, Arabidopsis thaliana landsberg
ctcccaaaagccaagagtatatattttatccaattatcgcccttatcatcttctttcttcaattttagttttatattaccaaaaaagggaaaccgtatcccttctctctctctttcttctttcctctattgtctgccatggcgatttctactattctctgagtctgtgatcttaaagatttgatgagacagaaacccagaaactgaaaaacaaaaacccaactcgtgatatttcgttccgaccaaatctgtctgatttgcgatctgaacaaagtacggtaatggagttgatggctaaaccaaccttctccatcgaagtctctcaatacggaaccaccgatctaccggcgacggagaaagcttcctcttcctcttcctctttcgagacaacaaacgaagaaggagtagaggaatctggtctaagttccgatctggtcaggacaaacggcggattactcatcggataggtcatcaatcggaacttccggagatagcgaagaagacgaag

SEQ ID NO: 45639 - DNA, 1034 bp, Arabidopsis thaliana landsberg
cctaatattacggaaggtgtcgaataaaatagagtgtgagatattttatatttttctgcataatgaagaaatgctagattactgtttttaagaatttggatattgtttatcaaaaagaatttggatattataaagagtgtccttcaaaagtgacaatggcaccaagacaaactaattaactataattgtttcaaagcaaaagtgattaatcattggaccctacaacccccattcaaaggcaaacaatgataatttgcaaacatgtttttatgagttggttgaataaacttatataattcatgtactaagttttattacaattagtttattttgtcaaatgtgataattatcagtctctaattaggtgtatatataagaaacgtatggtcaaaaggtacttttgctgagtttttaagtacctttaacaactaataaagtctatgataaagagaaatctcacaaaggtcatcaaactagtcgatgggttttaatgttttttattattaaaatttcaattaggttcggcgaaaagtaacaaaataggtttagttatatagatttgatgcaagacctacatcttttagcttctatttgtaattaaaaaatgggtccatgtgtcctaacttattctctacaaattttaccatatgaaattttctaacttattctctacaaattttaattcttcataaacataaatcattttgacaaaataaatactcatttaaaagtagttcatttttcttcgaaagtaatggctatggtaaaattctaggccaagttttgataaatcttaggtcttcaaatagttcttttttccaaaacagattattaataatgtacatatgtaatgacaatcaacttctaaaattagttaaactcgttattgtatattctgtccccctaccaaacatcgatgctttcttagaaacaataaaaagcattgcgtataatatataccacgatatcaaagttatgcttggaaaaaaaacacacgttaacacacgtttttgaaaaaaaattgattcagagat

SEQ ID NO: 45640 - DNA, 605 bp, Arabidopsis thaliana landsberg
aaaacatataactttcacctaattgtgtcattaatccaaacaatttaaatttggtaaagaaacgaatttttcgatttggattcgaaaacaagtgaggaattgcagaaatgaagaagggaatcaaacaaaatctgagattttttatatcaaatcgttcaacgaggagacctaaaaagagacgaactttgtctttaattacagagaatcgaaatgacccagaaggagaaaatgaatcggagaggagaagatacttgccttgtgtgaatcaaactcgaaacaagactgcatttgcttgcacggaagtgagaatttttgtaagaaatcgactgtttaatagagagagggagagagcataattgagattgaagtaaacaggtcgcgtgagagggaaagtgggagagagagagagacccgttttattcggatctgtgacccgatccgacaaatacggatctacgtggcttgaagtaagaagggttgacatgtttccacttttggcaaatttcatcaccgtactttatagtttggtacattatgaaaagtattcgagcacgatctgatttcggttgaaatgttgcactccgagaagcatgatcacccagatc

SEQ ID NO: 45641 - DNA, 956 bp, Arabidopsis thaliana landsberg
aaaccaaagacctgttcagattgtattaaaggtgcatcagacaagatatcatttagttttcctaacaaaacagatgcttatacatggcctgattgttgtatggtacgttattccaacatttctttctctggttcactcgttatggaaccttctgaaactctctatcataccggagatatcgaagatacaggcactaatttaacagtgtttgatagaatttgggaagagttaatgctccgtacaataactgcagcttcattgagtagtagtaatggatcatcatttggacaaaagtactttgcagctgaggttgcttcattgactactttccaaactatgtatgcgatgatgcaatgtacgccggatgtttcttcgaaagattgtgagttttgtttgaagacaggtgttggtgattatgagtcatgttgccgtggtaaacaaggtggtgcggtgatattaccaagttgctttgtccggtgggatttgtatccttatgctggagcttttgaaaatgttacatttccaccgcctccaccgcagtctttacctcagccaccggtttctttgactcctccagttagcgatagggcaaatacaaccatcaaaggtaatttccttcatatgatatgtaacagaaatatgttgaaaccttatataattgaataactcatttgcaatgatttgcggcttgtgtagatggaaaatcattttcaacagggattattgtggctattgttgtccctataattgttatcttggtttcacttgttgcactatctcgggttcgtagaagaaagaaatcatatgaaacaactgaggttcaaggttggttgggttttcatgtttttccccattatcttttgcagcttgcataagtaagatatgtacaaattctggaaaagtggatgatgaagacgatgttttcactttctttgtgcagctactgatgagatcac

SEQ ID NO: 45642 - DNA, 763 bp, Arabidopsis thaliana landsberg
ctctccaaattaataaactacaactaagagtactatttaaaaaacgcgtaaaatgacacaaaataactcaattttttatatcattatcgcattatacgtatagaatttaaataataacatatacatttccatataggataaataacctcatcaaaaaaaaagaagaattttattattagtttagacttttttgtcaatattaatttattagcttcttaagttttatattattagcaaaggataatgatgccaactatatacatgcgtgctccaacttttgggaccaattcatctaacctaagtgataaacagatagataaattatccacttctaactattttccatcagcttatttcaaaatttaaaagctaaatcatttcaaatcaaaaaggtctttggcttttttttatccactgttccattatttctctcttccattaaaaaaactgcattttacaagatctttcagtttttagaagtaatcaagtatcagtgccaaaaaaagctacattaagatcttacaaattacagtatacgacgtattcctattttcaatcgttatctaagtagaaatatatttaataaaacgtgtgaaatgtcattaaaacaacaacaaaatgtacatacattaaaaagaattcaagaccagcaaaaatatatatacacgttactatttaatctctagatatcgttcctgtataaaagaataaactctaccatttaacctcaataaccattcataaattatatcaaaattgtaaa

SEQ ID NO: 45643 - DNA, 472 bp, Arabidopsis thaliana landsberg
ttctaagtatggatttataacgcaatgttaatattcaaagatagattctttggtatgaaacattacaaatttaacatatgataaagcaataacgatttcaataattaagtattacgatcgtaatttttgcatgaagatgttgtgtagccgatcataatattgagggtacgtagtacttatcttgataagttggattgatctaagataaaagactttgccgggaaatggatgcatcattgtttaaggattcgtgattttgatttctctttgttcaatcctttatattagtaaaaaccttcgtttcaaaggagaaaaagaaagtgtttagttaatcatcataaaataataagaagcataaaataccaaatcgacatgattataattgtattgattaattataaagcactaggatattaaataccatatcaaatcagttggaaataaattttgcatgaattttccaaatcaattt

SEQ ID NO: 45644 - DNA, 783 bp, Arabidopsis thaliana landsberg
aatcacaagtttttttagtcatactaatacatattctaagattctctagactcaaatcatgtccaaaaaaaatgtctagactcaaatctatctacgatctctacggagtctaatatttacctaattaataaatcatgattcctttcaagctttataacttacgtggataaacttgtcccacataattagatttaagattgtgtttaaatgaactaattattttgactccaaatatgtctacagttggagctttccatcgaaatggctgggacattagcgatatgagaatgtgaagaagtgagaagataccttcagggagatgtcatactcgcttgagagtcagatcaaaacttgttgatgtcagcaatgctttcgtataggaacgttgttacggatgatttgatgaaccatcctccaatggtgtgagatggtccgatgggcaatatatcaaaagaaacatgtatcatttctgtttcctctttgtccgagagttgtttttgtggtatggatgtttatttttcttgagtcttggcatgagctcttgtaatacaaccttttattcttctcctttcgtttagtttaatcggggtttaagcagaccaaatgtcaaaatgggcttaagattaagtccaccacatgggctatctatcatgtataatcatcacattgttccctttaaactcaaagccatagcccgtgaggcttgtcagaccatattatgttccttcagtggtgcggattctgtttttgtttttttttttgataactggtgggatgatattt

SEQ ID NO: 45645 - DNA, 994 bp, Arabidopsis thaliana landsberg
  unsure (1)..(994): unsure at all n locations
tcaattttcgctacaatttttctttttctttaaaatatctaggtttttatataatattccataatttgatgaaaagaatgaaagagaaagttcaaatcaatccatatagcttgtcctagcctatagccaaaaatattcctatgccgcgattgaacaaccgttttttaaaaatcgtcaaattaaatcaaacctttttccatgacaatgagacttggatatagtttacattagattctgattggcccctttgatataactaggtaaactagcttcttgaataaactgtctcttattttggttttatacaaaaaaaaaaaagcttttggaaaatgatttaaatgtaaatacataatacgtagcgtctaagaaggatatttgagaaaatatggatttatttatctggtatttatccattaatttacctacaaatggaatccaccattaaccaaaaacaaacaaacaaatggaatcccgtgaaataaagtatcatcatatacatatctctcttttatgtttttatggagagaattagtccaatccttcttcactgaatttaccacctgcttctcgtagaatatataaaactacccttaagtctttttctaatgactatgagttgacaaatgagaaaaacaaaaactgcttttgttggtcattaaatattccgtctagatnnnnnnnnnnnnnnnnnnnnnnnnnnnnnnnnctcccatcaaaataaagctcactatacagcagattgtacaacactatacactaaagttacaattttgagattttattgattgacaatttcgtttcgatattcttagatacactaaactcaaatattgattntatgggaagagaataaaaaatggattgtgaaaaaggaaaaaaaaaaacctaaatttgggccatatgtgaagaatacttccttaagtttgggccatagtttaaatcaataggcccattagtctatctaacgattctttctcaactcttaaaaatctga

SEQ ID NO: 45646 - DNA, 716 bp, Arabidopsis thaliana landsberg
cttatatacactatgtctcgacagggttttgtcctaatgaaattgacgttaaatcgtataacgaatttgtgattgtgatgaccattagaaaaacgttgttcacaacaatagattccagagactcagaaaattctcacacaaaacatcaaaaggtggccatttatgaaagaacgagattaataccttatatgttttgtccttagattcacttcagaaatgagtcggaagtttcccataagacttgttcgtctattttgctcaagtattcgtcgtcaagacgtttccaagtcttgataagtttgattccttcccatgtgtctcttcctttcccaagcttagcttctatcactcttgctcttctatgccaatttggtcgtccataagcatggtatccgaatcctccaccgtaacaaaaccataccccttttagagttccacagaaatcattaacatggtcgtgtcccatgaacgcagcttttacatttcccattgacacaaatgtctgtaagactccagactgaacaatagagcatgccactccttcctgaaactgaccgataaagggcgtgtaccacagttcccgaacttccaatattgggatgtggaagaaggctaacgctggcggattaacatgaatcctctggctatgaccctgtttagtcactagtcagtgagtgtacttagaggaaatgaatccccgtgaggtttccactaaa

SEQ ID NO: 45647 - DNA, 651 bp, Arabidopsis thaliana landsberg
  unsure (1)..(651): unsure at all n locations
tcctgtccatctgatttttttgaacataccaataatcattatttttataacacttttaaatgatttatcacttttcaggcgggtctgtagattcccttaaaagtaagaacacaataattaaacaatcttgaagaagaaaactaaggtttcaaacaaggaagaaaccaccacataatgttaaaatacaaaaggctgaatttgaaaccaattttataactaattcactcatttaaaaggacgaatcttttgttgattttcctgagaccaattttttgaattaaatgttaaataaatcttcaaagaacacaaaaaccttagctagggttagattttgaggtaaatcaagaagattaaaaaggtcattttctttatgaacacatataataatacagtcattaacctactcattaaaaaaatgatcaaatcttttgctgattttgactacaattattattaatggtttgaaagaaaaaaaagattagcattttgtaatttaccttactgatttttgggacgatggatcggagcatagaaagacgatcgttaagtcgttttcttcgtcgtctcttcgncatgagattcttagaagggtggnnnctcaagcttttgctcttcttctggttcgctctcctcacagaaacaacactgagc

SEQ ID NO: 45648 - DNA, 611 bp, Arabidopsis thaliana landsberg
tgattccgctcaagtaagcgcactcgctctacttctacccacaatcgtttagttaccatgataggtcaatagtccttgaagtattatttagaaacaaatcaaaaacaaattttcaattaagaataaatatctcacagtgtttctaattttgctatcgtgtcatgttatcaggccgacaactttacccattccaacctggaaaacccacagacttaatactagattagactgtataatcatcacatttactttttgggtttaataatccaaaaacttttgctactaatttattaataatttagaacgtgaatatataacaaagtacgcatccatatgtaacacacgtacgtacgcgttttgagcagcgcacaaacaaatgtacacatattcgattacttactgtcttttcttaaatatctgtttttgaggttaaacaggtgtaaatatcttccaacctaaataatattattatactctccatcaggcgaattatacaaatcttataaaaaccctacagctaaaatctaaaattggtggcaaagtaccaacgataacctacctaaaaacaataacgagaaaattgaatacaaaaatatggataaagtttgata

SEQ ID NO: 45649 - DNA, 943 bp, Arabidopsis thaliana landsberg
ggaacgtcatgtttacaaatttgttaggcactagtcggactttgagaagagtttgattagagcctaatcaataaatcgaggactcagttaaaattactttttgtacaatatataattaacataaatatgaaaaagattattaaactattaaaatatttgtttctagttttaattcattttagtgttatattaacagaataatattttattaaaccaaaaaaatatttagcaaattcttacatacgtaaattatcaattttcaaacataacattattccattgaggtaggattcggaagaactaaagattccactaagaaaagaaaaaatgaaacttggaaattaccaaatacgagaaaagaaaaagacataacacgttgaaatatctttgaacaaataatatttgaatgaggtatatattctaaattggtggtgccttcaattaaaatattatttcgtttctttcaaaaaaaaaaaaaaaaatcaacaaacgcagatgattttcgcaaactaccaaaagtaaatggacctttttatcatttgtggcgagcctagctagtgcgtcttaatttttgaaatagtttccatttatttatcatttggaaataactaattaaattgtaaaatttaaaatatagaaaagatataacataatttaaaaaagaaatatttttgtttcttgattatgacttatgacatggaattcaacttaccataataagaagttaaagggaaacctttaacatcatttggtttataatagaatgagacctttcatatttttaaatgatctttaacttatgtagtcttgaagaagtaatcctcctcttcatagaaccctttagtaggtgtatagccactagcttgcaactataggtattatttggtctatatttagaatgcgtgaataaaatatctccaataattttttaaataatctttaa

SEQ ID NO: 45650 - DNA, 532 bp, Arabidopsis thaliana landsberg
ggaaaaccggtcagaaatgggtaaccggagcagcagaatctcttcgtcatagcttctcccgacgagattgctaagatccatcgagccgaaacttccaaacaaggtctcttcttctttctccgtctctctctctctttttttccctaaaaaaaatcttttaaattgatgactttggattatgtttacagccggagctattgccggagctaaggcagccgccgttgccgccgtcgccagtgcgattcccacagtaatcatataatctcacttatctaagttttttaaattgagatcttaaatgaattatgatgtaagagttatgtttctttgttgtagaattttaagacaaaagtgactcaccaatctcatgttctgtaataatcaagagtttcaattttgttacctattcattttgtgatttctgaatacaccaagtagagtcacattctttttgatgtgtgtataagatatgaatttggtacataagcatgcattgttttcgtaacaggtagctgccgttcgtatgttccgt

SEQ ID NO: 45651 - DNA, 624 bp, Arabidopsis thaliana landsberg
aggagcaggtattcaccaaagcgatcatggaaggcgaacagaacgagcggatccgtattgcgcgcgatcttcatgatagcatagggcagatcttgtcggtggccaaaatgaatatatccacccttcattaccagttacctgaaaataaaatggcaggaaccacggcggaactggtagataatgcgctgactgaaattcgcaatatctcccacaacctgatgcccgaggacctgaattttggtttgtttccggcaattgagaatatttgtgagaacatacatatcgccgggaaaacaaagataacacgcgatattcctgatgagctgaaacaatatccattcgaaaaatcagaagcgctcactatttatcgcattgtgcaggaggtactgaacaacatgataaaacatgctgaagctgaaacaatacatatacagttcaaatctgtgaactccaataccctttcgataaccattgcagataccggtaaaggttttgataccgcggagatcgccggctcgcgtggtcttggctggaagaacattgccgcacgcgtgcggatgctggatggagaaatgcagatccgctccgaaccatcaaaaggcacacagatcgatattacaattc

SEQ ID NO: 45652 - DNA, 613 bp, Arabidopsis thaliana landsberg
cgattccataccaatcgagcagcgtgtatcacaatctccgtatgatatctccaacttttattggggctttcctttggagttttcaataccccgcggtgcaatctccggcgagagctcctggtccgcggaagagttcttcaacgacggcaaaatcctccctatagaaatgaaaaagatcccggaacccatatatcgtagtaaaacagataaatataaaaccggtttacccaggcctgagataattccaatcgaagattttgaacaggttcttgaaatagaagaaattggagaccaagaagatgaggtaaagttgccattacttccttataactcgaccggttcgaattctatcaagagtcaggtttcgtcttcttcttcatcttctttttacggtagttttccgaaaccgatattgaagaagaaccatggaggttacaagtacaagggacatggaggtatgattagtgtgagctcatttctggatatagtaccttcggggaatttgtttgggttaggttcgataaatttttatggtggaagaaacaaaaacaagatacgatcaatgtttttctattggtaagaatgactttttgctggagtaagtgaattagtg

SEQ ID NO: 45653 - DNA, 753 bp, Arabidopsis thaliana landsberg
ctaaactttatgataaaataaaaatcaccaccagaactacatcaactgtggtagcaaccatcacctttttttttcaccacagttgctattgccattacaaaggccaccactaacatagaacacataacctctatttacatgacaaacaacaatagatcgtaacccttaaatcctaaatgctaaactacgcactaccgaccaaaacttgttttttagtggcctgtttgtgttaaactccatagcctcgttgattttgtttatggtaacttttagatatacatcacatttgtttgtactattactagaaaatgtttatccacaatatacattgttgtcgcctttgtttgtgaggtcaagagttttttaaatgatatcttacaacaagatttggtttgtttgagagtgttttgtttttcttcatcccaaaaatataacaatttactaatttagataatacgattcaattatacaaccactcaatacgaatctatatacaatatctatatgtctgcgtctatatatatatatggctggtgttgctttagatttagcggacttttgtctcttcttcattgattaaactctataggtacgacgtttttttgggtctttcttgtttctccattcattcataagagaagataatgtagttctgccttgttcatcctactttcgctttgttccttaataccattttctgatattgttatcacgttatattcaaactaaagaagtttcaagataaaccacatg

SEQ ID NO: 45654 - DNA, 520 bp, Arabidopsis thaliana landsberg
ttgatctatattctatcactatataggtttttttccatcactatatagtactctctctctctctattcctgatagattgatgtttttattttattttcagattaagaaaattttaattattaattaatttaaggctacattatgagtgtaaagagctagaaagtatagaccattacttaccacgacatatggcaaaaagcataaagtaaaaagtaaaaagtaaaaacaatattatttcagcttttttaatctaaaactttaatctttaaggaacaagataaaaacttaaagcatcaatttattaggaacataaattgtgaatctatattttattactatcagaatcattttagtacaaaggaaatctaaatgtttaagaaaataatttgttatagaaggcaaggcattgttttactagataatctagcaaagcacatatctcatgacttttgtttaagaacacatataacttttatatttggtatacaaagatcaatatttttttccatcgtagtctcgt

SEQ ID NO: 45655 - DNA, 625 bp, Arabidopsis thaliana landsberg
  unsure (1)..(625): unsure at all n locations
gcatacaattcaatattttcaaagaaagcatcatatggcaaacaactatgaactatctcacatgtatcacaagcctcaagaacagggttgctacgaatctcaagaacaggtgtcacaacattaaaacaacactcaggttatcaaaaatccatcacagggctcctacaaaccacatgacacaaatatcagaaggcaccatactatatcattacacccaaattgcatcacaaggcaccaaattgattcacattgcatgtttacgtcccaaattgcctcacannnnnnnnnnnnnnnnnnnnnngttttcagaactcaaacctgagtatttggccaatgtctgctgagcacaaatgacggctgcnnnnnnnnnnnnnnnnnnnnnnataacacatttttccacctccacagcggattcaagaacatcaagcatcaaaaccacatggttacctactgatgttgtggcgcggagatcgccaactatcacataggcggcaacagaagcattgatggtgtcacgggttgcttcaacggtcgcggagaacttctaggcacagagctcagcggcagattctatgccggaatcgatggctgtaaacctagggttacagagctacaagtggaagcg

SEQ ID NO: 45656 - DNA, 544 bp, Arabidopsis thaliana landsberg
tacacaacaaaatatacatcatggtaatatatattgcagttcatttataagtactataatttgcagatgatatcttataatatgtttctcatatgatttcaatattatttagcagattcaagatagaaacaaaatataaatgacagatgctttgataacatatcggaaacacttactccaatcaataagtcaactataaatgagaaagttttacctgcttcttcattcgtttctccaccaatctcaagatcatccaaaacttcgaatgcaagcaatcatgacaacattttggaatctgcactagacagcgagaactatgatcaatactattgttcatcagaaggttagtttcattcatatacaatatggctttttgaacagctacacgcattaagtaatcagacaatttattaatatgtgttgcagaagaacaagacgaacaaatatatgattgttcaagtgctgaagaggatactgatggacagtcagatgttgaaattgatgatacaaaagttttagaagaagtacagaaaaagctggacta

SEQ ID NO: 45657 - DNA, 595 bp, Arabidopsis thaliana landsberg
ttcgatgccactgcacagtaagctcatttcggtcaagtaggtaaggtttctaaatttaagctgggttttgtgaaatttaggtttggtttttgtgttcttggttggttttaagctgcggatttgatgatttgtgcgcaagcttggggtttcagctttttttttgtgatggaattttgatttccgagttgcatggtgttgtaggtgggagaagaagccatggaaggggatgagcgaggagtcttacttgcttgtgtaatttcgggtacccttttcacggttttcggttcgggttcgttttggatactttgggctgttaattggcggccatggcgtctctacaggtaaacaagtccattcatatgtttgggcagctctaggtgttgttttgtcatatatggcgcttgatagagttgctttgtatgagtagtattgacatagaaccatagttagtgaatgattttggaatgtgttctatttttgcagttggatctttgctagaaaatggccaaaagtattgcaaggtcctcagcttgatatactatggggggttctatctctttttgcttggattggggtagtatcccctattgcaatc

SEQ ID NO: 45658 - DNA, 428 bp, Arabidopsis thaliana landsberg
  unsure (1)..(428): unsure at all n locations
gtnnnnnnnnnnnnnnnnnnnnnnnnnnnnnnnnnnnnnnnnnnnnnnnnnnnnnnnnnnnnnnnnnnnnnnnnnnnnnnnnnnnnnnnnnnnnnnnnnnnnnnnnnnnnnnnnnnnnnnnnnnnnnnnnnnnnnnnnnnnnnnnnnnnnnnnnnnnnnnnnnnnnnnnnnnnnnnnnnnnnnnnnnnnnnnnnnnnnnnnnnnnnnnnnnnnnnnnnnnnnnnnnnnnnnnnatctttcacccctctttcttcttatttactttacttcttatattatatttttatccctcctctttcctggggggtgtggtgtttccttcttttcttcccccaagccaaatttttggggggggggttttcccccnnnnnncttttttttttcttttctctctatttaacaaccccctcctttttttttttttataa

SEQ ID NO: 45659 - DNA, 577 bp, Arabidopsis thaliana landsberg
tgaatcttcctagcctgagcctcacttcctcttcttctcatcacaactacctcatcatcccgaccccgatcataatctatcactctttttggtaagatccaaactctttttttcatgttttaaacctcatgcatgatccatctaggcatctagcaaggctactgagtcctaactgattaatggtcttctttttctctccgtttaggccttccagactttagagccgatcctaaatttttgtctagtatacactaccaccaaagcattattgaataccaaaaatcaagtacaaggaaaagttattagttttagacaaaaataagtttacatacgtacatacactgagacacctatatttttttctcaagcaatagactgatgatatttattgttcatagtggaagatacacaaatcaatttttcagccatttacttcacattgatcaacattatttcagattaagaaatgactcccacagtagttaattaggaggatgacttaaagcgaaaaaaacgtttaggggaatagagacggaagaggttgaaggcggagatggaagagaggaggacgatgaga

SEQ ID NO: 45660 - DNA, 392 bp, Arabidopsis thaliana landsberg
ttgagtctgtctgagcacgactaaacacgggattctcaaacgaccaaacagtaccatttaaaaggcaagaccaacccatctatacatactcagactgtatgtctttctcgaaccatatcgaccatgctatctattatgcataaacacgctagacaaagacaacgtcaaaaccctggctaacttctgaactgagcttgcgttgagagaggacttgtacccaccgctgcgatcttggaggataattctttagatccctttacttttatgggcaacgatcctacactgacaatgtcatcagccagagacccagtaacctcttcagaagagtctgacttgtggtcatagccgagagatggggtcggcttaagcgtggcttggggtggggttaaagg

SEQ ID NO: 45661 - DNA, 486 bp, Arabidopsis thaliana landsberg
acaatgtggctctgccatgtgctatcacagtgtgtgcctatctatgtttgtttcaatctcacccctcacaaaagaacctagtagctcacatactgataacaccttgcctcttcgttcttcaagtgattacctcaactcggagtaggagcagaccttgaattcaacctcgatgagtcgttgctccacctaagaactcaagcagcccttgataagtcctgtacaaacacacgacgcaaaatgattatgcctttttctcaaagctacctctcactattttctacaccttcttcttaatggtaccactaacgttaccaactacctctactttctactcaaaccatacattcagcaatttgactctcacctccatcgagttctgctctcaccatctgctttcttaacaagtaccctgaagcattattccctgcttaagttatatccatcagggccaaaacaaaataacacaatcaaaacaaacaagccggc

SEQ ID NO: 45662 - DNA, 745 bp, Arabidopsis thaliana landsberg
cctgcatcatgctgttgaatcagtttaaagagcctaatgatcttaaagtgtttggtttcttagggtttggctcagattttaatgagaaaggttctataatagtttcattgaggtcctttactcaatctcctgtcttcagcaacagaagagaccaaaatctccttggcgctagttatgattttgtaattcattccttagagaaccttttgcggtcttttgctaaagtctatgaagaatatactgagcacgcatggaatacacattcagacactgtaccttctaaatccttagcacctgattccccagaagttggcaggattgtggatatggatttagatttagctgaagacactaaagagagggatattatagctgctgggggaaaagctgtacctggcctgcccgtttctatgggtaactggaagttgggcatggtatcgcttatctcatgtttttctccggtacttcagtttcctacatgggatgttctatataatctattggagaaggaatctgatcctaaggtatttcagcaatcttttttattataccaatatctcaaacttttgtggtgaccttatagctacaaactgcttacatgtgcaggtactggaaaatatactgtatcatctatgcaagctttcatgcttgacttctatcccgaaagttgatgatttggtatggagatgaatttgctgatttagatttgctgtgaaatatattgagacagaaaatagagggtttt

SEQ ID NO: 45663 - DNA, 552 bp, Arabidopsis thaliana landsberg
ccagcttgacgtaatccacaccccactgcgcgaactggcgcatgtcgcggtaaaatgatccggcgcacccggcttggccgcgccgctgccggcataaccgccgcacgtcaggctgcccgcgtcctcgtagatgccgaacttcagtcccatgcgatggatggccgcaatgaccggctcgatgccttgcggaaagcgtttgggattaaccatgaggttgccctgcgcatcacgcttgcgccccatccagcagtcgtccaccgtcacgcggtcatagccgcgcttggccaagcccgaggcaaccagcgccttggcgttggcgaggacagtttgcgccgtgtaatcgcattgatagtgcgcccagtcgttccaccccatgggtggtgtcggcgatacgtccgtcgccgccgtggccggagccgcccacacagctgcgcccagcaggggaatcgccaggaaaaacgccaatgcgccaaattgcttgttcatgatccaccctcagttcatgccgccgcccgttcgattaccggccagtgcaggcgatgcacccaagta

SEQ ID NO: 45664 - DNA, 799 bp, Arabidopsis thaliana landsberg
ttacacgacgaaaatgctcaactcttcttcattttcccttcttaaaaaataaaatttattttagaataatcaatataaaaatcgtaagaaaaagacatatagttgttgttctaattagccaaagtggtatactggtattaattacaactaattcgaggaattgtccttaattatacaataatatgctttcttgtggaagtccccagaattaaaataaagtatttgttcaagaaccaaaaaaaaacatatcctgcaatctgtatcgcatcccccgatttaagcttattatcaattcatgtattccctacaccgtatcttattctttaattgaaaaaaaaaaaaaaaaaaaaacctgagttcatattaaacttataaaattacgaaaattttactttttgtcagtaacaggtttggttttttaagtcaatttatttgtttttgtcgaaataagttaatttatttaggctacgatttttgttgcaaaaactgtttcttcgcatttttaaaatatttgatttttggcacatacggaaaagatgcctggcaatgctaacatggacaggtggacgcttgataaaaggccacgtagatattgagcttggaaaaatatttcacgtggtcttggccccttctctttgtcatacacattcaccttgagaaccgaatcgggtcaaatcttcgttttttttttttattcactctgtattttttcatcatttccccaaatgcttaactcgaacactagtaaatctgaattatgttattcggattttatttttattttgaatgatgtttcttt

SEQ ID NO: 45665 - DNA, 616 bp, Arabidopsis thaliana landsberg
aagcggcagtgcacggttcgtttagaggttgctttaaacgtctggttcgtctttatcttacaccttgttaggattaagaatctttatacatgcatggccactattaccatttgtacggtgtgtttatctttggactatagagatgagaatgatgtttcttgtaaactcacataaggttttggactcgttagaactcattatccccaattgcatcttattttatgtgcagtacatagcgaaggttaaaatctcaaaagaacgaaataaaacgaatgtctaagttacttaattttatcttagttttcgaactcatctctcatggtgtgtgatgtatcatgtatgattgatagagcgctactaacatgttgtaatagggtctgtaataggtctggtactaatgtatctgaaaaatcacatataaagtgattagccatatgttctagtcagtactgtctcaaattttgtcttcgatcaataggacaacctatcttaccatatgtggagcaccacttggttggaaagttacgttggtacccgcaaaaaaagaaaaaaaaaaaagaaagaaccctagaaatagatatgatacatatctaaaatcatgttgaatgaagaaaca

SEQ ID NO: 45666 - DNA, 461 bp, Arabidopsis thaliana landsberg
caaagtaacagagcttgaaaaatgttttgaacagaaccgtttactctgttttcatcaaacaagctttggagtttcaaacgggaagagaaatatagagtattgaggaatttgtggctgtgtaaacgctaaagaggaagagcagaggaagagacagagcagtttaaatagagaagaagccaagcgagactgagtcagctcaatggacgattggatgtaaagaaagtatcacaaccgttggattagattgtaggaaacgaaacttcccctttttgcttttctcacctagagaattcgtcattaactccactcattaattaaacgactttatttttaacacattaaccacaatctcttaagcattttcaatttcttttcgtgacgttttacttgcgaattaaatttataactgatatctaatcttataaccaaaaaaatatgtagatgcagagaagaggatgagt

SEQ ID NO: 45667 - DNA, 978 bp, Arabidopsis thaliana landsberg
tgacctcaccaatagaagtgtgcttactcaattcctttttgttttacaatttttactctcttgttcacgaactcacgaataatggcgaaaatgtgtccacatggtatcttcttatttgtaattcagaaatagatatttaaatcgaaacgaagagaagagacaaagggttctcaagttgagcacttgaaaacaaaagttctggtacaatgtacaacacaccgtaatgtttgatttgatttggcaagaaaaccaaatttctaatattacaaaattagaacaataagaaaatttcgggaccaagtaataacccagaaatagaaggtgacacactattaaacaaatattattacaagactgtcataaaattgaaactataaaatgtctggtctctggacgaacttttctgtatttattatacctgataataacaaattaacaatataacatctctcttttaaaaagtgaccgaactggccgatctgtgctcacgatcttggtgttggtgatcatagcattacctataaggacctcatttgattaatggagagttggagactaaagaatgattctagaaaaaatacagtacatactacataacattatacatctgttcatcaacactcaagtcaagatcaaaggcaaaatagtttttccatattcattgtaattaacgccctaatccgtcattgaccctagattaagaaaatatatatattgagacatagatgatatatgtaaacatgttcaaacacagaaaaaaaaaagtgattcttaaaactaatcaagagagagatttaccaaagatcgatccagacttcaatcaatgtcttcaagtttctttctcaagctttaggtatttgtagccgtcgattgttgatgcagcatcatcaagattctcatatacatatcaaaaccctaatttagggtatttatcaatttccatgtgaatcttaatggtgctgcgcctacaaacaacga

SEQ ID NO: 45668 - DNA, 1590 bp, Arabidopsis thaliana landsberg
gcacttagattgctagaatgacaatcaaaccagcaataatggcgttggtcgtagcaacagcatgaacaatgtttctagcaatacctttcgcttcaaaaaggctgtgcaaaggaattccgaaagactcagcacggatatttgcagcagcagtaacaaattctacagctaactgatcatctttgtcaaaagtaaggtgtcctatttcctgtggcagcatatcgataaaaccatgaattaatcagtgcaccgaaacttatctatagacaaggagagtttacaaaaaggaccacacagaccttctttctcttggcgaagaacaacttcaatgcttctatgaacacaagagaattctgcgttagaccccacaattcctgtggattcttcaggccaagcgatggcatggcagagaccattgaatcaccatcagtaacagaacaattctgagtgcttccattttgttgagtcagactttcaggcaagacatccttactgtatataggccttggtcgtctgcgatttttccatgtctcttcattggacaaagccgcttcaatgttagaaccaaacacatgatcatatatcttcctaccatacagctcaatatcttcatcttctgaacgttcaaatacatcttctgtttctttggatgagcttgcagaattgttggatcgcacattaagatcattatcttgattcttgtcgccaaacaactttgcaaagagcaggtcttttgcccatacaatacagtgcacaaactgcagaatcaattcaaaattcatcggcacatcaaaaacaagctctatgcttaggataatactatataagccaagatagaatataatttccccaagattcacaaaaatttggaacaaacaagaaggtgttaataccttagttggcgtgctggttattgtacacacaggataagtctttggagcaggtttggtttggcactcataacattctgtttttccctttatatgcacagttacctgatttttacaagcaagtattgcaaagtcagatacgagagaaatgacaacagtacaccattcaagcctaacattgtagtgcatctaactcatagaataatgataagagaaagaagagctgcaagaccaaaaggcaagcagaataacctgtccaaggaagcccgttgtcccactttctacaagaggaacatcagctgcaagacaaaggcgattcacatgacgccttgcatccaagttgtccagcccattcagaacaacatcaaattgcttgaaaaaatcaacatcaaactcgggattcttcacatttgcatggtatgatcttatattaatgttaggcctaaatctcaagactgcatctctggcaacctggtgatatggtaaaaatatattaactcttatgaactggctttccttggacttagctcaagcaaaattaccttagccttagactgcccaacatgagaacgacggaatagaaattgcctattcaggttactgacttcaatagtgtccatgtcaatctgtaacacaagagttcagtaacttaatcacggttaccaactaatcttattagtccctgctctattcatacagaaat

SEQ ID NO: 45669 - DNA, 512 bp, Arabidopsis thaliana landsberg
  unsure (1)..(512): unsure at all n locations
gggactaattatcaattgtgaaccccaaggttagtaacatggtaacataggaggttacgattagggtttacctaattttctagccgccgttgcggtcatcccatcccagccgccgccggcgtcgcggccgtcccaaccctagccgccgtcgcagccctcatctgctccgccctcttgcgctaccgtcgtcgcggccctcatctgcttcgccctcctgcgccgtcgcggacgcgcgcctcctcctgcgtcgtcgcggacgcggactcatgcgtcgtcatctgtctgcgaactgctgcgctcgcgcntgcgccgtcgcggcacctgctccgccctccttcgccgtcatctgtccgcgagcgacgcggacagctgcactcgcgccagtgctccatctcgccacgtgcgccagtgctccattggcctgctcggtgttgtcggccctgctccatcagatctgctccacagtgcttctgccttcttacagccaaaccagatctgctgccgggtgttgt

SEQ ID NO: 45670 - DNA, 817 bp, Arabidopsis thaliana landsberg
gggctatcgcatcagcttgtttagcctttagccatcttattttgagcatgaaattatgtttcctcgtaacttcttttttgatggcataaagtcaaggcatttaaaaaaaaaacaatagatgaaaatttgttgttgttggaatacataagataatccatattagtctcaccaaatttgttaaccttgtttacatctatgaattaaatttatttaatatttacattttaagagaattatcaagcaataggtaggtaaaaagttgtcgagcaagatacaaacatatatataagcccattcaaatttatttttccatataaaaaaatttcaagtgcttatatttttgtttgaagtgttttagataaaaattctattgttgattagcaatttcatgagatgactactcttaatatcaatataggataaatgtgactttttggggcgattttattttacattgcagatgaaaaagtcagtgttttgagatttaaatacttttccaatgacgaccgtttcgtacctgaattatacaacgtatattgaatactcgaaatgtaaaaaaacttggctagacaagtataacaattattaaaagtcaaggctataaagtatttcatgcaatttaggaaaacaatggctacaaccgtcatagaaaaaacaagatcaatggatgagccgcatattatctcttagaaacgtatttgttgagatacgccaaaaaccgtaatcagcataatccgccacataatgttttactcattaatagtggttacgaatttatgtttacaatgaacatttttttcttttgcaccataacatc

SEQ ID NO: 45671 - DNA, 672 bp, Arabidopsis thaliana landsberg
agccttgttattctcatggagttgtatggtatagattatagaaattcagtattttagatggatgaggttaattataaggatcagagtgtgtcgtcgagctagatcgttctggtgcgtgagttttgaacatatacgacattgatttggtcggagcatatatcgtttgggttatatatgtcaaacaactgtatactagcttagatttgataagagttatacgtgtatgaatcgcgaatctgtgtttttatgatatcgaattatcgattgcacaatgtttgttatatgtgatctaattaatgttagaaaccgtgtcaatttggacaaataatattttaaagttattgtttatatatgtgcatgagaattcatcgacctgcaaatctgaacgaatcaccattagttcataatacacgtattatcgttttttttctttgccaactacgtattatttatgatttttcgttcgcggatacattgtattgtttgtgatttactttatcaccttagatttgatacaccacatatataagatttgggtaaataataatgaaaacaattgataccgagcaagcatatatattgaccaggtgacttttcgatttataaaaccatatacattatactttctaatattgattaagagtaatcaaaatgtaaaaaacaaaaaaaaaa

SEQ ID NO: 45672 - DNA, 634 bp, Arabidopsis thaliana landsberg
  unsure (1)..(634): unsure at all n locations
ggaacggacttaaagtttggtatatcataactacactaacacaatatactacttttttatactacatgtcttgattaatatctgagtaagacaactggtaaaattttgtcccatcaaactcattattatgcaaccactaagtatattttgaatatgaactattcttaagattgttttcgcgacaattcgatctttatcaagtatcaactttatgccatctaatataatgatcactcccgacataatatnnnnnnnnnnnnnnnnnnnnnnnnnnnnnnnnnnnnnnnngagttatccacgtaaacgatccaacaatgtaagatctaaaagggccctatgcgaaatcatgacacaatgacaataaaccacctaaaaccattacatatattccatttgtttctaaaatattgattttccatacgttttttaaattatttaatgctaataaattacaaaatttaaacaataatcattgaaaatatttaaatttataaactattataggtccaaataaaatagtattttttggtgagacaataatgtattttaaattacgttacatatatagtgagagatctgtctcctacatgcatntgatatttcaatcgattaatatactgtattataaaattta

SEQ ID NO: 45673 - DNA, 678 bp, Arabidopsis thaliana landsberg
ctcccactagaccactggtgctgttgtttcaactaagtaagtttagttaattgtatgttatttgaagtcgagtgatctggttgaaggttttatgctatgctaatcatggtttatggttttgatcttagcgggtatttattggatggtgattttacccagttcctaatgatacaagatgaatcagtttatacatgtcaaaattcttgtttttcaaatgtttcaacatgtatatgtgttgtatcttctattgtaaattaagtacttgatctttctcttatgactttcaggaatatagttacagttccaatgagaagttcataaaatggacagtgacaaacatgaacgttactaaccggtggaagttgggttcatgttatattttaaacaacttactttgtagcattcttcttttgggattctcattttgactcggacactctccactgaaactagttctatacccaataagttggtagaccatggttttttatgagttacatttagtttattctaaataatataattataagaatatgagttacgtgttgagctttgtggtattttaaatggacaaactcatgagtttttacaattaaaacaaggactttcaataattaaataataaaaaagctataaaacaaaatatagaaacaattgttcatttaaaagaattagagt

SEQ ID NO: 45674 - DNA, 553 bp, Arabidopsis thaliana landsberg
accacaattaatactttaatggaggtgatagctctaagatgccctcctctattaaaacattaccagagacgatcttgtttgatatgtcaacctccattggttatttttagattaaaataggatttcaccattttttgaatttgaattccgttttcacaaattaaacacatataatatatactagaaatagataatacacatctagagatgggccaaagttcaaccataaagagcttgtgggcttgagatgccaagatcgtaatggttttccatagggtttactacctaacaataagatgggtcgacccatgaacagctgggaagacatggaacatggtggcatagatttcatgacaagcaaactgacctagtcggctataaaaaagacagtgtttctaacaacatgcagacacttatatcatagctaactaggactagaattatgtgtctgtcctctatactatgaagataggatggggtactccccttgtaacatcttataataagtaatctaatgcaagacaatctaacatacatgccagatggtattact

SEQ ID NO: 45675 - DNA, 935 bp, Arabidopsis thaliana landsberg
cagcccaataaattaaagcccaccgaaagtggaagattttgaatttttgcacgattgtcgtgcgcctcgtgggaatgggagtagattatatactatatagatataaaactcttcaagatttgatgaacaattctgttgaaaacatacacactaactgcttatagagctgaagataccattgcttacttttccaaaaacaaaaattgataactaatatttggatggtcgccttttgtgatatttgaattattgtttcataagctattaatcatggatgaatgaaacaagatatcgttgagaacgaccgtgatgttagaatctgagtttgtcattcacaaataattactgctactctaaaaatcatatgatgttatcaggatatataaaagtcctggaatcagatagcagcacttttttttttttttttttttttggtcaaagagtcaagacatcacctgttgtatcattttgaaactgaatacagtaagtgtaacagtaatatactaatataaccgggggattaaatggtattcacaaaaataaaaaaataaaaattggctataacgtcccaatctcatctactttgaccgtaataattgacaaaaaaaaaaagtagggtgctaacatttattttattttaagcacagtgagctgtctaaacctacaaagtcaatgcctcaaaagaacattggccaatgtgtttcaccatcaaacataaacaactcatcgtcattaccaagaaaaaccctaattacaattattagtacgtccaaattcgtaattagtaaacaaaaagtgagatagtaatggtaaagagaagagagtgctttcgaagactcttccctcgaataaactcaaagaggtgacagccgttattaatacctcctgccgtactttcttctacagaccacacacactctttttttgcttacgac

SEQ ID NO: 45676 - DNA, 647 bp, Arabidopsis thaliana landsberg
actcactatagtattgtttttagagtgaggatagaaaagctaataatacatcattccatgtatttgatcgcatcctcctacatagtgattaaacaaatttttttgtacaaaagctatatcttttctttttacattaatattaaaatatattaaagaaacctgaaaacgtttttacaagaacttgaaacttaggatttgacatccccaagatgcaaaccacaaccaataaatcaacattgtagcgtcgaccacaccattctctcttatggatgaaatcctatttcgaataatcttgtagctttgtaacaaatcatttggaaattgtaatggaactagaaaactattctatgtaatatacaaggatcgtctattgaaaccaatcaaatccatattgttctgtatataataatagtttgcaggacaaaaacgagaaatcataaagggttactaatatttatgattggagaacttccccatgcttttcaagtttagtatagtttatcaaaaagatttagtaaattttctgtttttttagtctcatataggttatattcttaaatagactattcggcctttttttttgggcaaattgacaaacgtttgtaaactaggtttctcctctgtggatcagttatccgtaattgaat

SEQ ID NO: 45677 - DNA, 655 bp, Arabidopsis thaliana landsberg
attgcatcgataatggggtcgtaacattgaagttaaggtttctttaaagttgtgaacataaaagaaggatggggggggggggtgtataagcatcaagcgggttataaagctggtttcgaaggttggggaggttggggcgatgatagggaccgacatttatgtttggattttgccactatgtatcgttacagcagtagcagtgcatctccatgaaactttagagacttccaagtaaaggtggtaatataattgagggattgctttcttgttatgtgcttagtgactcaattagccttgttgtatttttgattgttatatcttgtttgtatcacctgaagtatttcactttctatacgagcttttaccgccttttttacttattgaaaaatagattcaaagtgatgaaatcttaaggcagtacagggatttcagatttggtattaagctggtctgcaaaagctctttttttttttagccggacggtaatagaaggtccagttgaaggaatttaaattctcaggtaaatctgtgtatgtgcttgagtttagatgataggagttcggcccaaactaaacccacaaagaccttttgctataactcgcacaaaagttggcgtttttggcccaaaaattcgtgtcgaaccgcattatattac

SEQ ID NO: 45678 - DNA, 670 bp, Arabidopsis thaliana landsberg
  unsure (1)..(670): unsure at all n locations
agctctttatactagttagatatttagagaaaactttgatcgtgctactttagtaaagcttcgtagctaaatcacattatagtgtattacaatgccaaataactaatgatgattgttgacggtcgttattccacatgttcgaccaacaactatccaaaaggatgggagagtttttatgaacaaagtaactaacattgcttataattgagtttcacaagttatgtttggaatatttgagtgtaggttatgaaaaaaatataaaagggagtgaaaatggccaagtcataaaggagtaatggttgacctaccaccccctagaccgatcgacatgccatggttgcccaaccacatcctttgtcacccagctatccccttggccattcagccacttgaccgagccaaatacactccacatttgatcctacatgcatgacatgatgaactcaacgcaacttcaaggtgtaccacgtggatgacacgtctaggaccaaaagacagccatgttattgatccagctcatggattcgtgaagtcagtgataaaaggaacatctattcaatggctaaggaagaacacataccaatccaatggttataggagaacaatgcanataatcgttaactgacttgaagaaggctctagaccgtagatgagtattgaggggagggat

SEQ ID NO: 45679 - DNA, 1156 bp, Arabidopsis thaliana landsberg
  unsure (1)..(1156): unsure at all n locations
cggctgaattttattaagaattcaaagtagaaataccatttgttaatttaaacgccggcagaccaacaaaatgtctggagaggctaagaccaaaagagggaaactaagctccaaccaaacgaagaaactatttagaccaacaataaaaacaaaaagacaaaatatctaaaaaaaagatcaacctttaaagtaaaatgaaaatttaaacactaaaattgcgcaaaagaaccagaaactcttacaaannnnnnnnnnnnnnnnnnnnnnnnncggaagcaccaataagatcagaaagaactcatactgatgttaaaccattaacaatccaacatggaggatagcaagaaaccacccgaacgagagacacaaatacaaacaccatcacacatcaccaaccagaccgaaatagcaaaaatactagagacaaggcaagagccttagaaatcgactagagataagccaattaagatcactagttcttacacgcggtttcaagttagttccgaacctcagtttttaagaggttataagtgtccaatatgttaatactaacgacagtgatcgctagacgtagtaatactagatctcgattagggtattactattactatattctctaaacatgatgttttcttctcaaaattttgcaccattggagatcttcttttcaaataaaagaaatatttactctctcaaacaaccattttcatccaaataagaaactaacagattttaccttacccaaattatcttaatatatattttgatattattttttcacaagcatatatttgataatttatatcaatatagtgaacacattaaaacatatgaactaccactagacatctgttatatgatacacaacaatatagaatttaaatttatagggtcaagagtccaataatgtttggaattattacaaagcatcaaagcatatagaatctccgagacatgtatctaactttttattttgtcacgtatctaaacatcaagcacccattataacccaacctagctgtcttcaacaattttttcttaaagagaagaaaaattcaacttcctagaaagtaaaatgaaattaaaacagaagtaatagatttttaagcagttcaggactagtgtcatcatcttcatgatagtctgttttaaagat

SEQ ID NO: 45680 - DNA, 515 bp, Arabidopsis thaliana landsberg
agaataagcaaaagggctagaaccgtgtataagtttttgatctgtgaaatctcatcaccaaagccatggcggatagagcaagtgatgtacaagcatcatagaaatttcctctaagatataggcagcctctgctttgtgatttagtgaagaaattttggcaacactaatcattctaaagatagaaagagacactaacaaaactaatcatcacacaatgatatgcattttttccaaaatcactcacaatgatagatcttcacaatatacaaagaagaaaaccaaattggaaagaagaagcagaatcacaattgtgaaaggcaaaccttcaatgtttgaggtttgagaacagacaatcggctcgaacacaattcaacgaagacaacctgtgatatcaacaacttgcttagacctgaacatagacaagataaagatatcaaacctcagtcctcaatgaacacatctaaagagaagaacctctggttcaagatgctgattattgcttcaacttcaagaca

SEQ ID NO: 45681 - DNA, 463 bp, Arabidopsis thaliana landsberg
cggcgcgccgatctcgcccaaggccccgcgcgacctggcgcagcacagctgcatcaacctgcgcatgaaaagttgcggtcgcctttattcctgggaattcgagaaatccggccgggcacaaaatgtgaaagtggacggccagctgaccttcaacaatctgcgcctgtgcgtgcgcgccgccgaagccgggctcggcctggccttcgtgcccgacgattgcgtcgagggcgcgattgccgatggccgcctggtcaaggtgctgtccgactggtgtccgccttttccgggctatcacctctattatcccagccgccgccagcaatcgccggccttcgctttgctggtggaaacgctgcgctggcgcggcaaaaagaaagacaagccatgatcccctgggtgcagctcgatacggccgtcgtgcccggcagcaacgacgagctgcggctgatgcagcgcgggaccg

SEQ ID NO: 45682 - DNA, 721 bp, Arabidopsis thaliana landsberg
tgaatgccaaagtgatttgtgagttagaaaaggagatggatggtcttgttcgataaatcaaggtccatgttataagaggatgatctcttgataaggctttatgcgttaactccaagacattatctatttttacttgagagtttttatatgagtagagtacttggttttatgaatcttattggttttctcggaaaataatcgatgttgatgctttctatacacttcttgattttgtttgtttgtctgaaacatgaagtgcaaaagacgatcaacacagtcttacaataataatgtatactagagctatagattttgggagaaatcattatgaatggttcacacatcagggctgtttaaaacctgcgagttcatgtaaaaagaatgttattactctctatgtgatcataagaaaagcattggcataggaggagaataatactaagatacttggaactctgccacttaacactatctcattcttctttcaagtttcaagtttcttgttcaagaattgaatgtcacaagtccttctttctctaatatacccttctcgactctttactgtggttcttttgtttaaggacgataatgtcatttacacgatatagattgaaccaaacttaaggcccatttcttgttttttgtttgggccttagcgataccttggtccgcttaacgaattatttttgaataagaagagtactattaatggtttgttttc

SEQ ID NO: 45683 - DNA, 726 bp, Arabidopsis thaliana landsberg
cgccatttcgtgaaggttttgattgaaggttcgccagctgttgtaattgtcaaggactgctcaagtttggaagagaatgatgtgaaagatattctctctgcctgcgacggagataatttgcaagtaagttcagtttgtttctctccaaatttcctggctatagactcgattatacttagttgttgttgtataagatctttgttcctcacattgctgcatatagacttgatagtctgactcagtttttgtcctttagagagaacgttttagtagcttctctaagatcttttcccccattggtttcttccgtttttctctaattacctgcttatagattggattttctgacttggtttttgtcttgacaaagaactatggtttgagttcatttcagcaacttgtctaagatcgttcttcctcatttgtttgcttttgtcctgaacgtcaaagagaattttctggttttgtattttgtacttaatgttctagttctcagctcatggtatacaactgtttctgtgttttttttttaatctcaggtcttaatactatacttctgtggccaagcccatacagatagcttgttgtccatctcagcaaacagatttccagtgttgtcatcgttatctctgaggggtgcattccgtctgactgataatgctctggactcgatctcaaagtctgctccttcacttgagttaattgacctctcagagtgctctatgt

SEQ ID NO: 45684 - DNA, 430 bp, Arabidopsis thaliana landsberg
gacatggttatacaataagaagacatatatgtctattttgctagtatggtcatatgttcgtttggcagccagtggcatggaaaaatattggttagtaatttgctcttctttgcagcgaattatgccggaactacctctcaggaacaattccaatggagtgggctaaaatggcatacctcactagcatgagagctgtttctgttctgtatttccaatagtggtcattggcatgatttgggagtaacgtacgaaatttttcttgcagctcggtctgcgcgaataatttgtctggaaacttaccagctggattacaaaacttcaagaatctgacattcctgtacgtctcaagttgttttgtataccggtatatatgttcgttttgatctgacctaatattacagtaatgtgacgaaattttcagaggagttga

SEQ ID NO: 45685 - DNA, 557 bp, Arabidopsis thaliana landsberg
gaagttccgttgctgtcaaaaaagactacgacttttacagaaatggttctcgtgatgtgtatgttcgacagagtggtagagatgacgagaggcgtcaaatcaaaaggcctagtgaccatgatctcaggaggaatgatgggcgtcaccgatcacggttggcatatgagaaaggggaactacgggaggaagcagaggttcagagaccctctgagaaaaggaggaagttttcacccatcgtgtggaatgcagaaaaagtgggtagagctccatctagggagaagaccaagtctcctttccctgttccgactacaactgtgatatccaatcaggctgttgctggtaagactacttcaaacgatcaagtgaatgccttgatgtcgccagaacctagttatcttgctccagtgcagccttcagaagccctgctggctgtgaaacatcctgttgatgatttggaggagggtcagttggaggaagaacaggtgatgcaggaggatgtaaaggagggtctgttggaggaagaacaagtgatgcaggaaccaaatataaagacatct

SEQ ID NO: 45686 - DNA, 656 bp, Arabidopsis thaliana landsberg
gtctagtgtaaactctagttaaagctgtcacatttgaatctgttttagtaatattaaggaaaaggaactcagggggtggtgtgttgttatatattggattcaagctttgattcattgaatggaattttagtgtttggtttacgacctctgttagttaataatcatagacaccatttccttctttagatgggttagtttggttctaatcagggaaagccattaatttttccatctaatcattgtagaaaccttgcaatattgtgtatatgtaaacatacacaatcgtaaatgtttggatatcaaactcttcacaagtgtttgtaggagaggaagtataggtgagaaaagattagggtcagtcacagattctgcaaaaagtaagagaaccatgaaagtaaaataaaacataaacccagaaatagaaaccattcccttcaattaagcaaatgagttctctttccttttctcttcttatgtgtatatatagaaatgaatagcttaaattttcccacaaaagccaaagagacccaaattattgttttattttgtttttgttacctcgcttatatctattatcatggaaaacataagtgggttggcttttgatatgggagagctaagaaacaaccttcccaaaaagtaaaatcgtaaaaaga

SEQ ID NO: 45687 - DNA, 895 bp, Arabidopsis thaliana landsberg
tgtatagtatcagttacatcctaaatcgaactgtattcattaaatttatgaaaccgctaaattttggaattaaaagaagtaaagcttagttttcccaacattctttccgagagacagaataacacgtctactactttttactaaaacactacaacatcgaatatcgaaacatttgtttttctcgaaaatttctccttttttcattacaccaaagttttgcataaaatgtatttgtagatcttttcgaaaataattcatgaaagccaacactaagaataaataaacgacagcaaaaatggtgaacaaacatttgagatgttccatgggaatctgctttggtgcaatcactgctgcaaaaacaaagacaaaaattcatcaaatgtctgagaaaacaaaattagtattgcataacaacataatagtatattggtttccacacttacctcacttcttcttcttgtttgttccaagagctttgtctatgatgctttaatagtaatgtgtataaggagcattcgcattttgcttttcaagctgcataaacgtgtctgcagattgttgatcgcttggagaaaaagtcacgtcatctctcttcctctgaacaaactcaatgttcgactctacctacaaatcaaaatccattctcaaatcaatacaagagagtcattcaagccaagattcttaatactccacaaaaagtagatggggttggtttggttgctttcatcttgggaataagaattacctgctcgataaagcgtatcaccacccgcttcaatccttccatagtgcttctttcgtgaaatttcttcagcctcatgacgggaatcgttgcaagatctggaaatgatatatggaagctccattgagcaagctggcagcaagcagttccatc

SEQ ID NO: 45688 - DNA, 587 bp, Arabidopsis thaliana landsberg
tctctccctagtttaaccaaattatgattgttatatgtttggaaagatacatgcaacacattttaaataatatgttgtgattgagccgaatgcttatatgattttctattatacgtatagcaatgaacacgattatgaattcgatttagagtgatgatacaaccttaataccttaatccattcaggctagagaccattataagttaacttaatctcctcatcctagtcactactcgaatgccatctttacgtttaaaacaattatggccacactaacgatatacctatgtttgtttgctagtataataaggatatgtctctatttgctatcacttcagccttttctgaagacaatgttaccgctatatcttccaatcaattgataccactaaatgataaaatcattgctaatcttataagatcaccaaacactcagacaaaaagtttgaatcttgcttcttcttcgtttctccactctttatccgcttataaatactctcattctctcctcttaacatcctcatcaaaccattatagcctctccacactcacaaagggctcacaagtctcaagtagttctcgttctc

SEQ ID NO: 45689 - DNA, 536 bp, Arabidopsis thaliana landsberg
cggcgacattctcggcgatcgagaaggcgacgtcattggcggtcttgtttagcaggaccttgaaggcgtcgtggggcgtgagcgcctggccgggcttgaggccgagcttggacggcggctcggcggcggcgcgcttgctcatcacgatcggggtcgcgagcgtcatccggcccgccttgatctggcggaaggcgacatatgccgtcatcagcttggtcagcgatgccggataccatttctggaaggcatcctcgtgctcgatcaccttgccgctgcggatatccacgagcatgtgcggacccgccaccgcctgggcgacgactcccatggaaagcacgggtgcgagcgttgcaacggcggccctcatggcggccttgcgaaatacagccttcatcctgtcccttacctaatgtccagccgggaaaaattttgaccgggccatatttaccctatatggcaaggaaatggcagatgcccgcgaaagtttttgccggagaatccggcaccttcaatgtgaatgacaggtgacagagaat

SEQ ID NO: 45690 - DNA, 593 bp, Arabidopsis thaliana landsberg
aaacaaccatctttttgaagtattgcaaaattggaaagaagaaaaaagtctgctatgatgcattttgtttatggcatccagaccattccttttggaggatactatccgcaaacaaacactcagaacaacaatatgtaaacaatgagcacatatactccatagtgcattagacctacttaattagagtttcaaaatacctaacgtaaatcaggaatccaaagtctataataaaggtaacataaattcaaactagagttttgtaaagtgtttatttgagtttgatggggaagtgtttctcatgcggaacgaaaagcacactaaaactctaattaacatgtaacttaatgtccaatatataaagaccaaaggccaaagcgcttgaacctgactcaagtatcctgataagcactacaaactcacttgctttctgaaatatgattatgtttcaaattgtacgtcggagaaatgataagaacttgcatattaagggttgtttggtacttaagtgtaactagcttgataaaactaagaagattgaactcgtttaaactaaaactgctctttacttgctgtttgtgttttcatatcacgtt

SEQ ID NO: 45691 - DNA, 378 bp, Arabidopsis thaliana landsberg
tatcccataattaaatacgcaagtatcaaaaatggctataacattgacaaaaataaattagaattatctgataaaaagatggtggagtgggtatttcacaaaattaccattgtgaattttgttgtactgagcaaaattgtctaatacatttttagatgcacaattaatacgagcacacgatcaattacatcgtcagactctcaatcttttgctcgtaagaacataatttcttaagccgatttgaattttaaagtaaagacatcagcacaaccgaagtgtcctgtcagtcgtcacatattaacatttgctagagacatatgggtgtgtagcaatcgactataagctaataacacatagccacgatatatggtctaaggc

SEQ ID NO: 45692 - DNA, 656 bp, Arabidopsis thaliana landsberg
ctcacatcttccccatctccaaaactcattagatcctacaagcactctcttctcttccttatccacatcttcacagtcttcaaccacacctgcctccctcctctccacttcctccgccgcgcctttactcttcttcactctcgcatctctcctctccttcctcgccgtcaacagatcttcaaccgaatcctcatcttcctcagaatcaccttccccttcccctcctccgcctcttcccgacggcgattactccgtcgctgccttccgtgccctaaccacagaccacatctggtcactcgatgcgcctctccgcgacgctcgttggcgctcattgtacggtctttcctacccagtcttcatcaccgtcgtcgacaagctcaaaccattcatcaccgcttcaaatctctctctccccgccgattacgccgtcgctatggtcctctctcgtctcgctcatggctgctcagctaaaaccctagcttctcgctactcactagatccatacctcatctccaagatcacaaacatggtcacacgtctcttagccaccaagctatatccagaattcatcaaaatccccgtcggaaaacgggagattgatcgaaacgactcagggattcgaagaactcacctctctccccaacatttgcggcgcc

SEQ ID NO: 45693 - DNA, 697 bp, Arabidopsis thaliana landsberg
catctattacatccacaccattattttagggtttgtccgtaacagtttatgaacaattcaacaaagcgcataaagtgaaatggattaaatttgtaagaaacatagaaaatgtttcttctttttatttgcacacatcaattttacaagtatatcaaatcaatatggcgagagagcatttacatatgcctgacgtcatattcttacgtcatttctccggcgaacagttacattccaccgtcacacacaagaaaacgaaaagatatttttttaaagaatctttttgtaattaattattcggtcagaaagagatcaaatcaaccgtcgccgatctcgtcttggtcaccggcgactgaggcaacctcgccgtgaaattaggaaaagaaccatcgtcatcagctctcacattatcctcgaaattgagcgcgtaactcaacggatcgtaactgaaatctccaggataactctggctatgatgatgatgatgaacacaattattataagcacaattgttgttacgacacgtaaccttgatacgtgacttcacacgccggcaccgatctcttaactctagctcctgcgccgtaaatttgagccaatcgtaaggagatcttggtgttctttgttctccaccaaacatcataaatatggctcaaccaccgcgttggctcctatacaacagatcgtagatctcattctg

SEQ ID NO: 45694 - DNA, 508 bp, Arabidopsis thaliana landsberg
cttttgatagtgtgcactatatgttgggtgtacagctttatcttgcgcctttcacacaaagtatatcgtggggtttaatttctctgtgtggctgattgagtgtacatatatatatatatataatcagagtcatatacattaggggatgcatgcgcatggtgcatggaacgaaacggatattttaaagggtgaaattgttaaatgatatttgaactaaacagctaaatatagtatgaaacacaatcggcattagctaaaatctcatgttaatttttataattaagttcacaaaatccatgttattttttaaaacacatgcagtcattaccattctacttacttactagtccatatttttataaatgacttatcatatgaatacctagtccatatgcatattgtttaagtctatatttatgtaaatgttattatcacaattcacaatattcactagctttggtttaaaacatggaacagaagtaaacccacaatagtacttacttaggta

SEQ ID NO: 45695 - DNA, 628 bp, Arabidopsis thaliana landsberg
gaaccgaaatacataaatacaattaaggactagttttatgcaaacatttaggctttatttattccactttttatatacgtctatgtgatttaatccattcataaaactctcagttacgaccaattcatcgaattcgaagaagagagctttttgggatagctcaacgtgtgatttcgtgattgcagtcatatatgtgactacctgaaatgtagcctattttggctatgcggattatttgttcctgagagatcgtacttgtaatagctacgtttcttttgggtttatttgatcgtgaggattattgtgtgtctatttttggttcaaattctgtttcgaatttggagttttgaatcggccgacagaaaaaatacaactttcattttcacacacacaacaaaaactaaatcattcatgtgcagccacacacatagaaacaaaagctcccataagtcatatctctctcacacacacatacacatatatcagtgaacatttattcagattcgtttttgttagcggataaattttgccgggtcacagatccaatattgttgcccactcattgctatttaccttttgtgttatagtgtttttgtggacctataatgtatatattttttgtaacgtg

SEQ ID NO: 45696 - DNA, 725 bp, Arabidopsis thaliana landsberg
attactctagctccgctgcccaacccaaatctcagcagttacttgtgattgcttccaaccataaccacactcatcgaatcgaggtcctaccacaatcacaccatttaattagtatgaaattgtgactacttaaaaaatagataataataatcttcaattatatatatatcacttgatatgttttatgaaaaaacaaatttccttaaaatgataattttatagtttatactttatatataacctcgttagtagttcatattatgtttaattcatttatttatagtagcatatatcttatgattcttttcttactttttttttatgtgcagcagatcttttcttacttaatattttctaattctctatcatggaatttttctaaataaaacagttacttgatgaaaaaaaaaagagttacttcaaattttgactaaaaacgaaataaagttccagtatattatataagttaactaatttatattttatatatttgtaactaattttttttctcagtaacttttcccatattgtgcttttaaggctaaatgcttttctagtagaaacttctaaggaaaaaagtgaacctgtgtgtcttaagaaaatatcttacaaattgctaaatgtttttttttttttttaacagaacggctaaatggttttcagatggaaagttctacgaataacgtacggggattagattacatcaatcaattaaatgagagcga

SEQ ID NO: 45697 - DNA, 506 bp, Arabidopsis thaliana landsberg
tttgcctttataaaagagggggcctattttcattggcacaaaatttctctttggacatgagggcatcgaccttgtcggggtaataaagatttgagatctagagtcacgatcacctttagttgattaagattatattccactaaattaaattcagaatcggtcaatgataatgtatgaaccctcatctcttggaccatgcctaacattaccttttttttttcatttcgatgtactatattttaacctaattttggcatttattcatgattatctgtttttaggccaaacaaattagtatactattcaggtactaaagtagtaaacacaagggtcaaagtgattattagctaaccacgggacctactaattaattatatactattagaccagattaggttctcaattccgttccttatgtatacttctaattataaaaatctcgaatgctaacatcatatttttttcatccgcgctttgatttgaacaacccgatttaaggaatcaaa

SEQ ID NO: 45698 - DNA, 648 bp, Arabidopsis thaliana landsberg
cccgaataacagtatgcagcaaaagacactcttgggtatgatgcaaacgtgcgagcctcaaattccctcaatatctctatatacgtctcttcatcactggtgaaagctatgctggtacgtaaatattgctctgtttctctttgaaaaacagtatcttttcgtcgctaaaatgtatcaactaaattgcaaatttttaggccattatgttcctcagttggctcagcttatgattcagtacaaccaagaagcacaatttgattaatctcaaaggcattgctgtgagtaattttcatatcactcctcaacattttcatatagatccggaatatgttatctgccttcataacacttggtttcgcacataggcaatccggttatggagtttgcaacggatttcacttcacgagcagagtatttctggtctcacgggttgatatcggatccaacttacagagtgttcacatcttcttgtaattactcgacgatcctgagtgagcaccataaacgatcagtgtcgagtatgtgcactacagtgctcaggcaagttggcatcggaacaagtagatgcatagactaatatgacgttactcttgacgactgcattccctctgtgctatctcaatccagagtagacagccctcaacctcc

SEQ ID NO: 45699 - DNA, 595 bp, Arabidopsis thaliana landsberg
ctcactgttgtcttttttttttccttacatcttttaatcttgtttaaatatggttggagtcacaatatttgagtttccgttttgctttcaagcacatgtatgtctgatataagatgttttcataatgatactaatgaatctacatgctgtcagatgttggcccatcgccttttcccagatgccaagtactcgatttgggtagactcaaaatcccagtttagaagagacccacttggtgtactagatgctcttctttggcgaacaaactcggtgcttgcaatttcagaacatggagctcgaagcagtgtatacgacgaggcaaacgctgtcatcaagaaacacaaagctacacccgaagaagttgaagtgcagataaatcaataccgacatgacaaattacccgaagataaaagattcaacgggaaaaaaggtaaatttctttataccataagtgttgtaccaaagctcctaaactttgatgatggaagtaatttttggctgttttactttcttacagctttatctgaagcctctgtgattgtaagggacacactccattgacaaatctattcatgtgcctctggttcaatgaagt

SEQ ID NO: 45700 - DNA, 708 bp, Arabidopsis thaliana landsberg
agttaccttaaagactctccttggcagtctcattatgcctgaagttccgttttctggaaacaccatggaaccttctttagaagacaaatcctgcaacatatattccttgagtagtgctgatcataaaaacttgaccctcctcgtctctgttcagcttcctgtatctcctgaacggtctaacctagtctcgagattgctcattgccaaagacattatccccgagcgggtgataatcttggattccattcagagccgtaacttcagaggtagactctcaccagacgaaacattggcagccaaactcgagacatctgctgagaagaaagcaacaactcacaccggtttagtgaatctcgattacttcccatcagggagtgtaatcgacggtctgagtgcttcacttttgagccggtgccagctaaagaacagaagaggaacattggtgatctcatggcctgagtttggtccttcagtgataagattcgtcggagctctgctgaagaaaattgtcccgagtttggatgttgcgagtgtgaacaaagatctggagaagaattcttcaagaactggtcttaaaaaggatacttggcttgactctgatctatatacatgattcagagacagagtaatgaaagcttctcacttgtttcatgtttctatgcttactaggaaaaaacagagaccttatttacgcttgtgtgttctcat

SEQ ID NO: 45701 - DNA, 579 bp, Arabidopsis thaliana landsberg
aatacatgcagagttcagcagaaccagttcagagattgacattttaactttctcgtgagctgtgaattcacagatcttgaagtggagcttcctgtaatgtatattcttttcatttttggtcgatataaacagcatcaacatcatcaagttctagtagtttctgcattagctctttgttcaattccatggcctcatcatccacctgcaacaaccaacaacaatcccaagtgattacattttccaagtgaatcgttgatgaatactgataagggtgtgactcttatttgggcggaacaagaagttaaaattaacgaacgaagaacacaaacaaattttctataagtttattgccatttccaattatgcttatgtagcatatgcaatttacaatgtatttaacacgttaagagaagataaactacatgttgacgataaaaatagaatcaataagttaatattagacagggcacagaggttacagaacagagcgggagatttgatacctcaactgtagtcagagggagcagttcagagccattgtcaggctcgaagttcactccttcatcacgtagctttgat

SEQ ID NO: 45702 - DNA, 571 bp, Arabidopsis thaliana landsberg
tacgacgcttctcctttggagtatcaccctgcaattcaaatttttgagttttacaaaatgccaaagcatccaaaagagaacccggtagatccataaaagggtgaaaatacctcatgtgacgagctgatagtttctcctgaactagaacattcaatccactttccatctttccacacaagagaaggacgaagattccaagctttgatcgtcaaagtttcttcttccgctgcagaaatatgttttagaaaataagaacgttttgagaacagtggatcagacaagcagtttagagcacaaaaatgaggtatattcatcaggcacattggcctttttacgcaccaggaaaatgcacagtcactgtgttttcatctttcttggtcttctctgtgataacaccctccaaccagactgaagaaaaacaaaacaaatatagatcaaagttccaaacttgtggaatgaataggatttccaaaacggaaaactgaaattgatatacagattttgtggttttgtctgatccctgttaggggagaccaataaaacagctagttatgcagacagtactacctgt

SEQ ID NO: 45703 - DNA, 812 bp, Arabidopsis thaliana landsberg
aacatatactgacgtcacacacaaaagatagataaacctatatataccgatcatggtaagtccttatttatggagtttaattatagaaaaagagaataatttctctgaaaattcataattttcttatgatcaaaagggtaatgttgaactgaaattaggaggctgtgttccaacgctttctcttaaaatcctttccatctctgctgcactatgaatattccctccctgtaatcatttttttgttaatacaaatccatgaaaatgttttatcttattataattttaatcatgtaatattatgtgatagttacctgaaatatatccgttggctcaatatccaaagaattaaggtcgtaacatgcacttgccgctgagagtttcatggacaaaaactgtagtcaagaggccaaagcaggaaaacatttaagtattagtgggatattataaaagttaatgggatgtttgaactttgaagagtgaaatcaatggcctaactaacctcgatttgattctggagtgatcgtacataatctatgatgacatcaagcatcactgccattcccattgcctgcatcacgttttgaattatcattatagagaataaacccattttgatttattactgtggaaaaaaaaaatcgctatacaaaaaaacaatctgttcatttacgtaagagacgctgccacacccttttagattttgggcgtttcgaaaaacaaaaacaaaaactaattatttctataagtttaaaaatattctatcacatgatttctaatttttacaacttaattcatgatcatagaaaaaaaat

SEQ ID NO: 45704 - DNA, 476 bp, Arabidopsis thaliana landsberg
aaaaggtggaaacctaaaaacctgtgagaaggaaactgaaaggaagagagaagcgaagagaaaagaatttattggaaactaaatacagaactgaaggagaagaaaacggaacaaaaatgaggacaatgaatgtgataaggtgatgatagagcaaaaagaataaaatgagacaattagaagaacaaaatacaacaagtgtgatgagaatggaaagtgaagaaaccaactactgaagaataaacaaagagggatgaaaagaaaagaaaacgctgaattgaataacaagacaaagaaaacgaagtgagagataaacatcatagaaagaaggaaaaaaaaaaagagaggctgaatagaccaagaaaagaaaaacagaagattgagagtacgacagatgaggaaagaggcgaaatagaatgaaaagagggtagaaaccgaaaaataaaaaatcggagagcgttgccaggagaactgaaaaa

SEQ ID NO: 45705 - DNA, 476 bp, Arabidopsis thaliana landsberg
aaaaacgcttttatttaaatgtttttttataaaaaatcttatatttcgtttttcataatcgaaaaatacacaatatagtcggtggtttttaaaacatattacttggatatttttgaaattcccccataaaagaagggattttttttgaaatagctacaaagaacataaattagaaagtatgttgactttattcgtaaattataaatgctagtagattttagagagaaaaaaaaaacgaaacctagtttttcttttacgcaaccgaaacctaaaattattaaattgataggcttgacatatataatataataattcgatcgaaaaatttgactacataaatctgaaatcataaactttgtgtcatgtaaacatacatatctcatttaacaaaaaactaatatataaaataattgaccttttgaaacaatatattgacttactattgtaaaatgggcctacctaaattcatctaactc

SEQ ID NO: 45706 - DNA, 814 bp, Arabidopsis thaliana landsberg
atttgaaacgtttgaaaggagcatgctttcacattgcagtccatatgcagcgtgataatcaataagtgagcaatcagtttggttatctgcaatgcatatgtggtcatttggtgcctagctagagacaagatatgggtattgtatactcacacttgattttaagattgcagagaaactctcactgctgaaaagggatgtttcaggttggtcttcaaactgcaacatccgacgcctttttaaagcagagcgtgtctcactgtgcacttccattttcctgttcgtgtcctctaaagccaaagattctttagattagaaaccatcgtcaaccatacatcaggaatggaaatgatcgatcacttgaaaaaaaaaacccacctgttgtgacatggtaacccaactcgctacatgccttcacaggagtattttcatcatcaaacatgtacgagtgatcttcttggttcaatgtgacttcagtcatcgtgcagtcaggcacatccgctggagttaagataccaattcaatcatggttattacagtgttgtaagagttaactgattcaatcatgctcgtcacagagatgtaagacttacagaaatgagactgaggttggtgattatagttatccacttgccaattccatgaggagctactgcaaaaaattaacaccaaacatgatcaaacccatagtacattttacatgattagagactactgtttactactttaaagctttttgaagactgaagagtctcaacgactcaaaactaagcaaatagagtaagcacatttgatagtttcaagctcaatcacaaca

SEQ ID NO: 45707 - DNA, 500 bp, Arabidopsis thaliana landsberg
gaaaaaaagacaaaggttctaaggctaaggataaaaaaggggaaatcgaatgaagaaaaaaagtaataaaataaacgaaataataaaagaagagaaacaaagaagaaataaaaaaaaaaaaggaaagacagagaagaaaaaagaaaaaagggaaaggaaaaaaaaaaaaaaaaaaaaaagaaaaaaagaaaatataagcaaaaaaaaaaaaaaaagaaagaaaaaaaaaaaaaaaaaaaattaaaaaaaaaaaaaaaccgataaaaaaaaatagaaaaaaaaaaaaaaaaaatagaaaagaaaaagaaaaataaaaaataaggaaaagaaagatagtaagaaaaacaaaaaaaaaaaaaggaaaaaaaaaagaattaaaaaaaaaataaaaagtgaaagaaaaaaaaaaaaagaaagaaaaggaaaaaaaaaaaaaaatgaagaaaaaaaaaggcaaaaagaaaaaagaaaaaaaaaaaaaaaaaagagaaaaaaaaaaa

SEQ ID NO: 45708 - DNA, 673 bp, Arabidopsis thaliana landsberg
aatctcgtgttaaatggcaaagaggaagaagcaatcgaaataattagaagtcaacaataaaacgcaaagatacagcaagcaatgacccatacaataatcatctgaaataatactatatgaataaaataaaataaaaaggtaaaagtaagcataagatcaaagagggtccacatgataaaaagcttaaaagggtactaagattaagcaattatatgatgatcaagcgacatatcctgcatttttcacgataattttttttaggaccccacctttgaattgagcaggtcagatttgtgttaccggccaagccaccatatcaaataatggaataattaacttaataattatgtaaaatgatgcggctaattggcaacgtgaaaaacaagctaaatgaaacatgtttgggtacgaaaccaaatgacttgtaagaatattcctaaacagtcaaaaaaaagatccaaaaagcaaacaacaattatccaagatttgaggtttttttaatcctcgtcagctccattttgatagataaagaaacaacaatgaagaaattaactaaaaatagtttactaaacctaatctaacaatctaaaatgacgaatcaaaatttgaataaccatccataagcaggcaataattcgatcactttctgtcatactcaggtatatactaaata

SEQ ID NO: 45709 - DNA, 211 bp, Arabidopsis thaliana landsberg
gagctgcttgcatatgcacatcagtagcacatgatagaaaacgactcatttgattcactgcaaaggtgatatcaggcctagtaacacaaaggaataacagcctaccaaccagatctttataaggtgttgcatcatcccaaaagagtttccttttttgcagaatgattcacctttggatccattggaacagtactccggattacaacccaat

SEQ ID NO: 45710 - DNA, 817 bp, Arabidopsis thaliana landsberg
  unsure (1)..(817): unsure at all n locations
acgttagattcacgatcgcaagaaccaacacgtagttacagatctagatatggaccaaactaaacaagagttacctctgaagcatatacaaaaacactcggatcttactactcgaagaagagttcaaaatgttaaaaatggatccaatcaaataactttgttccaccaaaacaaaatcacaaactagtaatacatcaaaagcaatacccagaattaagcaatgagatcgaaagaggcttgctggaagaataaaaaatattgaggcaaaagatttaccagaggatatttatggttatgtcaaagatcctcaaagattgcaactttgggaagcaagtaggatttttcggatgggatctagtagagaacgagcttagcgggttgattccagtgaagcaagctaagtgggttacggccttaaaacgtcaaaagttacactttttaaatattaaaaaacatttattttcgtgttttgtttattctcctatgccgcgttaatcaccgacacagatctctcaagactcgagtctgactgaagaacaaaacagatgcgaaatctgatagaaaacctcacggtttgattattatgttcactttacgaaatgaaatttctgaacaaaaaaacagaattttgaaagcaaattgatcataaggtgatacagcttaacaacttataagagctgtcgaacataagcacagcgttggactgttcgatctccccccaaattgatagagagacaaatatgatgtataaacgaaaaacataactgtgttcagatctcgaatatacatttccaaaacgtgacaagtntgtgttttt

SEQ ID NO: 45711 - DNA, 800 bp, Arabidopsis thaliana landsberg
gtcgaggtgcaatttcttaatcaagtctaactaaatcccataggccatgactacttttacacttgttgacttagaccaccaattaaagtacatataatgtaatctagtagacgaataaattattagataggtagaaaataaagtgaactttgcttacattttattgtagcgataagacaaactaggacaagatatgatgctaacttagctacatcagttttgaacgtaatagaagattttaaacataaatgctatggagtggcagatcacgatcgaatatagataatcattgtacgttcacaccgtttggaataatagtctttgactctttgttcacaaagagaatactgagttataggagtgaggtgattcaaatcagtgattgtaatactcttattttcttggtaaatggaaattgatgcaaagaggtgtaagagattattttctttgtaaaagtatactgtgatttatatatactgcttttatttgtagctcagcttttatcatcaataaaagtataatcagatccacaattagagtacattttttgttatatcttgaaccaaaatttatattacttttatgtaaaagcatttaatcaaaataacaaattaaaatacataaattcttagatataattaagcatccgaagatcagaacccactaaatgggaaatttaaattcccttttaccactgatttccaaaaatatcaactccacccaaattataggcaactttgtttcattctactgatagaactaaattacaaagtaataataaattaacaaagtaagaagat

SEQ ID NO: 45712 - DNA, 504 bp, Arabidopsis thaliana landsberg
  unsure (1)..(504): unsure at all n locations
cgccccgcttgaatttcttaattgcagcattcattccaacgaatatgaatcggccctgcattcgcccattttgcttttcgacctgcatacggccctgctcattctcggactcaaacccggaacgccggctcatttgaatgaacaaacccggcgatgggtcccgccgcatggtacgacannnnnnnnnnnnnnnnnnnnnaacaacccggacggcatgacgatcaccatccctgcatacaaatatgttgagggatatcaaaacgaaaaagtcgatgccccccactacctgggtatttgtgggcagccgcatactgtcggacggcgcatactcggacgatttcaccggctatttagtcagggagggttatttccagctgacggctgtcgatatgcccgaatcggccagcagctccaatgaaacccttgaatgggagatcaatcccgatgtgatgcccaaggccggcacctatgagtggatggttatttcagcggctaaaaaagtac

SEQ ID NO: 45713 - DNA, 545 bp, Arabidopsis thaliana landsberg
gcaaatgatgttctgagtactccagacaagtctgtttcacagcagcccaatggatcagcttctgcaccggaaaatggaacagctggttcgctctttctctcactctctgacacattaattactttacctacattgcaggattctatttagatcttatcggactgctattgaaatgcagtttgcaagtggagctccctgtatcgaaggaaagcaagagaaggatatttgtgaagggacaaatgacacatataacatcgagaagcttaagcgcgcagtcatctctgctatctcagccgcagcagtaaaagcacagaatcttgcaaagcaagaagtagatcagatcctgacaacgttcgggatcatagatagagaagcaggtacgatattgtttgtaagtgtaagcagcttagattccgcactgattatgtattgttcagagttgtaacttatgagcggttttctctaagcctaagcagcatcctaaacgtagggctcaggtatctatcttcgatgcagctgaaacttgacaatgagggtatgagcgc

SEQ ID NO: 45714 - DNA, 640 bp, Arabidopsis thaliana landsberg
  unsure (1)..(640): unsure at all n locations
tttctttccatcgtgcgcatggtgccactcagcggcaaggactctgaaaaaggtcaccgagagcagcaggtacggtgcagctgggtataccaagtcaaccttttctatccagatagagaatgtgtgggtcaaacagcccagccgacgacgccttcgtccgcacggccgggttggacttggaatcgccacttccaagactggctgtcttttcactattcttcctgtccggttgcactcactcacgcccgtgannnnnnnnnnnnnnnnnnnnnnnnnnnnnnnnnnnnnnnnnnnnnnnnnnnnnnnnnnnnnnnnnnnnnnnnnnnnnnnnnnncttccgatgctctcctgattgcaacgcggttcgcactatggatagaaaacgaaactggatgaaatgcatatccgaattatctaatatcggaattagctcaaactaataatatgaatagccatgtgcatatctatttccgatatggatactagatgaatacatctggtttttaaaaatatttttctctattcaattcaagatctgtattcgataataccaacaacataagttttgcaaaggggaaaagctatcataaatctatttaaaagggttttatttataacgagtgcccaatatttaatttta

SEQ ID NO: 45715 - DNA, 640 bp, Arabidopsis thaliana landsberg
agtcaagggcttgttttgtaaatatccgtaatttatcttccagaaatagttgcattaattatctctgtgactctgtccccagtctccttcctcagagactgatccctctctctcccaaagttgcattaagttttaaactagtacaaagtctaagcttggagcttccactttgtgttctccttgaaaagtttttaccttttttcaatctctgttgttgatacacctgtaaagctcatattgcacacaaagtgttcgataaaatgcctagccgaaacaaaaattgcatataactggtttgtttctcactctctatccctcaacttcttgaattttttttcgtaggaattctctagaggtgttatttaggaacataacggtttaatcgtctccatttcgttggtactttaatcataacagttttggttttgtgatcttcatttatagcttctgagaaaacaagtgaaagtatgttacggaacatgatgatgccttggaacagaagcgatcacaatgtagttggaatgttaacaaggcatttcgccacaaaccaaaacccaagatgaaaccgattgagctgaacacaccaccggagcaaactcagacgataaccccagtgatctttgatattttgaagatcatg

SEQ ID NO: 45716 - DNA, 657 bp, Arabidopsis thaliana landsberg
tttaaacaagtcactagaaacctgtttgcatcaagaaacaaatgggaagatatatacttattcttagcaaattatgatacaacctcacaagcggtattatccgttgtaatcaacttcatcacatgaaatcatcttcaatctaatcatatacaattgatacagaagaaacacaaaagaaaaccaaaaccttgacttcatcgtcaaccatggaatgaatttcttgacaaagaataaaaaccaagtctttaactgccaaaaggagataacttttaaggaacacaaaccctaatcctatattctctaatcaatcatatacgagaatcaaaaagaacaaatagaacaaaagcaatccgatcatcaaacctttagaacaatccccagaaaaattgagatagctgatgatcgaatcgaactaaacccaattcctcgatacgatcaaagacgacgaagacgagagtcagcgatatgatgaaaaagaaattgatcgctccaggagatgaaaaggttccacttttttaatttccccctggagcagagaaaaaaagatattattgctgtttaggaaaaaaaaaagtcggctttgaattttgaataggaaagtcttcttccctttgcaaatcacagatattctctccgtcacggactgtgacggtaata

SEQ ID NO: 45717 - DNA, 917 bp, Arabidopsis thaliana landsberg
acctttaagttttccggggtagctatatcaaaaatctatggacttgatcttgaaataactatttgttatgagcgcaaatttcggaatttaatgtaataatcaataatgagtggttgtgttcctactaatcactctagcgagtatccaaaagtgggacactgggccgtgatatattcagattacgacttcgattgttgctttttcattgcatttttctacttctttttttgtcatttgttgaaagccaaactcaaacaacgtgcatttgtattatactacaaaactcttttcggaaatttaaaataaaataaaatgaaaaggttattttataaaagataataaaaatgttcgagttatgctacaaatgcatttgcaaaagcagaaatttgcattgaataaaaaaacttaaatctttattaaaatcataatcctgaatatatatttttagattagcatcgatcatggattttcagaaacacaattagaaaccaacgccgattattttgtagattagcaagttctttggcaggagtttcccacaattccactacggatttatccctagaaccgaagtccaaaagttcaagtagtccaaacaaaacgaattagtttggacaaaaaatcaaactcccactaaagtcagaaggatacaaactccttttctaagattatgatctaactaccattgcaccactttgcttgggttaaattaccaaattttgattcatagtacagaacacaacatgcctagtatttttattgagatcttgatctcttaaacgatccaactaaaattgatctaagaacacatgatcagcttttaatttttaaataacacatagttttggtctttggtacatggatgaatccacatgaaaaaaaaatacaaataatgattgaaagagtaaataataatg

SEQ ID NO: 45718 - DNA, 364 bp, Arabidopsis thaliana landsberg
ctattcgtacgagcatctctccgaatatctgagatggatggctgtcaccccacctcatcctactttgaccttgtaccaaacatatggtaaattgctttgtcgtccatgggtcacaattgaacccaccaggtcacagtgcacttagcgtctttggatggcgaggaattgcggcttcgttggcatgaaccggcgtagtatacgctagcatgttatcgtattcaactatagctagcgtgcgagtaccaaactgtgtatcattaccgttagacatgtagcagaaccgacagctgagtagatcgagtactgtaggacgtaatcgcgaggtgatctgtgtacgtaacaatagcgatcacgttcattcggc

SEQ ID NO: 45719 - DNA, 736 bp, Arabidopsis thaliana landsberg
cgctgtatataatcttatgtggaaaatgcaaatttgtaagtttgttataatctactccgtagtcatcttatatacttctcaacgaaaattagtgagaggtttaatttttttacaaacaagattgaaccaaatcatcaagagcaaatttacgtacatggtgactggggagcaacatcttattgttgtgcatggcggcggcataaccttatcatctacaatattccatttccatcctcccacgtcacctctaataagttccagtgccttctctactgtggcttctcacataaaattgtatacaactaaacatactatttaaagcaaaccaaaagacttacatgaagtgataacatattggacttaaactcattggttacaaactccttaagcttatccttgaagttttaaagaaagataagtaactatatcatatgattgctttatttctcgtctggagactacaatgataaaaccaaggagcttgtgacaaatggatttaagtcttaatttgtaaccaaattcctattaagtcgttttgtttgttttgaacatatgttttgctgtacataatcttttattttttggtaccaagctgttataatattccccctacttactacatgtttgatgatagaagcttattatcttttagcaaagtatcatcatttatttcttactggttcttaaagaatattagaatacaaccctataaattttatgggttactcctataata

SEQ ID NO: 45720 - DNA, 751 bp, Arabidopsis thaliana landsberg
atgtcaagacgattaggtttgtgtcattcattcttgttaaattttttatttttaaaatattgcgttttttgcttattaacttttgacgacttctagcctatgacaatttgttttaaaaaattgttggacaaagaaaataggtcacatcacatgacaagtctatcatggggcacgtgcctcgaccttcttgggtcctgaattttaccgaagatagaaagtaactattcctctttgcatcatttttattaaaaattaagggtctttttaaaaaataattaaaattaagaagtctaccaccaacataatcggtatttattttagtataagtacaaaatgaataagtaccgttattacatgattcttttcacacaaaaagtcttcggtttattatatatcaaccccttcaccgacaaagttaataacgaatagagatttcgagattttaatactacacagatccttaaatgatagtacttggctgaatcttgaatagtttatcttactaatgtggaccataaacaaaagaatcttggaccgaatcatccactaatcatatgagaatttctacaaaagaaagggggataaagcaaacaattttcgatattattattctggattttctattccaaatatcacagctacacaaaaagcctttttttaatataactattttagttgatgcaatgcaaatacatgaactaattttttgctaaaagaaaaaactaatttattttcatacaaaaggcaaata

SEQ ID NO: 45721 - DNA, 522 bp, Arabidopsis thaliana landsberg
gcacgctgcccgcggtgcagtcgaaaccgatgtaagcggtgacgcgctttttggttaaaagctggtccagttcctccggccccgggcaatcgtaataggccccgcgcgcggcgaaggtgcggaggaattcggactggaattgcggcgcggaaggcatgataagactctggaaaacaaggcaaccggcaatagcacagtggatggggttcacaaagtcatcggcctgatgagcgggacctcgctggacgggatcgatgccgccctgatcgagaccgatggagaggccatcgtccggcccggtccggcgctcaccattccgtatggcgcccagacgcgggccctgctgcgcgccgccatcgacgatgcgcctgccgccgccggcgtcaattttgaaggtggcgggcagctgccgcacagcatccgcgaggccgaaagcctgtcgtccgaagcccatgcccgggcggtgaaggcgctgctggaaaaggccggtcttgcagcgcgcgatgtcgccctgatcggctt

SEQ ID NO: 45722 - DNA, 368 bp, Arabidopsis thaliana landsberg
  unsure (1)..(368): unsure at all n locations
aggctcgaaagactgcttggcaggtcactatttggggtcagtcacaaagtcgattggtaagcttccatatgcctgcctctgtcgtcggatagcaggcattgggcgttcctataatgtaccacatgctcagtctggcctcgcggtcccgaagttatggggccacaaagtacgaactctgttcaggcattttcgacatctaacctggctgccactccaggtcttcccgtgaggtccaccacgctagcagtaatctcgtccttggtctagtgactgcggtcnnnnnnnnnnnnnnnnnnnnnnnnnnnnnnnnnnnnnnnnnnnnnnnnnnnnnnnnnnnnnnnnnnnnnnnnnnnnnnnnnnnnacttgg

SEQ ID NO: 45723 - DNA, 1079 bp, Arabidopsis thaliana landsberg
tggaccagattatgtttattttttatgtataaatttaaattaacctatgttttcatataatgggtgcctttgttccaaagactttcactttcaattttgttttcggtttaataataaaatcttaacctataatttttgagagaccatagaccaactattagtctattaactgaatcttcataaattcacggaattatacctaagaaaaaggtattttgaaagaagaaaagcaaaaattgtaaatcttggaaaactaactttctttaatggcaaagttacatacatatccttataaaattttaatggttaaaaacaaattctaattcacatctggcttgccaaactaattcatgatttttctttatttttctgtcataggctataatgtaaaatgtacgccattgtccctttccttctaacaggttttgtgtggtaattctatttagcctaaacgaatatgtatttgcctgacaaaaacatgtggcatatattcattattacctataagtgttgtagccgatatatgccttcaacattaaatggagaccttatcaagaatagaaaaaaaatcgggatggagaggccacgaataagtggagtatttgttcaaaagaagaaaagaacaagtggagtatatgtaaagctgtgaaattagaataatggttgctcaaaaagcactacgttctattcacataatttgacttggtataattgttctatgcaataggagattattatttggaattacctaattagaaaaaccacgacatctactacaatcataatggcactctaaggtaatttatgctctgaatggtgcgattctaataataacaaatatatatatataaatttttgttactattagaacccacgctacactgtgcagttcggttttcatttgaagctttagatgtcttatatatttttaattatagatttgatcgggatagtaaatttaatcttaatgattgagctaattcccatgatgttctttttttttacttttttttgtctaacaaacttacatttatcaatcaatttataaaccagaattacaagacttcaggattaaaaga

SEQ ID NO: 45724 - DNA, 384 bp, Arabidopsis thaliana landsberg
  unsure (1)..(384): unsure at all n locations
gctagaggtaaagctgttttttttttcttcttttatgatcgttttggtttgggggagctgtttagtgtggtctcggtcattgtttcctttcatataatgacttagtattccacgggctttacagtgcagttgcattggtaacagcgagtctatgcacaaaggcatgctagtttatttgtcatgtaatcacgaacgggacggttattttaatatatgttttacattcttttatctccattcatgtggatattttgttaattgagttgataatttctgaacttcatatatccatgcctaggcataacacanaaattatgtatcatgcattaaaaacttgaatgtcacgttatgattattatgaatcttgcgaaagatccctccccg

SEQ ID NO: 45725 - DNA, 720 bp, Arabidopsis thaliana landsberg
  unsure (1)..(720): unsure at all n locations
cctatagtatatactaaacagatactgaattaaactcaaaagtttccgtacctttggcttgcagagagtttgtatatacctttcgtcttattgagccaaatttgcaatcggattcagattgaggtagaagctgattaacaataagccggtggactggcacattttcttttcttaaagatgcatgtcaccttgaagactcgtttattgccataacctaaagggaaatataatagccaagtgaatatgtaaccaaatgtacccaggattccaagaagataatttccaagccaggtgttcttcttaatacaaattaatgatctttaggaacaagtaaaagaatggtgttaccgttgggatggttacaataacaaactcggtagtgtccacatcacggaaaacatttcgaactttctccatcctctctttcagttggtctaactcgttaggctgttaaagcaatgaatgttcaaaatttgaaagaaggtgaaggggaagtaatggttcaagggaaaacctatacttacaagttctttttgttgtatctcttttttgccaaagaccgacttaaaggctgaagctgctgcagtgattntcttcttgagctgaataatcaaacaatccagttagaaacaagtaccctaaacatatcaattgtgtaagcaagccacaaccaaaggctatatttcatcctcaaaccttagttattttgctaatggatga

SEQ ID NO: 45726 - DNA, 852 bp, Arabidopsis thaliana landsberg
  unsure (1)..(852): unsure at all n locations
catccatagcgacacaaccatccgacacatcacatttaagtctgtctaatactatggtgaaatgactcattgaaaaagcaagccatcttgttaatcttggaccgaaacctactaaaaataccatgactttattatttataattaaaatngaactctggacagaagagtccttacttcctctattgaattccatgtaactcatgtaataagcttattttgtttgtaaatgaagcatatatcgagtataaaagaacaacgtgtggatggaggcaaaagttcatagcttctcagtgaagtttactttctagtttctaccaacatttgggaaattttggatttatgttataatgctttttttgtttagtacctcataatttgttttatgattttttaaatttgttgaatactagccagtggaggctgttgtgaatttctatgaatcactaatcaacaagcagttgaccttacaagcttgatctcttgggtatgactaatttagccgacgaaactaatacttatttagttatttataaaacaaacaaaaaaagataatgacacaaacgatcatacatcattaccatcttcttcaccaagaaagctcaaaaactcatacatcacaaatcaaaacatatctagttaatttgataggatttctaaaattaaatcactaaacggattcccaaaattaaagcatgtttggacgaaaaagaagaagcttaaaggagacgactacgtaccaaatagataattgtctacattttaggtaatcgtttccaaccattaatttagttgagatgagaccggcaccattattgtttcatagtgacttaaggggaaatgatatttctgaaa

SEQ ID NO: 45727 - DNA, 1627 bp, Arabidopsis thaliana landsberg
tcctggtcgaaaagtgatttctatttgactttgaaccaaaaatagaagaaaattcgaaatcgaatcgaaaaatgcataaggaatggtaacaacagtagtagacccgacgagaaacggatcggaggtccatcaaccgggaaattaacaacaccgccgacaggagactgcaataaccttccatggcgagctgaatcaaaagccctgagctcagtcagaccaagttcatggttcggcggaatcaatctctccagcttgagaaccgcgtcggagccgcaggccaaggttgtcgcagcaagtaaaagcacggcggcgatgataataactccagcgggagaatccaccgccatttctggagttcgaactttctcttcctggggaaagagagagaaagccgccaattgaaacgttctgataatatattctgatgacagtactaaagttttgcacattttcgtgattagtttaattaaatgtggaattaagatttgcataaactatccttttttgtgttagtcattatggcgtgtttaaatttggcatttttggtaattatgattttcacaagttcatttttatttatttaaatgttcggtgttgagtactagatagactgatgtaatgtgtctgaaagtactgatgtaattcatatgacgtgtccgaaagtactgatgtgattcattgatttccgttgaccaatttacccaaaattcaccagaactcagaagtctacgacaccaacggctttatttggaacctaaactaaacggacatccacgaggtagatatttggccttgttttgtttccacttttaactcaaattgtatcagaaaaagatttaggtcatatcattctcggatgagtacaactacacctatccaaacaagtgaagagtgagtatgacccctttccgttgaacaccagatacaaaattggacgaaaaggattctctatcgcttaagtgcagataatccaatcaaactgcaaaacggaaagataagagatactttattattgtcttcgacaacatcctccgtaagagccaaggaggagcacttgtgttttgagacggtctccagttcagggagcgatctggatatgtaatggaaccaaaaagacactcagatgttatattttcatacgctaaactatatcaagaaggtgcttcaaagaaacttttgtaactcttagctatgaaacattcaaggcaaagttgaaatattttctacacagaacgtttttctggccatgctgtagaatttttctgataattgcaggcctaagaagaattgggagtcttgtgatttaaatggtttaagagagagagaagtttggttacctctcattgatcttccaagagaagtgaggtgcaagagagaagttgagatacttcctctggagttgctgttccaaaaccttgccatcttattctcccggatttgtcaagtaagagaatatacctgaaacatgaacacgtatgtgcaatagagagatcagaaaggttaagggaatctcttatgctctcttaacctgatgaagagtagatttttctgtacccggtgagaaggttcagaactttaatttctttacggaagtagtaatggtccccaaatgcgtaccccacctgcc

SEQ ID NO: 45728 - DNA, 486 bp, Arabidopsis thaliana landsberg
agtaaattttactaagaaggaaggcgatttttttttgttatatatatatgaatcatagtggagggaatgatggcagtgttcctcaaacctcgatggttgccacgtgtaagttttgttttacttctctaatgaatggacggttgagattcatttagatcttaatgaaaaataatgttaagaaaaagactgcatacatgtgtctatacaagccacactagagtcaagttgcttaaaaagcttttttcatataaatactgaatacatgaaatttggtgaaaagaataacaacatgacattttagtttttctaacattttttaatccaccaacctatagtttgcattattttgagaaaataaaaatgaaacaaacaattacatacatagctttccccaattctttgagatataactcatccaatgagttctgattctagtttccaaaagaaccacacttcacccacaagcatcatattcatgaacaaacc

SEQ ID NO: 45729 - DNA, 609 bp, Arabidopsis thaliana landsberg
gatcggcggcaaacgtgacagcaaggttcccgattttgtgttatttgccttcatcgccaccggctttttctttctcggccgcctgattaccaccggccagatctgagccaccggcacttccgctacaacgcaggaaacggcggatatccttttctccaacatccaacttcatggagcatgaaagcatgagcgacatcaaacgattcaacagcgacaaacgcctgtcccgcgccgtcacccacggcaacgtggcctacctcgccggcatcaccgccgatgaccgcagcaagggcatgcgcgaacagaccgcggaaatcctcgccaagatcgatgccatgctgaaagccgcaggcaccgacaaatcgcggttgctgtcagccgtaatctggatcagcgacatgcgcgcgaaaccgcagatggacgaagcctgggcggcatgggccgatcagcagaacctgccggcacgcgcctgcgtcgaggcccggctcggcacgccggacacgctggtggaaatcatggtgcaggcggcgaagtatgacgaggcaaaataaggacgcggcgaaaattagacgatgaaatgcgcgtcgcctagcctttaaaactcgcgac

SEQ ID NO: 45730 - DNA, 589 bp, Arabidopsis thaliana landsberg
ctaacggccggtgaacccgccctgctggttgttccagttgaggtcgccctcgacaccaccgacgacggtatcgttgatgtggaaattatagccgacctgaccgccaagcagccaaccgttcgcggtcgtcgaatcggccgccgtattgtccgtcgccgaggcccagccataaccgacgctggccccgagatagggaccatcccagtcggtgacggcaggcgcgaccgcaacgggcgccgcgggcgggggcgtataaaggtcggcggccatcgccgctccggaccccgccactaccatcgccgaggcgagcacgaatttgccggtcattttcatctgctaactcctagatgtgatgacgctgaccggagaatgcccgatggcgaatttggctccaagcgctgaacctctgatttcattgggttttccaactttccaaaggtcgcgttgcattcctgcatcggtttttggcgcgggacaaaacatggccaaaataccgccttccagccgccacaattctgccgccggacggtcgatcaagttagcgtaaagttatcggcgggccgagactcgcgacagcggcgggtggatc

SEQ ID NO: 45731 - DNA, 575 bp, Arabidopsis thaliana landsberg
ctaatgctttatgtggagtcctaaaccaacaagaaaaactgcaaaacattcgtttagactcacctgcaccgtatcaggaagctcatggaaccacatattaaaacattagtcagttttatgtgagcatcaaaattcatcagaaacatttgtccattatcggagtaattcaagagattgtcgtgatagctttcccggacacgttcaaaagctagctaccttacaatatacagaatccactcgtcaatcttgcataggattcaaaatccatcaacaacatggatattttaaggtaaattatcaaaaaacatttacttattctgcgggttcgactgaaaggtgttcgaaaaaaccttacaaagacttattacgagcttaccgatagagctgtcaaatagttcgtatataaatcattaggactgaagttagacggtatataatggacaatgatccaaaatatatatatatgcccgataaagaatatgtagatttatgttcccaaaattgtaagttaagcaaacatgtttggtttacaaatgttcatatatggtaaataattttttttttaaagttgaata

SEQ ID NO: 45732 - DNA, 980 bp, Arabidopsis thaliana landsberg
taaatttgctagcattatcatatatcgaaattgtagattttttgggtcagaataaaaatctggttccaaaaatagaaagatgcatgcatcgaatgttttttttgtttctttcttttttcacttattaaatggagtatttagattctatctaacttatataaaattttctacgtttttggattttttttccaatgttttttaaataatctatactccattagctatgaataacatcagttcatttgattctgtgaaggaacatcattattcggacgtgctctttgggattgacatcctacaagattccggtctaagcgaaccccttcgataatatcgactttttattgcatagaacaattaataaaaattgaccattataataagacattgatctcaataacttagggagcattattatgtgagacaaaaccatgtgaccttagtgtttttctttttaacaaaaaagacatcagtgtttagggcgtacgtttacgccacaaatgataaaacccaaaatctcttcagggtttttttatagtaaagtttattaatcatcagtactacttaaataaattaagtcacgggttatagaaaaacgttagtttgatattagcaagactaacaaatttatttaatgtatatgacaaataatcaaggactcaacaatgcaagtcatttgtttgatcatataatttggcgcatgatatcatggatataatcgtataaatcattttcataatgtactacgtacagtatccctaaataaatattctatgatgggccttattgctaaacaattgcgcttaaaaaaagcgtataaaagtaacgattctatcttaattgatgcttcagcttcacttgccccggtgtatcagaaagaaaccctcatagagcaaatctgaagtacattggttctctctgttcctccagtacgactattctccattggtaacgctatcttcttttcttcgaatcataat

SEQ ID NO: 45733 - DNA, 409 bp, Arabidopsis thaliana landsberg
agtttatataaaactagaccatgcatatttatttcatcgctcgtaaatcatttaaatggtattatttatgtataagaaatcatttttgtcattatcataatcttaatactactctattatagtctaaagtaacaaggtcgagttgcatatacttgtggtattatataaacctcagtctacaatcttagatctgaaacattcatatccatacaaaaaatagtaattatgtaaaaatgtaagaataccggattatgcaagagacaatccaataaactaatctttgtcaacctaataatttagtaactccaggcgtattatttccctgctttcttatacataacgcgcttgtttcacgtgcctcgtcttgggctatcaaaatatgagagaggcaaggcctacacctttcttt

SEQ ID NO: 45734 - DNA, 577 bp, Arabidopsis thaliana landsberg
tggcaccaccgcccccactggacgaggtccagtgggggcggcagtgtgattttggtttgaacccaaccagaaggagcgtaccggtgatgcgagatcgacgtctcgtactcgtcgtccagggcgacgaggtgaccacctactaccagatgtggctggagaccccctgcgacgaccacggccagcacgttctgaccaaccggctctgcgaggagccgggcatcaccgctgagagcccccacgtgtgggtccagaaggccctggagcacgcccaagacgaactctgtctctgcggtgcggctgaggccgcaccggacgccctcacggccatcttggaggccacccgtgcctgacttcgaggtcgtggcgcaggccacggtgacggcgacgctcttcggggatggacggctcctcatctgcgagtccggccactggaatcaggctgagggtgagcggctgtcctacaccgagtggcacgaggacgtcggcacctgtgagccccaggagctcctctacaagctggtgaccgaaatgcaggaccgcgtctaatccgccacgccgaaaggcggtccccttgact

SEQ ID NO: 45735 - DNA, 712 bp, Arabidopsis thaliana landsberg
cgtttttgctcattacctagctgttaataaaacaaaaaggctagtatatttgcctctttaatcctcaggaaaaataaaacattgggtattacgagtgcatttataatactattttattaaatttttggaccgttgggatagataaagacagcttttttatttttttccgaaaagacagcttatatatacgcatggctggaataaaaacaatttctgttaaaaatattgcgaaaaaaataaaataataattatgttgtttctttagaattatgtggaatttgcttagaggcaccgacacttgttgtgctctttcttcccattacagcttgacttaagattttcaatatccatcaaaagatgcactcttctcgcttcttgtcctttttttaatttctgctctcttcttttcacccacttttttcactttttaattttctcatcaataaatctgtcctatagtacaatcaaaaataacaataagattactcttatatctacgtttggctaaacatctatcaagtgatttattattattcactttgtgttaggcgagattttcacaaatttataaattactccggttggtagattaacctaatagaaatgaaattctgcgtcttacatatccagaaaataacgttatcagagatatgtgttatgactttaaattaaggatttaaaattgattcgggtagaacgtgagagctaaatg

SEQ ID NO: 45736 - DNA, 634 bp, Arabidopsis thaliana landsberg
  unsure (1)..(634): unsure at all n locations
tatgtatatgacttgatttcgctgtaggatattatcaatatcaaaggctacgagctagattcaatagtaatcactaatcaatgaaatcctacctgaatacgcgttcctagagcaatcgcattagaagcttcatggataaggtcagctgcatgcagtccaaatatatgaactcctaagatttcaccgttgtcaggtcggtatatcatctgcataatgaaaagcaatgagatctctatgttctttcatgagacataaataaatcaacaacttttgcttctcccaccttagctattccttctccttcattttcagctagggcctttgtgttagccttgaaacttgtcttgacaacactaactttaaatccttccttctcgcctttttcttttgcttgaggctaccaataatgtcaaaacataaggagttacagtaagcatattttgctcatagcattcttctttttgaccctcttctgtacacaagtactaggatataaaactacctctgttaatcccaccatgctgatttcaggatgagtaaagcaagcagctgggatgctaagatgattaagcacatgatctctgccgctgacttgctcgaccactagcnccagagtaagagctcagagttaata

SEQ ID NO: 45737 - DNA, 288 bp, Arabidopsis thaliana landsberg
agactcatggggcttaggtgacggtaacgagacaacaacgggtttttgattttggatccagtgcagtaaccgaggtctctcgaataaaatgctctgctctataaacaaatgctacatgttagaacccactcttgcatacaagatattatccgatctaaccaaaaacatacacagggtatacaccaactgatggtactacccccaagcccatgatatgatgctagatctaccctgtgtactcaaggaattgagacactcattcttatcttgagtcaaaccaatcttttt

SEQ ID NO: 45738 - DNA, 1174 bp, Arabidopsis thaliana landsberg
ccgctttactatttgagtaactagctaagaccgtttggagtcatgagtggaccctacattttatgggactagctttttggatagtgaatgtttatattggcgtacgtgaggctataagattcggctcaactaaattagctacaaagtttgtctcagctagatttatgtggtgttacaattttcgtcctaaattgtatgattatatttatacttgttaggattcgaacacgacacctagtcttttttcccacaaacaaaaattcttaaatttgattgttaatttatttttagctgccattcttagacatattaatgcatattgttttggtagaatatcctttggtccgataacaaatagtagaagacttaaaaatgacacgaaaatttgataaacatgttgtacaactaacatgacaaatgaatgaaaatgaaaacatgatttagtttaagagattcggctgataaaaattaatataattacatatgtatcatttatatgacatataaactattttggatttaacactatatcatacattttactagtcagcaagaaatatccttagttaaaaaataatatatccttagttattcaccaaacatatcaattgtttgtatatatataatgaagaaaatgtgaataaaatacttaggcaatttactttgcattagaataaatattttgagtcctttttccaagttccaaaaataaattgggagggaaataaatagtgaaggaaaaaaaaagaattatatacagcagaaaaaagaagaagaaaaaaatgagaaagaagaacaagtctttggtctcactaccagacaaaacatgtcttcccaatctatccccttctctcttataatgactctgttctctggtcaataatctcaaaaacccttctctgctttttatcaaaattctctctttttcccaaaaagattcacaaatttgttgtagtctcgccgttaagatggcgccggcgacggagcatcagagctcgttcttgagtcgactaagccgtcgcaatcaagtggtttccatggaggttaaccacgagcaagagcaagaagaactcgaagattttcaaaaacacgtagctgaacgtttcgcggagctcttaccaccgtcggattcgccggaatcttacccgattctttcgatccagtggctaaggaa

SEQ ID NO: 45739 - DNA, 622 bp, Arabidopsis thaliana landsberg
catgaataatgtagttaacaacaccactgggaggagagggtttttagatagacgcgcggctttgactactggttcggagtctgcgtttgaacatgagctaaggtactgttcctactaggtggacggacttcattaccctacccaaaaagcaagcctgtaaaatttccgcatttgattttgcgcgaactatagtcaaatctattcttcttcttgacccgctcatgataactcggagatgcaacactcggctgtgtgctcttgataccttatagattttcttttcatcgaaagattagaccctgtctagaactgcactttgaattctgtggcgactccatccatgcatggccaacgccggcgacctggccgagaccaatagattcactatgccaacatgacaggggccatcgcatccaatgaaacctcgacgcacacttcagcttgctgtcggatgattttcttgtgacccagccaccgcctttccattttgttcagaagtgaggttattcgagctgtcgcaccgttaatgggctccaagcaacatttggaaaagccctcgatctcactgctgaaactcgcatcgtcaatggaccgacacatcagaagtctcactcagttacta

SEQ ID NO: 45740 - DNA, 604 bp, Arabidopsis thaliana landsberg
  unsure (1)..(604): unsure at all n locations
gctttctggggattaagtgcgcgaactgggctagataaaagaaaccgttgcatatatatctcagcttttatcatgtggtttagacatctcggatccttctgaagtatcctcttgctgtattcactcggaagctcataaacaaagactttcagtcttcccacgggatcatgttacaacacatcaccagcactacctaaacatcagagaagaaaaaaacagatnnnnnnnnnnnnnnnnnnnnnnnnnnaaggattaactatgtagctcaatcacagaacctgaaagatgatgctcatcaaagtaaaaagttcaaaaacaagatatagaatcggcttattcaggcatgaatattgacatatacaatttacagatcagatgcatattgatctacattttccccaagttcaacaagtgaaaacgaaactcctagtcttcattcgactagcaaactagctgatgactacacaagataactacggcaaatgcctagaactaagctgcatcatccaagtaaaattatgaaacctgagaattcacatgatccatagattaaccttctgtgcatagactgatggacagaactcacctgaaattcgctcaggtg

SEQ ID NO: 45741 - DNA, 544 bp, Arabidopsis thaliana landsberg
ttttcttacgatttggatttcatgcccgttacattatgagaattgttacgtttactatcataatctcaatcttagtttatcagttggaatttgattttattttagttaatcttaatttaacaaaataataaactcataaaagaacaacacaaattttgcctacatatatgttagttagaaaacgtatgttctaacatatgtatcggttgagaaaagcatcactttaatcaacataccatttgaatgatatttaaagagatagatgagtgaaattttggagatagattgattccaagcagtcttctcttcttcgtgtttctaatagtttctgtgaaacacacaatacaagttgtcaaaaaaaaattagggtacactaaacggagttcgacacttgtatcctataagatagacatttaagaaattacgtacactacaatagctacaaatctctgtcttatgagattgttataagcaaagtctctttcatcctacaaattgttgctagctaagttgattgaaagaacccggtcaaattagtttggtt

SEQ ID NO: 45742 - DNA, 490 bp, Arabidopsis thaliana landsberg
tgagtgaagcaagagagagagacgccggcagtttcagagtgagaagatgataaccgtgaggaaggtaatgcgacggtgactcgcggaggagctccgagtataagcgacgccatcgccgtgtgctgttttcgaatttgttcgaagaagaagatccagaagaagataaggcagtgagagtagaaaaacgattttaggataggcttttaattatctttttcatatttgggctttaatttcaattgggcttattttaaagcccaaatatatctaaaccctacacatgcttgtcacgtgtgtaatcgaccttgttcttgttcttgttcttgttcttcttcgtcttctcttcggagcttttttcttcagatatcacccagatcgtaacttttgatcttcgaatttcacaaagctcaaacttctcggtaagtattcttatcatcataaatgatcttgaaattttaaaaagtcacaatttttatcctcccatctggtt

SEQ ID NO: 45743 - DNA, 431 bp, Arabidopsis thaliana landsberg
acccacttacgtagcctccaacgtaacgaccaataattagctctttcttaggaacattacaacgaactaagagtttagtgagttatataaggtcatgaaatgaaatcttataacgtatctaacaactcacatgatctataccatgtcacattttttatcaaacatatgttaaccacctaagcactaacactactctttgatcaaacttatatttcgcatatactccaaaagaaaccaagtggcatattggcatatctcgtaatgtggtgccaaaaatgcttatcaacttaattatagttcagatattgtctccgtatcgtatcttaatatttgtattcaacaataggtattatgttgtattagctaggtgtgatttgtaacgagaagagatatctcgttctattgtgaggtaaaaataaaataaagcagta

SEQ ID NO: 45744 - DNA, 832 bp, Arabidopsis thaliana landsberg
aattctagaacaacaaattattttacaaacactataatctttcggtaatttaaccacaataaagagataaatggtctttgtattaaatcgatcgaattctaattctgtaggtactgtgagtcaaacatgaaagtgtaaattttcaaaatatgattggtgttaacttagatgaatcaatttttgatgtttttttgtcgatcatataaatcagaattaccgaagaatgcatgttgtttacataagtgatataattaattttttactgatatattaaaaataaaaatattttatgttattgttttggttatttttttgttccacaaaaattaattaatcataatatttctttcttgactatcactagattcaatgaaaatctctcttttatacataaataaaaatcttctcaatgcattaataaatatatataaattgaggaaaaaaagagatagaaatcatgaaaaaaaaggttaaaaatttcaagtataagcgagcatcacatatagaaatagaataatgtataggaatccatcatgatctcactctatatatatacgtaagccaagtatcttatttttggttatatatctctgaaatctgaatctgactgacttcaaaggacacagcttttacttctataactggttagcttctccacacacacacacacacttgttagatttacttttcctccgcactatcaacagatttttctcatctgggtctgtttgattctgttgactcaaagattccgactttcttattttctgtctcccatttcatcgccgaaatctcagacaattctggctttagatcttttaattcttggatc

SEQ ID NO: 45745 - DNA, 585 bp, Arabidopsis thaliana landsberg
agcaactaaactcatcgaagcacacctcgcatcactggtatttctaacttaaacttcatacgcaaactaagtgtcttatgtcccgatcataaaatcaatattcaaaaatagtgaatcggctcaccataattaactcgattcaatatttgtgagaacgacgacaatctccgattgaagtcttcgatcgaacgcttgataagcgacacattggaacgtcgccttgttcagttcagcattcaactggtgagtactagggcagcatcagacgacccgacaggagtaagcggccgatggcaaggtcgaacgaggagcacggcctcacggccagagaagggctgaaactgacagctaagacgggatgtcgcaggcctgtgcaaacaccgacgcagtggcacgaagcgagacgtcgggctagcataatggctaggggaggtgatgacgcgtgcgcatagaggacaggcgtgctggagaagccgagctaggacacggcgaggacacataggcttgcgacctaggcgaagtcggcgtctgcaagaccgggcaggaagggcgtgacgtagagggactcgactgctagtaaacccg

SEQ ID NO: 45746 - DNA, 717 bp, Arabidopsis thaliana landsberg
  unsure (1)..(717): unsure at all n locations
tccccccctcccccccacccccccccccccnncccccccgcaccccccccccccccccgtgaactccgcctcgcaccacacccccccccccccctcccgcccaaccccccacccccccccccccccccccccccccccccccccacacccctttccccccccccctcgtttccccgcccccccccacccccccccccnnnnccccccccccccccccccccccccctccttcccccccccccccctccccccccccccccctccccccccccccccccccttcccccccccctccccctcctcccccccccccccccccccccctccccttccccccctccccccccccccccccttcttcccnccccccccgtttgttcgccccacccncccaaccccccccgccccccnacacacaccacccccccctctcccccccccccccccccccccccccccccccccccccctnccccccccccccccccctcccccccccccccccccctcgcttgcccccccccccccccccccccccccccccccccccgccccccttccccctccccccctccccccccccccccccccctctctttcccccccccccccctctcccccccccccccccccccccccccccccccccctccccccccccnccccccccccccccccccccctctccccccccccccctgccccccgccccccccc

SEQ ID NO: 45747 - DNA, 586 bp, Arabidopsis thaliana landsberg
tgtagcatcaatgttaaaaaaagctctataggtgctatacaggtggttgggcctccaccttgtgcctaggcgttgcagagtgtttgtactttctgtggactgttagagtatcatgtcagaacagaaaaaaggaagatatcaacatgcatccataaataatatgatcgaagtttatctttcctcgtctataatttgtcccgtttttacatacatcaagtccaaaacatctctaaacggaaaaaagttagacaaagcactgcccagcacctaggcctcgcctttttaaacagacaaagaacaagggcttttcagaatgagaagtttgataattatcaccttgagagcaactaaaagagatttgaatatgacagtaagatcttctccatgataacagtctgaatcatccagaatttgcatcaagtaggcattcaagttacgagccttatcaacaatttcttttagcaaattaatttcgtcaatcctgtagaagtgagtttttagtcaccagaataagaaccctgaatcgcaattaaatgttcattgccaggaaaaattacccagtgtataaccccttgcaggagagatg

SEQ ID NO: 45748 - DNA, 549 bp, Arabidopsis thaliana landsberg
ggtggatccctcgaacaatttgaaatatcggacgagcgaagcgctgccgaaatggctgttttttatccgcatgcagggctatgaccctgtggggaaagactgggacagcagttttactatataatacgatacgcatgtttgtacaagaagaaatgaaccgatacagccgccagctgatgctgcctgagctgggcatacagggccaggaaaagctgaagcaggccagggtactggtgatcggcgccgggggcctgggttgcccggtgttgctgtacctggctgctgcaggggcaggcaccctgggtattgtcgatgatgatacggttgacgaaagcaacctgcagcgccaggtgttgtacaccactgcggatgtggggcgtggtaaggctgcagccgcaaaggccaggttgcaggcattaaacccttatgtctgcatcacagcatatcccgggcgcctgacggaacagaatgtgcaggcgctttttgcaggctatgacctggtggttgacggctcggataatttttccacccgctacctggtcaatgatg

SEQ ID NO: 45749 - DNA, 1418 bp, Arabidopsis thaliana landsberg
aatcagtgaacagccaaaatcagtaattcaattgatgaaatcattaagccaaaaaattgaaccccttatgataagcttatctattacctgaaactgacatgtatggataccacagaaaatcatagacagattcaccctcattcactagaagactcgcaccatacgaatctacaattccaataaacacaccatgaatcacaaaattacttcacacatattttacagcatttgccacaacatacaaatgctagatggaaaagctaaccttcttcagggactggcactccatagccattagaatcccctccatcttgtggcctgatggggcaaatttgcaaaactaaagattcaacagagaactaaaactacacaaacatacaaaattattgatacttaagctacaaaaatatttcaattgaaattattcaacttacagatgaaacagactaagtgtattatcttcagagcttgcaaggaaacatgaaccatcaggtgacctatataagaaacagtaacaaaatcagtacctcaaaagttaggcaaaaagaaaaaaccaaactttgagaaagaacaaaactctactcaagagattgatttgaaacaagaagaaaagggtaccacttaagacccttgaggaaattattagggtttcgagctgtcctgaactgcttagagaaatggtgcgttctataaggagagacatcaaatctcatagtaggccaggatgatttttgttctcctgattctaccttaagtccaccattttcttctgctactgcttcttcttcacccatcttcttcgtcagagcttctggaaaaaagcagcagagagaggtttactttcgttctaaaccccagtcaaaatctccaaaacctgaacccggttttcaatctcagaccgacaaattgaaccgaacttaaaccaaaaaccggattagggattttgattggaatttggaagaaaagcccgccaggtttgtcattagtgcgtctctctcttctcccggcggatcggcgaatcccggcgaccaccgtcttctttcctttatccactctctacagctttcttctcaagtgtttctctctagttacttccttcctacagctttgctagatattgaaaattagaatattaacccctaatcccaaaaacctcggaatgtcggaaatggcgagtgacgaggaagaaaatatcattcctttccagctccagttcgacaagcccataccttttcaggttttggttctactcctgctcaaagtcgtgtcttttttatgcttttaaggatttagatgtttatatatgttcaatttcattagattaagatagctgagtggaacccggagaaggatttactggcaatggttactgaggactccaagattttgctgcatcggttcaattggcagagattatg

SEQ ID NO: 45750 - DNA, 353 bp, Arabidopsis thaliana landsberg
tgatggattatattcatatgataacaatttatgtatttaaattctaaagggtttaagtatatgaataactactcaatatgtgtacagagaaccaagtttaaacttaattttgttttagttttgatcattattttaatttgaatactaaagttattcataaatggagatagatacagatgcttgattgacctaaaagaaaaactatattagttattcttggctacattttagttttcagtacaaagagcaaaattaaagagacaactgaaatatttactcaattatgaatacataaaaccatgaacacaaagacaggtatattactgctccaataacattgtttagcacattga

SEQ ID NO: 45751 - DNA, 551 bp, Arabidopsis thaliana landsberg
catccttactctaatcatatcctcatatataaagactcaaaaactactctgtagaagggttatcgacctaaattacttattccccacactagtcaattataagtctaagggtttgagtaatccattagcgaggctattagtcaatttcctaagttggaacaccaaatgatgatattattcacttcgggaaaaaatgtatatggagatctctcatgtcttatattggatcaatgatattatgctacagtttagtacagttcaaaatccgtaactcattgcaaatttctcggcccaaaaaaaatgtcgttttcaagaaagcctaaccatgccgttttcaacaaagcaaaactagaacaagaaaaaagtcaacagttaagaacctaagttaattactcgtgggcctgttaagatcagtctatagtctatatgaatgaagtttgtttcgttcagagcccaacaaatcaaagacacgaagggacatgttctatcatattgggccgattaactaggcccagtaatctcgttacttatcgttgttgaatagtgcgcca

SEQ ID NO: 45752 - DNA, 379 bp, Arabidopsis thaliana landsberg
gtactgattgttgcctagcatcttctctttagcaccatctttcaccttcatctgagttcacataaatttagagattctggtagatatttactcatttcgggtattctattttagatagttatccaattatctgttacatgtttaaggatatgataaattaacaatttgaccatgcctgtagtgatatatgatatgacattgagttctgcttcaatatctctatgctgtttcgattttcatgatttgccttcaggatgaaaattgcatttttagcaatttgacccacgcatgttgtgatttctctacacctatgtctattacataggcctatgccttttatctctatgatgttcccgttcatctatatattctttttttc

SEQ ID NO: 45753 - DNA, 471 bp, Arabidopsis thaliana landsberg
caatcccttatgttgaaataatataataattttcttacaaattttatatgatggtcgataattgatgtcaatggggtttatttcagcatgaacaacggcttcgcggcgtttccttctctattgatggaacgacgctgctatatctttcccttaaaaagacaaaaaaatgaaaaaaaaacatgaataaaaatagaaaagttgagacgtatgaaccaatgttgagatacaaaatttagcaaatttatggtggttcaggcgttgagtgattaatgatttggcatgcaaatcctcactcatagctacaatcaatgcctgcgtgggtagggtctaaacgaccctagttccacaacgttaggctcatgctttatgtttaccttttagaaatggccggagtcattaattaaaattaacaaaactttctaagaacacatattgaacccaaatttggttatggaagttacttcttccgtg

SEQ ID NO: 45754 - DNA, 323 bp, Arabidopsis thaliana landsberg
gctggggatactgcgaggtttttcaaatatgctagaccatgctgaaggccgcgtttgtggtgggctatatgctgagacgagctgctgcgggggagcggacagtcactgatgacggtggaatggaaggccttgggacaaaaaacaccctgctctggaggagtgcgcgccaccatgtaggactaatccggtgttaaaactacgcgagctgcctgcggctatatgtcggccgtcattatgatggaacgatactgaaggcccgcgactgtggctacaatcgatgggctggagcgtttaatgaaccatgtggtaatagagataccacc

SEQ ID NO: 45755 - DNA, 585 bp, Arabidopsis thaliana landsberg
  unsure (1)..(585): unsure at all n locations
gaaaacatatatctattttagaaagtctctatggttgaaaaatgttattattgtgatagttttgaaatgtttaaaaagggaaaaaactgaaagtgtgaaagtttctcattttgagagtttaacacataaaaagtattttttttatcaactgataataactagaactcaaaagaatcattttttaagaatgttcttacatatgtatctcataaaaagtttgaaatttctgatttcaaagtctctagtctcttatagcttataaataattaatactctataatgtaggttattcctataggagatttgtccctttcagtgacttaaaagtaaaaaaatatgtgtcttggcgtacttaaaccgatgtaatagaccgggtactttattaaccccgttgttacgttcacgtgacgcttccttattgcaatagaattctttgtatgcatcaacgattatggacattatcgcttacttctgtntgctaaagaattatcgcttacttcttccttttgntatttatacaaatagccatcacgtaatcttgcatttttcgcataatttttctaagatattatccgagaagaatca

SEQ ID NO: 45756 - DNA, 641 bp, Arabidopsis thaliana landsberg
gaaatatgaatgactgaatatttaattagatattatcgaaattgtgattcttgttgacaaaaaaaaacaaatctcataagaagtggtgatgtcagttttcgttgagagaaagagaatttaagtggatatgttcaatatacaaaaaaataaaataaaaaaaattggacaatttggtcgaatattaataaggtaggtctaaatattagtgaaagtaacatatgtgaatgcccaaaacggacggatattttactagctttgaaacagagaaacgatgggacaaaatgacaaattgaatgtctatttatttggagtttgtcatgattattcatgtcaaaaacgcaaactattattaatagactgtttattttattattttcttacactcgccgaaaatgttcagaatcggaaataattagatgtaatgttcctgtaaaaaatgcattgagttttaattttattttattttcttaaagataaagaatttctgttaaatgaaaaatgaaagagttgtgaattacgttttttttttttaatattgattataaatgtacagctagcaactttaaaaatggttagaaaacaaatgttggatagcactattttatttttacataaagaaaatcttttggacgtggaatttt

SEQ ID NO: 45757 - DNA, 667 bp, Arabidopsis thaliana landsberg
  unsure (1)..(667): unsure at all n locations
tggaacggttccttgaacaccaggagttgtctcttgggagagtatgaagaagacgaatattaagtttacggctttgtctatatctaaagcggccccatccttttccatttcatcaaatattatatctaagaaatcgccaagtccttcttttgatactatcttcttcagaatcaaggcctttagcagcttcgcagccttcctccgagcctaccaaaaatcacatgcactatataaatgctcagtgatttatgttgcaatcatataacatgagattttagtagcannnnnnnnnnnnnnnnnnnnnnnnnnnnnnnnncagttgttccaggaatgttgtaagaaaactgaaaccaactggttcggaaagcactccagcataacccgagttcttttacggcctcggattccgtttcacccattattttctttgcaataagttcacccaccatcttcaaattacacgttaggaaaacatatattgttaaaaccattaatattagatggtttttgatgaatggttgcatgtaactattactactgtaagaaaattatattagcatatacaattttataatttcgcagaaaacataagtttacagctcattcttcttgcttttagagaaattcctcaaaaccacattttcaagttttttttgttttggcaaac

SEQ ID NO: 45758 - DNA, 388 bp, Arabidopsis thaliana landsberg
gcatgttaggcagaagcgaatcaggcagagcaacgtttcatctaggtgcctcgccgatctgcttctgtctccttgccccagccactcgcgaatcaaccgtcgcgagaactagagccaatcaccaaaaatggccaatgtaaattcgcccaaaggcattgcgaataaaattcggctgcgctatacaaagctgccaaagtgattggatcattacgaaatgtgccaatgcctttgggttgcggttggccctcaattaccagtctgctccggtctgttgacttgcgaagcctatcgctgcacaattactgcgtgcaagagccgttatcggcagacttactggatttagcggtctggtgattgagggcctcccgttaacaagcgaatgcacaaa

SEQ ID NO: 45759 - DNA, 774 bp, Arabidopsis thaliana landsberg
  unsure (1)..(774): unsure at all n locations
gatcatataatcagctttaatactcacagtgccttagactatttcaattccaattcaatgttgattactattggtttcttgtcaagtctaaaagtgctaaattgaactcttataatatgtaaactgctgtaatgaaaatttatccaatccttttaagtttatgttttaggatttatagagataaaatgatgagaaagcaacgcatgcatagaaaaaaacactaaagagttgactcttttttctctttttgacttttgagtaacgagttcatgccgctgattgcgctctttcttcccttccctaaataattatctctacttttcaaaattaaaagtttcaattataaatttgcttcttttttttcattttatcccaatttcattcgaaaacaaaacttgtctataacgtcttatagtacgtaattagtttataaatcaaagaaagcaaaactataatattaatatctaatttcgatatgttagaagattctaatccttaacgacactagattcatttaatcgagttataatatataatacatgcatcatcatctatttacttatggtcctacatttacttgcctttttcacttctttacacaacctcgaactctaacgaacattttcccaaagacagaaaaaaaaaacactaaagagaaacatgaactcaaagnctctcacttgctgtgttgtgttcttactacacaccagtttgttttcttctacattacaatcctctcttatccactngaactccacaacatcaatccttaat

SEQ ID NO: 45760 - DNA, 522 bp, Arabidopsis thaliana landsberg
  unsure (1)..(522): unsure at all n locations
cttccctttgatcgaagaagaattcccgaaaccttttttaattcaagcgatttttacgttccggattttaaatttccaaaagaaccgtttgcaataaccgcagaagaaaattacaacgacagcaaaagctcacacccgaatatttcaaagcgaaaaaaacaggtattggagattcttgaaaaagggaatggctggacaggtgttccaaatctcctgggaacagaacgtttcaatgaaatcagaacaatcgcccgatttgaatctgtgagaaannnnnnnnnnnnnnnnnnnctgaccaatgccctctactctattttcgttctggaaaaagaatttccagagtcgtattatctgaccaatatgaaagcaaaaacctggttagcattagcacaaacaaaatctgcaatgatatccaaaccattcgaatcaaaaatccacaaagaaggcgaaatagcagtgcttcatgccatgttgaaaaaaatggataaactggaactttcttctattgcattgagacaaatc

SEQ ID NO: 45761 - DNA, 828 bp, Arabidopsis thaliana landsberg
agggcaaatgttgggatgggtacacgcaactctataaacccttggtaaaccacacttatatactcaacggaaacataagcaaccaacttaccagacaactcacgacgtttatcaatttgttgaggttcgctcaaaagagatggtataacctagaacacacaaaacacatagattcatttcatcaaacaaaacactcacaaaacctaatcaaagtatcaaactttttttatactcaccatagagtaaatcggaagctgagcatcaatagttttcaatagctcaggtccagagaaatcccaatgacgaatagtaccatcaagagaagcagtccaacaataacaaaggattttttgagcaggacttgatgcaggaacaacaattagagttgttactggagctgtatgaccttcaagcgaagtaatctaaaacagaaatgtatcaatcaatgattcgaatagaaaccctaacaaaatcgaagaagaattaaatttttggtacctgtaagccagtggcggcgctgaaaacagagacagtgtttcctgtgcagacgagaagctttttagcgtcgttggagaatgatggaggtgaagttacgtagcttcttccgccgcgtttcatggttaatttccggcgatagagagaggcggtgaaattgggaagagaagaagaaaagggagacgcacaaaattggtttacttcaaaagccctaacttaaacccttcttcgtctcttttgtttttttttctgcttaattacatttcagtttttatctatttatttaatcggaaaatattaaacaataatgtttttgggcctttgtaatgggcc

SEQ ID NO: 45762 - DNA, 322 bp, Arabidopsis thaliana landsberg
  unsure (1)..(322): unsure at all n locations
actctnnnnnnnnnnnnnnnnnnnnnnnnnnnnnnnnnnnnnnnnnnnnnnnnnnnnnnnnnnnnnnnnnnnnnnnnnnnnnnnnnacagaccgtttgagccgtgtaaaacaagcagaggttttaaagagggcactcaacaaccccactcggacatgagcggatagactgactcatacatggggaactagaaggttccacaattaaaagcctgtcctagaaaaaagctggctcaaaatgaatacctagataatgctcttccgtaccgccataggacggggtgacaggatatgaacccgggacattgtgttcccagaacaaac

SEQ ID NO: 45763 - DNA, 473 bp, Arabidopsis thaliana landsberg
ctgtgttttgttcttctacttcttcttcttcttcagttgttttttttcaccttctaagtaaactgtcttgtataatcctaatattataatgacaagaagtcttctcttatttgtgtctttgtggttcatataaaatgttcaagtgttctctttcatcacaacacagaagcttttccttctccaggcatgtttcatgttttagtctcttagttttagtttggtgagatcagatttctgagtttttccatttatttatggttgtgattagttggaaaataagggtccttcctgcttttgaagttctttcacaagtcctgaatatattttctgcagtaaatatgctaagactccaatcttagaggtcttaagtttgaactgtttcaggaaaacaaaggttcctctggttactctgaaatatttcaaaccaatggtgagcaattggtagcacttgctaaagaagatggagaagacac

SEQ ID NO: 45764 - DNA, 618 bp, Arabidopsis thaliana landsberg
cgaccaaaataataaaccaaatacatgatatgtacaataattacatagaatttcatattaatatattaaatacaaactaaatatacaactttttcattgaagataactaaatatgattatatcacaataaccaacataaaatacatcacacattcttaggatcttaactttgactatccattgttttctatatggcttgagagagttgatatcattgaaatatatggtattagagtttatgtgaatcattaatgagtttcgagatatatatgatgtttcgaagaccatgtttatataaaaagaattaactattagcttggagaagaataaaaaatccctaatgatgtaatatgaatttatttaaagaaacgattatgtacaaaatgattgaattttaagaatattcgactgttgttcaaatagtgcacatacttggcatcaaaaatattttttattatctaattgagctagaatctgaatttcttactaacttttaattagtaattggtaacataattgaatttcggttggaaccattgcttctatgtgtcttgaatacaaactgaaattgttttttttttttgcttatagcatatgcaaaatctttacaatataata

SEQ ID NO: 45765 - DNA, 529 bp, Arabidopsis thaliana landsberg
tctgctttgtatattttgtaatgtctcgtttgttgttatcgtctactaaggaagacaaataatgggttgttctagctcgagaaccatagcagagggtactctctctctcatcaaatgagagtcaagaaatgacccacacacatctgatctaatgttttcttcttcatgattattcttactgctgagagtatctctgtggactgtgatttgattgtgtgtttgtagggaaaaaggagaagattcgaagaccaaaaacatggaaacatcctcaaccgatatcaagagatgagctcacacagatgcgagaggagttctgggacacagctcctcactatggaggcaagaaaggtgatcatcacatataaataattatgtcaagagtcaaaagtgtttgtatttcaatgtatatacatatgtaaacagagatatgggatgcgttacgagctgcagcagaagaggatgatttatcgcttgcgcaaacgatacttgagagtgccggtgtgattgttcagaacactgacctcaccat

SEQ ID NO: 45766 - DNA, 521 bp, Arabidopsis thaliana landsberg
tgctaattcttatcaaaaatatatatatgcttctcccagagtcccagtttcctataatcctgacgcaattatactaatagagccaagtttacataataaagtatatatgattaatagataggctttcttattgagccatatctttaattaagatgtgatgatagcgttttgtataagttaccaattgtttgaaagaagagatcatcacaatcataaatcataagtagtagtatatagtaataaataaatacacaagtcataataagagtaatgagaggataattaaggagggaagaagaaagcagaaaatgcggttggagaattaggtgctaaaagttagttgagtccatctcagtatctaacggtcaactctctctctctctagagaaaacaattaagaaatctgacatacacatatgtctctctctctctctctagtctctacacacaattcaattagagaagagacagagaagttcgtcttttttgtttttatacccttaaatcaatcatgcaattgt

SEQ ID NO: 45767 - DNA, 528 bp, Arabidopsis thaliana landsberg
gataatacattaataacaatatccacctaaaattctaaattaatttaaaaaatctctaaatttacgcaaaatttttattgccgtcaaatttctggactggtcttcgtcaaagaaaaatagctgagcacaaggggaggatcatcgtcaaagccaacgagaagaatactctgaaatatcttgaagctgcgacaggaaaaatggacgcggcgatagggaaggttttcgattccgtctcagacttcttctccggcgctgcttctgcttccgccgatgagtttcccttgtgcgattccgacatcatctccgtaagttttatgattcaccaccttttatgttcctcaacttgacacgcacaggaacctcgaatcacaaatttccaattgttttaatatctccttcatcggattttggattctcttgcgttgcttgtccttagaaagacttttctgtgtttggcctgaattttggcatgcatacataatatctgtaggaattgacatcgctctcagggatgtgagaaagaacttg

SEQ ID NO: 45768 - DNA, 605 bp, Arabidopsis thaliana landsberg
  unsure (1)..(605): unsure at all n locations
catggctttcaccgtgacgagaccaccggtgatgaccagacannnnnnnnnnnnnnnnnnnnnnnnnnnnnnnnnnnnnnnnnnnnnnnnnnnnnncggaaggcggccaaatccggcgaggttatctggaccgaccgtaagcaaggggggtacgacgtccagggcgaaacagtgtctcgagcacatccccaacgtgatattccttaccccgagcagttatctgtacttcaatgaacacgaatcgcaacagcagcgatgatcacggtgcgggatcaccggcagtgatacactgaatctggcgatcttcgtcagatcactgtaccattagaacaccattcagagtacctgatagagcttacttgggggcgatttgctccaaatttcatgtagcaacttgaccattaatttgtatcaaagttgtagctctgtaaaccagctacaaaatcgactatagagacctggctcatttacttactccttcgagcttgaatggagtcaaagtttagcagactcactgttagacagtatcagctatatgggtgctgacacaatactttgagtcatttactccacttttgtcacaccatgcttatgacttaacaagt

SEQ ID NO: 45769 - DNA, 560 bp, Arabidopsis thaliana landsberg
  unsure (1)..(560): unsure at all n locations
catggtggtttcttagcaaaagggtggtagaaatagagttacaccgaaggtggttttcaccttgtatagctccaccatattgaagaaaannnnnnnnnnnnnnnnnnnnnnnnnnnnnnnnnnnnnnngcttcactattggtgtgttgtccatcatgcagtgaacatgtgttcatgggtttactgtgttttacctcgacatggtgaccatgcaggggataagtgcaacatgttggtcctgttttatccactgcatacggtcccaaagaagctacagccaggatgcagcagatatgccttgttatggcatataaaaacacaaactgagatccaccgagccctagctgattccatactttatccaccgtgccacaaaattcacatacatctagggtaagccctcaaaccttgtccacccctctatttcactacaaggccagaacaccgagcagacactagcagtggtgaccacgcctaccgaattcccacctcccgtggctagccttcctggaaggtaatatgctcggtttgtttatgtttcataaccatatatgatagtga

SEQ ID NO: 45770 - DNA, 2223 bp, Arabidopsis thaliana landsberg
cctagtctagtggggttccatcacttttctgattctcaatttggtgtcaaatttgcaggctggaattctgaatgagctcatagggaatggactggaggcagaaaccattctatcatgggggaaagccttttcatgctcgcaaagtctattcccttttgtagttgcattttcttctgccttaggtatgaacctactccttaattcaacagtacagtctcttcttgtaggtttccttattccttttgttaataagctgcttgatctttgttcttcttctttaatctcacaaggaaatctataccacaaaaagcagtgtctggatctggcagaaaaggaactccaaaatgcaaaagagatattaattgctaatcagcgagatttttcttgcgtaaagcgcaaactgaagttggaagttacattggataaacaacttggagacatatctcggaaaaaaattgatagagtttcacagacagatggattcttgcatgctgaaagcttgtttagtgctgccctgggaaaattctgttgctcagcatggaaaagctgcattagatcacatggggaagaaattgctgaggagatagtgattgatagaaatggaggggaaggtttaggacataatatcaagtaaaacaaagctcagtataaaggagccaccaggaaacagaggctccaggaggggtggaagagctaacaaaacttgtttgtcaaaggatcaggatttgatatctgagccaacatcaaggttgactcgatctatgcgtcactcacttagagagcaatgccaaaaccgttctaatgtgcctgaagttgtttcaaagaagcctaatttatgtgatagatctgttggttctaggggtgaaagggttttgttggacacgagtaatgcactccctggcttttgtatttgctacaaagaaaaacgtcagcagtgcctctcggaagaagtaacagaatctgggtctctcaacaatttagtaagtttgaaatgggaactctgccataggaagcttgcgtcctcaatacttgttagccttggtatgatctaattccttatgcattttctcactcaaatgcgcatgcatgcatatgaagttggctttttgacattttcctgttggaacaatctaatagcttaatagtttagatgagagctgagacccagtaaccattaaagtcgtccattgttgataaaacaaaagtaatgggtatgaaagacctggagtgagttttgaggccaatgagtttgttcttattctccatttccatgcttttcttttgtattctgaccatttattctcgtaaaaacacacacatggtatatattcacgtctcacttacgattacgaagcattgctagaagatgagtatctctgcttacagtttagctttccaattcaggaaaatgtttgggagactctggtagaattcatctagctcatgaggctttactgcatagtatctctgttttattcaaaagcacctggtccagccacaaccagccttctgtcagtcagttgctggaatttatcgggcaagaagttacaagagatgtatttgccgttgatcgtgcaataatattatacaacttgtgctggttgaatttgcggaattaccactgcaggaagagtaggtatgtgagacatattgtttgtataacacttgtcatttttgtcatgatcgagcttttgtcctccctgatgcaaaacatcatatgctaaattgatcaagtatgctctttagaaatgtgtacctatcatccttcttaacctcttgattgttaccttcaacaggtctatctgctgtgatctgtttcatatccctttcacaaaactagtgtcatggttaatgttagcatttgtactcagcggagaggttccaatattatttcaaaaggtaaaagcttgggatgttcgacggtaacctgtcgttgcctgttttgtttttattttaactattgttgggtataagactgttttttgttcccgacaggtttcaagattgcttgcctctttatatctgctttcttcctcaaattctgaattcacattcgaatatgatggaaatgagctgtcagcaagtcattgggtctcatttttccatcaagcctcgcttggtacccatctcagttaccatttcatttcaaaaatgagccaaaaacacaaatcacagtgcctctcagataaagaggtaagataggttttttcagctttctatctg

SEQ ID NO: 45771 - DNA, 640 bp, Arabidopsis thaliana landsberg
ctcacatactatggcaattctcaaaaatacctaaattgagtattattgttccacaaatactgtcactagtttttttctcaaaacataccacaaaacaaaaactagattttaaactttcaaaactaaatcctaaaccgtaaaaataaactctaaatcctaacaacaaattctaaactcaaaagtttaaattataaaccttgaaaaattaattttggtgtttgtaataaatttggaacaaaatttttgttgtagtattttcgaaaaaataaactcattaaaatatttttggaaaagagaaaaaacatagtttagtggtattttataaaacagattttaaaacatttaagagcctttgagttaaactcaaaacgacgttgttaagcttattcgactaatggagttctctacctcaaaacgtccggcgacgacagcgacggcggcggagtctgtacatttccgtcttctctgtccggcaacaagaactggtgcaataatcggaataggcggctcagtcattcgacactccaatctgtaaccggttcaaattccgcgtcatcgatgatattcacgttcgttcagaagagcgtgtagctgtgataatcgacctagtggatagaagaggacgaacgaatgtgtgtga

SEQ ID NO: 45772 - DNA, 693 bp, Arabidopsis thaliana landsberg
tcctttcattctctgactggtttgcttcaagctcttcgatagtactcttaaaatcttcaagatgatggctgacatcgtccttgaacttttcatggatcattctcattttctcttcttgctctgttagacgattagatattatcagtgaacacaatagatcagaacggatcttgcatatttttattcaatgagtggaaatatggagacatttccagactctcatgttccacaacaatacacagctcaattttttattattctccacataggaatgaattgagcatttagctttgtcttgatataactatgttaaatgcaagtttcatgtctatgttagagccgaaagtatagttaggtgtgtgtgtgtgtctaatcaaagagacatgaaagcacaagaatgaagcaagatggtgagtacttcaagactaaatgcaatctaaagagtaatacttgatatcaaatttccgatctactaccttgaatcaggattaaactgcaaagatagtatatttgaacttctaagttttcttaatgttcatgactgtgaattcgagtacagtattaactattaagatataatgtgttgatgtaccttgtaatcttgtttcggcatgctttctcttagttttggctaggttacttgtctttcccctgtaccataattaacaagatctttgattgataatttaaaag

SEQ ID NO: 45773 - DNA, 2956 bp, Arabidopsis thaliana landsberg
acagttgccataagcgggaaactatatacaacgttttcttcttctttttttaattaaatgttatatttaaatatagaaatgatttaactttaaaccattaaaccattaacactactttagtagattcggttttttcataacttacatttgtagattttgtagaattttccatgcatcaaacatagtattttataggattatgattgcaatatttaattttgtataaatgttttgcaaaacagtaaacatccctacactattcgatattattattaaggctttttctgaaaacatgtaattgggccatcatggttcgattctcagcccaattaaaaccggatcattgagactcacaataacgtcgtcgtttagctctgagctctgagctcttctctcaactccgactcatggaggatgaaccaaactactgtaaaagttttcaagtttcaatttttgttctcaatcgaaatcaaattgagtctctctcaaccacaaaaaatgattgttcaccgtataataccttcccgcgtaaaagaccctctcactcgatttaaacctctcaaaaacttgacaacttcttcatctcccgtattcgaaccctcttcttcttcttcttcttcttcttcttcttcttcggcttcgttttctgtttcagattctttcttggtggagaagatttgttttagtttgaagcaaggtaacaataatgtgagaaaccacctgattcggttaaaccctttagccgtcgttgaggttttataccgctgccgcaatgatttaactttaggtcaaagattcgtggatcaattaggtttccattttccgaatttcaagcatacgtctttgtctttaagcgctatgattcatattctcgtgaggagtggaagattatcagatgcacagagttgtcttcttaggatgattaggaggagtggtgtttctagactagagattgtgaattccttggattctacgtttagtaattgtggttccaatgattcggtttttgatttgttgattaggacttatgttcaggctaggaaacttagagaagcacatgaggcttttacattgctgagaagcaaaggttttacggtttctatcgatgcgtgtaacgctcttatcgggagcttggtgaggatcgggtgggttgaactggcttggggtgtttatcaggagatttctcggagtggtgttggtattaatgtctatactctcaatatcatggttaatgctttgtgcaaagatggtaaaatggaaaaagtcggaacctttttatcacaagtgcaagagaaaggggtttatccggatattgtaacatataatacattgattagtgcctactctagtaaaggtctcatggaagaggcatttgagttgatgaatgctatgccgggcaaagggtttagtcctggtgtttatacttataatactgtgataaatggactgtgtaagcatgggaaatatgagagagccaaggaagttttcgcggagatgttaagatccgggttgagtcctgactccactacctacagatcgttgctgatggaggcttgtaagaagggagatgtggttgaaacggaaaaggttttcagtgatatgagatctagagatgttgttcctgatttggtttgctttagctcgatgatgagtctttttactcggagtggaaatctcgataaggcattaatgtattttaacagtgtgaaggaggctggtctgattcctgacaatgtgatctataccattcttatccaagggtattgtagaaaaggtatgatctctgtagctatgaatttgagaaatgaaatgcttcagcagggttgtgctatggatgttgttacctacaacaccattttgcatggcttatgcaaacggaaaatgttgggtgaagcggataaattgttcaacgaaatgactgaaagggctttgtttccagattcttatactttaactatactgattgatggacattgtaagctcgggaatctgcaaaacgcaatggagctctttcaaaagatgaagaaaaagagaatcagactcgatgttgtgacatacaacactctgttagatgggtttggtaaagtaggcgatatcgatacagcaaaagagatatgggcagatatggtatcaaaagagatacttcccactccaatatcttacagcattttggttaacgcgttgtgcagtaaagcccatctggctgaggcatttcgagtttgggatgaaatgatcagtaaaaatataaagccaacggtaatgatttgtaactctatgataaagggatattgtcgttctggtaatgcctcagatggagaaagctttttagagaagatgatctcggaaggttttgtgccggattgcatcagttacaacacattaatatatggttttgttagagaagaaaacatgagcaaagcttttggtttggtaaagaagatggaggaggagcaaggaggattagtacctgatgtatttacatataattcgatcttacatgggttttgtagacaaaatcagatgaaagaagccgaggttgtgctaaggaagatgatcgagagaggtgtcaatcccgataggtcaacgtatacttgtatgatcaatggatttgtttctcaagataacttaaccgaggcatttcggattcacgatgagatgctgcaaagaggattctctcctgatgataaattctgaatcagtatattttggattcttgctcaaattctacttgtgatagcttcaagctgatatcctagattgagttgatattggtgttttttggtcaaaggaccaaagatgtgtgtcactactcactacagaagctcaaggaacttgactttatcgaatagcaaaatggtccccgttacttgagaacatttcatattagacctcagttttttgtaattctaccattttagttccttcaaacattttattacgccataccgttttttaa

SEQ ID NO: 45774 - DNA, 941 bp, Arabidopsis thaliana landsberg
  unsure (1)..(941): unsure at all n locations
agatttggtttaaggcttgaagcaataattaaatattaaatatctagatatttgcatgaacgttgcaaaatggaagaaattgccaaaacaaaaagattatttgacttttaaattgcgtgatagtataattataattctctttcaatctctaaatcacagtgtcgggaaagttttttcttggaagaagaagaagaagagctcaacaagctcaacgaccaaaaaacttcggacacgaagactttttaagtcagttctcctctttggtttttttcgttccaaaatatttgatactctcgatctcttcttagtgatcctcattaaataaaaatacgatttttattctttttttgtgagtgcaccaaattttttgactttggattagcgtagaattcaagcacattctgggtttattcgtgtatgagtagacattgattttgtcaaaggtgcattcttttatataaaaaaagtttaatttccttttttcttttcttttctcttttttttttttttcccccatgttatagattcttccccaaattttgaagaaaggagagaactaaagagtcctttttgagattcttttgctgcttcccttgcttgattagatcatttttgtgattctggattttgtgggggtttcgtgaagcttattgggatcttatctgattcaggattttctcaaggtaaagggacgatctttagcttttttgcagctgcaattacttgataattccatgtctggattctaatttcatggttttttcaaaaaaaaaaacaaaaaacaaatccgtttggaactcgtttgcttaatggtgacaggttttagggttgtttagttattgttgatagattcaaagtgctattggtctgtggcttttgatgttnggaagtgaaacacagttgttttgggttcttgctaatcagagaagattcgacgattt

SEQ ID NO: 45775 - DNA, 759 bp, Arabidopsis thaliana landsberg
aaatatatgtgcttttgtaacagtttcgatttgtttgctacattacattacatatttcttataatcacaatattattgtatcactagctcattctgcatgtagacattatgaaaattgtcagacagccgaagatctcggcattaatattaacgaatttgggcacttcgttattaaattgaatgaaacatgatttgtctagtatatgtgtccgaggcccatgggcccttaatttcagactcagcaatatttctgatattttcctcctggtaacatggaggagctaaagaagaagacttttctaataatgttatttctaacaataattttcagctctaaattgaaaattaccaagattaacatataacttaaattatacgttaccaatccattcacatcccaaaaatgaataaagataaatgtaatcacgttcccgacacttaccatgtaacgatccaccaaacaagctacgttacgtgcttaatgatctttttaaatccaataaatacgttaatctacataattaaatggcttaatggccacttcatgacttatccagaaagaatcatccaaagaaatatgacgtcagtaacaaaaagaatatccaacatgttactgtaattaatattaaattcggcggttgttaaatcgtacgagaaaactattcgtgtcggaactttagatccgatatttatagaaagcaaccaaactccggctccggttactcgggagttcaagttttggactttgatgggtcatgc

SEQ ID NO: 45776 - DNA, 724 bp, Arabidopsis thaliana landsberg
  unsure (1)..(724): unsure at all n locations
aagtatatatatatcgtgtttctataaaaatcacaataatcttttctgctttcaaacgttcttaatgagctgcttttatatactgcttcaacacaataatttatttattttttgacatcgacattttacttatataaagattaaatgaaaattggctatgaaatccagtttatgttattgtatgaatactcgatacggttcggcatgtgtgtttagaaaatctatttatactaaaaccaagttttattagattcgatttatgttatgaaaaaaattacgttcagttttgtttaactttggataaaaaatacaaatcagaaatttaaaaattactgttacatgtgtatacgtgttttgtgtatatttcgagaaaattagtaaactaattgagaataactatatacagctggttaatacaaataatgaagtacacaacaaatattccataatatgcaaatttttacaacataaattaaatgatatcaaaagatccgttaaagtaaaagcgagaaattttcgtttctgtcatttagtcactagttctccgtctctcccattctgaccattctccattctccattcttcctaggtttgtggctntctcacgtttatctttaatccgatccgtttcatttttctgcccctttttcttacggcttcatgttccattgattagctaggtaacgatatttggcgtttcttagaaaagttgtaaaaatacatt

SEQ ID NO: 45777 - DNA, 732 bp, Arabidopsis thaliana landsberg
atttcttcacaaattaggtctataaaaattgtttctcccatgatatcagattcattgaaatcgtgtaatgaatcttagttagtatgtcttggcttataatgttttgatgttgataaatttgatagagcaagtggaaagaggagctggatcaagcggaaggactgaggaaacacaagtaaacaatccaagacacaataaggaagattctggttctgaggaatccgacttttggatgcctaagtcaagttctgattcagagttagatgaagagactgatgaagaaaactgtaaaggttgctctcttttgttttttggttctactgtcatctcatatcgaaactttaattagatttgcatctgatttgggtacaggttctcattgtgatgacaaagaatctgaagagctctcagaaaggtacattactatatttgctcttctctttttttacaatcatccttttgattgtgtctcataataactcaatttggtctcttctacagaacaaagagaatgtcactagagattggaccaagtagctttgcttctaggaagaaaaagagtaagaatgatgagttgtcttaagatgttgtggacaaaaaaagaaagagcacaattctgtttgtaagaaagagctcttttgaaaattatgtgagagctaaatttcaaaaccgaatcatccataatcattaatcacaagttcaagccaaatttaaagacgaaatggaggcaac

SEQ ID NO: 45778 - DNA, 748 bp, Arabidopsis thaliana landsberg
aaggcatgactaaacaaccttttagtcaatgtttatattttttaaaccaaagttgacctataactggggtaaagctgatccataaaggaactactgccattctcagagaaagatacaaaactgatcgtagacagataatttacttaaattcgtaaaggacccgagagaaacagcatcctaatctcctctatgacatttttagtatttaagtgcttgtggatctgttataagcgcattaataaatatcaaacagatgagacggttggtttgaaagttaccaacctttattgttcaatttgagattaccaatctcgttcttgatccgatgataccgagccatgcaagttgtggaacataaggcagcttcagtttcgagccagagattcttgtacaagagagtttgtgggtggttttcttcaccatcaggaaagttggaagcaagtatgttcttaatactctgcaaagttaagattcagtaggcaagactttataaatgatgcacaaaaataatatgcaagtatatacctgggtcatttcattcttatccaccggttctttgacaccaaagctgtctagtggcttgacactaaacctttgaaagtctttagcaactcccgttgcggcctgaacaagggtaccgttaaacaacaaacggcaaacaagaacaacaatgtgttttttatcaaaaaccaaataggtcgggaacataacacaaagtaagacattacctaggctcatgtgaaatact

SEQ ID NO: 45779 - DNA, 497 bp, Arabidopsis thaliana landsberg
tgagagttactagaattatttaaggggattgcttgttgtgaaatagagctagagaaggtatctgattctacatcacctcttatactaattaacattgctctagttatttcatgacattgaaatgaatgtttatggtctatttgtatcctctgtagatctggattctatcacttgtgtcaaagctactcgcccgaggggttgcatagggttgtgaggttaggtaagggccatgtgccacgaccgcaccagggccactacctgagccacacctataccagggcagggctatgcattggggttatgcccatgctggggcaggtccatgcatggacctcccgctagtgatgttctcattcataagatggaggatgaagttgagtcgctcggtggaaaaaatgaattggtatctttcataactagtgataggtgactgattttgtagactttcctaactccacatcatgtgaaagcaggaggaggctgttatgaaatttgaa

SEQ ID NO: 45780 - DNA, 715 bp, Arabidopsis thaliana landsberg
  unsure (1)..(715): unsure at all n locations
actcattggatcttgaaatatttcaggattataatgagttccataagtggtccagagtatctgcattcaaacaaagaagcagaggtttatttattagtatttcttcaaagaaatagagttttgattagaagctgaagaatcttgagagatggatgtgttaaaccttccagcctttggggattgtgtatcctccatagtcaatatcagccactgcttttctgaaagaaccgaagattggaggggataatcgcattgtttcacgaacaacttgccaactatacttcatctttttcacatcttccactgtaagatattctccttcccctttgtttgcttttatttgagcatgttctgatatgaatcaagaaaaaactgagagttgagtatatgatttttgctgataggaagagaatattctgatattcagttgattgttaccttgaaggagagtgtcacgacaagttgggtgctgagctaacatcttgaaagtcatggacatggcgtaagaggttgtgtcatgagctgcaaacactagcaaaaccatattatctacaacctcttcttcggttatcacacctttgatcaactcttctactagcctcgagaaagcgttgtgtttggcttctcagctccctctttttccatttctcttcgcttctccctgaccttcccactagaaatgtctctatctctagccntgcttctttgctctagc

SEQ ID NO: 45781 - DNA, 527 bp, Arabidopsis thaliana landsberg
gcattctaccgatccattcgatcaattataatttcttattaaggggtctctaaagaagaatctaggaatgggagggtataaatcaacaaacaaaaatataaggataggacagtaattaaacacgtcacctgcccacaaagaatcaatactagccaatcacaactctccactacgatctctcatcacgactctctgctatgtttgtgacatgtgaaagtctcaaaaacaaaattcgttttaccaaaatgaaacaaaaataaaaatatttctgagaacctcaagtttaattttgcggcttagatttaaattcgtctctcaaactcaaatatctgaaaaaacctttgtccagtatataaataagctccacgagattttcaatttctctgtatatttttccttttgattcccagaaaatgtcactagattccactttctagcttgcggtttctcgggaatctgaagtttccttttgtgttgaatcgctgggaaaaatctgatggaagcagcttcaagtttcctgggtagaa

SEQ ID NO: 45782 - DNA, 544 bp, Arabidopsis thaliana landsberg
tggaacattcgatagagaaccaacttacttgccttaaattctcctgaatctacgatttaatccattatatccccaataattgtccaaactacctatttatggtttgacttttggtgcctctttggaaattgacaatttgtttatgcagttgaacaaatctaatttggacaagcaagctagcttgcgtggatagggaatcatgaattttgttaggattaacatatgcatgccataccatcattcatgatttcttatgttgtgctgcaaattcaattcttcggtgtagaaattatttaaagttttaatgtaaaacaatttttttgtaaaataaataatctgtcatatttgtttggaaaatctattacttaagttttggctcaattggtttatctaataatcataaatacatgtggtctgattacccctgttattagttagaaaacatttaaaatttaggacatataatgtggtggtctttcgaaaaaacgttctctctgaactatttcagtgtgcttttattgaaactcaccggatcagtcgatag

SEQ ID NO: 45783 - DNA, 291 bp, Arabidopsis thaliana landsberg
ctccccgatcatgaatggtccctctcatggtggggatagtttgtgccaatctttgttggtgtggacccgtcataagaccaagtttcctatttgcagggttctttggacatagtggtcgtgacaccttcgtagtgtctgctggtacttcgccgatcccaaaagtgccatatcacatgcttcgtcgagttggtccagcgcgtcctctaggtttgactcgttctgtttggttgcatactattttacccttggggcaccatagtcgaggtcggtagggagcaccgcttcagctcc

SEQ ID NO: 45784 - DNA, 684 bp, Arabidopsis thaliana landsberg
  unsure (1)..(684): unsure at all n locations
aagtcgagattattttaaatagatttatttcataattattcatctaattaggatatttggttataaatgcgtttacatttctgaaattaacgggtacatatgatatagaagaaaaaataaaaaacaattcgggtatcaacaagtagtcctaaaacttattaaggtttttcagatttacccacaacacctgatatctattgaggttttatgaattcagatttttggtgggaagattcatctctaggctttgatgttttttaccagctcctacgtctttactggtaacactttcttggttataaatcatttcttttaagtgtaacatgtttgttttatagaaattaaagatcgcattttattaaaaataaataattgttagtgacaaataatcgcattttattaaactattttacaaggttccaaaaacttgaaaaaaataatttaaagtttttaacaaagaaacaaaagagggttagtgacaaataatctctaataactgtttatttagtattaaaaaaccgttatcattactaactgttttttttttttaacacaaatcactaataactgttaaaaatatagaaagaggaagaagaaaaaaaggcgtgaggttgacattacagctcagagctaaagctttcgtacaactgacacttcctcaaacttncaagaaagcatcagatc

SEQ ID NO: 45785 - DNA, 1327 bp, Arabidopsis thaliana landsberg
gatttaatgtgacgtactaagaatgtataacttttaattaccccacacgcttacaaaaactaaacatatccgttaggtccttgacctgatttgcgctttgagagaatttttcataacgaccgtgaaggcgtacgtctcagtcgggtcgggtggagaatccggaaccgggatccatttaaacgaatggatcatccttgcaagcatcaagttgatgtgcagaatccctaaagaccaagccgggcagatcctacgacccgcaccaaaaggcaacattgtaacaccacgtgtccccgtccagtcagaatcaaccccgtccccaccggttaaaaacctctcgggtcgaaacttaccaggatccgaccaaatatccgggttctcagtaacccaagcagtgtaaatttccacatacgcccctgccggaatatcataccctcctagctccgtgtctttcacggcggcgtgagagagaagaaaatgtcccggaggatgtcgtcggagagtctctttcacgatggcttctaaataaggcattttcgccacgtcatcctcttcaacgacgccgtttttgccaacaactccaacaacttcctcatataacttctcttgaatgttttggtcagtcactagatgaaataacgcccattcaagcgtcgttgcactcgtgtccgtaccggcagagacaatctccgagcacaaagtcacaatctcttcatctccaagctcaccacctctctcgatcaagttcaaacgaaacaaagaatccacataagctgcaccaatcggactaaccatctcttcgttaggattctcctttgcatcaacgaacttacgacggtttcttatcaacggcacgagacactcgagctgcgtcttcctcagctctctagcttctctaacttgacgccgaaacaacggagtgaaaaccggcaaaaagtcaggtaacgtcggagaagttataagcataacgtccttaagaacattctcaatgttcttaatcttttcctcgctgatcttggcaccgaaacaaagacagatcaagatactacaaatcgttagcctacattggctcataacctccacgaaacctttctcaacattctccgttttaatcctcttcatatgattctgcatagcccaactccttatccacgagcactgcttcactctcggcgcggtcactagctctgtcacaaagttcctcctcagagtcctccacaaagatccgtactccgccgagtttatagcgcatttcccaacactaaacatgagccggatcggcgagtccggaggccgggaagcgaatgtagggccgcgttggactagagcc

SEQ ID NO: 45786 - DNA, 1095 bp, Arabidopsis thaliana landsberg
  unsure (1)..(1095): unsure at all n locations
attgccaatggaccttatgattatacaagaagtggcaatcctacacgggatgcattggaaaggtaattgtttcttagcatcttctcgattcctaggttatttagctatatttgtatgtgtgtttgttcaacattacttatagaagttgtattcgtttgttagcctccttgcgaagcttgacaaggcagatagagcattttgctttactagcggaatggctgctcttagtgctgttacacatcttatcaaaaatggtaatttccgatactgacttctcctggattgtaatgtctttcagtgtattagatcggtagcatagacttggtttcattgtagtacatttgattttgtttctataggcgaagaaattgttgctggagatgatgtatatggtggctctgacagattactatcccaagttgttccaagatctggcgttgtggtaaagttagtattgctacctttgattctgaattatataactagttattcttacaactaagataacttaatgataccattaaaaatcttgtagacgagtaaacacaactaagttagacgaggttgctgctgcaattggtccccaaacaaagcttgtgtggcttgagtctccaacaaacccaagacaacaaatttctgatatacgagtaaatactctgtttctacaaagtttggagccagataccacatggccgaaatcgacttattctgctgtaatgtttaattggtttgatggttttctgtctttgtagaaaatatctgagatggctcatgctcaaggtgctcttgtgttggtggacaacagtattatgtcaccagtgctctctcggccattagaacttggagctggtgtgtaaaacaactcagacttgctttctattggctaaaattttcgtttttctgttctcaaatttgcttcttaatactcatatttcaacttgtctggctttnnnnnnnnnnnnnnnnnnnnggctactaagtttatagccggacacagtgacgtgatggcaggtgtgcttgctgtaaaaggcgaaaagtatgttgcctttactcttttctatctgaaacatttctttgaaatatctgcttttctat

SEQ ID NO: 45787 - DNA, 482 bp, Arabidopsis thaliana landsberg
aaaatattagagagcaagagacatggggtaataaattcttttgtaaaaaatttgatatggggtgtccacaaaatctttcttcttactagacattaccgatccacaacaattagttcaaagattagcgatcccctaattcattttgattgtgtttggaagcgtgaagagaaaaattgtattcgaagcattaaattatttttttgccaatagattatgagttaccacttattaccaattgattttgagttgaaattccttataaaatttgatttaagctttagatgaaatgtgtgtttgtgtctacggtgcactcgaaatcagaatatattcatttctaccatcgttcatgatagctggggcattcgaactcttaatgccctaaaaatttattttcttcatctatttattatgttgaaaatagaatgttcgatgtgttttgaatgagcgatacacatgtgtaccatcatttacgtaaacttaac

SEQ ID NO: 45788 - DNA, 927 bp, Arabidopsis thaliana landsberg
ttttttttttgaagtcattgtttcaatgtgtgcagttaaatgagagaataaggatcaatgtcaatatggtaattcaaactcttccaaaatgctaaattttagttttcaaagctcaaacaaatcatgatgtgtaaacacttttggtataagtctcataatgtataccgagtacatgcatctttcacatgcatctgtctcgctatatgtgtatgtatatatgataattagaggtcgaaatgtacttatggcgtaattatgtaatgatgatttgcttgacccatcaaatttgagtgttggctgtaaagacaatctccttttccccattatcgtcctttcttcatgtttctatattcgcttctatattcttcttttatatcctttttatgttgatgtcatctcaataaattttgagtcggtgaatgatgaagtatttatcatttcttgatgtttatagcaagaaaagaaaaacatagcatcaataattataatcctaaataattatgaatgatattttcatgttttgaaaatcttaaaacgttatttttccattcaaaacgttcacttatgaggtataataccagtcattctcatatgaatacgtacttttgttacaaaagactcctagatttagggtaagaatcatcttctatccaaactaattagggcatcaacattctaagaatgcaaacttaaattagaaatatatacggagggagacctaatgattctaaaataagaaaatattaagtaacattgatttggaaaaaaatgagctaactatagtaattaaacagaggtggtgtgctttgttagtatatgtatgatgtgatgtcacttgtctcactcgtaaatgattaggctgaactttgattacacattttcaaatttaaagttacattttcatcatgatcaaattaaaataaatat

SEQ ID NO: 45789 - DNA, 570 bp, Arabidopsis thaliana landsberg
  unsure (1)..(570): unsure at all n locations
gaacttaggtgagaacatatacttgatgggtcactggtactcgtcgtgacctcaaattaaactctaccgtgcttgtcgcctcagtccacctcaccggcgtttggttgcccgttgtcgccgtggatggggaggctctaggttgtttgggacctattaacttaggggaaataataggtaagcctcgaggatcacgttggtgggctcgatttcatcggagacggtcgccgtcgatgggtctaggcggtggatggccggcgctcgtcagggtttgatcgtggaccggagtttgtanatagaaggaaaacggagggcctcggtgcacatgtaagcgaaacaaaagaatagggcactgaacccttttgcggttaaccgatctagcgagggggtttctgtaaaaattccaggcgcgggcggcctgtgcgggggtcgttcctcctcgttcgtgggcagagctgatggtttcatcccatcgttgtttagcgttttctttttcgtgcaactagtaaactcactaaaaactgtagaaaatagtgaactacatttcaaggtcactaaaatatgtaatcttgt

SEQ ID NO: 45790 - DNA, 545 bp, Arabidopsis thaliana landsberg
tctcccacgtcgttcgtgattattgcagtattttgtgttctgattttttatttcaagttcttaaaatttgactttcaatttctatcttctttgaaatttgttactaaattggtatatgggtagttgttgttagctcttttgtttggtaatctagggttttgacatccatcaattctttatctctgtagctataaaatgcttttaaatgtgtgttgaatccattgttatttccaacattggcgtaggtactgaaaaaaacaatgttttgattttgttgctttagatttttgtgaagattcaacaacagatctgtgagtccattggagtatatcactattcatagtggttagacatctactagcattttctgtcttttattttgtttttgtctaaccatttttggttttgtttatgaacagatacaatgacaagggttacacgcgattttcgggattcattacagagagatggtgttcctgcagtatcagcagatgtgaaatttgcttcaagtagatctcctaattatagaattggagctgatgatc

SEQ ID NO: 45791 - DNA, 929 bp, Arabidopsis thaliana landsberg
  unsure (1)..(929): unsure at all n locations
aaaatttttaagaaatttcttgaaagtttgagaagcttttgaaagtgttttaagaaattttagttgattcattatttcggtaactaaatttgtctagttttttttgataaactaactttgtctaattcattggcgaagaaattcacaccttgagtactagtattatttgatacaatgataaattaatgtccatgaacattataacaattggacgtaaatccattactatggtccatngangaggtttcacatactctaactctacactataaaaaattctgatttcatgcatttgtaaaattattatagctcatccctatattatattgttattgcccaaggagacaagctagtaccacaaatccatctcactgtggtcatcatccataaggtcaggtcgttgtttagcctcttcaaaattgtttttcttttcttttgacacaaaatagttataatccattcttgtccacatgtcgttaattgattggccaacaaaaatcataatatcatataaaaagttaaaatgcactttagtttagttttttttttttttttcagtttggaacaaaaaccaatacaaagttggaactgagatacggactacagatgaagctgtattcctcataaacgagagaaacagaaacctcgaacctttaacccttattgtccggaaccacatttttactcttctaatctctactctctaaacatatactacttctatctctcaaaattaatctccatttttgattctcttttttatcttccctctagtgtctacttgtatcagctacttcaccttttgagcgcatgcttctctttcttatgttaacaatctctctcgagcccctttcaccgtcagtgacaacagagagattcacagtaataatttttacacagaaagatttctcttctcttgtcttatcatc

SEQ ID NO: 45792 - DNA, 725 bp, Arabidopsis thaliana landsberg
ttatgtggttacaaaataaaatattgatatgcatggttggtgctcttatatcttcgtgacatactacatagtcttcgtactcgtctattctcctcattcaagcttactttttgtgaagaatcggaaaagttggatatatctccgaggagacagttattgttctgatttagtagacaagagtcacagaaaaacgtgcaacattttgactaattgtaagtttggtttagaactgaggagcaaaacacactgacaaaactttatactttgactcccaagcaacccaaagcgtgagagaaattattgggattgattttccggcatcaatctacagccgcgtcaaacttaatgttatcatgagattaccgaaatgttgttgcatacatagatcactctatattccataagggtcaaaattaacatttatgagtttttcgtaggtggtagaagaccaaatgagatcaagaactagagatcgaccaatatggaatgatcgcactgagtaaccaaaattacataattggtaggattcaattataagaaagttaaaaaaataaaaatttagaagtttttttttctttttttttttgaattaaatgtaaaattatattcaaccaacaacatttttataaaatttaaattatactctaagaatatattatatatttatgattatcctaatgaaaaaacattaggtctacttcgtataaaaatttcataaaaatttt

SEQ ID NO: 45793 - DNA, 176 bp, Arabidopsis thaliana landsberg
agaagtttctgcacatgaaatttctgacctattgacaaaagacatgggctgtatgctgtatgcacgaacccaaagacctgtagaatcaaattctaagttcataaacgcatttattgtgagggagctaagggcttaacataaacccacacaattgagcacttccaacatcaattcca

SEQ ID NO: 45794 - DNA, 2132 bp, Arabidopsis thaliana landsberg
  unsure (1)..(2132): unsure at all n locations
tcttaatcgcctgattatcgggggttttctgttttggggaactcttctgatattttgatgactgagtctcttacagatgttcgagatgataagcaattctttgccgagcaccctggtgctgtgcctatctctaccgctcaggtacctttctcattatctttctaaactgaatcctaggtgttaatattctgcatgtttcatattttgatggtatcaaaacagggtgaagaactaaagaagctgattggggcgcctgcttatatcgaatgcagtgcaaaaactcaacaggtattaacctgagagtcaatatctttatctaatctttacctgtctaaaaccgccaattgaatctgctgatgattcctatatctgttatctgttcaacagaatgtgaaagcagtgtttgatgcggctatcaaggtcgttctccagccaccaaaaaacaagaagaagaagaagagaaaatctcagaaaggttgttctatactctgattcaacaagaagaaaggaatcaacaggagaattagagctataagtatttgttttctcctttttcataacttgtttacccaaggaatcaaaaatctgttgtttgtagtctgaaaatgacaaaagttgaagaactagtaacaagtatttgtattcttgtttgcattttgatctgtaaatataccacgaatccttgatttctctgtttcctagattcacaccaattgtcttaaggattatgttccaaacctaaagacaatgagagcttacacgcgcgaaccaatgagaatgagagaacacttgtctttcttgtcaatagtatctaaaccagcttatttgaaaccttctgaatgagccagagtgtcttccatacatatcaattccacatagacctaacctgatctttagactataatcttcaatgatttcagaacctcaaaacttttgattttacatttttaatcaaatttatttgatattcattttgcttattgactagacgttttccccttggagataatagaatgattgattttaactctcaccggaaaagacaaaaaaaaggaaaaataaatcattgattaaataaaatttatggtgaataagcttggcttctctttaccaaacatatatgtttgttgatcaatctctttctttgcgttatctgccccttgatttagacccacgtattattcgattcctaaactaattgaaatgattagatatgtgtcatgacgtttagtgaactaatattcacctaatatgtctttcaatcacttaagaatttgcattattcttgtgaaaaacataaattcacatgctgctagtaaaatatgttaacaaatcaattaaacatcagaaaataataactgagatcttcataaagaaaatggaagtttttttaaatatatgaagaagaaaagtgcgtagtgtgcacgggacttagttcatttaattctcgagccattgccgtacggaggaggctgccttcaaggcttaagtcgaggcgtgttcgttacgtttaacccgcaatagccggtggctacacactcacaaatcccctttgactcaccggatatcaacggtttcccgctattttttcccctaactaactttttttccttttcttgtaaaactcttaaaaacaaaactcggtgttgtctctttgtttgctcactccttttctttctctctctcgccgacactttcattctcacttgtgttcgtacgtaatgttcttgatccggtaggtttttatttgattataaactcatttcatttaacaaattgagtccatctctctatgattcacccataagatgatagaagaagatcaacatttacgtctgagataaatcatgtcctttaatgtatatttgtttattttctggtcaatcatcgatctttcttagtcgtagcagttacacaatgctgatggtacatggcggcagattttcgattcttattatttaaagaccaaatttaataatagatgtatgtacaacgagttttggtatcactatcttgtccggtaatgctcattgtttatcttttaaatctacgtcttcttctgcatattaaaaaaaatcattgtttcntggagtttttgtttgtttgatttcctctgttcttatgcagaaaaa

SEQ ID NO: 45795 - DNA, 1515 bp, Arabidopsis thaliana landsberg
tcagaaatattagcagttaaaatgaacataacctgttttgttgaatgtgtgtatatatatatatacctaatgcagttaacagcagggtgcatagtgaggaaatcgccgatctcagatccttttccggtgatgcagctgataagaccttttgggaaaccggctaagtgaaagcaatgtaccatgtgaaggcaagaaacagctccctaaagaaactgaccgttaaaaagcattttcaaaacattcattttaaaagagtgttaaaagcttcttagttacttgagttggcggtttgaggacaagggagtttccggcgatcaaagcaggagcgatcttcgatacagcgagattaactggataattgaatggaggaatagccaaaaccacaccgagtggaatcttcagatcagaaaacaaacacataatttgatcaaaacatttgttaacaacttcaactattgacgcatacatatgaatctaagagattataccttggaagtgaggcagtacttagtacggtcattaccggggaagctatcggagagaagaaacttcccttcacctaagatcctaacaccttcttcagcacaataagagatcaaatctccagacctcacaacctttcaccaatatcaaacattaaagatcttgaaaaacacaaaacaaaaagagcttcgtatgaagttgatgcatagagagggatatggtgagacctcagtaacagaatctttggcgggtttagcgatttctttaacaagagactcagccatgggagctttgttgtccttaaggattgctgcagccttgtgaagaagctcagctcttttccaaagaggagttttcgcccacgatttctgagctgatttcgccagttccatcaccgcgttcacttcttcttgcgtgcatgctgcgttaaacagaaaaacagaacattgtcttatcttgtaaattctctgttttatcttctctgtttatcttcggagattctttggttgttatcaaaacttgttcaagtaatcaatctaccaaaattcatcaatatttctagtatatatctccaaatttttgccaatatctgaaatcaagaaagaatgaaacttaatgagatataccttgaaccttgtactgtgtcttcctcgtggccgggttcatgatggcaacactcttacctgaggaagaagttttccactcaccatcagcgtagtatttgtatacttctccatcaagaatctcagcaaacaatccagtcccggccattgatctctgaaacaaaacttaaagaacacaaagttgtgtgtgttgtgttgatttgtgttctgttcacacaatgttttgaatatatatagccaaagagacaaaaacagagaagaagactaactctctcctctgtgtctcgcttcttgagtgttgtatcagagagagagagagagaggaagtgattattgataagattttatggaaagagttgggaagagcatgaaaggtagatagatatagattagtgatgagggtaaaaga

SEQ ID NO: 45796 - DNA, 311 bp, Arabidopsis thaliana landsberg
ccaacctcccccccccacccccctcctcctcccccccccccacccccttttttttcccggtgttttttcccccacaacaccccccccccccccaattatcaccccccccccccccccccccctccccccccccccccccttttttcccccctcccccctccccccccccctttttccctccccccccccccttcaactccccccccccccccccccccccccttccctcccccccccctttcttctttctcccccttccccccccccccccccccccccttctcctcccctcccttccccccccccccttt

SEQ ID NO: 45797 - DNA, 717 bp, Arabidopsis thaliana landsberg
ttatcgacatgccgttaaaggcacactcttggtatcggatgctttgatgcattaggcaagtagagcctacgttacgttgctaatttctttatctttgtctcttctgcttattataataactcgacaaagcagcaaaaaagtaaaatgtcgacaaatatagaaaaacaattgagtgacttgaggcctacttttaatggccaatgaatgctacatgtccttgattacgactctaaatcctaatctcttctatttcacagttccgtgccgtatttttttccctcgtttttatcgagtaaggatagatgattgatattcgtattttgaacacatatttttctctcttaccaaaaaagtttcggacctatactaaatggataatttagttttatatctcataaccagttctgccaacttatatgtgattgtatattgcataaatacgttacatcaagaatatgtatcaaagtcatcctgtgggataaatatgaatctaaacaaaaaaaaaagaagttatttttgttttgaaaattggcaccaaccattttgaacttttcttttcttcgcaattttttgtatgaaaatttcatctttcccctgccaaaacgcttttgtattaggaagatatatgttcatatcctcaagatgaatattgctaatatatagccgaccctagaccctaaaagaggaagaggtttctataacaaaaaccagtaaatg

SEQ ID NO: 45798 - DNA, 579 bp, Arabidopsis thaliana landsberg
aacaccttaacaagcactgcaagtaaattagtgagccgattgtacgacccttagggctcaggctggagaattgggtttcagtttttataactacataaaagaaagaaaaaaaaaacatgaaacgaaaacagttgattaaaagctagtaaacacgtacgggaccattaaggtttgggaagatcatgtccaccaaaaagacaaaacttaaaatccagacgataacgtttgtggagtagacgatattgagcagattacatctgtttcgttttctcctttttttctccttttttttttttaatttgttttgtttcctcctttttatattgtatgaattaaaaactatataatacaaagctcacatatatgcaggcagacaagtttctggtttagatcttgagatatcattccaatatcagtaaagaagattttgcgtatattaccagtaaagagtaaagagactaatatcatcagatcaacattgacctatctatctttttactgtcactattagtaaccgttattttaaagtacatttggttattatatagtaaattatgtgactttggttgcatcattttc

SEQ ID NO: 45799 - DNA, 413 bp, Arabidopsis thaliana landsberg
tttggttcattccacgccgtgatgaaaggcattcccgttgttgcttctgctggaaacgaaggacctaacgctcaaaccgtcgataatgttgctccatggatcataaccgtcgccgctacatccctagaccgttctttcccgataccgataactcttggaaacaatctaactattctcgtatgatcgaacctttttgattcttttttttttatgattaagcaagaagtgccagaaatgtgattcgatgttctttctgattattttcagggtgaaggtttaaacacattcccagaagttggatttactaatcttatattatcagatgaaatgttgagcagatctatcgaacaggggaaaactcaagggaccattgtccttgcgtttacggcaaacgatgagatgataagaagggt

SEQ ID NO: 45800 - DNA, 1023 bp, Arabidopsis thaliana landsberg
tacccgacatggtaaccagagacataatacatagtttgtgattttcataaaacgctattaatgacatataataactcatctttcacgtagatatttcttgttatattagtattttgcagtatatttttgtttgatttctactatggaaaaagatggaaacgctagacattcatttttttggattgatcacaatatctagaaagaaatgagaagagacattacaaatatctaagaggagagaattataagaccacctgtcccatggtgacgtacaaacaccatcaactttttcatattatttggtttgtttctatagtttattgtaataactccttatgtggaatccaacgaatcttatacgacaacaacaaagattagtgtaagatcgcatgtataaatatccttgacacttggagaaaccttagtggttcaataatgtgtataaccttaaaataatccagcaccatgatattcttttacttttaattatgctttctaagaaaatattcattaaggaagttaaataattataataatcataatatatgtccctgcattaaacctctagatcatatacgtggcaacaaaacacaagttgtaaataactttagcttaaccctatcaaaaagataaaaatttagattaaaaggattattctattggatttgatgccttgttaaaccatgttacctaatgccttaacattatttctttaatcttgcataaaataatggatcaaaatgaatagccctgtaatatcctcgtttcgtgtatatgagaatgatgaagcttgggtggcttaataattataacatttaaatttgatttagtttcttaaacttttcaatagaattctagctgaaatcaaataaattatgctttggatctgtttagtttttgatttaggctgaattcgcttatatatatatatatacatatatatatatatataccaatattaattcctggttggatttaatttaattttccttttttttggggttaaacctttatttaaaaaac

SEQ ID NO: 45801 - DNA, 910 bp, Arabidopsis thaliana landsberg
aagaccatgtattacaaatttaaattaatttgacctatctaacacttttgattgtcaattttataagcaaaatattctatggttctgtatcgaatgttaagcaaacattctacaaaactcttacaaaatcagtttgatagtagagcgagtaatcatctaataatcaataataaaaactcaaaaaaatactatgacacatcttaaaatttattttactaatagcaattcaagctgtttaaataattatattggtttaaagaatttaaacaaatttaatagtataacattctagtgttaatctaaggaagtacttacataaccatatgctattcctaattcttttctctttaaattaatattcagaagatgtgaattatggtgtttttttattaggatacaaataaacaaactcattatagtatttgataattcaacagtctctctctcgtgtgctagatttgttgtttcttgtttgactagattagtaatacaatacctttaaatatagtattcttataatacattccacatttccgtctatatattatatgcttttattggaaaaaataataaaacaaaaaagtagagttgaaataaaatataattaaaatgacggtagagatgataaaaattagaaaaaaaggaagataatataattaatgtgtccgcacaaaataattaaatgtcctttccaaattagattcggacaatcttccttctaaactataaattattaatttctttttccctttcttccttctttcctcctgtggccaccagaatttctcctcttttttttccctttcaattcaaaaatcttaacgccttcctttttcttttgggcctggaccaaaaaaaaaattattttttttccaaaataatcaaacttccttttttttttttttcttcc

SEQ ID NO: 45802 - DNA, 445 bp, Arabidopsis thaliana landsberg
  unsure (1)..(445): unsure at all n locations
cagaggatccatgtgtaatagtttctgaagaagaagaagataaagatgtttcttttatttcctcctcggttgttattaagctgcatttttacgacgaaacctgtcttcttcttcttcgtcttggtgatgttcggtttctttatgtcaagcgacattgcttgatttagctaaatcaaactcaagagacagagatttgggagaaatgtagagaaagagtcgttgaaagaattacaaaaccggtgatctacttctcatcattctctcgtgtgggtttggtttgaatccaacagggtcacaacaaatcattaagaaacccacaaaaaaaaaaaagagtttttttcagagtacagagagaatttagagaccgaaggtcgtcacatggtgatggaaaatggagcaaaatagagctcggcaatggtctcgggttcatcgctgggcnagtttc

SEQ ID NO: 45803 - DNA, 634 bp, Arabidopsis thaliana landsberg
  unsure (1)..(634): unsure at all n locations
accactctatggatcttagattttaacaattgtatctgcataaaggcaaaattaaagaaaaacattgtcaatgagccggacgccgtccagccatgccgccgccaggcagacatcggtacgctgaccgggcgctccagtatnnnnnnnnnnnnnnnnnnnnngataacgaggtaatcaaccttgaggccggcatcttcaatatggcgggccgcttgttccgtcagatttggaaagggtattttcaggaaattttctttgacgaaaagaagtgtttcatggatcacgggcgctttcctgcgggcattttccgaaagccgtaagttccggctgctcatggccaatccgtcggcttcacgcaaaacagggctggagattaactttactttaattttaagtatatctattaatttattgataatcattgtttgttgataatctttctgccccataaaaagcaaatccggccggatgatctctaatagttgctgcatgacctggcccaccccctggaaatgcccgggccggaaagcaccttccaggatcgtttccaaagagccgaaattgaaaaccctcaattgtccggtaccttccgggtaaatttcatgtacggcaggcaaaaagagaatatctgtcg

SEQ ID NO: 45804 - DNA, 467 bp, Arabidopsis thaliana landsberg
tcaactcatcccaatgtcgaaactcgcaatcttcttccatctaaaaaatatctgtttcacaaaaaccaatacaagatcttcaaattctatgtatctaagaatctcttcaagtctttaaaactttttttcttgaagcaatctaaagattcatacttttgtatcaagatccaagagagataataaagaaatgaagaaaactcaaagatctaacaaacccatatgaacaaaacatgtttaaggaactaaaactaaaacaatcactgagagctaaaactccacaaaaccacagctaaaatctatgagcaagaacaagaagtatggaagtaaagtacaatcactaactcagaagctcccactggagaaagatcagaaaaaaacacagagagatctgaaacaaaaagttgaaagagctcaagaaccagtgaagttactagaattggaaagatagatactaaaaggagtaaaaa

SEQ ID NO: 45805 - DNA, 234 bp, Arabidopsis thaliana landsberg
aaaaatgtaacaaagtactcttctactttaaaagaatttgaagaaaaatgtacacaccttataattattgtcatttgttcttgatgattagcatcgggagtgcaatccaaaattatagaaaaatatttcgcttctttcaccctcataagaaatttttattttatttttggagcaatcaaaagaatcctccgttttaaatattattactaaggtcgcgattatgaatagttccac

SEQ ID NO: 45806 - DNA, 920 bp, Arabidopsis thaliana landsberg
ttgttcgcaatgaaatttaaggaacagtaaagagaacaaaaatatgattttgcaattctgcctgattggaaaacaattgtgaattacataatgatttacttttcgtcattccattcctgggattctgctcagtcaaaacattttaaacaatatcgatgtatctgtttaatataattttctataaaaaaacactcttactcaaaaaaaaaaaaaaaactaagacattattttgaaaaaatctttaaccaaaagtttcattttgaaaaaaaatcatccagataaattcgattttattagagaaaccccacaccaccactagctagaagcagaaagtgattgaaggaaataaagggtggcacgcgttgctctgacctcaatatatatctgggaactatatgaggaaataactgtaatcaactttattagaattaccattctcagaaacacaatcataattacttcttttcaaaagacagaagttacaaaaaggttttgtattttaaattaaagttgatgtatatgtggagtaaccaatcaaatgaaaatatgaaagctatcaaatgttgtaccatgtcctttttttctggccaatctctacacacgaggagcactgtaaatacctatttttaaaaattattttcgttacgttcaaattgtaaattttgaattcccccttgcagaaaattgcttcatgtgattgttgtgtctgtgtataatgtatatgacgctatagttcgtcccatttatcaagaagttaattatttgatccataagtttttcggactacagaccaaaacatattgttattttttcttactaattgttatcatccctctcaaaaagatgagattcaagtttttgttgccagagagttttgcaactctataaaacaacagaaaattcaatatttcatgtgaagt

SEQ ID NO: 45807 - DNA, 339 bp, Arabidopsis thaliana landsberg
  unsure (1)..(339): unsure at all n locations
aaccacttcactgtgccggtctctcgggtagccattgatcaaccttcctttgtctcagcggcctgcagccgcaacgatgatcggcgaagttgaaactccgcctgccacggactggaaggccacgttcgatgcgatgcctgccttggcgcgcgccggccgggtctgcagcccatccttactgtaccggaaccgctgccgccgacaagccgtttgggacgctccggtgatttgactatcatcgacgacaaattgctttggaaaacgtctcgatgaaacgctgtctgccgctggttttcgtgttcgccactctgacgcccgnncggtgtcgcccaccggccg

SEQ ID NO: 45808 - DNA, 1883 bp, Arabidopsis thaliana landsberg
ctatctaactaaataattggaggaatagaagctctgctcttcacttgtcttcctacttaccagttaccaccttcctacggtcttgtactttggttttcgagctagcttatacatatacccttattaatatgcatactatttacttgcacaaaaacagaaaaatgtagtttccactagctaaatagtatttcggttataaaaaaactactttaatttttgactaactcgagaaagtacaaacaattatttctaagaaatgtaaattatgtatatgaagtagctactatcattattctttttacttataagtactgtagttttttactcaatgtttttgttattaggttttttagtattaagttgttaatattggggctacataaagccaaacaaacatatatgattggcatagtcaagttctcaacaagctatcctctaacgaagcatttgggtaacgacatgtcgtcgtatatatatctagatacacgtacatcttaaattagaaatttactccaaaagcagaggattctcgtaatcattaccaagtcggctcgaaagtagtttatatacattactatgaatacatttccaaatgaagatgcccgtgatttatgaccccacaaattcaaagacaaagacaaaaaaaatatataccctattaaaccggtttggtttagatacagtcccaaccatagaagatacaatcttactacatatactttacgttgcaaatttataaataccaacccatgtcagtgtcttgttggtgttgcttaaaaagaatgacacaaatattaaattccacgtagggaccttcgctgatcattacatattcggatcgttttcacttatcacgtgggtaatatttgatgttatgaaagtgttcaaaaactacgtaaattatagtttttgcacccaaaaaataaaatacaaatggttgagtttgtatacagggaaacatgcagacataacctcaaactttttttttttttgcaaagctacctttcacctgcaacacaaccatccaagtcataacttagctcgagtaaatgatctctcaacgagagcatgcgttcacaacttaataaaaaaactcaataatttatcaaaactacagtacgttgttttaaatattttaaaaaactaacataatgtgaaatagggaccgtaaaatgacttaacaattgaacaaataacctaaaccgtgtaagactatattataaagattcgaacacatgacatgaactcaagacataaccatataatacacgtacatcttttgataaatcatgaagaataatatcaaaaagaaattcttggtaatgagtcgaaaatcaaaccattaaattttcaaactcgaatgtttgtagatgtaaaattttaggaagtttcatgtataaaaagtaaccatgttcggaactgaataaaagctataaaaggactttgttaacttcggaatccgtaagttcagaattgtctcgactaaaataaaggtccaaaatcagtactaatgtactatgaaatatgtatcattgctaagccgcacaatcatgaaattttattttggtactacaaagccgcaaaatcagtactatgcatcattgcaaaatcagtactatgcatccgagagagtgttgaaaaaaaaatttggtacaacaaagccgtaaaatcagtactatgcatcattgctaagatgaggtaactgttcattaagccgacgaaattcggtttttatttttctcattttgattttttctaggagtcagactcgtcactcccaatgtctgaaccgaaattaaaaccaatccaaaccatagaccgtttgaaacattgcaattttgttatttccgttaccttcgcatgtatgcaaatataacagattt

SEQ ID NO: 45809 - DNA, 539 bp, Arabidopsis thaliana landsberg
gaggacctcgccttcttccaaggatgtctcacttggctattgtttagacttacaatatacatttcctttacatgtcaaccgttcttgccttcatcagcgctctgttaccgattttcccttactggttcgcgacaatcccagcggctttgcagctcgtgctagaaggaagatatattgttgcagtgattttatctgtgactcatcttgtgctaatggagtatggtgcttcagagattcaagatgacattcctgggtccaatgcttaccttactggactaagtattattggtggagtcactctgtttccttctgctctagaggtaagaaaattaaaggattgggtctttatgaaatttggaacaaaaattggcgattttgtaatgtttttttcgggtattttgttgttgcagggagcgataatggggccgttgataacgacggtggtgattgctttgaaggatctgtatgcagagtttgttctgaatgagccaaagaagatcaattagtcggtattggtttctttaataggagcttcaagt

SEQ ID NO: 45810 - DNA, 592 bp, Arabidopsis thaliana landsberg
tctatctcttctctctctctctgagggtcccaatattttctttggtttgaatttggtggccgaagcaacacaaaggtctcaagagttttctgggtatattctcttcttccttcgatttctctttatttttgtttttgttttgttttgcttttacgtatattgtctgcttgcaaatattgttttttgacttgttgggtttggtctatctgatattttgtccgatgggttccattttcacttttgcaagatcaagtatttcagtagtaatacggactggattgttttgtcgttatatgctttgataaaaatcaaaagaaagaaaaagatcgatgcttttactgtataatcatttgatgataaaccattaatcttgtttgtgattttcttttaccttctctaaatatttctcctatattatgtacttaatctctttggtagtagttttcctatagtatttattcaatcccttgggagtaataactaatggaatttggatctctaaatctttgtgttattcatatgatgaatcttatttcacaagttagatctctcgatctttcactaaaagtctctggttttttcttttgggtat

SEQ ID NO: 45811 - DNA, 712 bp, Arabidopsis thaliana landsberg
  unsure (1)..(712): unsure at all n locations
actgttgtatcttcaggcttgggagggacttaccaatacttggaagcccaaactttccttattcttctatctccaatacgcagagttgacctaaatgattttgttctgtaacaggctgagaagttttcgccatcatcattttccttaccgtgtaaatctacatcatcggagcatgttgaaggattttggggaataggtttcctgaatccactacctatatgtttctcatccttacctacaacattccttgataactttgcttcaaaatttaaccctccaagcattgatttcttatcattagactctgacctatagcaatcaccattattgatcttggattcatcatacgccaattcttgagtttcaaacttctcagaggaatcagaagttataccagaagaagatccaaaatggaactctttaaggggacttggagatctattaaagctttgcatttcatgagatttttgaagaatctcagagacaaagaaactccgttcagcattattattatcatgatcagaatttgtagtctcttcttccaccattatatcgccgccgttaagcggctctttcttaactgcacactgatcttcatcattaccagaggtattgttacttgaggaagaagaattcccaccttcaagcagcagttttccagctactgcagccaacanatcgaaagacgatatttgatggctttcgcttttct

SEQ ID NO: 45812 - DNA, 1048 bp, Arabidopsis thaliana landsberg
aaaagccctaaacccagtattattcgacaaaaactacatttatacaataagataaaccatttcgaatccgtcgagatgttcttaatcaggtaaagagcaaaatcaagagtcctgaatccataatccaaacatttcaaccaaacaattcgaacgaaatctgtagcgataactgtatgagaacatcttgcaagatttaaaatttataatcacgaaccaaacggataaacaataagaagatctcacttgggatatgaggaggtcgagtcgactcagtgaatcatttggggaatttgggatttgtaccgagccgcggaggtgtatgaaccgacaaatttggacgtgacgatctgggaaattgatattgggctgtagataacttaaatgggccgtactcgtatacatatctaataacttattgggctaacttcgtaaatttgcataaaaaatgcttcgaagatttgtagcatcaataattaaatatattttattagtctttaatttttgggaatcttgcaaatgtaccgcttctcattcaaaatctaccacaactgaaaacaattttcaaaatctacaacatttcttgtcacatgtaaatttgtagatgaaattgccattgataatgacagactgcggtgtcagataaaataataattgatagtagactttcgtatttgttttcaaatattcttacgcttttaatagattgatggacccaaaaataatttttattggagtcataaaataaataattttaaaattttttatatcgtataatatatttcaaaataatattacaaaaacactaaacctttttgttaatttataatttatatttattaatttagtatcaaacacaaatattgctactttaaatcctccaaatatgttgtgattttcagaaaaataaatataaacttaaaaaatgaaaaaataattatgtctacaagaatcgaacatggtagaagagatgtcaccactttgagaattaccaaatatgatactggcactttaggaatttaaaaggactaaaattattttatatattttt

SEQ ID NO: 45813 - DNA, 644 bp, Arabidopsis thaliana landsberg
cagtctaccaccacgaaccaaggcttgtccaagtacactaatgtataaccaaaaatggtttaaataaagagtttctgttacaaacaaatgtatgtttatgtgtccttaaattgatagctctaaataatctactttgggccttttaaaagttatgattgacgaataaatttctgctggagttgaaatattattctatgtgactatgttgtatattcaagtcgtctacatgttcacgttacattgacttacaccgcaagcgatgaaaagctattatatgttagtttaatcagaataccaaaaagataataatcaaaatattccatcttctttctttgtgaaacgaatatatattctcttacaggtggtttaattaaaagcttgacaacagtacgtaatattagcatacatataaaaagttacattaattggatacgaaattttaatctcctaaagatagttattctccgattgtatagaatcaaaaaagaaaagaacaaaaatcgacaaagaagaagaaaaaagattgattgattcttttgtcctccacgcatctctctgagttggctcggccacgtcagcattcaaacatcaaaaccaaaacgcatttaaatgtcgaaaagagtgggtccctttctttttttttc

SEQ ID NO: 45814 - DNA, 804 bp, Arabidopsis thaliana landsberg
ggtgcattgcttccattatgttaatcttctttgaacctttaaaacatgctatgcagaatggaacaatatgtggggactgcaaagtggatttggtaaagttccctggcttgaggattttagctatgcgaatgatactgctgctttgcaggaacatggcagggtaaatctgggtcttggacagacatgtaaccatgaagagttcaagcgatttagttcattcctcttgaaattgattgccaccacaaaagagttttctctgcctccggaaaggcaaaaatttggtctgatcacagaagaatcattggcttcatcatttaattttggaaaatctgattcgtgggcagcggtccttcagctggcaggatgtccacattgttctaagattttcaaggccggggatgacattcagagatttttaaagatggaaaatccgatagttacagaggtatggttctttctgtctgtatgcttagttgattttgcatattcacgtatctttatttaactgattttgtattactccagtgacaataagcggctttttgccgtcaaagcaaaatctctatgttgtgtgagtcaatacaatttgaatctgtcgttacatgtctattaggcttatatagttatgtccatccaaaattttctatcttgcctgacatacatcaattttctttgtttttcttatgtagctggaggacgactggcaggaccatgagtcatctctacctgcaagtaaaccgtcagttattctttttgtggatagatcaagtgggtccttgcagcagatgagaaggagtaaaaagc

SEQ ID NO: 45815 - DNA, 527 bp, Arabidopsis thaliana landsberg
ctgaatttttacgttttattgttgtaccatatttcacctctaatggtcatgcgtgcaatcatctttcacttgaaagagggctccagcttagtggaaagtttgatattgatgaggaaaccaaatactcatcggtctgtgcgactaatagatttgatgatacgtgttatgaagacgatgaagaagaagaagaagatatattattggattgctgcaacaatttgacttttggtgattcttctgcttctgatggcaaggaacctgcttcaactggcaaattctatgaagattcatgggtatggttgagttcttcactcctagtagtttctaggagaatcataggtgatattgccattttttgtccttcagggtgacagcctgcatttacggagtaacaaaatggtagatcagagctggtcgaactcaaataagcatactcgccagcttatgtccgaactgccatccaaagatttttctgttgcaggaaacaacatcaggtctttttcccttttgacatacaaaatatcttt

SEQ ID NO: 45816 - DNA, 574 bp, Arabidopsis thaliana landsberg
agttgctaaaccttaagagacgccataagtgaatagcttaccaatgtgtttccttaaagtttttggtttttcagaaactttagcaaattcagaggttgtagttagttgcagacctgtgaaaagtagaactctaaagctttagttggacccatcaaatccattgttatacaaaattgaagcttttaaggattttgattttgttccacagtatcctaagcatagatagatatgttgaggctcctttagtacaaagaagatatgattgctcgtaatgaaatagattgattggttaaaaagattctctattatcattcttcttccactgaaatgtgttttgatctttcctaatcgtttgtgtaatgagaaggtcttagaaagacatggaacctttgcttcctcccattgagacacccccttgtctctattggaacatgattgataactctgaataagttgctattaatactgaacagtaaagtcgccaaacattccattcaattgttttatataataaataactcacatggtaacttgaggtagacaatatgcagttttccaatgaacctctgacatg

SEQ ID NO: 45817 - DNA, 688 bp, Arabidopsis thaliana landsberg
cacatatgtaattatatgaaaagatagttagaccctttatttttcttggttcgcgttagtctctgtctctctctcgcgagtcggggtctctctctctttctctcgtactgtgcaaagtcctctgatgcagtctccaataatggcgtaatctaagctacttttgttactgtatctcgcaacgctccacattgcttcattcactggaaatggagaagcttattcttcttcctaagagaacaatgactgcaatggagatcaaaaccatttgcttaacgaactcaaatccaccgactctgctcttcgtacggatcataacactcttacccttttcgatttgggcctagcttcccaggttttctttcaaaagtctgcaaatttagagcgctaatgtcaatgtaaaggtttagcctttttgaactttctctacgattagctgaattttgttttctgggtatttcttcagttttgtttatgaagaactgtagcgaatatgagaagaggtcttttgatatttgttgcatacctgcattgctttggaaaattctgtagaaatgagtgtaacggttcattgaattttgatatgaaatcgaatttttcttgtttttaacctctttgcaaaagagagacgtttcacattttcagctttcgttctgtttcgggaagatacttgtgtaacgcttgttacttt

SEQ ID NO: 45818 - DNA, 758 bp, Arabidopsis thaliana landsberg
cttttctaaaaataaaacactaaacatatctgggctagaagcataaccatgggatttattgcacgaaagggcccatgaacttcgaaaggcttgaacgatgatattcatggttgattgttgaaggacacgcaaaataatccacgcgtcaaagtcttgcaaaattttgggcacgtgtgagaagctccttcactccacgatgagaggcggtgacagcttcagaatcgcgacggagagattccaatcaccggaaaacaaaaaaactatgaagaaacactacagcccttgatttgagacctccaaactccatcttcagcaaatccttagaattgattttcacaccgctataaacccccagatgaaagatgaaatagagcgccaaagaacggcgacggcgaagtcggatctgatcggaaacgagagtcggaacttctggaaatgataaaaccagatgaaccgaacggcgtaataaaactgctaatcggacctcgtccgaacactagccagagtaaaaactggacgacaacccaaaaaggatggacggctaaactaaaccctagagctctctttttgaaagattttagagagagaaaagagagagctcttaccactcttgactcttgtttaagaaagatttaaagcatattgaatatataaagtgacttccaatctcaaactttagtgaaaacatatttcattcagatgacgaaacccactgtggtcgaaaagttatatatatatatatatatatatggatatgg

SEQ ID NO: 45819 - DNA, 581 bp, Arabidopsis thaliana landsberg
gatgaccctccaaaaacatgtattaccaggatacctgtacgagtcccttttgattttcagaaagaatctcacagtcctcagactgatagagagagtcatcgccatgccaaccaagaaaggtttgatgttgaagatcctaaagtttcttccagtcagttatcttctggtataaaaggttgcacagaagaaaaaaaatcaaatgcatttggtggaggtagatgggagagtatgcttcgtagatcaaataaccctgaaactagtgcctttagtgatcgcagacaggactcctctggcacatttgaattgccacttgattttgttatagacaagtgtctactgcaggaaatacatcttcagtatccttctcgatacttccatttgctagaaatatacatatttaggttaataatttgtcagttggctgtcattttctgtctagaatgtttttctcgtgataacatatcaatatcactttttccttaacagacaatagatataactttgtcagtaagctagctatcaagttgctcgaagaaggatttggcttgcaagaacatctgctagctctacgtagatatcat

SEQ ID NO: 45820 - DNA, 525 bp, Arabidopsis thaliana landsberg
tgacttacagcatccataatatatataccaatgtttcgcactgacagagaagtcaaagaacgatgaaggaggagtgcccggcattctgcgagcaactggagaagatcgtcaggaagaaagcaggggcgtacatgctgcagcctgcaggaggagtgtgctggcgcatgcgttcaccattcctctgcgtgctactccagccataagcacacacagctagctaattaaggtattttagtctgtaaataatggactgtgtagtcgtgtgtgtgtgtgtgtgtcgtaactgtgaaagtcgccgatggatgcataatatatatgtggttttcccttaaacaaattggatagatcctttggttctatttgtttcttttgccatggatagagaaaacactgtacagtgaactgcgtcagttttggttagagctgggagtgggcactgggcagaggagcatttcgctggcgcctgctcctgcattctaaagaggcccttgggtccaggtgagattcggccggcgcgtccgaaga

SEQ ID NO: 45821 - DNA, 615 bp, Arabidopsis thaliana landsberg
gtattaaattatatcaattgaaataagataatataatttatttataatactaaaaagaaaagaatcacatagggttatggattaaaatatatcatcttattgtataacctacacttttcaaagtttatattctttttgtgacacatgtcaatcaattcaccacgcatattaaatcataatatttttattggattttgatatatgtaacattattgattttgacatgtgtttatagttttacattttcttatgataataattaaaaaaaaagaaagataattgtagtttttggattaaacgtgataaaatgtgttggagatattggtgatacagctatgtatttcctacatgtaaataaatgtatacgttaatatctccaacgcatagccaaaatcacacacattggtttattggtgtgtgtatagaaggcgggtcaatgtgagacctttgtctaggtccaaaaccctcgccaaacacatatgtgctcgtgatagaaagaagacaacagggagaacatagactcgcatacgagcgggaaaaagccctagctggtatctaaaagaaaatgaaagcataccatggctagtaaaagccagaaaaaaacatgggagccgg

SEQ ID NO: 45822 - DNA, 645 bp, Arabidopsis thaliana landsberg
tagtttttgtgattgataactgttaaaatttgaacaaaactgtactatgttaccattcaaaccctatgactttcacaaatgtagtaaatcttcacacagttcaacgtaattttaaaatttcacaagcttttgacatgtagacttcaataaaaaaaaaaagaatgttttggtgtaggtctgtatgatgagacatttaatccctaatgtagataaaaagtataccaggaaatgattgcaaggcagaaactattgtggccgttgaaagaattcacgtggcatgatgattcttttgtgtcgatcccatcttaattatggtgagagtttggggataggattccgttagcagcctttaataattaagttcatgttctcaaggaacaacagatccagattaaatatttttcatcatgattttagcgcaaaaaaaataaaaaaatcaggaatctgttttaaaattcactaattgtttttaaaggaactgaactgtcctggtaattaattaatggtgcttggttgttctttagaaaaaaaaaaatttttgtaaagacgacgagaagtaaaatgatagaatccttaaacaaaaagaacaaaaaaaggtaaaatgataatgattaggttatatattcctcatgcacgacatcttcc

SEQ ID NO: 45823 - DNA, 773 bp, Arabidopsis thaliana landsberg
ttgcttgtgtttgaaaatcacatctcatccaatcatcgatgatgaaaaagaatatgtcgtcttctatcgcaaaaatgctcaactaggctaatatgtttgtttgagtctcctaaaggtttgtcacagtcttcaccaaaccactaggcttatattttattcgaaatccgtactcttcttatggatggtacggagtacggacacctggctaatggagctaatttggtaactcacagctgcgaaccggaatttggtccggttaaattgcaatacgccaataacgtaacgatggaaaagtaagcgaaatgggcggagagtgaggtgactaatttatttaggcccatgggccaggatccataaactgaataacaaaatatccgacaccgattcagatcgccggcggatattcagatctcctccacattacattctccgaggaatttaacctttacctacaaatctaagcttctgtcgttgacttcgaaaacttataagtcaaaatcccctttctcaatctctcatcgccttgactcaacaatggcggacaccacaggatccggtacgtcaatctctaaattccatctctcgactttatgtctgaatataatgtttcatgtgtatatacggaattttatggaataaaatttagattttcgtggaaaacttgaaaacctaggtctttaattcctcgtaattctgtgcagagatgaaatcgggctcgtttatgttagagaaatccgccaagatctttgtccctggacataggggattggttg

SEQ ID NO: 45824 - DNA, 536 bp, Arabidopsis thaliana landsberg
cgagcgcggcgtttccgccggtgcccagttcttcccgcgtcaactcgacgcccgtgctcaggttgtgcgtgacggcgccggtgtcgaaattgagcgtgaagttggtctggttggtcaggatgcggttggtctggtccttgaagttcgggttgctgcgcgccagcgtccacgtggatggatccagcgggtcgggcgtcagcaggttggccgtgctgcccatgaacgacgtcaacaggtagttttcctgcgtgcggccccagcgcagggtgtcgtgcagggcagcgttgtcggaaaactcgtggtgcacgatcagcgtggccatgtcggacttgacgtggtcgtggtcggccgcggtgccgtagaagttggatggatcgaccattggcgcgctggagaggaatggccgcgtgggatcgggcgacgagttacccggcaggccgatcgtcggtacgccgccgtcgggcacgttgtcctgggtaatgtgcagatagtcgatgtacacggtggttgctgtgccaagcccgtacgccagcgac

SEQ ID NO: 45825 - DNA, 469 bp, Arabidopsis thaliana landsberg
  unsure (1)..(469): unsure at all n locations
attatacagtgttagtcctacaaaattcaaaacttatttctctgttttgggacaacatgcttaggaataaatgaattttttttttctttttcttaaaccgcttaatattttttctttcatccagtttttagttgttgaatcttatatttgatttcatgttaatgcaatatgaatcgttatagtttatggatctgttaacgataaatttaataatctatgtttctttttagagttctatctaggtctatattcccaacatcttaatataccaaatagtacatatgtagaatcaaaaaaacaatctaatatagaatcgtataaacttaatagtgacaaaatcttattaaaattgaatcttaccaaattcttatttttcttctttaatatgtcaactacaaatttctacatatattctgtnttcaggattctatccctttatgctcattttttaatttatttttcatatgct

SEQ ID NO: 45826 - DNA, 640 bp, Arabidopsis thaliana landsberg
atactccttttcagcttcggtcagctatttggttgttcgttattggtgtccattgctgacttatccagggcatggtgagaatcaatgacattttcaaagtcataatatggatgcgcctgcacatttaaaaaccgatgtcgctatgtatgtgtatcaaagaagtaaaacaactcgttggttcattatcagcatcgtaagttagttacctttggtcgcggtttaacagcttcgaaactatgaaattgaggatccgagaaatcaggcgcctgcaaaataatatatgctcctttgtttttgtacctctcttctgttgcctacaccacacacaaaaatgattgttaacgcatatctttagaaaatgcaaataccaaaggcgtaaaaatacatacttggaattgcggatagtcaagtgcactgaaaatagtgataagctctgcggattcgacattgtggactattgtatatccattgtccattgcaccaaaaacaggtctcttctctctagcatctggaccttcatgtgatctgatgatcaactgcaccaataagtgtaaaacattcgatacaatcatgcatatcagtatttgagaagcaaacaagcatcaagatctactgtggtgtcacctacagttcatatttc

SEQ ID NO: 45827 - DNA, 385 bp, Arabidopsis thaliana landsberg
gaatgcgtttggctgaccatatctgcataatcttataatacttctgcttacagatatctttactcatctatgtgatatggggcatcacttatatggttatttggcctttatatcctaacaaaatcatacatgcctaatttattgaaccaaatcacactgctgatactcttgactgcttgccaaaaatctacattagcatatcatggaactaattacattcttacggtcaatcgagcggatgttgagggtcaggatcacacgaacggcattgaaagagggttgctctctaaagacacgtatattgtgtttgaagcatcaaaagcaagtggcataaaggtctgattttgataagttttctatatctgtgtaattgaatcagttgctc

SEQ ID NO: 45828 - DNA, 469 bp, Arabidopsis thaliana landsberg
gttgtccttgcagagcgcataatggcccatcacgaaggcgagccggccgccgcattgtgtcatcagcgcattgtgatagtgcgctggcgacgagacggaatcttcgcccttcgaggcgctttcgatgatcttcgcggtaaaatacttgatcgcgcaatccggatgcagggccatggtcgccggcgcagtgtctggcgtgggccggtagaggatcgtcggcaggatgtgcgtctcgaacagggcaaggacgtcgagccacttgaaggccgtcttgcgcaggcacccgtaatagagattgtagccgtcgatatagacgcgtgttcgtaacgccggcacgccctgcccccaagacataaaaaaaccggcttgcgccggctttttcccccaaccgcccggagcccatgtctctcaggatgctgggttagttgttagctctcacatagtgtcgagggacgtccacgtcaatcaa

SEQ ID NO: 45829 - DNA, 703 bp, Arabidopsis thaliana landsberg
  unsure (1)..(703): unsure at all n locations
gacattgtcacgtgcaatggaccgtctcttatttgcatgatattattgttttttgtgagtcttattgtaatattctgattgtctcctcccctctagactctagttacagtcttacaaaaacaactaatctgaagtgtgaatagattagacggtggatacaatataatcatatgaaataagcataacatatatagctagctattgtcaacaaaacatcaattttaccttgcaaccatagaaatgttatatatataaaaaaggatatgaaacacaattatcatgagcaaaacgagaataatagactagagagggttgaagtcacgaaaagaaacatataaaaataaagtaatattggttggtaagaaaataagtcaaaattaaataatcagagaaggtatatggagtatatggacatttgcatcnnnnnnnnnnnnnnnnnnnnnnnnnnnnnnnnngtgagcaactgcatactgatacggttttggaaaaatcataactaagacaatgaaagaatgttgttattacgaaaaagacaaaatgcacgaccaaattattcgtgatcatattaatcgacatattattgtgtagttatgtatataactggataacacccaaatctcgattaagataaatcaaaaacgatatcttgtctttttacattctaacccaaaaaaaaaaaaaaaacagaaagggggaataaatg

SEQ ID NO: 45830 - DNA, 589 bp, Arabidopsis thaliana landsberg
tatggtttagataatgtgtataaagaggtaaaacttacgttgaaaatggaagttgcgcgaccgaagatgaagtctatggagccttggatgtaacactcatggtagtaatgtctacctttgttatcaaacaaagtgttgtgtaagctgtagaacgcacaatggtaaaacgctactttgtcagcagccacaaacgctgccaccgattggttctcagatgtgaatgccattccgacaggtgcatcattctatatgtgcatcacaccaagtcattagttgacgtaattaaaaggaaaacaaatttgaatatctacaattgttatacgtactcggatgctgataccaaaagcgacaaagtgattagcctcgactttgaaagtagctgaagcaacattgtcgaccgaactttgcgaagattcgatcaccgtttttccttttccattacccctcatgaatatgaacggcttgttctccggaatgtgcactctctccctatataaatcaacaaattcaaaatcataaatgtactatatatttaggtaaagccatacttgtataagcaatatataatcgaaacttgtcttcaatgaca

SEQ ID NO: 45831 - DNA, 721 bp, Arabidopsis thaliana landsberg
cctgaaatattattatagctagagatccctacttgtaaatatcaaaacattgaaaactatttttctgattcatttggtgtaaccggctaagttatattattggtcggacaccaaatattatagaatagaaaaataaaataaaataaaaggatgcatgagtgagtcatttgttatggaagagtagtgaggacaagtgtctaatacactgcatacgggtacccccaaaaaaaaaacacaaaggtacattgaatcacgtggctttcacgtgaacttcacgctctgctttttttacttcttccattgtttggtctactttttcctttcaagagaatgctgccaaacaccttgtaggtcctatcaatattttttgtgggcccagcccattccttattgttcttgtactgtgaatgttcttcccacaaccacgtgggctttttggcccgttctctctctctctcctccccaacacttttttttttgtcgtactatcggtttgtgaaacagagatttgttgtttcactgatgtttacaaaagatatttgtctatgttgtggcaatctgatattctgacggatgtctattattatatttttaagtcctttctatttgtattttatgtgatttcgcttttggaaacgacatcccttgcatttaaataatctctttataatttataaggcacaataaagtatcaaaaaaaaaatcttcaagatgctaagat

SEQ ID NO: 45832 - DNA, 444 bp, Arabidopsis thaliana landsberg
ccctacatagatcaatgggatagtaagatttattacaccaccattaaataactctttaactgaaaaggtaaaaatattgtgaagaaggctaaagatgaatataacagtgaaggttaaagttggtacagtgtctcctttttcactattagtttcaaaatcgtaaatacgtaacaattaaatcccgccgttaaagtcagacactaatttaagaccatatttataacattcattttacaaattttaattgttgctatgcaaattgaccagacatatatagtaacaaaaaaggtaaacaagttccataagactaacccacttatacattgcaagtttattacttacaaaagtcaacaatattttaaaatttagttagctacaatcttcttttaacttaattgttgaaggcttgtggaactaaaatggtcatgactcatgaagacctaa

SEQ ID NO: 45833 - DNA, 674 bp, Arabidopsis thaliana landsberg
taacgacttgccatgtttgtacatgtatagagcttttgtcccttttttatattttctctctcgaatgatctagaggaagggaataggattttattcttttttttctccaactattttgctaagaggtttttacttgattagtggtagaatttagtcttgatatatgttgtaaaaatactcaactgagaatacaaagcaagctccaaaacaaaaattataactaaagatggttactaaaaatatttcatatctaatctatagtcatttgtttcttccttacttataatctgtcgttgtttttttgttataatgtcgatgttttctcttgggtctttattctcgaaacataaataattctgtgtagataagtcacggctagttttatgaatttgatattcgtatagtgacattacatgctaaccatatattatgatattttttatattatcgttaagtataattatgtagcatatatgatatcaatgccaaatcactcggctttattctaatcgcaattctttcaactcgctctccacgtatacgagaaaattataagatgttatcttgttaatggcaccagttccttctgtgatcatattgttttgcatcaaattataaaatctcacattttttcacaatcatacaaatagattatatattagttttatgccttt

SEQ ID NO: 45834 - DNA, 428 bp, Arabidopsis thaliana landsberg
tttgttctacaaagcctctggagatgaagtcttcacaaaccatatgtcaatgcatgaattcctcgtgctttggctgctaagctaagcaacacattcttgagttgttgttcacaatatctgtaaaaacaacccagtgatctatatcaaaagctgctttgattcatcttaagaaaatagttatgagagatatatgtttctgttcaattcatgaccaatgcttaattaccttgattcgcttcctgcttaccactgtctctacattgctgtctccacactcttcaccgagttcagtctcatgggcatgtcttctatcattatccaacttgctttcatcggcctctcatacatgtaccaccctacttggaccaaaaaggtgtttctgcggtgaaaccccctcagagaaccgtataccacatgcatttatttgc

SEQ ID NO: 45835 - DNA, 321 bp, Arabidopsis thaliana landsberg
tcttaccgagtaattgtttgccttgtctgaatacaacaactgttccttctattgacaagagaaggtctcttagctctagccctcccagttccaggaaaaaatcatctcttagactttcttataaatggagagaaggtcatgcttcaggagccttgtgtaagtgtttatattgctcttggttcattggattaccagctttatctgaaatcgtaaactcacatattatctcgaaacttgtcttagttttgtcgaaaatgcagctgaagagaccgatagcgggttctcaggttcctttctgtccaattgataagaaaatgctcg

SEQ ID NO: 45836 - DNA, 929 bp, Arabidopsis thaliana landsberg
tatataaaatctctttgtctaaaaatacttcattttgaatcattggtggattcaagtttgtgacttaacaattattaacggatattacaaaatcatttaacgacattaaatgttaaccatgtgtatataaatagatatatacaaattttattcaaaatcttacaaatatattggtgtggtctagtggtaacaagtagtttatttaatatcactgcgttagtacgatcaagactctctctttctcaaacccctttttttttttttcacttttacctaaattcttctcgacttcagcaactaacctactccacgaccacaaaaatgacatatacatcgtcgtcgtcatctttgtctcaatctctcatgtgttaattgtatttaaattcaaatttatagaaagtgaagaaaatgatgtatttaaatttgtatgatgacattcattaaagaaaattggacatgtgcaagttgaataacatacgtgttacaccaaacaatatatttgtaaaagattttataaatattgtatatatttatttttacatggaaagttaaaatttaacgtactttactaattctaaaactctcgttaacggctgttaaggcaaggatttgaatctaataacaattcaaaaacaaagtatttttagaaaaaatatttaaatggggtatttttttcctacaaaaaaattgaggcattgaaagtccaaaaataaacagatcaagtatttctcgactattttactgttataatttaaacgttgtttacagatcccgtaacgtctgttaatgaccgttaaatcataggtttgaatcaaccaataattttaaaataaggtattttcgaccgaatataattaagagataagttggaaaacatacgtttttcaaacttaattataaaactagtacccgtactatttattttgaga

SEQ ID NO: 45837 - DNA, 635 bp, Arabidopsis thaliana landsberg
aaacgtctcgtctcctaaaaaaaacgtataaactcttatatacgttccctagccgccacgttttaatagaaataaaaatatttctataataatattggtagttgaatcgcacgtctccattcgaaatctaataacaacccaattaataacagaattattttaatatttattttacatatttttttttttttaaattattgaataaaaaaaaaatttaaaagaaggaaaaatctctcttatctaaaaaagcgaaacaaaattttctctctcttataaagctggaccaaactccatctctctcctctataaatataaacgtctcgcctcctggaaaaaacgtataaactctcacactctccctagccgccacctaccctccgccgcctccttttcgccgcctgcttcgctccgccgcgcgcagcgcttttagtctttttctgagactgtttccgaagaatctctctgttaggattttgtttgattctagtcgttatccagatcagagaaatccgtgatccttttttctctctcactttcttctctgaaataggaaaaaaaaaaaccaaatctgataatcgaaactgatcactcactgctgattccgtaacctaaaaaatgtcggcagcttcttctag

SEQ ID NO: 45838 - DNA, 363 bp, Arabidopsis thaliana landsberg
taggcatggaaaatatatcccagccggccgcccccggcatctaccacctcgacgccgaggtttatcatcagagccccggcgcatcgaagtcggcgctctggacgctgcacaagcgcacaccgttccacgcccgctacggcaacaaggacgagaccaacgcgcagaagttcggcagcgccgcgcattgcgcggtcctcgagccggtgtttttcgaggccaggtactaccgcggcccgtccgatcggcgcgggaagaagtgggagactgccgagcaggtcgccgcccagaccggccggacgtgcctgacggagaaggatttcgacggcgccctccgccttcgcgacgtggcgcaccgcaacccga

SEQ ID NO: 45839 - DNA, 723 bp, Arabidopsis thaliana landsberg
tcgtcttaccaaaataaattaaatctaagacatatatccttcaacaatatttatttacatatgaattagtcaattgtatatagatcatcttcacaaaagtcagtcgacaaaaatatttttcaatcttaaaaatttaaatcaaggaatataataagcaaaattgagataatgttaataatattcctttcagtggtacgagaaatactatcacgtgggggttaaattgaccacttatcaaaaagaatggctagaatcaaaacaaaattaagataggggtcaaaatcggaatttaagaaaaataaaacggtccaagtccagcaacaggtgtctaaaccattgggtcattttcaaaaaaggtcgtccacagaccacagtgggagaaaaccaatatttactttaccctcaaatgttgtctaaaactacgaaactaccactatctgggatttgtcacacccgtacgcaataagtaccacgagaaattgctagaattagaaattatttttattcaaatttagaaaaaatatctcaaattcggtatttttaaaatcctctctcgtcttcttcttcttcgatcgctggatctaagttttgctcttctctgtatcgtcttcttcacagactgggcttgattttgagttcttctagttttcggattcttagcaatctaagtttttttttttttttacttttcgaaaagccgatccagattttttgatatttttg

SEQ ID NO: 45840 - DNA, 452 bp, Arabidopsis thaliana landsberg
  unsure (1)..(452): unsure at all n locations
ccccccccccccccccccccccccccccccccntccctccccccccttcnccctctccccctctctcccccccccccccctcccccccccccccccccccccccccccttttccaaagaaccacccccacccccccaaaaccaccaaccccccccccccaccccccttccccccccccccccccccccccccccctccccccccccccccccccccttcccccccccccctccccccccccccccccccccccccccccccccccccctccccccccccccccccccccccccccccccccccccccccccccctccccccccgtgcccccctccccctcccccccccccccccctccaccccccccccccccccccctcccccccccccccccccccccccccccccccccccccccctcccctccccccccccccccccccccccccccc

SEQ ID NO: 45841 - DNA, 626 bp, Arabidopsis thaliana landsberg
ctccccctagtaactgcaccatttggacatgcctcccaggtaatagtacaaacacttttcagaatctagactggttcgttgtttctgctacttctatcctgtgttttgcgttctactgatttttctctatgcctctttttttattaggaaattgtaaacctgctgctgtgtggagaagcggttcctaatgtatttgatggacggatggatcttggaggcggcatgtttctgaaaggcatatctaagaatgtagatgtgggcttcctcacgttgctcgagtctctcaacttctgcaaagtcggtcagaatctcaaatgtcccaaatggccaatatgggttattggcagtgagtctcattacaccgtcttgtttgcacttgacccatccgtccaagaagaaaacgaacttgagctgagagagtctcagataagaagagctttcgatgcaagagaccaaagcggaggaggaggtttcataactgtggaggcctttcaccaagttgctcaagaaacaaacatcagactcccaatcaagaagctcgacgacatctgcgccacggggttcatcgtgtggagcgagttatggcatgttatcttggaactagaccaaaatttgggagggataaa

SEQ ID NO: 45842 - DNA, 542 bp, Arabidopsis thaliana landsberg
atgtgagagtcttaacagggtcaagacaagaagatcaagaaaatctgtgatatgaattcagatccttcaagaactgtaggaaacggaaccgttgcaagctcgagcaattcaaacattacaaactcatgccttgtgaatggaggagtatctgaagtgaacaactccttatgtaatgacttctcattgccagcaggaggcatctcttcgctgcgattaccagtggtagttgtaccctgaacaatatgttttctttattctctgtgtcttcctaaatatttatgcttgtttcagcactaacttaagtaaaacctgcatcatagagccaaccatttatctaacctctttctgggtgattgctaaaactcaaatgcagggttttgcattggcgccaattgagtcgaagtaatatagatcatatcatgtagtatatgcgtccagaaaaatgatacactttgctcaaatttactgttcattggtgctggacttgtgtttttcgtacttgtgcattttcccattccatggccttcactaccactgattag

SEQ ID NO: 45843 - DNA, 168 bp, Arabidopsis thaliana landsberg
cttccggggctgagttcgattatcacgcgcacatgggctgcggcgcggtgaatgtttgctcgggctggggcgccgatggctgccggagttcagggcgggcgccgctgggtaggggtcgaagatttcacttgcggtggcgacgcggcgggccacgctatgagcgcgctg

SEQ ID NO: 45844 - DNA, 817 bp, Arabidopsis thaliana landsberg
taacaaaacctagagtttttcttgtttctattgtaccatatttataaacgtgtttgttagtgaaattgtttaatgcatgaaaaactcgatatcttttcctgactttcttaatagttttatatttgtgagttaatatctttctatctccatattatttgtgtgttgtttttgtgttgtcaaaacaaataaaatcatgagagatagcttaaacataattttgttaccctttttttaaagtcaattaagagtaagcaaatatttaatctttctgttattaagaattgataagattttattgaatatattaattcatctgcatcctagatttttataaaatagttcattgtaaaaagtgaatcgccgagttatatatgcgtatctaatctaagtatcatcacgacgttcagctctaatctaaatcaaaccacaaagtaatcaatattgtaattttctaagtttaaggacttcttttgttttgcaagcgtgtaattaattaagggccaaacatgtttttccattggctcttctttgccaccagaagcaagttgcaaaagagagtgaagcacccaaattgattaaaaagaattaaaaaaaaaaaaagggttcaaatcctttccatcgtgctgcaaattgcactttttgttggtcatccaaattgctcattaatcttcgttaaaaaatatataacatttgggtgatgattaaaaaagtagactgtagtggacccgccacacctaatcgtacccaatgtataatccggtaaggttcggttccatttagaccgcattcccaaacttagaaaatgaaacggaaagaa

SEQ ID NO: 45845 - DNA, 535 bp, Arabidopsis thaliana landsberg
tactagtttaaccagctatcagatgacgatgttgaatcaatgttagctctggtcttctttgttaaagattaattgttctttcgtgaaaaggaatttgctaattaaccagccatctttgttaaagattacgtgtgtgttggatgctcgtcagtcttgttaatttatctttcttacactagtctgcaattttgcaaaatatacgataaaaggctaattttgtataaaatcaaatgttaggcacaaaatcttcactgacaactcttttattgtgcatccatattggattgtcagagtttgtaagggtcaactgtgacctaaaactattttggtttgagtatatgacctaaaatactgatttacgtatgttcaaaatgagagaactttatcctagagaacttcattagctgtcaccttttgagagaggacacgtcacctcgcggctgagtgcttgaatgttcattatctatgacccgtaaacctcctatgtgggacgcaacaatcctctatgactctatgttccattatatcacatttg

SEQ ID NO: 45846 - DNA, 397 bp, Arabidopsis thaliana landsberg
tccggaatactccagattcgcgctgttgcatcaccagacctgattatatgcaaaagatgtataaatggaataagagaacaaattatccacaagtgcattcatctttctcaacaaacaatttaccctgacgcaagaagtgaagctgagggactccatgcgcaagcacaaacctaaagtagtaatgtagacaaaattgttgtaaaataaataccagtgaagatggaaaagacctatagaacatgtttaattatcggataaagtcacctaataaagtacctcagaagtatgcccttccaaaatcctcacatcagaattaggaatgtgacttgtctgagatgtggggagtcataacaatatcataggttctgcgcctgttcaaataaaacacagattcata

SEQ ID NO: 45847 - DNA, 515 bp, Arabidopsis thaliana landsberg
ccgactaactattagttctagaggtgggtctaaggaacgaatcaacatattatggctagtttagaaacctcattttttcaaagagtttccatttttaagaaaaattaatttatttttccttaaaaaatgagaatcctttcagaaaatagattttctaaactagcccttaggtttttcccctgaaaggcagaaaacagaagtataaggtgttcctatctatgtctgttttcatgtcattgagaggtttatcatatctttcaatattaacatgagtatagattttaaataatctcaccaacattattttaatgagattaaggcttgtttggttcctttagtctcgggactaaagtttagtcgagtgacttaggtttagtctctactttatttggttgtagggaataacagtattcagaacgcattaaatgactcataagaaactaaaatgtctcttaaaactctttcgtcatcagtgcactgaaatatatgaggagcgaaaagtggaattaatatag

SEQ ID NO: 45848 - DNA, 519 bp, Arabidopsis thaliana landsberg
gccatcacccgggtcgcgagctgcccgagtggggacagcgtttttctggtggcgacccgggcaaggaagccgagggcgggaacggtgagcagcacgggcgagcgcagcagcagtgtcgccgcacacaggatgaccactccggcggcaaccacgcgggcggccttctcgttgaccggattgggaaagtcgaacactgccatggcctttatcatcctcgccgccgccggggcgtcggtgtgatccccgctatcaatcccgcaccgtgggatcagttcacccggggtggccgatgattaggacagctttaccccgcgggccgtatcacgcagtatggaggctgctctcaccccccggggcactgcacaactcacgggggcgtgatgacgaggacaaccacaccggccgagcccggtcgcaaccacaaacaccacacggtgcgcgccgacgccttgcccgcgccgtcgccgacaccgggacgggcgcggcatagctatcccgagccggttcgccggccgcgcg

SEQ ID NO: 45849 - DNA, 399 bp, Arabidopsis thaliana landsberg
cttctcatgagtagcagtatccactttggcttctacatgaccattggcttctacatgaccattggcttctatatgaccattctgcttaacagctacttgaacttcttcttcttcaatctctattttatcatcatcaatgttgctcccattcctgatcacctttgccaaagccatcccttccttgttttccatcatgtcacacagtttccgcaactgctcggagttaagtgacatgcatagatcttccacatgttcatcagatatgccaagcagacgctgggacagaacaggggcggagagaactctgagccgacttcgttctttgcgcagaagcttcttctctctttccattgggtctcttgtgcagctgagcagcctctgccgcacgttttgctactt

SEQ ID NO: 45850 - DNA, 386 bp, Arabidopsis thaliana landsberg
acatctagaggatcccctagctttattatagagctttttcgtataactcctttttacaaatttgcataaagctttatattactaatcagatctacgttttacaaagatataattttcttatactatattttgttgatagtacaaaataactagaagaaattaatctaagattcttgcacgtctaccacatatgccacatgccatatcttattcattatccattataatattaataattaaaaaaaaaaaaagaaatcttccattatgacacggtccacgcttcctgtgagttatctagatagaacaaaactgaaatacgataaaactgataattttgctgtttatagaaaccgatgtatgattctcattactaacttatatgatga

SEQ ID NO: 45851 - DNA, 627 bp, Arabidopsis thaliana landsberg
  unsure (1)..(627): unsure at all n locations
aaaaaaaaaaaaaaaaaaanaaaaaaagaaatttttttaaaaaaaaaaaacaaaaacaccccaaaaaataaaaaaaaaaaaaaaaaaaaataatataaaaaaaaattaaaaaattaataaaaaaaaaaaaaaaataaaaaataaataaaaaaataaaaaaaaaaaataaaaaaaaaaaaaaaaaaaaaaaaaaaaacaattaaaaaaatataaaaaaaaaaaaaataaaaaaaaaaaaaaaaaaaaaaaaaaaaaaaaaaaaaaaaaaaaaaaaaaaaaaaaacaaaataaaaaaaaataaaaaaaataaaaaaaaaaaaaaaaataaaaaaaaaaaataaaaaataaataaaaaaaaaaaaaataataaaaaaataaaaataaaaaaaatataaaaaaaaaaaaaataaaaaaaaaataaaataaaaaaattaataaaaaaaaataaaaaaataaaaaaaaaatataaaaaaaaaaaaaaaaaaataaaaataaaaaataataaaaaaaaataataaaaaataaaagaaattaaaaataaaaaaaaaactatataaaaaaaaaaaaaaaaaaaattaaaaataaaaaaaaaaaaaaaaaaataaaaaaaaaaaataaaaaaaaaaa

SEQ ID NO: 45852 - DNA, 1736 bp, Arabidopsis thaliana landsberg
gatggtgatgttactctctttatcagtgattggtatactatgagccataaggtttttacatatagccttgggcctttctttattgttttctgtcctgtctcttttgctatgcttgttttaacatctgaaacacttctgtggaatcagaagctgaggaaggatgttgagagtaagaacggccttcgacctccggatggtattgtcatcaatggatttggaccttttgcttctaatggtagtccttttgggaccataaacgttgaaccaggtatctgataataacatctctttttgttgaatcttcactttgtttatagtttgaatcttctctcgtctctgaaaacattcatatcttcatatttactaggacgaacatatcgttttcgtgttcacaatagtggcattgcaaccagcttgaatttcagaatacagaatcataacctgcttcttgttgagacagaagggtcatacacaattcagcagaattatacgaatatggatattcatgtgggtcaatctttctcatttctggtcactatggatcagtctggtagtaacgactactacattgttgccagcccaaggtttgctacatccgtcaaagctagtggagtcgctgtcttgcgctactctaattcccaaggatccgcttcaggtccactccctgatcctcctattgagttggacacatttttctcaatgaaccaagcacgatccttaaggttgttaacgactatgtatagttatgttttcatattaggaaatatcttggccagaatggtattttgtatgaagcataatcctcttttgtatttctattgaaaattgcaatttttagttgttgctgatgggaaaatgatgtttggtaggttgaatttgtcatctggagctgcccgtccaaacccgcagggatctttcaaatatggccagattacagtaactgatgtgtatgtgattgtcaaccgaccaccagagatgatagagggacgattgcgtgcaactcttaatggtatatcatacttacctccttcaacacccctaaagcttgctcagcaatacaacatctcaggggtatacaagttggatttcccaaaaagacctatgaataggcatcccagggttgatacctctgtcataaacggcacgttcaagggattcgtggaaatcatatttcagaatagtgacaccactgttaagagctatcacttggatggttatgcattttttgttgttgggtaaggttccattagttatattagatccatttacatgagaagatgttgaaagataatgggcaatgtgattgtaaagttaaagaatgatgtttgtcttgaaggatggactttggtctgtggacagaaaatagcagaagcacatacaacaagggggatgcagttgctcgatctactacgcaggtgttatgacttaacacctgaaaccgaaatgttacatgtgtttctatgtggttttaaacggctaatttgtttacaggtgttttctggtgcatggacggccgtattggtttctttggacaatgctggcatgtggaacctttcaatagacaatctcgcctcatggtatcttggccaagaactatacttgagtgtggttaatacagagattgacattgactcatctgagaattccgttcctaaaaactttatatattgtgggcgggttctaaccatttacaaaaataagtttatgaaaagggaattatgctttttagggttggc

SEQ ID NO: 45853 - DNA, 279 bp, Arabidopsis thaliana landsberg
actacgagaaaacgatgacattatgtgatcacttgatcaaaaacttcttatcatatatctttacctcatatgtgaaaggggtaacaggctgtaattcataagttttagattttgcttatacttttatttgtctataaataatctactctatactagtactagactctagatttttaatctactagtttattgtgaaatagagtcttgaactttttatgaaagatatgctcatttgaactttttatgaaagatatgttcacctcataatgattagccgag

SEQ ID NO: 45854 - DNA, 295 bp, Arabidopsis thaliana landsberg
aggttatagacagaaactgatataaatcaacttacacttaggtttgattgacattcaatggtcatatattaggagatgcgagactattgaagaaacatagtacgagaaagaagatgatgtaggtgcaagagggaagagtctgtctatagaaatttaattcaggtggttataaactcataagtctttgtagtctcataatttgcttgatcttgttccatattggactcttcaaaagaacttaatggttattgactaattgaccactgttttctcataacttgctcaatggatatta

SEQ ID NO: 45855 - DNA, 853 bp, Arabidopsis thaliana landsberg
taaaatttttaattaaaaaattgagttaagagtttgactatatatattttttaaatcaccaaatatataagagtaatataaatattttttccctccaatgacagccagaattgagtcattttgataactctagaaatggtaaaaatcattatatgtaaatatttattcaaatagaacgtataaataaggaattccgaatatttcaatatgactaatcaagtaaaaaggattacaagacattaattatgttaatcacccatagtataaaattctccgacattattagttcctagtattaattaatgattaaaacacaaaccttgtaataataatagaaacgcgtttagaaagaagaagaagaaaacctaactctgttgtgtagttccgaagtcgtaacctgctccattatctatggacaacacaccaatcctctcttctctctccttttatatatatcatccacttccgtacctgtcgtctcttattaatcgcatttaataaacgcgtctcaagtccgacattgcgtcggtgttgtcaccataatcttcttcttgactctatatcgaaaaaagcttccaactttatctcgttaaccgaaactccggcgacaaagcttctacctttatgttctaaaatcgaaactccggcgataaagcttctattttaatttgtaaattgaacttccggctgaattttaaccggagtatgtagattccggcacacagatgtttatctttctcttactgtatttgtccgttactgttacatttctttattgcgttaatcaaaattccggcgataaaggttgtacctttcgccggagaatgcagattccggcagactggtctttgtc

SEQ ID NO: 45856 - DNA, 539 bp, Arabidopsis thaliana landsberg
aaagtgagaaagtgatagagactgacccgtctgaatattgaatcgttgccccagatactgaaatatgttagtgatggggagcctattaagagagaggatgatgagcgtcgtgatgaagtcggttattaggatgttggagttcggtagcagatggcccaaatccgagagctagttgagcttccactacgccatcctcagcctgtcaaatctactggtgtgtcgccacctaagggcatcttgctgtataggccacctagctctgggtaaactctaaatgcacgtgctgttgcagacgatactggagccttagtctaccaaaacaatggtccagagcgtcgctcatgcacgtgtcgtgatacggtcaccgaacggcggacgccagtcatagcgcctaaccatatgactgactatagatccgtaatcatgataggatatgtttccgttgcaacgcacgggcagctaactatgtaatcgacgaatagcgtgtccaaagaattaaggctcgctagctagacgtgggcgtgagaatgtatatgggc

SEQ ID NO: 45857 - DNA, 588 bp, Arabidopsis thaliana landsberg
ctaaatatatgcaactaactggccaaattaatccaccaaaataccactgaattttggtagttagaacctgttagaaattataacaaagtaatccccaactagagcctacctatatttatccatttcgttccaaacaaagatatcaacaccacacaaatcctttacacaaagattgatcgcgttggagtgtacaaatgctctcgtcatgacaaatcaatgatctccggaaaaaacataaaaagagagctacttttggaatccttgtcgtgttccgttttataaagctaaatttaatgcctacttttgcaccagattgcgtgttaactctcacatcctcgtagaaaggataatgcaacatgtgagctttatctatgaaaacattatagtatcatcatcatagatatttctttgtacaaaataaacagaatcaacaaaattaccataaccataaacagaatcagctaaatcattttatgatgtcaaattaaatgtcacaacattcatcaaaacatgatcggagtcggcaaggttcagccgcaaccaagagtgtgttctcacttctttaatagaacaaactcatcgattact

SEQ ID NO: 45858 - DNA, 373 bp, Arabidopsis thaliana landsberg
  unsure (1)..(373): unsure at all n locations
nnnnnnnnnnnnnnnnnnnnnnnnnnnnnnnnnnnnnnnnnnnnnnnnnnnnnnnnnnnnnnnnnnnnnnnnnnnnnnnnnnnnnnnnnnnnnnnnnnnnnnnnnnnnnnnnnnnnnnnnnnnnnnnnnnnnnnnnnnnnnnnnnnnnnnnnnnnnnnnnnnnnnnnnnnnnnnnnnnnnnnnnnnnnnnnnnnnnnnnnnnnnnnnnagtccagaaatcgtcgtcggaatagttcccgcgacgtgctctactctgtcggatggctcgcctttgggctttcacgcgagacgtatctcgtgccagctgtggcctcacagttgactcacgtgagggagtcatggaggtttatgcggtggaggcagatcgggagac

SEQ ID NO: 45859 - DNA, 320 bp, Arabidopsis thaliana landsberg
ctcttctatacgatttggttcctctaagattatgttgctagaagaagtttcatcgggctcttcctttcttgaggttttgccagaatcctcattgggggtctgcaccactgtattagctttggtgacttctggtcgattaacaaaaatctactaagttacatgtgccatctgaggcaactgattatatatactctgtgattcctcgaaggatggcctacggattctagatggaacgtttgccacagctgcaactgatggctgttaacagtaccgaagagaaacacgctcaaaatggaaactccctaaacattgagcggagt

SEQ ID NO: 45860 - DNA, 521 bp, Arabidopsis thaliana landsberg
ccactctttctagcgaatgtactgtaatactcaaattcttcttcttctgtggtgaagatttgacctacgtatggggtaaacacagtatcgtattgtgatgttggtgttggtgttgattccatttcgctttttgttattgttgattcgtcttcttcgagtctgatgtagcatttccaatcaccacaaggacattgttgacgacgaatccagatgttgttcaatggcttcaacgccataagacaaggggaaaaagcttcgattgagagtcgaaaccctagagattaagaaacggagtggtttttgggtttagaaatctgcttgcgtcttcactgaaggatctcgatgtcggcttgattctccgattagacaatcaaaggacgatattatcacttgtggaaggagagggagaatcgggaggtgtgtattaaggaagaagaaaccaattagaattagatatctgggtctgaattagaattagatatttgggtctgaatgataatcgctgattttgttgtgcggga

SEQ ID NO: 45861 - DNA, 575 bp, Arabidopsis thaliana landsberg
  unsure (1)..(575): unsure at all n locations
tgccatttagcagggaacaaaataaatatgaaattgagatggggatgctattaaatctgagtattatctgccatgtatattgaaaactattggcagattgagtacaataaaaagaaccatgacctatctccattgctatttaacaccaaactcatcattttctcacactatctccccactgttacagttttatgcttgcggacaacacacctgattacagaatcatatcaccaaccaaggaacttaaataattcccaaaataaattctgaatctacacattttcgcaggattatgtttgtcttcatttttcgtggtagctaaaccaaaattttaggtttgtcctcttcataaaaatagtgaacacaacactttcctctactattgacatcatatgtggtagtacaatacatgagagcgacgacaggcaagtgtcataaagggctacctaacctttatcggatcacgatccagacggcactaggcatctactggaccagctacaggatcgagatgaacgcctttaacatgctcatcatntagaacaggaatgcctggctgtgagcctaagtactgc

SEQ ID NO: 45862 - DNA, 509 bp, Arabidopsis thaliana landsberg
caattcaccttcggcctgccataagtcgttggcctcgagatttgccacgttagttttacatttccctacgacttagaaacaaatttttaatacgacaagttactttagattccgcaacaacattttgtttttatttattttatttgatctttgtagatattggcaagcaaattaaaagtgtgattctttaacttcctatagcttgatcgacaaatgtcagtgagatgaagcaaatcttagagacgaaatcatgagcatccatccttgatttatgtatgtaagtaaaatacattacataaattttgttattgtaatgtattgatcgcaaattattttctaatttcactctagacctatatgtataaattcagttaaattattgtaagaaattgacatattgtgacttattacgagtatcgtaatataatgggttggttgatctgtttacttagcaaaagtagcaaatgacaaagctaaataaaataatttatagttttgattacataaac

SEQ ID NO: 45863 - DNA, 385 bp, Arabidopsis thaliana landsberg
tacgcggccggtgcgttttagaatataaatcccgtgtgccaattgactgaccttgaattgaatggcctgttccgtttttataaaataaacacggtagggatgtccgattacatccataaagctattttccgaaaaatatgcttctgtctcgagagcacaaatcggtttgtaaggggtttggatagatcacaggcggttgggcccggatgtcttttattccgcgcactcggaccagaagtaatcaattcttatattgatcgctgatgcgcatggaaactggtaacttgacattggtcgcggattatacggggcatctgtgtgaagcatgggttttaatcccgctggtagcgtgacctgtgctgtagaaccattactcaatcacaca

SEQ ID NO: 45864 - DNA, 628 bp, Arabidopsis thaliana landsberg
gttctattgtatgcctcctcgaattaaaaccttcaattatcgataaaaatgaaggaagaagagggaggaccttagtgatctcgagtttattaaacacatgctgaagaaccttataggtctgaatcatctcatattcactcttcgcatcaaagttaaccttgtgcatcggatcagacccaggatgcaccgaatccatcagctgacaatgaacagggcctgaacaagcctattaatccatagatccgtattcagatccagaagaaacagataataaattcatcaaatccgtgttcaatttccagatcaacaaatcaccaacacagataagaaaccgcccattccgtattcaaatacagaatttcaccgtatttgttcatagaagacgataatcgtaagatccaattccgaatccgaaactaggttcaggaagagaagcgattttactcaatagattacctcttcgactttggagagattgagttggagagtagagttaatgcaagccagaatctccgatctcccgacgaaatatgcagaatgcatcatcccaatgatcgcaccccatattcgaccctatcaggtttctctctaagattctttctcgaactgtctctctccaacggctctt

SEQ ID NO: 45865 - DNA, 1226 bp, Arabidopsis thaliana landsberg
  unsure (1)..(1226): unsure at all n locations
ttaggggaaaattaacagatttcatttaaatcacaaaacaatataagaaaaaaagaaagttaatacaacatttaatttaaaacgaagaaaatagttaaagatggcgccggtgaagtagtattacaacacagtgacataaactacattagcacatcccacgttaaccacagtataaagattaggtgtggtgtttcaagatagatttacaaatataatcatgataggcctcgaggacgatagactatgttctcatcaccagttacctctcgttttactcttttagatctttatctgttttacgtatggaggtgactagagagttttcagaagaaatatgcagaagatgatggcttcttttaaaatctcattatttttggatgctattgatattatatccaaactcatcaaatgtttaatttgagtggacaaaataaacaacatccggataagaaaacgaacattcaccaaagaaataaaaacaacaatttcacacatttatgtgggaatctttgcatgagctcgaatgtctgactcttagcttaaaaaactcaacaaaacactcaatatgtgtactaacctaatttaggagctaaggcataacaaatgaaaatttctggcccaacataatttaatgtcggccctttgcaataactttttttttttggcgtcgccttttacaaatctttggttattgatacgaaaatgatttttgtaagttgtaaaaaagtctttgtatattgatatgttaatttacatccattaggatggatatgatagagtattacttgacagttattaatcaatattcaatcatatagttgaaaacattctgcaagatattaataaacatatgtttctttcaatgtaaattaaacagtgtactttcaatttttaataaaagtcatactaactggtgtaatttaaacattgtttttttttgttttttcttcaaaatatacttatatgtgattcatattcgataacactatatttatatataaacttaggaccacatttttaaattttgacaaaaaaaagggaccacatttttaatctcattttagttatgtgtcaagcgaggtcatatatatactgattgtcaatnggttcacatagtataaaataagattattgatccgaaatagagaatgatgcggattaaaattaaattcatttgaaaagactagacattatattcaccgaaaaccccgatgaaaatgttaata

SEQ ID NO: 45866 - DNA, 518 bp, Arabidopsis thaliana landsberg
tatatgaaaaccaatccaaaaaaaaaaaaaaaagtactatatctttcactcattccttttgcatcaacaatgtcttaaagcttgatttcttctcttctaagttgtcttgttttggtacccaccaaaccctgagactcttgtcaaggcctccactgtaaagcatgaagccagcaccgacattgtttggcgacgttgtaagcatttgaccggaccttcatggccatgtatgactccgaatttacagagcatgccagtcacttctctcctccacaacccaatgctcttatcagccgatccactgcataccatttccccaactacacacatacacagaactgccatgttatgtcctcttgtctcaaaccctaatctccattcctcaaagtctccttctttctctttcttctcccatcccatcacaaacccgtctgatcctcctccgtatacccaattaccgtcaccggaaaccaccaccggagttactgacacctctgcacgaccctccaacgtagccttca

SEQ ID NO: 45867 - DNA, 567 bp, Arabidopsis thaliana landsberg
atttataagaaatagttgttttttttttaatccgttaagatactcttatgcctggtccatatattttaatggattggagccatataatagggttttgacaaactatagaaaatttctccaattggttatctataccattacaaaaccgaaaagtttaattatagaagtgagagggagctaaaaaaatcaaaaggctcaatataatgctggccattaccattacaattttcacaccaaacacagtccccttcatcacgctgcatctctaaaggctaaaactaaggatgggcaaaagtcatgtcccgtccctttttgttctattcctttttaccaaatatctcgtttcagataatgtatatgcgtttccgcttaagaaatgacttttaatttttgacatttcttaaataaaaagaatttaatataaaataagaaaaatgaaatgaaaatcaagactagtgggttttgagagtgcaacatgactcgttatgtgtgtttaggtaagagaatgagtcctagtatttacgaaacttgttaggattctcgttggttacgatagacacattaagt

SEQ ID NO: 45868 - DNA, 157 bp, Arabidopsis thaliana landsberg
gaaccaagctgacaacatggatgggagttcatctttgatgtagtctaagatctgtactatattttcgatataacactcagggagtcccaaataggttcctggccccctttattattgatgccaagctcatcttgaatccaacccttacaatctgatc

SEQ ID NO: 45869 - DNA, 644 bp, Arabidopsis thaliana landsberg
aattaacgaaccgcacaaccgaagataatgcgaaaagttaggattttttggagtttaagttggaagaacagaacagagcaacaccactcgttttattgtaatctcaatgcaaatttgtgaggataggatagagtccaattttgtactttcgtacttccgtgacttttgtcttccaacgtcaaaaaggtcaaaacattacgttgagataaacggcgacgtttctagtctcaaaatttagattttgggctttagatactctcttgaagtttggcccacaaaaaaagaagaagaatactctcttgaatcaaaaaaagaaaagaaagaaaaagaatctacattttctaattaatgtcttttaaaacatgtaagattaaaaacgtctttggtaatagaatattcctttataacctataattcaagccctctctgtccagttgtaagttgtaaccaagtagtatgatttttaatataattttgtttttgaaacttattgattggatcatcacactgacaaatcttatcacattcttaagcttcttaattatatattctcctcaatcttaaccgaataacttgatgatccctagcttaattctaatttgaatcatgattgcacactagcacaagtatacatagttatgaaa

SEQ ID NO: 45870 - DNA, 551 bp, Arabidopsis thaliana landsberg
ttaggatccaaaggtgaacacgatgatatggtttcgcatgttcatcgaccgtaacctgttttatattcatcggactttaccgggcttgcctctgacctactggacattttagtaggagatccgaaagggagacagaatcgttaggaattaagataatcgaagccaattgaaagcaaacaaaagaaatgaaacgtgagggtactcgggacactcatagaactatgattctaaagtggttaaagggctggagatgaaaatatatatcgtggctgtccacgacgactttcttagtagatcctataatttcctatgcctaaattcccgttaatactatgcttccggcccccacgtagtactatgataaggcgtacattagttatgagattgcttggtgctggttggtctgcatccctgttgctggagaccagagtgatatacacgatgtcaccacggacaaagaagattaacttctaacatacgactagccccgctacccgagatagagagatcacgttatctttggatctttggataagcactaaaatagggca

SEQ ID NO: 45871 - DNA, 636 bp, Arabidopsis thaliana landsberg
  unsure (1)..(636): unsure at all n locations
aaccaacccccactctaatattatttatttataacttaacttttcagttttcatccttggctattactttcgattgattacaattttcactcaaaactcccaaataaaatgcagatatacagagagtgtgatgaatcatggaggctaacgttaaacggagacctaaatattccgctggggaggacagaagagttctgtgaaggaccatgcttctcagaaacacatttggctttgaattgcattgaagaaattattcaccactacagattctttaacagagccaccattcacgacatccgtgaaaccctcaagtctggctgcagctacggacctgaacgaggtttacgatttttaaagactggttcttgttctggtttataccggttattcgcttccttgtttaatgctagtttatataattgtatgcaggtgttttcaacgtcttggagcatattgaagatgaagatgaaaatgcaagtgagaagataaagtcaagatttgggccgttgctattcattattgccttgcttctctaagacctctcttaattttaatcttagccattatctgatatacatatatgttgcttatctagttaatacattanatataaacttgactatttgatacttttat

SEQ ID NO: 45872 - DNA, 720 bp, Arabidopsis thaliana landsberg
ggggtgataacatcccaactacttaggagcaacatgtagtttacattattaagcttaaaatctaaagatcatggcaatatagcaatcgtatcactgtagggtaagtccaaaaatagaggtacgtacgaactacgaagacaacataacgttttagtttctaccaaactttattgactaagtacttttcttttcttttttcttaattgactaagtactttatatagaagtgcaccgattattgcaaacccttattaatggacggcaaagaagagaaaattacgacagcttccagcttcctaactcctattgcatatatggactatggtaggtgtccttctcgtcagagcacatgtttgggaagattaatcattggataaacttaaagaattgaattatgattctaagttatctgaacatttacttttgaaaataatatattacctaacaaactagtattattttggctaacgtcctatagattgtgtttcgaatagttttggttttgttggtgatagaaaaccaagtaaatgaagatagtacagtttcagtgttttgagaaaaaagctgaactaaaaccaaaatgtttaagggacacaatatttagtttcaattagataattcagcagtttgaacaatcctttttttttccttgaagtcatttatttatacaatgttctaaaaagcattaagcatttaggcagccgacaaacgcgtattgtc

SEQ ID NO: 45873 - DNA, 654 bp, Arabidopsis thaliana landsberg
ttacaccgactcgaagggtacggatgcgtacaaccagagcctgtcggagcgtcgcgcgcagatcgtgtacgactacctgacggcgcacggtatcgacgcgagccgcctggaaggtccgatcggccacggcgagaacgatccggtcgacacgaacgacacggatgccggtcgcgcccgcaaccgtcgcacggagctgcaggttcagcagtaagaacctcagtcgtacccgagaagaagcccggcatctgccgggctttttctttttgtttccgcgtcatgctcccccaccgcggcatgagatccctggcgtgacctcaacgcacggcctgaagatggctaaggcgaggcagctggggtctcttggtgatatcgcaagaaaaagcccgggcaacccgggcttctctcgtcttagcggagcgactcgatcagtcggagcggcgctggaaccggtaatgcccgaccagccactcgttgccttcatcgaaaccgaacaactccgcgcaggccatccagaacatgcgccagcgctggtgccaaagattcgcagcctgctcgccgtaggtgcccgccagtacctccaggatttcctcgcggtgagcgtactggttgaacagccagtggttggaagtcttttcatagtgggtgccggtcagg

SEQ ID NO: 45874 - DNA, 440 bp, Arabidopsis thaliana landsberg
tcaaccaaacattaatcggatgtcttcactcttcataaatagttcacgaaaaccctaccagaaaaaaatatccaatttaaattgataaatatttataactataagtatctctctcgtgtggatcctcatcatttcatgtaaccacaatctgagaagacacaacaaattaagatccaacatcaatacacacacatatatatatatatatatagtgagaaaaaaagaagctatgggagatcatcatgatttcatcaactcaggaagctggtggaaagtatcttcttcttcttcaccatcttcttcttcttccatgagagcaagctctattgaatctggtggttctgctgttttccatgataagcttcatcatcattctttagctactgatcaccatcttcagatgattggtttaggactttcttcacaatcaccatgttgat

SEQ ID NO: 45875 - DNA, 891 bp, Arabidopsis thaliana landsberg
caaatatccactcatttatatgtaattcttgcaagactaatttatattacaattccaaaagatctccttggagaaagtttattttctttatttaattctatcattctattcaacgttttctcgattccatttattagttaacgatcaaaacctatacactttgtcaaaaagtagaagaaaaaacaacgaaaatatgaagaaaaaaaactatgtaagttgaaattctacgctcggaacattatcattataaaaaaaaaacgtgctacagaaagtgttgttactcaagatcttgccctagttttttatagaacctcaaatcaaactcaatcgtaaccttatacctttttcacacgaaaacagagttgtgtttgttgagagccattctttggcgtttaatcgttattctcttccaaattgtatatgaggagtatcactttacccattagttcggaaatttcattggacctattatcgtttttggcaaactttatattaatagtgagaatttttaatagcttactgtctcgagggtatatgtactttggtatacacactttcggttgcattaccatttatgtattttgctctcatttctacttgaagtgtaattctaaataaatggcctcacagaacataaaaataaacatcggaattaagaagaattccggagcgatgcctgattgaggatttagaagcaactgtaaagtacaccttatatataagttgagtttgcaagagccatgcgaagtcgatacttttgcataataactttcttttaacaaatactttttttcatctttattatttgattatcagcaaatcaaaagcgcatattgtattatagtaaccgtgtacattatatgctctattattttatttgataattcactg

SEQ ID NO: 45876 - DNA, 600 bp, Arabidopsis thaliana landsberg
aaaagttgcccgaaagtgctctatgtttttcaccggttcaggtgggagttattggactatggaacaagctgagtgtaagtctactttgaaagatcttttaagatatatatatgaatgttacttatataaaaccatagaggtgtgatttctatatgtaactatatgagtataagatatagagacatgttggagaagaagattgttgttattattgttgttgttgttgttgtgtaaaagcctctcctatctctctcgaacctaaggattctctctctgattagtatattttttgtttgacagaataatttgttacttatattgtaatttaacaatggagttgttcttgtactagccttcttttaaagtttcccttgaattcatacttttgaagctttttggtacatcagattcatcacttgacaaatagatacattaatttatgacttggaatcttggatgtccattccaacactctgatgacttgttcattctctggtacatctaatgagttggggagaagaagaagctagaatccgaatctcacaagtaacacaacccaagtaagctcattcccgggcctaagccctaatggccatctat

SEQ ID NO: 45877 - DNA, 409 bp, Arabidopsis thaliana landsberg
cttcttactgacgtccagcgtgtacatactattctctactttatcacccgatgccttcccacttttttttgtttgccgccgcatgggacacgattgcgagagcttcagaacacctccacaccaaagcagcttacctcgtcccttttcaggtactgacgaccttgaatcaaccgcttgggagcttcagtcgcgtttcaaggttttcgtcggatcaacatcgtaagaagagcattcagatcatgggccctacgtaaggatgccgccaacttcttgttgggcggaaaagaaccaacgtcgtcatcacagcggccacttctgggtatgatggactacggctcactatcaaaaggtgagacgagcagcgatcttgtagatacggaacttgagcattgggcacaaagtgcgtgtc

SEQ ID NO: 45878 - DNA, 258 bp, Arabidopsis thaliana landsberg
gtttccttcaagtgctgcaccgtcttctgtcactgtgcctgtgtcagctttggcttctggggcggtatctgcgatgagaatgaccagattcgtcgctgctgagctttcattggcattgtctgtcactataattgggaaactatcacttacgctgctatcaccaccgctgtggtttttgctggtgccactttgttggtagctataactgactttgcctgttactggatcatagtcggtaagggtcagtgttccttgtgt

SEQ ID NO: 45879 - DNA, 504 bp, Arabidopsis thaliana landsberg
taaagtttaaacaaatttaatttcgaaagaacttaaatcttcactgttctcacagcttcatacaaagaaatggtcattttcataacctacttgataaaataacataatccaatagtcaacgaaataagaataattcagtctaggactaattacttaattataaatggaatcaaatccactaaaaataaataaataatccgacaaagacaatctattcgatagcaacagtactactgttcttgcatggaaatgttccaataatgcaaatttcccaataattagaataacgttttgaaaatgacttgaaaaaaacagagcacaagttcccattctctaatgccacaacttcatacagaatccagatggaacaactgcagacgcaccgctaccaccaaccgcagaacgctttatcgaaacacggtcgtcgaaagtatcaatgagctgctcagccaaagccatgggatcatcaataaatgtatcaatgaatatcttcacaactctaat

SEQ ID NO: 45880 - DNA, 449 bp, Arabidopsis thaliana landsberg
  unsure (1)..(449): unsure at all n locations
tttcatcaaacaccttctccgcacaatgcatcttcccacaatttcaccaatcaaatcgttaaagtacannnnnnnnnnnnnnnnnnnnnnnnnnnnnnnnnnnnngcttcgcagatacaggaattgacgtctatggcggtcgaatttgcgtgagtaagatgattccaactttccatgaggatgttttggagggaaaatcaaaacctagtttatgtcagtttcacgttccgttatatcgtagatgatctaataaacccgctttgaagtgatccttttgaaaatgggcctgtaatgggctcagatttaattccaatcaagaactttaaaacatggataaatgctaagaccaatgtcggcaggtcatcttttcagctacgttctgcaaagtttttcttgtcatcatcatgtcaatagcagcgagtttgcgcacccacgtaatgggatccaat

SEQ ID NO: 45881 - DNA, 765 bp, Arabidopsis thaliana landsberg
  unsure (1)..(765): unsure at all n locations
tgcactcatctctcagcttcttggtatcagggcaagcacaacatatcctcttctttggtttcgtctctgctgaggcagcagccttgcttggctctgaagtgggtggaggaatcaatccattttgtgctggctgatcagtcatcctgtagacaacgaaaaaaagaacacggtaaaaaaaatgaacatgataaagaacaaatggcataaacataagtcacatactcacatcgcctaaattctccttcaaatcctaacttatcattcatctgttaaagaagcgatcttaaagatcaaatatcaagtccttaaaccttgggatgtgctcataagcaaacacaaacaaagatcgaaataatatacttggttctcaaaaaccaagctcaataagagctaacaaatgtatagaattccatgacaatagtctacttggtaagaaatcgaaaacaatgactgcataaatctaccacaaagacttttattgagaacttgtgatcacgaaatgagtnnnnnnnnnnnnnnnnnnnnnnnnnnntatattaaattcgagatttttcaatcaaaatttaaaaacgcataaacccatctgaacatctaaaaaaattgaacttctgataaaccctaagaaacatcagacgacttaaaaccctgaatctcaaaaccctgaccttaaattacgaaatctcatcaataagataacaacaacaccaaactcataagccaattgggtaacaattcaattcaacgagcaagcaagcanatcaaatc

SEQ ID NO: 45882 - DNA, 1987 bp, Arabidopsis thaliana landsberg
agaacaaagatacatcagtaagtttaagataaaccaaaaggatatgtaagatttgatatcttatcagaattaagagcttaacaacaggaaaatagcttatttcaacatggagcaaagtctaaacgtgtacttaatccccaaggtctggctaagaacataaaacagagaacagagcattacataaactatgtattatcatataaatgctcatatatagctacagaataaagggtacagtccaactatgtccatctcatcttttgacattgcttgcatccttgatctaacttcctagccttactcttataaaaaaccagcaagaatcatagttctaaaataaggcagtagaaataattaaaaaaaatggaattacacggagaagttgagcataatcatatatttactcaaaatacctttctttagaaagtttgtaatagttggaaacatgaccctttatgtgttttctcgaatgtttcccatgttctatcaacatcttcaaaatactccctgaacccatcaaaacaactctttagaagttggtatgcatgctcatgtaaaaagaaaagacagtccagaggcgggatcaaatcatcatatgcactaccaaaagagtaacagctctacctactgctcattactttagcatagagacctattttctttcatagcacaccagtaactcttgaattaaagctttcgggctcacttcatgtaagtacaaaaagcaaagaaaggaaacgagtggaatatatacaaacctcagcctcccaacctcctctccagcagctgctaatgcaaatcttcgtttaccatcaagtgctgttaatctctatggaagaaaaacagaatattatgtcttacaccaaacgttctttttttcaaagtgatgcagtcagaaatgcctggaatccatgggaagaggaactcatgctacctcataagtgttaacgatttctttatcatcactcaaagaatccctagccgcagcagcttcaacagaaattgacatcataccttctacatccttgaaaaaagagaatgaggtaaaaataagttgacaaaaacttggaaagcatttaaacatctgagacgaccatgcagagctatatatatttgcgttcaagaataagttagaaggacaacactgaaccaaatactgtaagcaatacaatcagtgctcatcggcatatctacctttagagttttgtttagattattcctggcgttactcagcagctttatttggtcatgattgtcaatcaaagtttgacattcctgacaaagcctgtggcacaagaagagaagttagagggaaagaaatgcaaaagttggtaactcagcttcaagaatctctagtcaagcaaaaacatacttgtcgatagaaatgaaattatcccgcagttcataaatggttttctcagatgatgaaagtgactctaacccagcttgagcttgttcaacctgaagtttgtcaacagctattacttaagaacaacaaaaaagtcgaaatacattaaagtacaaagaaggccagattaaagctgtacctgctcagcaaccatagtactgagctgtgcatcatttgcctgattgaaacagcaagcatcactagtcaggtcattaaaaatttccagaaaatcgaaaataaaagataacaatagcatatcaaaacctaacaactcaaatctagcattgctcaggaatcactaatactcagtgcaaatgatacttcaaaagccaattcagttccaattgcaattcaaaagcaagatgtcaaacctgttgacgagcgatgtaatcggccttgattgaagaaatagactgcaaaagttcaggtaagggtaagagcttcgccacttctcgcacagccgcttccttcgcttccacaccaagatcttcgaccatcatcttcgctaaatcaccttatttacgaactccgatcctaaattgaaggctacctctgcaaagttattcaaaattccagcac

SEQ ID NO: 45883 - DNA, 720 bp, Arabidopsis thaliana landsberg
ggggcatagttgtagctttctggtctttcaagatttgggttgttttatgctttttgggaaaacattaacaaaaagggtcacttctgaaacacccccaaggaatcgcaatcatatacgcaaactccatatacgtgtgtttaagtttcttgggaaaatagtttattactaattcataacttaagattttgttaaatatggttgaagaagaaaatgactttatcttctcgacatcttttgtaatctttacttttggatataactgccatgtgtttgcaatctatttagccttaattatatattttgtcgcctaggcctaattaaaatcaaaaggaatggttttatttatatgaatgttgttctgttaattaaaataccgggaatatcctctttttctttttattattacaatactttgcataaatgaagtaaaatccggtaggtgtcaaagagacaaccatatgaagagttaggtatttccggcagcttatgtacgacgaagtaataaaacaaaccaaaccatgtggtcaatatgaaaaagatagttcgcatttggtaccaacccattgatgactggagatgtgatcgttttattttaggtttcagtccttgagaagctccaatttcttcagggcatcacgaacatccgaatctggtgatgcgtgaaccacgttgttgctctcaaaggagatcacgtcggtgagaggatagctccggttagcg

SEQ ID NO: 45884 - DNA, 653 bp, Arabidopsis thaliana landsberg
ctcaaacaagtaagagttcgtcaacaaatggcagctttgtgatgtcccaaccacaagagtttatgtatcaccgcagtcggtgctgcaaaccagcttatgaaacgtgatgtcgacggccaaatgaaccaaggcaatatctcatccaaggtaagatttcctcaaatggacctgtaatgagtgtttttctttagctcaagctgtttctgtaatgattggtcaaatctgtgaatgcagacactgaacaacttttcatgtgtgatacttggaggaatggtaacagaacatatactattcggatactcagaagggctatactcagatattgtcaaggtaatacaaactcaagtctccttccactcatagtcatgagactataatcttctaatgtattttttgagatttgagtgttgcagttgaacgatgttctgcggtggctcggcttcacagaatcagaaaaggaggctcatatcaaatgggctgtttccaacactgtctcattattacattctcacaaagaagcaagagtctcacttgcagaaaccatggctaaagccaaacctattagcacttgtattgaagccattgaatccgctatttcaacacatcaaatttaactatttcacttcttcaaaccgaattcattactggatttg

SEQ ID NO: 45885 - DNA, 453 bp, Arabidopsis thaliana landsberg
  unsure (1)..(453): unsure at all n locations
accagcgcggctcgttttgattattacatgtcgaaaaagttttacaaagagtccgcgtgaatttaatgccccaacctaactctcctcacttatttcccactccttccatttttaaagtttaatctttgaaatgaaatatgtctctgtatgcgatcgaccatacaactattgttacagtttttttgaccgaaacgtaaatatctttttaggcattattcattagcattagacaataatcaattattctagacactgttagaaaacacagctgcctagctgccaagacgactatctaggcaatcaancggttttcttccgtcaaaaatagtcccaaatcgactacactaattaatcttatgacacatccgaatcttacataatttaagactaagttcagaatcactatgtccaaatttacaagaaccatttaacaataatatacgacccgatgat

SEQ ID NO: 45886 - DNA, 896 bp, Arabidopsis thaliana landsberg
aaacccaaacgattggagacctccaaaactgtgttgttactaactagtttgtataggatacaaaaccaaaacggagcagcttagtgaaatggcagataatcaacaccagctcttattcaggaaaacacttcccattctacctattaaccgtacttgttggagagtgctctggcccaggggctttggtcttccgaccatattatccggcccccgagcattgcacaccatcttagattcagaagtgctgcagcaagatgctcctcagattttctgaacagttcgattatctttgtttcagcttcagggtcttcgctcatgacgaaattttcctctagctctattttcttgtcctgaagactctccttgtcttcttcgttgagcatccttaagctcagaacattcaaagcttctatagctgttgcatgataccctttctccacataacaactgaaaacataatgacatgtcgttggatctggattcactttctctcggtgcatttgctccactatgtactcaatcacatcaatcattccctgcagacaaaagttatgtgtatactaaagcagtttattcactttcattactttaagcgtttttacaacaaatatctttaccttctcaaacgctttacgcaaaatggtgttgtatgataagacatcaagatgtatctcttctaatgccgcttggtccaagagattgagtgcctcctcgaaattcgcatcattcaacaaaatctaagaggatacacagctttagttaattaaaattaaatgaacagcaataagctgctagattccaaaaaaaaaattggaagttctgagcgtgagcgatggttcaagaaaatttggtatgtgtctgtactgtgtgtagaattctttcatcctgaactgaaa

SEQ ID NO: 45887 - DNA, 542 bp, Arabidopsis thaliana landsberg
gagcgccgatacctgatccgggcgttcaccagggcgttcgccatacctccgcatcgttacgtgaccgggcgacggctcgacctcgctaggcgcaggctgctcgacggtgagccgcctgccgcggtcgccgtggcgaccggcttctacgaccaggcgcacttccatcgccatttccggcggttgctgagcacttcgccgggaagttaccaagcatcgatcgcgtaagcgcccaccgcgtgccaatgccgctgttcgggcgggtgtcgccatacgctgcttgctgacaactgacaaggggctgtctgcggatcgccggtcgaacgaggatgggatcgtccagatggaccgacacgtgcgacggcgactgccgtgaagctggtcctgatcggcgcgctcggcgcgctcgtcatcgccctgatcggcaccggctacttcatcgtgctggcggggcgcaggggtggggccagttcatccgggatgacggcccgaccagccaccacccaagcgtggcacgccgcagatgttcgggatcgtcatcatcg

SEQ ID NO: 45888 - DNA, 322 bp, Arabidopsis thaliana landsberg
tatataacatactaaatcatctaccaagagcaaatgacatgaaaggacatcagattctcatagtctaattcagaaccacgcaaatagataggatgcctacttaacatccgttacacgataaggatgtatttaaatataacgactcacattacactacaacacatcctattatatgccaaaggtagtcagccacagaacgggaacactgacattaggccgtccattaccacgaagcacgctgatccggtctgtgcatatccgcaagtgtccgacgatattcatccgtggtcgtacaattctcatgtccgatagattctcaaag

SEQ ID NO: 45889 - DNA, 693 bp, Arabidopsis thaliana landsberg
gaggaagtttttgacgaagttctctcagagaagaacatctctcaagaagaagagccgctggatgctcatagactttagccggaatgtaatttctctcggagagaaagtgacgatggcgagacgggggattagggatttgaggaacggtagagaactgcaccaattgtgagctcatgcttttgttctgcaaaaatcaatcctttagacaattccttcttcgaagtatatactttatccacaatgtctggacttgattgaattgacagtgacgtgagcttattccggagaagaaggtgaagtgagtcactcttctcaggtgaattaagaccaagtcgtaatagacgggccaactttggtcaatcaaaccgtagaaagaccgccattaatagaaaaatgatgaatcttttagcttgcatcatcatcttagaggtaacagtgccacttgactttgacatttctaacaatatttggacttttctcttgagaatttaatcatcaccacaacattacagaatcacttaacgtaactcaagaccctaccattggtaattgttacattcaatgctgagatctttgctattaatagatcggatgtgtttgtgttgtttcaggacatattaagaacacaaaagctagctacaccaaattgggactgttcttgagagctggtactgaagctatgagacttcatga

SEQ ID NO: 45890 - DNA, 652 bp, Arabidopsis thaliana landsberg
tattcgttgttatgaagagtcaccacacgaggtgtataaatttagcctcaccgatttcgaagaagagattatgtgtttgatgattacagagaagatatgaagtgtagaatgttggatgatatagtgaagaattccggtcaccgtgtagaaatatcaaggccggaatattataaacctgagattgaaaaacaggttttgtttttttggttattttgtgattaagatcagtttttttttttggtttaataatatttgatcttgtgtgtgtttaggtatatgaaaaggaagagaagaaagtaatggatccggatatctatattagatcttatgaagagtcaccaaacgaggtgtataaatttagcctcactgatttggaagaagagataatggaaaatgactccatagaaggtgtgaagtgtagaatgttggatgaaataatgaagaagtccggtcaccatttaaaaatatcaaggccggaatataaacctgagattgaaaaacaggttagtttttaataaaaagatcactagatatattcttttttttttttttttggggacataatatttgacttgtggcatgtgtttaggtatatgaagaggaagagaagaaagtaatggatccagatgtggatattagatgttatgaaaag

SEQ ID NO: 45891 - DNA, 694 bp, Arabidopsis thaliana landsberg
tccttctttctataggaaagtgggaaaaacgcgattcacacgatactgttgctattgcgtcgtacagattgcgatacgtgtcacaatcttgacggtctgttctatttaaaccacgtgttttaatcaaaaaacttctgtcggatcgtatcggagactttgaatttttatggcacatgaaacttcgtaggggtttgatggtaggatcccacattggtccacttactattcaattcgcaccgccgttaagtttgttaactaacgtgaggaacgtcgcggtgatgtcaaaaaaggccatgaaagttgtttctattacgatgatgccatcactggagttggtaatgtgctcttgtggaagggcaaattttgtaaatacgatcaaatttcgagtcttttacgaatttgtgacatacgccgtttaataacgtttgccgtcggttctgaaatctttattctttttctcttttatcgttacgcgtaaggaaaacgtgcggtaaattctaacagaaaatatatataaaaaattagtccaattttgaaatctggccgttgatggtagacaactaaactgtgccaaacaagaaacaagaggtgaacatatttttatgataagacagggcaataaatttgttgtaccaactcataaaacaatagataaattacttgcacaatgatggattattaacattaattttct

SEQ ID NO: 45892 - DNA, 576 bp, Arabidopsis thaliana landsberg
  unsure (1)..(576): unsure at all n locations
gctatagcgtttcgtttttaatcgttgtatcgtttagatatggagatgaacataagcttgctggattttcagctacttttcaagctattatttcttttgtggagaatgggtaaaatatgcactagctttgtcttatgtttgtttcctttatggttactttttgtatttaacgtttgatgcctaacccatttttttttagtggtgaccgtgtcaacttagtcaaggcaggaaatcaccaggtattaaaatttccctgtactatcaattgtatggcttggtgcattaactttcaactagagaagtgttttcttcatttacatatggcgatattgattagagatataagtcatgtataaagtaaaatcactgctcttaagaagattacaatcattttaaaaatgagatttcctggtcaaattcaggttgtctttctcgttaaggggccaatatatctggtctgcatcagctgtacagatgaaacatatgagtatttaggggggcagntggatcttctattatgggcaggtaaaaaatagtctgctgctctgtatcctttctttgtaactttttcatgtt

SEQ ID NO: 45893 - DNA, 705 bp, Arabidopsis thaliana landsberg
  unsure (1)..(705): unsure at all n locations
tttaataggtattgagcccccgccatatcattacgtggaatttctctcaaattaacgttcaatagttactaatagcttatgggtacaattcaatctaatgtgcgggaattgttggagaaaacatgttggaggacatctctatgaaaaggagaagaagaataagtaaaggaaaccaaatttgattaaaattttaaaaggtcaagaagatgatacatgggtccatgttgtgctatcttcgctcagaatcacttgcccgcacaccacaaataatctcatcattttatgttttatttatttcccaatatagattggaaaactatgaataaaattggtaagctacaaatatataaccatccaatatggtagcatgatgttttcgaatcttattttcttagttgtcacccaaatttcaaaactgttgttttctattgcagacaagaaaaattatgaatatctttctgactaatatatatatttacttatttcaaaatagataatattctagataccaacgattttaaatgagggactacaagatgtcaccagtaaaaaaaataaagccagagactaaaaaattgctttgagggagagtacatcatctttctctgtggctgagatccattgcaacaagaatgaaacttgaaaattcanactagttgtaggacttaggatacaatagtttataactatacgaaatgtaatata

SEQ ID NO: 45894 - DNA, 651 bp, Arabidopsis thaliana landsberg
  unsure (1)..(651): unsure at all n locations
cccttccccccccccgccccccccccccccccccccccccccccccccccttattccagcccaccccccccccgcttccccccaccccacccccccccccccccccccccaccccccccccccccttctccccccccgggtccccccccccccacccccccccccccccccccccccccccccccccccccccccccccccccccccccctcttcccccccccccctcccctcctccccccctcccctcctctcccccccctcccccccccccctctccctccctccccccccccctcccnncctccctctcttctcccccccccgctgtcgcgcccaccccccccccccgcgcccgcccccccccaacacaaacccccccccatcctccccccccccccccccccctcccntcccctcccctcccccccccccctcgcccccccctcccccgccctgcccccccccccccgcccccccccccccccccccctcgccccccccctcccccccccccccccccgtccccccccccccccccccccccccccccccccccgcccccccccccccccctcccctctccccctcccccccccccctcccctccccccccccctcccgtcccccccccccccccccctcccccccc

SEQ ID NO: 45895 - DNA, 535 bp, Arabidopsis thaliana landsberg
gctgattgttaaatttcgtaactttcgagaaacaaaagtagatatttttgattttgttgcttaaattagaaactgggttttgggtaaagtttgcgactttcttcagaaaatgttgagttttgagttgagagattgaggcgtggaggagagagaaatgaaattataaggggagagaagagaaggttctagagacaagacaagatcatttcactgtattgaagcttctttgacatttatgtgagcacgtggcgacaagacaagacaatgttccagaaacttcgttactaatctagaatctctttttttatatatatatcatatgggcctttacttaagcccatttctaacgatgccaatttatgttctaggtccttctttttaatgtgggccgccagaaaaagcctactaaaatgaattattgggtatgtccaagggtatttatgtacttaagaggcgacctacatatctcgtgcgtgtctccacctgctgcacaatttttctctcacccgataaccaaacaggtctctcacgtgta

SEQ ID NO: 45896 - DNA, 497 bp, Arabidopsis thaliana landsberg
gaggaatcagacactgcaaggaacacacacgagatttgtctctttcttagttctgggaagatttgacctctctctctctctttttctatcaaaatctgtagagtagtaatggatttttaaagctggttgataataatttttggatctaagtaacaaaggaaaggcgttactctttttttgttcttttcaaattggcgtaaagtaaagaaactactttttatttattttctcttaaatagattagattatgattacacccaaaaataaaaaacatgaagtaaaaaacaagggtaggtgaagaagaagaggacaaagaacaggcgtgcttaagcaacgctcatatctgttttaggtttttgtcaacgatcccttttgcattaggttgagaactaattctgaattccttgcatactacccagtgtctatatattctccaacaattcgaagctaattggaaaatttcttgctcatgttcacgtctcgatccaattgatttg

SEQ ID NO: 45897 - DNA, 498 bp, Arabidopsis thaliana landsberg
ccttcttaaatatgtgcgcagttacctgatctcccgtatcttaatattcctgtaaaacaccgaattaccatgatcctgcagcaggatggggccgctttcggaaagaccgaaatttttctgtttggcaaacttgctgtgcgccaccagtaccctgaaaatattgccgccgcgttcatactccaccactttgtacccgtttaaccagtgctgcacgaggttattgggatatacgatgatccttccgtggttccactctcctattttgtgccggccttgtggtacctgtatggagggtatcaggtcgtacaggcttcccattttccggtttccttctgttccgagtttggcatctgcatgatgttcatcatccaatacctggaactcgaggcccagccccgactttgttgcccccggagcttccgttacaaagtactttacacctgaattagcgccttcagtcagtttgaaatcgaataccagttcgaatgacctgaaatt

SEQ ID NO: 45898 - DNA, 577 bp, Arabidopsis thaliana landsberg
cgcaaatgatctggcgattaccacatttacaccaacgtggaaaattttgcccaatgatttttttcagttatctttccgtctaaagaaatatcctcaccaaaataataacatgtatacctaatcaatcaatcattatctttctttaaatttctttaattttttttttgtttttttttgcatattgcaaagttttgaacgcgagcgaattctccgcggagttggggttaaaaggaagaactattagggtttttgattcttcgggttttctcgtgctttgattcctttcaagtcaaagcaaagcattaccttttctcgtccatgtaagtcagaattgttcaagttattgttttttcttttcttttgtgggtaaattttgttcgaattatatacgatcacgttgtttgatgattctcctcaatctcctcgtcgattttgatcgaatttcataatctgggctttggtttcgctcgctttcttgtttcgattgtcgtagtgagttctcttcgcgaatcaaatcctttgattcctctgtttatggtgttctgtttttttttaggttctatggaatcgtgggtca

SEQ ID NO: 45899 - DNA, 354 bp, Arabidopsis thaliana landsberg
agagggatcaatgaataaaagcttcgtccatttctagctggagattccatggatctccagttagtgcaagtgatacacgttgtctacatttgttcctaagtttctgcattttttgtcgttcttttgtgttagacaagtcttggaccctagatgatacttcagtttcttagacgttaaatttgatgaatccgaacttgtttgatttcaaagcctggcctttctgcaatgtgtttttgtgcatgttctggcttgtttgttgttactcaacgcaggatttgttataatatgtacaatatatctactacacacataagtcaagcaggtaaaactccgtggcccaatggataaggcgct

SEQ ID NO: 45900 - DNA, 360 bp, Arabidopsis thaliana landsberg
  unsure (1)..(360): unsure at all n locations
atgtttgcaggaaattaacaagagcgatggctatgcacagacgaaaatggatcctaaggagattgtggaggttttcaagaaaaaattcatggtaagtcatacaactaggatataatttttttaactgaactaccacatgattttaatggatccaaatgtgagttgcttcatattttcttgggggttagaacataaaagctatatatgcctttaagcatatggttgtttaggtgtgaatgttcgttgctttgggttagttttctgttttgggaatgaaaaccgagtcggtttatcatctggctcagagacaatctcatctttctncaacgagcgtttttgcgacttagacgttttgaaagc

SEQ ID NO: 45901 - DNA, 454 bp, Arabidopsis thaliana landsberg
  unsure (1)..(454): unsure at all n locations
ggtggcaacagtggcgatggaaagaaaaagtgtgtgtgttcactttccaatcatccaagatcgttcaagtgtaggtagcatcaacatgaatatcaatggcttcctccaccttctttttcataccttcacaaataacatatcatcaattcactcatgcatacaacagcatatagttatatattattattattcatggatatattgattcgttaagcacttcaatcaacgaagaaattgtgttgtggctctccgaattgctcatcacctacattagatcatatacacgttctatcaaaaacccctgccgcgatatctatattcgcaggcaatgaaagctaggatggtgtttgtcgactctctgccacatcacgtttggacatgctcgcttctaaaacactagaaggtacctagcgaaacatttctgtnnnnnnnnnnnnnnnnnncatacattggt

SEQ ID NO: 45902 - DNA, 777 bp, Arabidopsis thaliana landsberg
attgtgttttccgatacaaattgtaaaatactccagctatcctcgtgtataacaactgttcatgctccacgtaaaacttatttatattaaagtaaccccccaaccacacagtagaggaggtaacatacctaataatccccaaatactctcgaaattccacaatattgatttaacgcaatgttgaaaaaattagcaaatcagatgttttgataagtttgtgataaaaaaaaaaggtcgatagaccagaagaaataaagaattatgaaaacaaagctgcttggatgttatagcttttaaaaggtgttagtaaaatgtgatgatttaaaaatactttaactcatgtgatcttggccattggtacatggaaaagaatcaaaagttgaaccaaaatgtaaatttgcagctaaatatatgcaaattcgaattcaaatagtgacacaatggtcacactaacataaaacactagatatcattttattgattttcaagtgatatatactttcattcttaaatataaaatatgattttatttgcccatttcggccaacagtccatcatctttctttggcagagtggcatgtatttccatgctagtttgtaaattacaatgaacaaataacataaaaaatgtattgttaatttgactctacaaaaaacatgatatgaatttgttctgaaaacaataatttatataagtacctaattggggtaagtattaaaatattaacatggtgcttgtagatctcagttatatgagcagggaaactttagtaagaa

SEQ ID NO: 45903 - DNA, 537 bp, Arabidopsis thaliana landsberg
gtttaattggggattagctgttagaaagaaagcagagaaggttttaaagctacttgagaaaggggaattacttaaggaagaaaggaagcgagctcgtgagctgtctcgagggattcaaggtttcggtagctttaaccacaagtcttcatctcattctttgtcagagcatgaagtcttacaagaatctacagtctataggaaatgtaattccaattttaccaagaattacgatgaggatgaccaagagaacactatggtttctcctaatgacgccaacctttttcctcagccgctggtagctgacccgagcgaggaatctaggacgggtatgaaagaaaatatggatcctgaagatgatgagaacacagaggtaaacccacttttgggttttagtaaaaaggagggtcaagaactagccggagaagacgagaaccatccatttacggatggcgagagtaagcatacagtagtcttgcttgatgagaacacagattaaattttatttacgtgatatcgcaatctgtataggagaaaaaa

SEQ ID NO: 45904 - DNA, 214 bp, Arabidopsis thaliana landsberg
aagagcatccatgttttctatgttcctgaaaccatcaacttgcaggcatgaccatccccgtcgagccagagactcgcggtagtcctcttcagtgtagaagatcgtctcttctgaatggactgggaattggttggattcatcataatggcgaaccctaatggccagtgctgcaagaggggttttgcatactgacaacttcagtcaaaaaaaaaca

SEQ ID NO: 45905 - DNA, 620 bp, Arabidopsis thaliana landsberg
  unsure (1)..(620): unsure at all n locations
gggaagagacttagagttgtataccaaagtagcagtgtcactgtttcttctctcattgatcggatttttcatggattttcagacactttgccacaccagtaagtagatattctaaaactcctatagacttggaatgcttttgagctggatattcattttgtggttgttcttggttaatttggcaggcgttttggtggttatgacggttccagctttctatgagagatatgaggattacattgttggctctattgagtttatctgcaacaaaactagagagctttaccttagactcgagatatgggctaatccggaaaataagaaactgagctgagatgctgtcacctctttcttcttcaggagtttctttttctgatttttctcggttttgtggaaagaaaggagaaaaatgtatgatttttgataaatgttggatggtacagccaatatatgagcaatccacagaaattttaatttcacagttttactcgaaaactgaatctctattccgaaaacaatattcgaccaagttctggcctctctcaatcaccgaaaatgaagaagaaaacaatgttgctctcatcccctctgcttaaaactntgtgtctcagtttcttttg

SEQ ID NO: 45906 - DNA, 884 bp, Arabidopsis thaliana landsberg
tctcagtttagtattgacatgatagcatcatgttcagtctctcacacagcttgtgtttcttgcaccgaaaagagtgatagctgcaggcaggcaacccatcggcggtagcgatatcactccgattctccttgctcctagttcatacagattctgttacaagtgacagtatgattcttgttcacacaaaaaagggtaaataactgatacgatttttttgtgtttcttgtaaatttgcacattcatatggttgccttattatgaatatcgagttctacaagttcgttactaaacttagaagtacctggatgaattctgagaaggatctcaggagaatgtcagcgaactgatcaggtgtatttaggatgttgagtagaggattgatgtaataattctgaagaaagtcgctagatcccgcactcaaaatgtggatacctctagagaacagtatgtgcgcgttccccctcccgatcattctcgttactctattttgatacgccctgtaatagctcagctgtcgtgttaaggagatcgagccctgcaaaaggaagagtaaaaccttatggatcatttcttgggtatgtgtgtaatgatgtttgactgtgttgtctcctttacaaatggaacagatgtggcatcatagtatcctgaagaagctgatgcaaagttggcaccgatcaggatattctcgttgcttgcttcccggcttaggaatgcacgtgggtatgaagagaaaccaaggtactcggctagacacaagtaggcagattaaaaaaccaattagattaggaagagagagaaagtatttgaaggtcatacttgatggagagatagatatatgtggttttgtgagaaagactttacctgagaaatctacagcgagtttt

SEQ ID NO: 45907 - DNA, 661 bp, Arabidopsis thaliana landsberg
ttaggtgtatatacaatactagaggtccagaggtacatttcttacccaaataggtatattcaggtaaataacggtgaagtttgttttttccatatatgttaacagaaaatgattaaactaatgaatgtcaagactttttagttcttactttatctttttagatggttgtttgtgtcattttcctgccgactacggtactagtcaagtaaaatatgtattcatatcaagagatatacgatgacattatttctaatcctgaagtatttacataattcatcctcttttttttcttttctgcagataaaacagagtttctaatttgactaaagttgtacggtcaatatatatgtgttttatactctagatgtgaaacaaaaaaattggttatagtccagctaacttacaaaattacctaagttataatggcttgtcgataaaagaactaacttacaaaatggcctaatttataatgattttgtcgaaagagctaacttacataatgactatattaaaaatattattttaatttaccggaatatatatcttttcttgttttggtttaagattttgtaatattatagttaaaactgtaatcgatggcttgttgttttgtattagcctattaaggctattcaaataacactgcgtggttaagaaatga

SEQ ID NO: 45908 - DNA, 297 bp, Arabidopsis thaliana landsberg
gctttgagagttgctaaaaattcctgaggatttgtggccagctgccaggcccgggactggctggacaaaagaaccgcccggtcgctggccgcgatcggctgcaggccttgggagccaaggtgaccgggtcagtttccaagaagaccgactgcctggtttacggggaagatgccggcagcaaactggccaaggcagaagccctggatattccgcgcttaacggagacagaagcaatcactaagatcgaagagaaggacacggaaaagtgaagagatttttcaggcaatacttgacaag

SEQ ID NO: 45909 - DNA, 369 bp, Arabidopsis thaliana landsberg
acaaaagagtaaacgattcaatcccaattaaagtggttctggagcaaattatacaggagtatgagtagaagaatcttatatggttatcaaagaggaagagagcaaattcttaccggagaactgaagccggtgttgagaacgacggacattgtgaattaggtttttaagagcgacgcatatggaggaagatgaaagacggaaactctgtttctgtgtggtagtgaagaagctaaacacagaatcgaagattgggttctctgcttcatctcgatgatcaacgtcccactcgctcttaaagcacgtgacaaccacgcgatctcattaataatttgacccattgaaaagatgaaaattgcaaaacacaaccca

SEQ ID NO: 45910 - DNA, 519 bp, Arabidopsis thaliana landsberg
  unsure (1)..(519): unsure at all n locations
aaatgctccaagcaccaatgacattttctcttcagagttagagaattatgcaggtttattaaatgtctgatatatatacaaaggatgattaccaaccacttaagggtgttaaagcaagagtaagtgttgataaaaataacttacagatgaaacagctactacttttcttggtcatagcaatgtgagccttgaccataagcagtgtgtcacaattgtttgcatatatacatgcttcaaatcacttgagcagattctccctcaaaggaacttagagcgctgataaccgattcatatacttctattcctttcatgaatacagtatcctttaggaactgaggccacaattaagtgtttatatcagtactgtgattaaatatatagactcaaagatggcaatagataatatcatcatgtgaatacctcgttatggtcatgcaataaaataagcgtattggtcattggagagaaccnaaaagttggaattccaaagtgcgaataagcgtgaatctgtagttgaag

SEQ ID NO: 45911 - DNA, 634 bp, Arabidopsis thaliana landsberg
tgatacagttcgcaccattcttgccatctcatctcaattcaattgggagatctttcaattagatgtcaagagtgcctttttacatggcgagctcaaggaggaagtgtacgtaagacaaccggaaggattcataagggaaggagaggaagaaaaagtttataagctaaggaaggcattgtacgggctgaagcaggcaccacgagcttggtacagccggattgaggcttatttcttgaaagaagagtttgaaaggtgtcctagtgagcatacgctttttacaaagacaagaggaggtaatattttaattgtcagcttatacgttgatgatttaatatttactggaagtgataaagctatgtgtgatgagtttaagaaatcaatgatgctggaatttgaaatgtcggatttgggaaagatgaagcatttccttgggatagaagtgaaacagagtgatggtgggatttttatttgtcaaagaagatacgctcgggaggttttagcaaggtttggaatggatgagagcaatgctgtgaaaaatcaattgttccgggacaaagcttacgaaggatgaaaatggcgagaaagttgatgaaccatgtcaagcagttggttggaagctcatgtatttacagtg

SEQ ID NO: 45912 - DNA, 922 bp, Arabidopsis thaliana landsberg
aatcaaaggacttgaaatgaattgctctcatcacatcttcgagacagatctataaagatacagaggaaactatatgagcaaatgtaaagcaaattcaaacagatgacaataaactgaaccagataccttgtttttgtttgaaagtgcatgacaaagctttctttctaacgcccaatactcttcacccgaattaaactcttgttgtactctaacccatgcaacaaattaataatgatcagtgtatatgtttgtccctttccctaataaaacagtaaggaaaacaaaagttatagcaaggaaatacctgtttgtcaaaagggccttacgttcaagcagatctccaagcggttttaacggattagtttcaaacagaactcgtgattcagcattccatccatgacttgaatactgcatctcaaaccattagcttgtacactgaattggtgattcctatactcctaaatatttttacacatgccatcttacaatgacttgggatccacaagctgattcactgactatcttctcattaagagcatccatctacagaaacaaaagacctacatttcttagattcaggtaacattgtcattgttgcagggcacggttactcaaaacaaagaaaatcttacagacacgagggagaaaacaacagaaagacacatattattacctgatatatgtaactctctgtgaatgaaagcacaggtaaatatctgaatattgattgcggttcgttaatatccaaccgatgaaacatgaaataagacctggactgcaacaagatatggacagttatctacacaatccgatcgtgttatctattatgattagctaactcaaccattgaagacagagagtatcaatgcatttgtaagaggaaaaacttacgaaatcctcaagtgtagagtttgctctcttc

SEQ ID NO: 45913 - DNA, 626 bp, Arabidopsis thaliana landsberg
tactacatttgggcttgttcaagagaagtgtcttttcttcattcaatcagaaccgtgaagaaaggagatcgttactttccattgatggctaaaaattaaaataatcacgataaatattaataatacaaaaaacaattaaaataacaaaaaaagatcaaaaattctctaacccttcattccttatctctgacgtggccatcaatcttcagattttcttcttcttctaatttaaatactcaacaaccactcttcacttcaccatcagcatcactaaactcgaaccctaaagaaaaacaaaaatggctgccatagcttctactctctctctttcttcaaccaaacctcagagacttttcgattcttccttccatggctcagccatctccgcagctcctatctccatcggtctcaaaccacgatctttctccgttcgcgccacaaccgctggttacgacttgaacgctttcacgttcgacccgatcaaggaatcgatcgtgtcacgtgagatgacgagaaagtacatgacggatatgatcacttacgctgagactgaagtcgtcgtcgttggtgctggatctgctggtttatctgctgcttatgagatcagtaagaaccctaatgttcaa

SEQ ID NO: 45914 - DNA, 397 bp, Arabidopsis thaliana landsberg
aggcattgatacacatataccatgcaattttttaaggtatgcacacggacccttccttcttgaggatgagggccaacgccaaactttccgcccccaggccatggttctcacatcattttggacactattgagatcatagagtatgttacttaccattgatattattctctcttctggtcatagatattttggttataagtagtaattaaagctttttgttgggtcttgaattttctaggtacttagagagaatagctgaagtttcctctggtatagaagatgctacttttaatagagaagttgctgaatggatgcggaagattagggaatgggagtccaaacttttcacttttgctcaccataccggaaaatagtcgcctctatgtttccaagttct

SEQ ID NO: 45915 - DNA, 784 bp, Arabidopsis thaliana landsberg
catgcaagtataccgtatacgtctctagtttttcttttatatcttttttttttaaggatgttaatttttctttgatatgttaaatttgaattaactagactaacatgttcttttttctttttgtatatatataatactagactaacatgcttaatcgtgtgctataagaaaaaagcaatggctaatcctgtctatataaataaaaataacttgcagggacttttataatatccgctataatctctggagcaacaattgtattcacatggtgcttggtgccggagactcgaagattaacgttagaagaaatccaactgtcgtttgtcaatgtttagggttcatcggaagcattcatatatgcatcataaaggttgatatactacatcatttgctacatataattcggcttcgatcgtatccataaattatttgattaattcaatataaattaactaaagtttccattgtttagttgaactcattgacgattagtttatttgtatacatatatatatacttttttcttcggtaacattatgctgattaaaattcgaatgatgatatgcagcgcgtgttacttgtataaactactatcgaccatctttttatttattttattttggagttcttatcttcatcattataatacacatgatccttaaagctagcacatagtgtggtatatgttaaaagtgaacaaactgcttatatcaccattttgaaccctgtttttagaaaaatcctttcttaaaaaattcaatgctttttttttttcttaaactca

SEQ ID NO: 45916 - DNA, 550 bp, Arabidopsis thaliana landsberg
ttattgatcgccttgacataaaatgaaaaatttaacccaatcaaaaacttaattgataagacttttgaaaaaagaaggtataaccaaaacaaaattagtcaaaaggctgatccaagaatcagtttttcactaagcttcaacaagaatagatttcgggatcccaaaatcagtattttattggtgattgaccatttttttcatatggaagtgttaactttgatgaaatctcgtaaattgattagaaccacaaatttgagtcctgcgtaaattgataagaaccacaaatccaaagtttacatcgaaaactcgttttatagtaaagaaatcttacagggtaacaactactacaaactcaataatataataaacaacacactttatttaaataaaaaataaatactctcttaaactattttttttttgtcaacagctttaaattaaactcaaaagagccattgtagctgccatttaaattctttaatgactcaaaagaaaatacatgaaaaatcaatatataccatcgactaatcacaacctagtttagtaacac

SEQ ID NO: 45917 - DNA, 694 bp, Arabidopsis thaliana landsberg
  unsure (1)..(694): unsure at all n locations
gatttacgaacaaagcacacaagggtgacacaatttgcattgggtgagtaacttcctccatgtcgtaaatcacaacattatgatcactacgcactgtcttatgtatatcctacagtcgtaaaatatcattgctacgggatcttgttctttgcatcaaccacgtaaaaatgaagagctgaaagatagagaaggatcatcacagtttccttctagctagtttatcctagactcagtatattgcattgcattcactacagctcaaatagtttaaaacaagaattaacaaactctttctaaatggaaggcttggtagagtaaacaggcatgtcgaaatagagtctcagtgataaaatcacaaaaacccgaattaacaaaatataaactgcaaataagtggaaagcaaagagagtagaaactagaaaaaacctgagtagctttgggtgaatttatattggtttggctttcttcaaatagagaggtgtagtaggcagggtcgtagatagaacctcccaagatttcttcagcacctgaacattgtctagctatagcaggagttggtggattcaagaagctatttcgtaaatccgaatctgtttcacgaggaagtgaagtgtccacgatagaagcccncagcctataaatctgaaaccataaaagcgaggatgatagcctcacaaagaaccaatcatttcca

SEQ ID NO: 45918 - DNA, 760 bp, Arabidopsis thaliana landsberg
aggacgaagaagaggacgaagcaggtgagctagtagagttaaacgcttaagagtaatgatatgtgagtgaagaaaccttgttaagaaaacgaagccgagaagagctactgatggagagaagattaagcatgcgaatgcagaaactaatggaactctcttggccttcttcttattcatctgctactgcattcgagctctcactgtcaccgacgacgaacgagaaaactaaactaaaagatcgaaacaattggaaaacgtcaccgtttcagtgtaagcgaagtgactgcttgacttattcataaacaggcctaatgttacaagcctttggattaaaatggaaagatggaaaatttatacaaatattgtttgatttacataattttacaaaaaaaaaaaaaaaaaaaaactgtttcagtagttttaagttttaactgcttgaagttgaaacaaaatatagttcctgctaccaatttaactcatcattaaacattgtagaaatcaagagatttctttaatttaggcagcaaaaaaccggggtggctgagtcgagaaaaccggatcgtaatctttcggagtgttcaccgcgcaaactgatggcgagatggagctatcgacaatctaatggtcaaaagattggtttccaaaaacgacaatcttccacaaatagcaacctgtctttgaactgctagcaaaaaagaatatgtgcaaagaaacaacaaagagagaagaagaattgtatatcgctttcatgtggaccatc

SEQ ID NO: 45919 - DNA, 649 bp, Arabidopsis thaliana landsberg
accaaaaaaaacaaaccaacgcatgtaatgatgatttctaatatgtttccatagaaacttcaagaggtttcatcataaactttaagtggcatgaactagaaataaattagatgtcatcatgatattgtttattagaaaaaggtagttgggaaatatatggctgtgaattccaatattgtatgttgtggttgcgtcgaatgctaagaaatgagttgtccagagcacatggccttcaacctctcttcatacatacatttacgtatgttaaaataaagaacatgtagtttatatttattgtgtaagtagaagatatatggtgatggtggttacatttttataatgaagcagttaatacacggtgtaagtacaatctgcagcagaatgttggaaggacaacttaacgtgttaaaatccaattcctaaagtaagtgacaaaaaaagaaggtaatgaaacgaatggtgattggatcatttaattaggtcaaactctgctttattcaagtttattaaaagatgttcgtatttgttaggttgagttcttactattacaacgtcagtgtatggattagatgtatattatctcgccaccaccccttccaaaagtgacccttttttgttcttctttttttgcctttacacaaaacatcgg

SEQ ID NO: 45920 - DNA, 478 bp, Arabidopsis thaliana landsberg
aaatcgatttctctaatcgttttctgcaaatcttagatccacaaagttctcttcccaactttcgattctggtcgagcttagggtttccaccccgttttgttcttaccactatctctgtgaatatttcggctttaatcatctccatatgtaaattttagagttactagatcggtacatttctccatttcgatttcttctgagggaaaaaaataaaaatcctcaaacacaagagagtttcttctccgatttggattgggaccatcaaacgtgttttacggatcgggtttgcaatatcagtgtaccccaaaacttggaattcgaattgtttcttaagccttacaaatctcagagataatctcagtcacagtacaagtgctaatttcttgagaaattttacaatgggagaagcaacagttcgtttcccgaaagagaattcaaaaccaagaatgggttgaaaaaaaacccgtttttttttgac

SEQ ID NO: 45921 - DNA, 766 bp, Arabidopsis thaliana landsberg
gattagaaggacaaaccgtcgtgtttgagtccgaaacttagcatgaagaaagagatagagtggaaaaacgcccttcccactagaattggtagagccatgaaggttgtactaacaagaaacatactcagagaagcaagaatcaacatcactccaatcctcaccataaacctgagacttcaacttatcagaatatagattttgcgaaggaagttatctctattaaaagcatgttaactactaccttttatctctttgctcgtttgtatccttttcacaggtggtatcgctttgagatccatgcaaactgaccatagagccttcagctatgccaaatactagacaccgaagtctcatattatgatttgcacggtgttttcggggctctccaagcaagaaatcactcaacttgagcaaagaactgatagtgataacccacttgtgaactatgggtctgatggatggtctaattaaattggctaaccaccggggaccgaatattactaggcacatataagcaacaagtaagccaaacacaaactcatcctcgtacaccctgcatatcccttattaggcacattttgttcaagaatcgagaaattagaaacattatgtggtaaggtccagaggagcttacccaaattggagagggaaaaaggactggctgatgagactgattgtttttattggtaagtgaagcacaatcaccaccattgtcccatgcaaagcaaacgccaagagaatgggaccaagatgcagtatggtgact

SEQ ID NO: 45922 - DNA, 816 bp, Arabidopsis thaliana landsberg
aaaaagaaaaaaaaaacattttgacgtaacagattttagtatcattatcgttggttatcttttagaagcaatttggtcacattcacataaacctttaaatttgttactccatttgtggcttattgccttaacgattacgccttgttttctttacatatatattcatgtactttttatgttctctgttagcttttacgtcagaaatatagtttacaaaaaaatatatatatatattttcacaattccaatatcccacattctcacataactttctttgggttttttcttttctttggttttcttttgattttcattacttatctattttgattcaacaaaaagaagccgaaagaaaaatgattaaacaataaaaacttaaaaggtgtaaataattttatgatatttcacgaataaatttatagggtccgatggtaactaaaatctgttagctgttagctttttcgaaacagtgtaaagctgtaaaaaaaactatacaaaaaaattgtaaaaaaaactgagagtaaaatttttagcaacgtttttgtgattggtaattgtcaaaattgtatattttataacgttttgtaccgttttgtaaagtggttatcaatcaaaaccgtacttaagtaaattaggatatgaatgatggtactagtgaatcgagatgatattaatgtatatcaaatatttcggcttacgtcgcatctttttcactatattaaaataatcttatacgtagcaccttcgttgaagtttaaatattaatcgtatagcaatagctaattaataaagaatctcaattgtgtgatagacatc

SEQ ID NO: 45923 - DNA, 699 bp, Arabidopsis thaliana landsberg
ctaattataaagaatttcatgtgaatttcatttttaattttttaaatatatatatgagaagtagtcaattccgacattctgtattcgttcacgtgaattttttgttcagcgctctacgtaattaactaattcacaacttcatcggtccagtttgatatcaatcgcaacatatattctttagagtattacaaaaggataatgattcatacatgtacttgctgcttcaagttgatgtattttaaagattctatctttcacatatagctcccatatgaactttgccctgaaaatggtttggttcataacttcatatatctgtactttgccctaaaactggtttgatacataaccttcatatatgtacttctcaagtttttagactttatttcgcacgatcatctaacgtacgatgatttaggacttcgaatctagagattttattattagttacgagatttttatttttattttccttattaggagagttacgaaataactaaataactcgagtgtgtttcgtacacaccaattcgtagttttttttttttcgtacacacatttgttcatagtgttcttgaaacacaatatttttattttccaacaagagacgattttggaaaccaacaatatcattgtaactaacagatctttcattggcttaattgaacctataagattcttttttttttttttgttaat

SEQ ID NO: 45924 - DNA, 612 bp, Arabidopsis thaliana landsberg
tatttatcaactttacccaaaacaacaaatcaactcaccaaaaataacttagttgttggtgctgttcgcatggcgtgaagaggctgtgcagacccggcaaagtgagacgcagagacgtcggggctgcacggattgatgacgcgactgctctcgccgagccggaacaagtcgtggcgctatggttctcgctgcgcgcaacagcacggcaagcgcgaggagaggcgtggttgcgggatttttttttgtggtgcggcgtgcgggacagcacggggtgtggctgcaagggggcgttgcaaggagagcgacgtcgagaccatgccgtggattcacagcgctacgacgcacagtgggacagcacggattgagcagcacgccggaataaaagttgacgatgttgtccccgacacagtgctccaaaccgacagtttgacaacaccgaaaagaggcgagcagggctgcgcacaacacaagcaagacaacatgcagtcggctgcgcatatcgtcgagcaggtagtgcgcgtggtggagcagcggcaggggaagggacatcgtcgtccagggaaacagggagggcgcaggttgggagagggctcggctacagcaccatggctg

SEQ ID NO: 45925 - DNA, 525 bp, Arabidopsis thaliana landsberg
aaaacaaattgttgtccggttgcgaacagattaaaggtcttttatttttcaaacgaaaaaaaaaaaaaaggaaaagcttattgtacttattttcatgaggtccacccaacaacagtcgtcacactagtcgcgttggacttgcatgcgcatattatactctatagtcaaacccacactaacctacgccgatattcttatccaccaccacctcttattagctcaaaaaaatttcactaacccatagtcattattgcttatactccgtattaaaaaatgttaaaccttttgatctgacgtttaaaagcaggtttctttctatttccagataaaaaactttactcatcgagactcgtttagtgattcgaaatttcccttctcggctcaaatcttcgatctgggctttcgtgtctttttgcgttttgattgggaataaaaagaagctttttaaaaactttttccatggctggaagtgaagaagttaatcttattgagagcaagggaagacctttttattgactttgctga

SEQ ID NO: 45926 - DNA, 592 bp, Arabidopsis thaliana landsberg
ggacaaacaccatagcgttttttggggtggaaaacgacatgcagtttgagtccaacactcaaaaggatggagccatgttggaggagggtgtatatataggctaaaaacatagcagtcccttctttttactagctgaaatcaaatatgaagacaaaacaaaaggtataataatataccacaaagacgagtttacaatcatggcaccacaaatcttagccagccattttgtctctctgtgttatgttggggccaagtcaggtgcaaagatggctatgagaagagggtttcttcttaagcaggacaacaagtcattttggctgattctttgatcttggtcgtcgtctagcaaatggtacattcctcgaatctgaaacatgaggttaaccaaatcattaggctatacatcttttcagagatttggaaattttgattctgctcaaattttacatttacctcgtccttgttcaagtttgggattgtgtttttgagagcttcttcgagctgagccaaaaatatataagaaaaactcataggaacacaaaaacatatatggaaaagaggtgtgaagaattaaagagcactgaatctactt

SEQ ID NO: 45927 - DNA, 721 bp, Arabidopsis thaliana landsberg
  unsure (1)..(721): unsure at all n locations
ggaaaaaacttctctgaatcttaaagcttcattattggttaaacaaaatggagttggtttttgtacgccagaatgcaaagagttatgttttgctacaagttgttattgcgtttgtcctaatcttcaatctctaaccactagtgaagcatctgtgcatcatgaagctccactatcgattaagcaaaatgagcttagtttttgtacgccaaaatgcaaagaattatgttttggtacaggctgttattgcgtttgtcctaacgcctccaactaaattgtaaaagtactagtgtttaatatggtttcctacttaagtgagaattgtgtgaatcaaactaagacaaataaattctttggaagtactgccaccgtatgtggcgctcactctcaatcccatttttagccactgaattctatttttaatggttcattatttcaaaagaaagtgaaagatttatcgactaattttctaaggaaaataagaaaataaaatgttaagttgggtcatttaacaaaagttcctgtcattatcaattctaagaaaggtttgtcaaaagtctaccagcaaaattcatgacattctcgatatcaatggatgattttgtttgtttatgtaatttttggatgacattttaatatgactacttttgcctctntaattttagcccatttctttttggtttttcattttgagaaaattgtgacatttgaataattatttact

SEQ ID NO: 45928 - DNA, 570 bp, Arabidopsis thaliana landsberg
aaagttggtattgagtttttttcggcaggagttacatagcgtgacaactatctttgtgctaaataacatgtgtgtaatttgctcaaatgtactatttccaacaaatataataggtactacagcatattcacaaacatcaaatcttagctaagcttgactttttcaatatacactctcaagtcttaataactcgttaacgtcagtttcaatgttagatcatatttgatatatgatttgatcgttgctagtgttaaccagctgtttaaggtgttctgtcattttctccattgtctttgtgggagttattcagaaaacaaagatacattagaaagtctaatatgagtggttatgagcaaaaaaccaaatttgattaattaggattatgatgtagggatcacgccgtgattgatggaaactatatagaacagagaagcgtctctttctatttacctactatagcaaagagaacccgcaacaagttatcaatcaagcaaaaattaatgtctaatcaaaaaccatctatctcaagttgttgataatatcttacatgatcataaacaattataccgc

SEQ ID NO: 45929 - DNA, 214 bp, Arabidopsis thaliana landsberg
tttgtgctgactcatgtgtcactatacaatgacaatgtaggtttgtgtacttttggtggtaactcaatactatttggtgtcaatggtgattttatttcctcgaactttttttttttgtttgtacttatccgcaatacatgaaatgagtcatattctttcagatatgggtatctagctgaaatgagtgccattttatttctttcataatcaaatt

SEQ ID NO: 45930 - DNA, 673 bp, Arabidopsis thaliana landsberg
caacacacagatgatcataacttcaagaagcaagatttgttagtaaaaaccaaatttaccgcacagaagatctgggaaagaatcatcgactgactcaaggaaccatcctgcacactttttgccagaatagagagattgataagcagccatcccatcatcccggctctgacaaagaaaaacctacacaaggaataactcccattcatcataaccatgcataactgctgattacattattaaactgccactcgattgagtacggagcaaactgaagcaatgatgtagccttggctgacaaatagaagaaaaaatagaaaaatggattacttgagatcaatgctcataaactgaggattcagctgtattccaaaccacctatcacatgaaacaaacaatatgagaaaaaattgaagcagttgtttggaagagataagtgaaagacaaaaaccagaacttctagtttcagtagaaaagttcaaaagctaaagtcactgcggttaaaaggaaaaaagaggaagctacaaccgttctaggagaaattactcaacactctacgaagttctatagaatcatcttgtccaattcagtgtttcaaactctatatagtaccaaattatttcttagttttgctcttgcaggagtcaaaatatataacttttaacaacattttgtg

SEQ ID NO: 45931 - DNA, 692 bp, Arabidopsis thaliana landsberg
aattttttacatctttccggatcaccagtcaacatatttttttttaaccaattggccgggtggttaaggacgctaattatccttggctctataataccatttcaatcgatattttaactaattatatactattagaaatgaaatgacaaatctgccgaaagcttttttctttttaatattttgtcaaaagaagacacacaaaaaaaaagaaagtaaattgtattagaaaaaatccaagacagagaaaaaagtaaacgcgtacacagatggcgacaggagaaagagagagtggagaagaagaaaagaattgcgatcaaagaaaattagacttctttcttccaacgttttcacattacaaatacacaaaaaccaaaagataaagaaaaacaagaaatattttgtttttcgatctgaaaaagtgaaagcttcttcaaaatctttgctttagagatcgtttggtgattttgattctttattttttttttatagattcttcttcttgattctttcatatggatggacatcagcatcatcaccttcaccagctttaatatctcaacaagcatcatcttcatactcaatcgcaaacgccggaaatagcctctccggtagctgttgtggataggtttccacagtggagccgccaagagacaaaagaggtgatagggataagaggagagctagatcaaact

SEQ ID NO: 45932 - DNA, 406 bp, Arabidopsis thaliana landsberg
tcttcgcgcttgtagtgacgccgactagagagctagcgttccagctcgctgagcagtttaaggctttgggttcgtgtttgaatttgcgttgctctgtaattgtgggaggaatggatatgttgacgcaaactatgagcttggtttcacgacctcatatcgttattactactcctggaagaatcaaggttttgcttgaaaacaatcctgatgttcctccagttttctctagaaccaaggtaaagaacattcacaaatttctgagctatcaaagtagctgctttttaattgattctttagctttactttgtgtttgtttgattagttcttagtgctggacgaggcggatagagttcttgatgttggtttccaagactgagttacgcacaatctttcagtgtctgccaaa

SEQ ID NO: 45933 - DNA, 566 bp, Arabidopsis thaliana landsberg
ggagttcctggcaacggcagtgacgttatcggaacggagcttggtattgccccacggagagagatggagatcgacgattgatatgagatcgtcttcgaagagcttcgcgaggtggttaacaatgaaggaagagcagtagggacagagagactcgtagtacaggcccaccgagactttaggcgacgaagatggaagagataccccagaataatcagatgatgatgcaaaggggaaaagaaaaacgtagcagactaggactggaagaagtttgctcggcatcgacgccatggatgcaaatgcaaggtttttgtgtcgtcgcattcttcttcttcaaagaacattcaataaatatgaaagagccgagagaaattagataattgctattcccaatggtaccaatttattacagacacgtgtagcttcgaaagccacgtgtctcactttcattctgtaaccgtcaatagttcaacacaaagtaagctcaggctttgcaaaatttgggtaaacttgtgaactcgacttatcaaaaaggctcattttaaccaaaattgttaactccaaaaaag

SEQ ID NO: 45934 - DNA, 626 bp, Arabidopsis thaliana landsberg
  unsure (1)..(626): unsure at all n locations
gggtagtgagaaatagatagagtttggtagaagaaagggtccattggttgttgcttcctttccttcatttatggttttcattattttctttttctttttcacatatctctttctttcctttttttatcttaaaaacattaaaagttttctcctacctccttctcttacaacttttctattcctgccaaattaactacaaacctcactttccacttgtcatgaaacattttggatttatcttcagtttcacgttcttctcctagatctttaattatagatcttaacaaggtatcatctctaccagtacaatctaagtattatgtgatcaagtatctttgccatactcgtaatcttttttctccttatttggcttatctccaacattggataacgagttatttgggcaaccaacctaatcttacctcataaactgataatcttaatcgtatacaaattaattacaatagagctatacgatctaatgatctatatttttatcaccgatcgtctagatccggtatttgatatttatgccaatggagttaatttgtaaaagaaaaaaaaaacanattctatatattataattcagcagntaaanttctcatacaagttgaagatttacttt

SEQ ID NO: 45935 - DNA, 705 bp, Arabidopsis thaliana landsberg
gaggattcaattatgaaggatcagtgttttcccttgtcgtttggtgcagttaaaagaagaattaaactactctgctctctatgaattggtttgtttatttatttttcatgttgattacttagtgtttttgctatctaccttgtttcaatgggacaggaagtggaacaaccttaaggctaaagcaaatgggaatggagttcaccgtgtgggtttttaagcatgtaaaaatattcttttctatacttcagcctgaatttacgtttgttgtgtgtaaaagcagacagtatgaactcaatctatttattatttgtgtgaagaaacaactcaaatgttttttgctcaactcaatgttagatgttttttatggaaaattccatggaggaccataccaacaatagccttttctcttttttcttttctttttgtttggtcttgagagtctttgtttttgagtatgttatgcttacatcactggactcgtttaaaatgcaggggaagatagatcagatgaaacttatgggacctgtcatactgaatgctattctaaaaatgcttgatggtttcacaggctcagaaacaggtcagcttttataagacaaaagaaaagtcgcgagttttctgatgcatgtgctcaaatgagaattgaagtagatatgctacattctttcattcagatgctctatcgagggagaccaaaacattttc

SEQ ID NO: 45936 - DNA, 579 bp, Arabidopsis thaliana landsberg
cctcactttacatcgacggccacttctccggcgcgacgagtactgaggtttgtctcaatctctgttttttattttattttatcaaaagtctaaattatggacaattatgtactctaaattttataacaaaactaaaaaatagtttaaattttaattaattaagtactttaaatttaaacttctcatttaaactcgaaatgatatcctaactcttaaattttatatataagcaacttgtataatttaaaaaacatttggaagatttaacttatttttggaaaagataattaaatttttagatttttttctcaattattctaaataaatccactactaatccataattaaataaattaccatacagtaaaaaagagaaagtaaaaaaacattttatggaaaaacagaaaaaacatcttctgattagagcagagacacatggccggctgaaaattgtctgtttgatatgactgaatcatgaaagtttttcaggaagtaccgtaaatatgttttactttagatgacggatatgcccctatttccgagtgaaaatctatcgtagagcttggttatggtgggggt

SEQ ID NO: 45937 - DNA, 843 bp, Arabidopsis thaliana landsberg
tgacaaacggaaaagttgacaagttacttattaatttttctggacgtacgttttgagttataagaacgggttagagttacggttcaaggcatctcccttaccacttcgagcaaacaacaatcgaccaaactctctttttactttgcctccaaaaaagctctcacatggctgcttcttcctcttcatcttctcccgctggggcaccaacaacctcaacagaaaatcaagtgttcatcagtttccgtggagctgatatacgcgatggcttcctcgactatctcgtgcatgaaatgcaagatgcaggtatcaacgtcttcatagacgaccacgaggtgagaggtattgatctagataatctatttgtgaggatcgaagagtcagaggtggcgattgtgatcttctcggaaaagtacacgacttcgaagtggtgtttaaacgagctggtcaaaatcgatgaatgtgctgctaagaacactcttatggcgattcccgtattctacaaggtggaaccctccgaagtgaaggatatcgaggggaattttggcattcatttcagagctctaaagcgcaacaatccatacgatacagtaaacgtccagaaatgggagaaagctatagcgtctatttcagtaaaaactggcatgccgttgtcagaacacgggtttggcttttgtctctctctttgctttttttttcaaatttttcccataagtagacttctagaccagaatatatactaatctctgaatctgcaatagtaaaattataaatataaaaagaattacttatcacctctatgattttttttttgttttttttttaaagaaactattcagtaaactg

SEQ ID NO: 45938 - DNA, 614 bp, Arabidopsis thaliana landsberg
  unsure (1)..(614): unsure at all n locations
atcacatgaatttttgtttctatcaatcatttgtttaaaatactttgtattgtagtttggacctaaatttcatacttttacagcagaatgttgtcagatctctaataacagaatctttaattttctgtttttcttattaaaaagtttcgatttttttttcagatttccnnnnnnnnnnnnnnnnnnnngccgagttgaaatgttttgaaaaaattggaaaaacccaaaatattttcaagtagtaattaaatgaagttaaatactgttggggctagttgacgaaaacaaaaattgttgaaaaaatgatctaaatctaaagctatgcgggacccgctaatctcttaaccaatgagagaacgacgtatgtcacggaacatgtgtttctttgccgcaccaaatccctcatttaatcaaaaatcaaccaaagatccaaatttcgaaactttttagtttttttgcatatcgcaatttccacaaattttactgttttccttggctgttgntgtgtctgaatctccaagaagaaagagttgtgtctttaagattctgcttttacccaaattgngtgttctttttccaagtttctgagaattagggtttncgcgaggactctg

SEQ ID NO: 45939 - DNA, 670 bp, Arabidopsis thaliana landsberg
  unsure (1)..(670): unsure at all n locations
gacacggtgcctaatcatagaactatacagaccaaagcattcatttttcgagctcgaaacagcagatatcattgtgttgtaaacaaaaacattcgggttgggagtgaaattaagaaatagaagcttcgccaagtcgagattctctgggtatgtgatcgccgagaagaagataagacggctcatgggaaacgtatcgcagatgagattgaaacgcatgatctgtgccaaaacctgcttgaattgattcctggaattgcaattctcgagcaagacaagagattgatgatnnnnnnnnnnnnnnnnnnnnnnnnnncatttggttgtcttgctcccacattctgtgccaaacaatcgaaatcctcgccgcaacaacaacacaaagcacatacttctatttttgataacacaaagcacatcaagttatgtaattatgttcttaatttaaaattaatttaggccgcatcgatatatcatctggcccattaaaagcccgattaatatggactattctctgtacttgaagatattgtttttagtataagaagaacccttttctatgggatttgtatgtacatctaatacatctgccaatttggttcgatttgttctaattatcttagataataggtgtttaactttacacgaatcgtagaaacacaatgaaagagct

SEQ ID NO: 45940 - DNA, 605 bp, Arabidopsis thaliana landsberg
  unsure (1)..(605): unsure at all n locations
atatatcattcgtaactgttactacagtgaactagcaaaggttagctgggtatatatgccttgccattgagctcacaaatattgtgcaagttttgtttgttactccttgatgaaaagacttattatataacgaataagaaaacatcctgagttctcaggatcctaactaatgatgcttgaagtgatttccatttcttaaatcctagccgaagtagcagtaaacgaattccataaagtatgatggttcccttacccacgagctaatagcttttgcactgcctcatctatcccactttcagagataccaacctgaaacaaaaggtggtgtcaaaatttatagacacaataattcaagcaggccagttgtttcaactaatttacctgtctgcattttcccacaccactcatggtcatcttccagtcaagctccttgtgacctaattccgcatctagctcatacagctcataaaatttcccctgagaagagcataacgtaaacagatgtaagtgaacaaatcacattgaggaaatggattgaacactagattaatagttactaaccactntaaagaaaagcacaatgtccatatattcactcttaacac

SEQ ID NO: 45941 - DNA, 651 bp, Arabidopsis thaliana landsberg
gggacctggaggtggagagtcaacgtctcctgctgctgcgccagcacctcaacaacctgagtatttaactttgttctttgtctctttcctttgtccggttttggggattgaagtttcgtagatttatgttgggattttgttgtgttttcagggtaaccaagaagaagtcgaagaagtgatttggtgttgaacttttttgcgattgaatctttgagtttacctgtagaagaagcgtctttttatcttttatatgattttgtcggagattcttttcttcaaaaatatttcttatgttatggatctcacattgcttattatgaatttatcagttttgtttctctttaccttttctctttcaatagtttctgattccattgtcttaaaacatcaaagaagttgagtagtatcacacttcccaattttggagttacttgttcaaccatgtatttaacaaatatgtaaatcccaatttgattaacttgagagtttagtattgtttttgacaacaacataaatgatttttaatgaactgactacatgtaattcaaaacacggcgttgaatgtattaaattcaatagatttctattgaataaggtggggtcagctttttgtttccccaatattaatcctgttagctttgatttattata

SEQ ID NO: 45942 - DNA, 793 bp, Arabidopsis thaliana landsberg
tttcttataagacccaaatttagcgattttgcggagaagtatgctcatggacttgaattttttcaaatttgggtagtcttttcgcacttccgccattaaagcccatgcttgatcgaaataacgcatccgtgcgagaatgtgaagtgttctctcgaaggaatcagaggtgggagaagatttagagcttttaagtgaatacttgaagaattcgagagctttaaggccattggaatgagcagcgaatagacgaccgagaacttctgatacaaattccggtgacagagaagataaagggatgtgcttggcgagaatgggttgaatcggatgatttgggaatggatgatcattgatgattattgtaatccgttcgatctctgttctgtttatcgatgtagatgataaagatgaagatgatgatagtactggagcaagaagacgacgatacgaatcggaggagatcttctgaagcatttttctctctaccagaaaattagattccgagaagaaatagaaaccttaaagagcccatttcagttaaccgaagcgaaccgaaccgaaattatgccgaaggaactgaaatcgaacatcggtttattttggttattaaaacttgttggacggctccgcgagcttattcatcggcatctgtagagaaggaaggagttcgtttggcagcgacgcaaatttcatgttttgaactggtaatttctcattaatccacgcacagatatgtgagttcttgttcgtgtatgaatttacttgcggttctctagctcaaagtttggttcacttt

SEQ ID NO: 45943 - DNA, 567 bp, Arabidopsis thaliana landsberg
agagtgttatgcttctattaagaaactcttgaatactctggtcaccggaaatagtgtattaatgtaagtatcacaaaacttatcttatataaacttttcctataattagcttatcctatatagttgtcctttcctaatttatttgtctttgtacaggctcataaccacagttttcaccattattgacacacatatagagaaagatacactcttgacagagttgaatttgagtgttcttcctgatctgcatggccactttgttaagctaactgaatatgtggtaagccttgtagccataccatgttcaacatctcatcacccttggcgcgaattcaggagaataactgaaattagccttcttgcaacagctgcaaaacaaagacaaggacaagattcagattgttaatgtcttgctgaaaatattagaaatggtgacaaaagacatactaaaggaagaggtttcaaggtaagatcacctgactttaaggtttttttgttgaatggtagatcaaatgtttttttttttttttttttgagcatgctcatttataaattcctttatatagc

SEQ ID NO: 45944 - DNA, 699 bp, Arabidopsis thaliana landsberg
tgagttgagtcgagttgggttactcattttgacactcctacatataacattacataatcgagacaaagagtcttaaataaaaacacacatacataatcgaatctaatcttataaatcttcctgccgctgcttcttcttcttcttcattcttcaaggttgattgttgtcacaatcatgcacattctagtgaattgggtctgtgaaatgattcacctccaccttttcattctttccacccttcttcttctgtatgtacttgctattgaatgagattgtcgtcacagatttcctaatggctccatatttcttcttcaaataatgaaacaccgttgcaaccttcttgtcatatccttcgtcagcttcgagctccacttctcttctttaatattctccaacgtaacattcaccttcctcgccgcagatgcaacagcatggctcgtgaatgggatcttcctcttggttgggaaagatccgcacttaacaacagccttaacagctttgatcatttcttgaacaagatttttcattttgcgctttgattaaaaaaaggattaatgtatgagttatgagttatggaatgctcatacatatagaagaagaataagaaaaagaagaagaaaatattaaattttgaaatcatcattttgatgagaaaaattggatcgtgtactccttggggttttagaggtcacatagagc

SEQ ID NO: 45945 - DNA, 611 bp, Arabidopsis thaliana landsberg
  unsure (1)..(611): unsure at all n locations
gggtcggtgaggagtggtctagtgcaattttctatggaggaccaggaggatgcaccattacttaacaaatctttaaggtcatttacgtataagtataccttctattttgatgtgttaaagaaatatatagtaaaataactttgacaaaaataaggaaatagtaatactaatatataagttttcaaatactataaatgttaaacttctttttacatcttctttattaagcaaatacaaaattgatttaacggtttgatacatatatatgcatgtttgtcaagtcttatggtcatggagatagcaagtcttaacggtttgagaaatttgtttgccttttcttttagctttatattttcgatattatggtcatggactggagataccatattagttgacatcactacgtttttagatgaagagatcctatgaaagacactacaaaatgggcaatgcttggccaattacatcattaattttcttgcttttgtttgctggcttttgtccgctatttacatattttgtgtcacattgtgagcttagttgcaaggactaagatttgtntgtgcatttgtatcgataagtctttgggacttgggagtggacatttgtaa

SEQ ID NO: 45946 - DNA, 966 bp, Arabidopsis thaliana landsberg
agaatatctttacatttttttaacttgaccaacaacaaacacaaattagtaaaatctaggatgctctttttactatttcggattgtgattgaaaaaataattgttgttctctgaacatacaggttatgatccagatgaatgcttaatgaagtgacaaaagtctactgcatatatccatagccttaaactagatcccatgcacctacaaatattggatggtggtatctataatatattgttaatataaataaaaagtgaaaaaatcacggtaattttgatatcatattaaaatgagagcagtaattattgccaatactgttttttttttttgtgattctatttctgcgtggtctaacgagccaatatccagcaactaaactacaaagccaatatgggaatatgctagccataaaaggaatataaacgagaagcataatctaatttgcttgaggaatcataaaaataaggtactaatggtgataattaaacgatggattagaaaatgtagtcacttttaaaaatgaacagaaaatgagaagtgcattgtcaaatcgatcgcatcaaacgattctttttcatatagtttgagataaacatcagagaacagtccttgagtaggttcatagacaccgtcctacacttggaaacttcaattaattcttctctaccccacttttcttattttatcaatttcttattgcactcaaatgtattctttgtaagttgaaacttatctctcattatttgtataaaaacccaatgggctttagtctccaatattatagattcggccccctcgttctacaattgttggagtggttacgacttagttggttacacatagtcgatcatagttgtatacttgttagcagccaattgattttttattctttggttctcaaaacatttgtgacatgtcattagcattgttagtgatttaataatgatcctattattaaattaaac

SEQ ID NO: 45947 - DNA, 519 bp, Arabidopsis thaliana landsberg
tcttctgttatgttgttccaagattctgaaccttttagaatgtgaagaacttatcatatttctagctttgtttttaatagcttttcataagataaatatagacactttcgagttcttcttctttttttgcgtgtaagtcacgacaccaatcataaccaaattttttatattagcttgtgttccgatgatattttggatctcgtgttcgttttatttgaaacaagagtttgcttcaatattgtgcacgtctaacacaccgtgtaatataattagtggaggaatctcgaaacaggaaggtgaaaaaggctagtcaagcttgacttatgtaagttcatcacagtaacagtttcttctcctctttacatggcgtagaaactttcttttgtgtgaactatcgactgtccacatttactgtaattatctttcactattcacatccattcacatatacatcacaatgatcacatcatcatccctactcaacattaggttcacaaatcacaattacattcgactaca

SEQ ID NO: 45948 - DNA, 458 bp, Arabidopsis thaliana landsberg
tatacctatatgtatgtcatacattatagatgtatacgagatatattttaattttatataaatttatcagcattttagtacacgcaaatgtagttaaccgactatttttataaaataaaacgattatatttttactttaaaaatttatcagtaaattgtaattaattagtttaatggtttttttttgtttttttctacagtattaaacttaattatatgaaatcaaaagtttttttctacaaaaaaaaaaagaaaaaaaaaactggagatgtgtatttaacgataaaataaacaaaattgcaatgtttggttaagtggtccaaagaaaactataatgggtgaaaataagcgcctactaaaatttcagggacgaaacatgacattgtcactctttgaggtaacagatggggtcctcttgcccgaattcggataaaaccagtttaacccgacccagatct

SEQ ID NO: 45949 - DNA, 586 bp, Arabidopsis thaliana landsberg
  unsure (1)..(586): unsure at all n locations
aaatgttgccaacattaaaaaacgcatttgctgtttcccatcaatattggagtatagtttatataagatttttaacaatattataagctagttaattaatagagttaatctttggtaaaaaaacagacggaattttataactttcgaaatcatattgatctgcatatatatatatatatatatatgtnnnnnnnnnnnnnnnnnngagataaaaattttgacggatttgctaactaaagttaggccacaaagaaatcaatcaagtttgtgacaatatctttaatagtatacttctcatttacataattcaataagtcaaatcttattgtgtcttggtgtgactgtaagtcccgagtctgttgttcaacgcgctagcacttaacttgttaactgtcacgttgntcnnagccanaatcaattatcacgttactaatgtagcgataaattcttaaatgggccgtaagccaagaaaaaacaattctttagtggagctccttttcgcaccttattacgttgtcatcgtatacagatgcgtatatatattcttttttccgtggattgagccttctagttctctgaattgttg

SEQ ID NO: 45950 - DNA, 562 bp, Arabidopsis thaliana landsberg
  unsure (1)..(562): unsure at all n locations
ttcttcttccttctctgttctcctccacaccacctctatatatataatagagttccatgggggctggagccctcagccccttcagatccgcccttgtctaggagtgcaggaagtgcaggacacattgtttatgttataataacacaccacagaacgggtacttgattagtcttgtcaacacatttagattagagatgttggccgccttggtcaagctggaccaacagccatgcgtacatcaaggattcagtgatcgacgcgagcaacagcaaccaggagggctgttcgtgccagaacacacggttgatatgtgctaatatatagacaagtgatgagtgattgtttaaaagacgatgatcaaggctctgatttagtgtttaaactaataatcataccgtgagcgtgatattgtacaacatgtctcttgttgtctcataatatgtaagtgttaacatatatatatgataaaaacaatagacagggtcgagtgaatttgtaccgatgnactgcaagtgatggaggacgaatgagaggcttgaacatagggactagacaccatagg

SEQ ID NO: 45951 - DNA, 621 bp, Arabidopsis thaliana landsberg
gattaaaccgaaaaaaaaaaactcaattttagtagccgttgagaaaaatctaaatggagaatcgcaataaattgggttagatgtattatgtatatggaataagatgaaataaatacacttacgacgatttaattcatcagattcagagtatcaaacatattctctcctctaaaattcaccaaccctccttgcggtttcagtcatctaatggcacattaatggaaaatagtttaagccgacacgttaatacatagctagccttacctatgtcaaacgtccctttatatatttcatttagttttttttttttaattataaatttggttaaacaacctatatgatgtcaatacacataaacatgtatataattttatatatatatatctccctctgtagggtaaattgcgttttgttttccagatatcaacaatacgcattacacacacatttcatttctcctaaaatgtgtgtagtgtatacttttaatatggagctttatcaaatttcaatttcattaacaagagaaaaaaatcagttattattacttaatatggagaatatttttcccttacatgttaaaaaaagcaaatgacatttaaagtaaatattcacaatcctatg

SEQ ID NO: 45952 - DNA, 868 bp, Arabidopsis thaliana landsberg
cacaacatatttaactctatttttcttcggtcaaacatatatttaactcttttagtatgtttcctacactcttgggtccctatctcatctcctgtcttacatctaataattataaattattagttactttttgtcggcaactaaatataatattataagcaaaaacatgtccaaactgttttctatagacgatgctagagcttctctagctagagtgttgtctacatgatttgctcctctttgaactcgtatgaacttaaagaaacatgcatttttacataaagagagaattatactgatacaaggagcaacaatctgatgtccctaatccttagaattccacgtagatgttgaaagagctacttcttattgtgagtaaaataagattttgcaatataacccccagtctaagagctagctacctctgcctctaaaggagttaaaatggaactaagagaatgactctatgatttcaaaacttaggatgcatagaccagcttatcccacttgtgttgagcactaatgtccaagaaacatcaacaaagcatcactggttattagctttgccaaaagcttccgtcatagttgtagggaacttgattaggaagtgtatttcttaattgaggattctaataaaaagaatgcaaaagaattaaagagagatagggagagagacatgtgtctagcaggatgtcatggtacacccttctagagcatcaaaacattgctcaaatgcgcatttgctgagtatgtgaagtcgtacgaacaaggtcatgactttggcatgatactctgtttttgatgaagagttaaacttaagcttgagaagttttttctatgtgcttgagattgtgatggaggcgcatat

SEQ ID NO: 45953 - DNA, 635 bp, Arabidopsis thaliana landsberg
tctggtggtgtggttggaggtgtctttggtgtgtttggaggagttcccggtggtgtgtttggaggtgtttctggtggagtatttggaggactttgtgggggggtgtttggtggagtttctggtggtgtgattggaggagtttctggtggtgtggttggaggtgtctccggtggtgtgtttggaggagttcctggtggtgtgtttggaagtgtctctggtggtgtgtttggaggagtcccggtggtgtgtttggaggtgtttctggtggagtatttggaggactttgtgggggggtgtttggtggagtttctggtggtgtgattggaggagtttctggtggtgttgttggaggtgtcccggtgatgtgtttggaggagttcctggtggtgtgtttggaagtgtctcaggtggtgtgtttggaggagtcccggtggtgtgtttggaggtgtttctggtggagtatttggaggactttgtgggggtgtgtttggtggaattccaggtggtgtggttggagaagtttccggtggtgtgtttggagaagtttctggtggtgtggttggaggtgtctcggtggtgtggttggaggtgctcaggtggtgtgtttggaagagttccagatggtgtgtttggag

SEQ ID NO: 45954 - DNA, 810 bp, Arabidopsis thaliana landsberg
catgccaaatatgtaattcttagacttaggaaaaaatggtcatttttttatataataatacttctaattaaatggtcctgactaaaacaatgtttacttaataaaacgtataaacaaatagattttgttacatataaaagtaaaagtataacctaaaatgcatgcagcaaatttctggattgttagcatatagctcagaacaatcggaaacaagatgtgctgccacctgaaacaaacatactaatatatgattattaagttgacatgacctaaggggaatctcgtgagattcgttttttgacaacttagctttggatccagaatcaaacatagcccacacaaatgaaaataggataacatggattccacaaactcttcacactttttatattatatatagtacttgtgattttataatataaaataaactatatcaatgatattagctagatatttaattcgcgttgaatgtggatactacaagagtttgatagattaaattgattcaagcaaatattttagtgggaatttgtaaaacactacatcttcgttatcgacttgggtatgagactaagagacaatatatatatatattctattaaaaaaactcactgttacatgcgataaatggatgaataattcttgcttaagtttgagtatattacttttgttgtgacaaccgaaatagtgtcaagaactttatatcactcggtggattactttattagattgaatcttaattgataacgaaatcctttctttttctatgatttcgattatttatgtaatcagaaaattttaagttttttt

SEQ ID NO: 45955 - DNA, 601 bp, Arabidopsis thaliana landsberg
tggaagagaggaatgaccatactgaacataccaatacccacaccttcgttgatacgaccggcaaagaagtaggcgggggtctgggcaccagactgtaggccagtaccaagagtgaagatgacgacggcaaccatcatggcgtactttcgggagatacggtcagggaggacaccgttgatcagagcaccagcccaggcaccgagctccaacgcaggcacgagccaaccctgaatagtcgatccatcgaagtaagggaagtggttcttgaagttctccatgacaagaatgggacccatcacaccctgatcgtaaccgtacatgatacaacccagggaagcgaacagacaggtcgagaagacataagggttctgcagcatacccacgataccatgggccttcttcgcgttggcgcggccaacaacagactgactaaccagcatcgttgcgagagaatgatggaggagagcaaaatatgatgcaaagagacaacagagaaatgatcagcgagcctggaagttctacgacatgggcggatcagctagattatatagctgtacggagtagatcctcttatgactatcaattttttttctcttttttt

SEQ ID NO: 45956 - DNA, 585 bp, Arabidopsis thaliana landsberg
tcctttccaaattattattcccatttagtattgaatcaaggttgggagagacactagatacgtttaatataactaaaattaacaaaaaaccgtgttaaattttcacggtaacctaatcgaatagagatattgtaaattttccaaaaagacatcaacgatacattgctcattttgttaatctctagacattattcattatttagaatcaacatgtcacaacctagctaggttattctttggacttaccaatgtacatatgacacctagtaatcgtcatctgtatccataatcttaaccttgccatataaaaaatttcttatgggtttattgcaatatgcatgcactaaatttatgacctttaatcgaactaatattaatttaacatttttcttctaaagagagtccattttgaagggatgttgagatagttcataacttgatctaatattagacattcgattttctaattttcttttgtcaaccttcattcacaatatatattatcgtgatttaagaatacttaagattacaccttaattaatatataagtaactggactttgatcagattttttttttttcatac

SEQ ID NO: 45957 - DNA, 912 bp, Arabidopsis thaliana landsberg
cgaatcagatcaagagaacagtataaaagtttagatctttaagtaactttcttctaacctgcccaagaggttgcctagattgcagcaccaaccactaaaaagtaaagcgcatactgcaataaccaaaaacaagttagtgttttcaaagattgaagatgaagagaaagaaataaagttagtaccttgagaacttcttccatcatcttgtcaacgttattagaattagaaccaaaggaattaacaagatcggcgaagaatcgaagaaacagaggtaaagagcagccatggacaaaagcaccaacagagccaattcccatcaatacataatctaatccgtcggcgaatctgaatagctctttaaaagcaactccacgaatctctgctttcttaggctcttccaccactagtgtcggcggaggaggaggagcaccaccgtcattatccatttccggtgagtttctctggagctctgtttctctggagcttcgtgagttgttgttggtgttatgagggagaagctcaaggccttgcatttcggaccaacgccattgttcaagtgacttaatttcttcttcttcgtctacttttttctgatcagattgttgggacatttgtgtagatgttttcttactttgctttatagagaacctcaaaaaccacaacagccctgaagaaaattaataaataaataatatactattttttaaaaatcttattttgttttcttattaaaataaaataaaactcaagactctaaaaatcgaatagcttcttcttcacaacacttatttttataatcttccatcttcagttttcttccgctctatatgctttctttaatactttactaatcccactcttcatttgttttgatttatttccttatttattaacgttttttaccgtttttta

SEQ ID NO: 45958 - DNA, 868 bp, Arabidopsis thaliana landsberg
  unsure (1)..(868): unsure at all n locations
ctttttgcatggttttctatgattttgacaacctatagattattatactaagtgcatcggcaaataatctatcgaggttgcgagaacgagcagaggaatatgccgcactgatcatggaagaacttgcaccagatggactctattctcagtacatagaggtggttccatcacttttaactcccaatcttgttaaatgtcctaacagaaaacatgtttaaataccgtaaaacttttgatagtgtgtagatcagtctctttctatgagagagagagtagaagggttctttgttaagtttgaccttagtaagtgatgacgttgagctctcttacctttcaagttctctgatagggacatttgactgagtcaaaaccaatgagcttaaagttatgtgctatgcaagtttgtttttgtatggaattaatataataaaaggttgacgaagacaaaaatgtagaggtccacatatagagcttgaacaaatattgttatcaaaaataatctctagtggtgtagtggcgtttaagtgtatgattaagaatttagataatcttactgtgattagtaacaaatattgtttgagagactgcccacttgcttgagactgagacaagataggtagtagaactctgtcaacattctaatatgttgtctttgttatggatttgaaatgatgcagttaaaggacctagagatactgctactagagaaggacatatctcatagttacagcctaccgttcagccagacgagccgagccttaagccagaacctaaaggatagaagatggagaatgagcagaaacttgctttactctttgcaagataattggaagaggatttgggttttgacattgtggttngtgatcat

SEQ ID NO: 45959 - DNA, 913 bp, Arabidopsis thaliana landsberg
tgtccaaactcttcaccatcttacctactcatccgtccaaaagctcctcaactttttttgtggtttagtttaagtccaaaaggtaattggagatggattggtcacgactcacgagtgctcaacagccatattcggtttggtatcaataactttgattatgatgtccaaaagaaactatgatttagatatggagtttacgccactttcattttaaacaaaaataacattttaaaagacagttccctctcctccaaataaaagttgtttacaattatagtaaggataatgtcgctccaaaagagaaatgtagttttggtcctgtttcaattcttggttaggagggattaaatttttccatcgcaacgggaagaagtctcctcccggaatttgtattatggtcagtagagctacaacatatagctccccaatttagagatatttaaattgcttaacatttgaacttttggtgtactcaatattctaaaatacgtcttcggctgataatgtagtttttatttccggaagaatttatgatgacgttttaagtggacttaaagatcgtgatcttatgttagagacataaatcaaatcaacataagcgtaggccggtgatgcaaaagtaaatgctagtttagatggataatgattctgcacactcatactttatatatatcttagttctattaactttcagcctaattttcttttagaacttttgttttgaccagattatgcttattggattttttttccttattgattctgtttttttttttttgtttgtctaaaacaaacctaaaagagatgtgaaagaagatgaggtcattttcaacaaaattttctatgattaaaagtaataactcaactggaaaatcgacgatttctagagaattatgtggagaacccgacgagt

SEQ ID NO: 45960 - DNA, 787 bp, Arabidopsis thaliana landsberg
atagacaaaaagtttagaatttctcacttttctctcttatttttttttatgttttattagtcattaagagactcccattaaatatgtgctctcttaatgtctcattggttcagttcctacttcctacaaaatcataatttggtaaagaaaaaaagctacatacaattgcataagcatatgtagtctataagaccagatatatatgataattttcggaatattattacttagcattttgtttaaatataaccacaatcaggctttaatttcagtttttgtcttgtcatttgcatctaacataaaatattatattttactctaaagaacaaaaacgcacatcattattattcaatcaaaattttttatgacttttttatcaggagataatatttttttctatttttcgttatgtttaatttaaagtaattttgatggtaaatcaaaatatattttagataggtacaaatcattttagcggacaaaaaaaatgtacaacagcaagagggtgatttagcaacaaaatttagcttgaaaaaattgatgtttatagattatgtctaaatctgaataaaagaataaataattaagtttgatagatcatgcaagagggtggtttagcaacaaaaataaacatattaccctgtctcataaatcattgagattatcaatataaaaaaaacccaatttctgtcttaatattgtccccaccaatgtgagtccatatctgattctctgtttctttcttcactacttggaattatataaaaatatgtatatacatattaat

SEQ ID NO: 45961 - DNA, 661 bp, Arabidopsis thaliana landsberg
tgtttaaactctgactggatctgctttttatctttttggtagaatctttgttaattgttctcttttcacacaggttacacctttgacatggcttgaagcttggcttgacaatgtaatggcaagtgtgcccgagttagcaatttgttatcatgagaacggcatcgtccaagggtatgagcttttgaaaacagacgatatatttatactaaaaggtatctctgaggatggtacacctgcttttcatcctcatgttgttcagcaaaacggccttgctgttttaaggtttcttcaatcaaattgtaaagaggatcctggagcatattgggtaatgttataattctctgcgaactattatattgtttgtccgaattatttatgttcatgtcattgcttaaaccagttgatttggctatctccttttcagctctacaaaagcgctggtgaagatgaacttcaactctttgatctttccattatctcaaagaaccattcctcaagcgttcataatgacagcgctagctcaccatctttgattcacagtgggagaagtgattctatgttttctttaggaaatcttctttaccgtgtcggtcataggctctctttgtcagtggtaaggaagcagagcattagtctacatgaaacgtcaataagaacttaa

SEQ ID NO: 45962 - DNA, 419 bp, Arabidopsis thaliana landsberg
cagagcggggggccagccagcgcgggcctgccggtcgtcgacgccgacggtctctgcgcgcgaccgatggtggccgcggcgagggtggtgtcgggggtgaaggcggagggtctgctgcggggcgcgtgccggcgctggcccggcggccgcgctgcattgtggggctcagcacgcagacggagacggtgctgctcgtccgcaagaaggccaccgtcaatgacgtccaggcgctctggtaagctagctagctatcagccgagcccaaccactcttctgcactgctagcatgtgtgcgtgctgatcgtcgatcgacggtcgttctatctctgcccctgccgcatggtgctggcgatggcggccgcgtcgcactgggcataccacctgctgcagctgctcaagtgcctctacctcggccgcgg

SEQ ID NO: 45963 - DNA, 612 bp, Arabidopsis thaliana landsberg
gatccagatgcacatatatattttgttctcgatcttaaagtaagagcaagggtctaaaaattttaggttccagcggcaacatttgcatcgaggattgctaagggtgggtgttgcagctggtggccgtgacctgcctctccctggctagcaagatggaggagaccctcgtgacctgacctccctcctagacctacaggcaaggcaactagaacactacttgtcatgcatacatgtcattatagctatgtgtttagtcccaataataattatgactctcgtgagttctttcttaattaatcaaggctgatgaacattgattgattattgttgattgcacgtcattgcaggttgacaacaccagcagatacaactgtttcgagcctaggacagtcgtattatggagattatcaacctgatggcgctcaactggcggcccggtcgtattcgattgttaatacatttaataaacagacatctgcaactcttacaaatttgtacacttagtttacattttcttttttggtgggggacaattttatttagagtctaggtatttttgcttcagtgcaattcctggaagatttgagcaagcaagtcgttgaaatttaacat

SEQ ID NO: 45964 - DNA, 696 bp, Arabidopsis thaliana landsberg
  unsure (1)..(696): unsure at all n locations
aaattttttagaatcaccaaattacacctttacccttatattgtttttaatttgtttccgaattttaccaactgtttcaattaaacgtaccaacccatttctggttggatacaagcgggattcattcctatataacatttttaacggtatcattcaatcataccggtccaatttatttctatcatgctatctatataacattttcttacaaaatgtatttctctataccttttcacattcgaaacttcaaaagttaatgtgtcaatttaattacgcataactcgaaaaatgcattttaaaacaattaaaattaaatttatcttaatttgacgttataaaaaaatattgaatatatttccgagaaataataataagagaaaggactataaatacgtctctagtgtgtaatgtgtaacacagacgagagtcctcaaatccattttctctctctatctctctttatcccttcgtcttcttcctcggcgacaccacttgcaggcgctaactcgacgaagaaggaaaaggtgagagaaactctctgaaaactgtacggatttaaacgtatatatgtgtgtatgtatacgaatctgatggtttagttttctggatttttctccattctctgntgattctactttttttgtttgtttgtttgctttgtttctctgtgtttcacgctgcactacgctccagctt

SEQ ID NO: 45965 - DNA, 647 bp, Arabidopsis thaliana landsberg
tcgatgtgctcatcatcgttgctcaacaaagggctctccattaatcacttatgattttcttctacttcttttggattcaatcaaaatctgcgttgcaacacaaagcatatatagacctttcaaattagacgccaagaccattcctaagtcaattatggtattcctacaatgaaataactattgaactacttggtgctaaattatagtatattctacaatgaaacacaaagcattgactgtttcaaattatttggtgaaattattattttaagaccaactacaccaaaaccaattatataaagtcgcttttgtttattgaatttgaaacacaaaacatagacctttccaattcgctggcgctaaattgttcttttataccaacaatttcaggaagatatataggattcaatcgtgacacttggctttatttgataaataaatagagtattacaacattttaaacaaaagaaagaagaaagcgacatgatcattcttctttttatctgcataagcatctggaacaacaaccacagataatgcaggcaaagattccaaagcataataggattatagacgtagtcaaatttatctcatcagtaatgtcaccaacgaagtctatcgattgggaaagatatagtatcatagga

SEQ ID NO: 45966 - DNA, 891 bp, Arabidopsis thaliana landsberg
  unsure (1)..(891): unsure at all n locations
tgctctcagtgattcgtcggagattatgagccggagtatccattgaagtatctttgtgaccgtgtttctgatttgttttcaaagtttgatagattggttagtcctaagagtgataggaagtatacattgacgaaggagataaagggaagtggtgagaggaagtataaatgggaggcggagattcaaggaccgttggagaggaagtataagttggaagctgagattgaaggttcgggagagaggaagtatagatggacgacggagattaaaggagggaagaaggatgatgaagggttaaagttagctgctttgaagaaggagaaggcgaaagctaaagctattgctgctgctgaagcggagaagaagaagaataagaataagaagaagagttataattggacgacggaggtgaagagtgagagagagaatggtgaggtttcgcatacttatatcatcaaggctactactggaggagagaaaaagaagaaacatgaggagaaggagaagaaagagaagatagagactaagagcaagaagaaggagaaaactcgtgttgtggtgattgaggagcaggaagaagaagatgatgagtcgtcagaacatggtgctatcgttcttaggaaggtatcattcaccatttgaattgactgttgttttgtttgctctgctttagtgtcactgtcatgaagttgtttgagagtagtgagttnnnnnnnnnnnnnnnnnnnnnnnnnnnnnncaaaagttggaacctttatgtgtttgagtggtggtatttaggttagcaaaacagagtgattattaagttatagacatagacttaatgagatatttatttggatgtcatctttaactaaagcttgttgtacttactatatggttgtgtggtta

SEQ ID NO: 45967 - DNA, 530 bp, Arabidopsis thaliana landsberg
  unsure (1)..(530): unsure at all n locations
tgcgcgacggcgagcagcccgagctggaggtgacatccttccttacggagaacaccggcttcaccgccgcgccggcgctgctcggctcgctggaactgtcgcgcgccgacggcagccgcgcggcgatggccgacctagttcgagcgcatcggcaatgccggcgacgcctgggccgccgtcacgggcgcgctggccgcccagcttcgcgccggcgggagcggcgaggcgccgggcatttgccttcgatcccggccgcacgatcggccgtcgcaccggtgagatgcacgccgcgctctcgaccgagacgggcaacgccgccttcgatcccgagccgctggaccggatctcgctcgcccgcatcgtcgacgaggccaagcacgaggcggccggggcatcgcggtcctgcgcggcgtccaggcgcaggcggcggacgatgtcnnnnnnnnnnnnnnnnnnnnnnnnnnnnnnnnnnnnnnnnnnnnnnnnnnnnntaacagctgaccggcggcggcaccccatcatgcgataca

SEQ ID NO: 45968 - DNA, 968 bp, Arabidopsis thaliana landsberg
gaggcttgggtttgtactaatgaattatgacacgctctccattattatgacaatttcattaattttcatccatttgattattatcttatgttttagtttttctttgttattatattttggataaatgtacattgtgactgatttgtatattacaaacaataaaaccgccaaaacaataataaaattaaaatatgtctttcataagatgataccaaaataatttttaaaatatagagatgacatatgtataacttttttttacaacctaaactagtaaaacatgatactgaatagtaaaataatacatatatgttaaagggcaatattctttattatttaacagataattttaatacaacgaagagttacgcaataattatgaaattaaccactagaatatggtcgactgttaaaaatgtcaaatgtgattaaggttcaatcatttgatacgtgcgtgaatcttcattagctattatttcggctatataatattcattaaacttttccttctaagttctaaccctctttaccttttcattcaattatttgattggtttattgaatgcaaatagcaagttagcaaccattattctagtgaagacaaccctttttgtaacgatttgacgtggtcaacgaaatgggtaaaacgtcataaaagcaaagccatggattatagaggtacttataataaattattacactaattagtaattaccttcagatttaaaattcgttttgtaatatttcaacaagactacgctagaaaatgatcgctcatatggttattgtattttcatttttcccacgtatataatctgaaaattataaataaatataaataacattatgaacgttaaaaaattcttattacatgaagttacaagcaaactttaaatcatagattgacctagaaatttagacaaaaaaaaaaagattgacctagactatttggtgatgattggaattat

SEQ ID NO: 45969 - DNA, 1320 bp, Arabidopsis thaliana landsberg
aggagaagcagcaatagagttttttggttggagataagaaagatggaaacatcgagagatatcgaagagcattttttgtttcaacttttgtagtgttttggaggagaagaagaagagtcaattttttctcacatttagttgctagatttaatctcatactcgtcttcgtgtattatatctgtgtaatgccacagtttcagaagctatgttatcctttcgaaattcgaaccttctttgtgtaagtagacagagggtttaactaatctctctttctccttacactttgtatgttgaaatatagcatcacaaacattctttagtggttatctctgagtaaacgaaagtatcgggccaaatttgatcttttacatgatttgaggggtatatccaaaattaaccttagttaaaaatgaaaaaacaaatgtttgggccaaatctcgaaatgttacactacttggggtttaaacataatataatgtttcgtgagtttaacacgacgacgttttgtttgcaagttaggttttgttatgcctctctcagctaaacccttcttcttcttccaccgtctccgccacgaaccagagaaagctcaacaatggcgtcaatcctctcaaagaagcagaagaagaacgaaaaatacaccttgaaagagctcaaatcattaggtcatgacttactcacttctcgatctcacatcaataaccttcctctccttctcaccttcgtctcaccagaatctccgccgcagttcgtcgttgaatcactcctctcactccaatcctttttcactcctctactctctcagcttcctccgacttcttcgtctccttcttcaaccaaaacagaggaccctgaagttgtgttcaaagcttggctcagatcaaaatttgacgaattcgtcaagcttttactcgatgttcttgtctctcaacaatcagaagattctctaagggtaagatttttctatctatcttctctgcgttctcttgaagttacatagctttgttattttttgttacctaatgtttttggttgatttagggaattgtgttgggaacattaatggaatttgtaaagcttttgaatgctggaaggtttcattcttcaatctaccacagattacttgatgctattgtaagtttagtctcagacttcttctttacgaaattgttattgcaagtgcttgatgttcttactattgttcactgtagattcactctgaggttgatattgagatattcttggatatacttacttcaaagtacttcaagtacattgatgtccggtatgttgataacacttccagtttatatggttctt

SEQ ID NO: 45970 - DNA, 922 bp, Arabidopsis thaliana landsberg
tgaagttcacggattttgtccgccctaaacttcaatcctatgaggtccttgggttcagattttgatgtttcagatggtgcagctaacccttttaccttaggggcagtagatggccccttcaccaaaacagatggctgagcatctgctggaaccacagatacagacatagagctattggtggaatgatcaggactgtgttcctgcgttatggaaggagccgatggcagctctgtcttcgaagcagatatcaagcccttcgaaactaaagagcttaagaggcatgaaagaggatctgaggccttacttttctcttttgacgtttgtactgaggtgatgccagtaagagacgctgcacatgagacaagtggtgcggaggattgttcaacttttaaacgagctaataaattgtcactagccaatgaaattggcaaagtcttaggcttagaggctgctggcagggttagtgcccccgggttgacctcatcatgactatcctccttgatcgcaccacatgttgaattattagaaaggattccactcttcatgacagcttctagcaaatcactcatgttgggttgtcctgtagcttctgaggcaagagtaaggcctggggcattttcagctgctgacttagagtcaaagatttccactggtagttcacgcatatttgtgtttttaaactgactacttgaagatgggagccgtacagagtcatccctgggaacattttgttttgctggaaaccgggaagccctaggatcacgttgggggagtgagtgagctcttctaacatcttgcttggccacattctgcttagaagtcgaatcatgtaaaggcgattgtctatctgacccagatcctgagcttggcaaaattccacagcttgcaacccttggttgaggctgaattccctatctagttg

SEQ ID NO: 45971 - DNA, 509 bp, Arabidopsis thaliana landsberg
cagttaattaggtgtgattgataggctgatggaaccactaaatatttttaaaccactagtttttttgggggggaaatgcagtaagaacaagtttttgagaacacttttaccgtctgataaaaaaaaaattagtaataaaataatagtacaaatattattaacttgttatactgtttcaattttcaaagtatggaaagacaacaaacctacggttactttgtttgcattgggactatgcaaactcaaaatatgacaaaacaaaatgagaaacccgtgttaggaaacaaccattcgtgatttcaaaattattaatctcaaccacccaaagacaaagttttcacaagcgtttttctaaccagctataattgagtcaatgacaaacgcagtcagccttttcgggaatgtagattttctaatttacaaataatgtcaaaactcgttttcactttacattaataaaatattaattcaaattaattaaagacttattcgtacttttcgtagaactt

SEQ ID NO: 45972 - DNA, 763 bp, Arabidopsis thaliana landsberg
attattggtatacaaaactaattacaaagagagctaatctgactatatatctgagtaggattttaattttttgtgcaattgcatagtaataatactaataacacctactttacagaagaaacgaaggcccactaaaagcccatagctcctctttgtgtaacagaattgttaacgtgttaaattgttaacagaatcgttaacgtgttaacgcattcaaatgataatcacaacaacaaaggccaaaataaaaccctaaagctcaagactctctttcttcacatgaacacagcaagatcttcgattaaactaaaacgacacactaaaatctcaagactctctttcttcacatgagcacagcaagatcttcgattaaactaaaacgacacactaaaacctcgatcaagactctctttcttcacatgaacacagcaagatcttcaattaatctttcttcttacgctccgatggggggccaaagaacttttcccatacataaatcacaaactcgccacgactcatccgaacgatttgtcttgatgtcttaccatcttcaaaaagtggatctctttttgatttccagtcgtcaaaggttgatgttgctttcaccatgttgccttccaagatcaaattgtgaattttttttcttagctttccaatcactgccttttctctggtctctatatcgtcgtttttacaagatttgaatggagtagtaaaaatgaagagacagatcggatcggaggaagagaggaagaagagagaa

SEQ ID NO: 45973 - DNA, 719 bp, Arabidopsis thaliana landsberg
gagacattttgttcggattgaaactttcttataaaagggtaactgtaattttttatttagatttaaaataagtaaagtaaatcttattacgatttttaaaataaaccaaaaattgcaattgttcatgaaataaactaaatattgcaatgattcaactaaatggttgtcaccgtttatgaatagttacaataaaaagatacaaccgtagaagatatttattcggattataactttctaaaaaaataaaaccgtaaaatatcttctaattgcgtagaagatgaaactatctctcatcttttcttcacactgtacgcttggcattcgaagggtttgggaacataaaactttcaaaacctccctaaaccttaggcacatctcctctgttcgaacataagttatggcaacaaaagcacaaattggagaagagccgttaacaccttagattatatggtcaattcggcatgcacttcaaaacaataaaagaaagaagcatcatgtcagatccaatccccgatggaaatcctcaataagatcaaaaacggatctctttacattatctcaaaagtaatctttctaaaaatacctgacaatccgaagatccataataatcaaccaaataaaaatagattgtagcattcctattcaatgtcaatagaatacaactccagatctgtaaattgataatgatggtaatacaaatatctttcagtcactgtctt

SEQ ID NO: 45974 - DNA, 757 bp, Arabidopsis thaliana landsberg
caattccttttaaatgatgatgccatacacgcttatcgaaacaaaccatcaaaagctatgtagatgtgtttttgtttttaattattactgaataactatgtgtttagatgatcagtaccaggccggaggcagcagcggcaggaggataggtggtcaaagtttggatgcagaaggctttgtttttgactctctggcaattggaatcgatgaattccctgttgaccaaggctgaagctggggctaatagaaattgtgacagaactgccaaagtaacgacgaacaaacaaccggagtaagaagccatttcgtcgccggaaaaatattttatttctcttgacctctaagtatggggaaatcggattttggttttagcttttgttggttgaggcaatatcactttgggtcatatatataccaaaatggcacgtctaatttaagaaagtaaaacatttactgtgttctcaagtttgaaccgtctctataaatagatcattggcatgggttctattactgtggtcaggggacaaaaattttcaatcttatcgcctttctttatttagaaagaaaaacagttaaataaaactggggttctgtctatttttaggcaaaaatccaaagctacctaattcattattaaaaagtcttaatctcggctaaacattcaaaaaagttgattacttattaacttaatttctacctcttcccaatgcttacacttaaacttaattcacaaaatagtggtccccaacttcccaaa

SEQ ID NO: 45975 - DNA, 604 bp, Arabidopsis thaliana landsberg
agaaaatatcttcaaaagaaaaattaaaaatagttcaactggacaacgaaattatcctaatatagttatttcttttgatctaatccttcttcttttaaacttttttttacttgtttctactctacatgtttcttgttattaggtaaagtattaggctctttttaaaaaaaaaatgcttaatcctctgggtacctcgaaaagggaataatactctagttagataagtgcagcgatcaacatgacaaaatgaatgaatgtttgctttaattggtggctaaaagctaaatacacagaaaagtcaaaattcaatctcaaaatcaacccctctgtctccaatgtccctaatctataccaaaatgtcaatttattttcttgatcatatattccactaattaaaaataaatccttctctaatgaaatttgtcaaggccttggaagcctagttttaaatattaaatggaaactatttcttcaacaatcacactgttatttagtaattgtgtatgttgatcactactttcttcatttgttttgtaagaaactataataagcgaaaacacataatagagtctcatgtgcaataatgaatcttatgcacatgctt

SEQ ID NO: 45976 - DNA, 629 bp, Arabidopsis thaliana landsberg
cttcttctcctctcctaagccaatcctttaacatatccgattacgtttggccactgatcttgtacattttctatgcaagaagacgaatccggtttacgcaaaatcgccatttcacaaaactttgaaaccatccggttaatgcagtcgtcccaaagcgggatcagcgagtctttactcgagataacgaagccattattagagtttaagcgggacattatggggccaatgatgtcgtatgtgatagctctacaatctagtagctcagtggaggagatggagaagaagagctcttttccttgcggcaagtctttgtagacgtctggccggagaggaaaccggagattttccggcggtggttcttgaagataccgtgcgagctcaaataaactgggaagatttccggctggcactcgcaatttacttaagcaatgctccgatgggtcttggaactccagtgttgatattgctgtagtagcattagatcacatgttaacaatataaaagaataatgcaaatttgaaggtataagattcggaaaaacttacatttataaatgggttctgaaagttgaagctgaggtcgatcaaacacaccagccacatttactaaaaggttaacaaacagttatg

SEQ ID NO: 45977 - DNA, 732 bp, Arabidopsis thaliana landsberg
catgataatgaaaaaatcaactgaatatatgtttacacaataaatcaaaatttggatggaagggacaaaaggaagcatatataccgtccgatcatgtagaaaagagatagcaattacaccgacgagaatagtaacttggcaacgtcatgctttcttttcaagattatatgaattttcaaactttatgttcttccaaataattagacgacttcatggctctcacgttaccatttgagtacgtagtccactagcgtggtccaaaattctatatccatcattttttgttctttttcttttattttacaatcaatcaatctatggatgtacatataagtaaaagtctacgccaattggatgattaagaattaagataagcgtcgtgaagaaataaaaaatcattgggccttgggctaaaggaatatttgagaagcatataaacaattggcccacaaggccacaaggatctccttttcaaacgctcggaagtttccgctttggattcctgtcaccggcgatttcgtgggatgataacgacgccgagctatatttcgtgactgaagcaaagtgatgattcttcgattgaaagaccaaacgctcatcaaaatcaattcaactcgttcgtacttatcttccttagttttccgacgagattctcactcgcaggctcggacaaaacccgatcacgatcgccggagaagaggatacgagagggatgtgagaatcgaggagaag

SEQ ID NO: 45978 - DNA, 629 bp, Arabidopsis thaliana landsberg
  unsure (1)..(629): unsure at all n locations
tttcttctaaaccttttttctcttgttgggtacttctgtaaggagacggaaaaattcactagctaagtacatttactaaaatttctagtcacggttgattatgttaggtgaaaagcatttcaccagaagccgcatctgatgaagacagttggtgctgggaacttagctccattgatgtgaatgtcggaactgaggatatcaaagggattgaatttgtccagaaaggttactggattaatattatctccactcatgaggtggacgctagaatcgctcatcctgatggatcacctactagtttgaaaatcaaggtattctttgtcaggtggattctccatgagttttggctatttagagttaaaatctatcaaaactaatggttttcttcgtttgtggtaactacagaaaggttcacagaaaatatgcattgagtcacctggagggcatgagcttcagctttctgactcatgcatgtgctttgggagcaattcaataaagatagatgtctcaaatcacaggttttattttggaatcttctctcttttgtttcagcattctttggcttgtccttcatttagcatctctatgcgtttctttctgcagcctattcatctganagcagagaagta

SEQ ID NO: 45979 - DNA, 802 bp, Arabidopsis thaliana landsberg
tttattttaaaccacacatttaggcccataaaggcccagaataccttttcttgggcctattattaaaaacttaacccctttaatcgctgttttctctctctcgcgacggatcttcttaggtctctctcttctcctccttttccccactttttcaaaatcagcaaattttggattttcagaatttgagtgaacttaaagtagacgacgaattgtctgaattcgaattttaagaaaaatttgcagagatgaggagttttttcggtagaggagggaaggattcaccggctgattctgcttctccgtcaccgagatcatacccttcgacgtctccggcgtcttcgtctgctgtgacgggaccaccgagaccctattcgttagtgtattgtgatgagaacgggaagtttcgtatggaccctgaagctgttgctactttgcaactctttaaggagccaattggtgttgtttcggtgtgtggtagggctcgtcaaggaaagagctttattttgaatcaggttagggtttcgcttcttcttcaagagttcgttgttgggtcttcgttggaaaaatggggtttgttttgaattgggtgctttgtacttcgttttgaggtctagggttttggcaaattagggttcttttttgtattacctcgagttgatttgttaggttttggaagctttttggattcaataatggggaattatgtttgtttgatttggttctgtgtacattgttttgaggtctagggtttatgtttctgtgtgtttcttaaattgttttgtggtgttgtgcgtttgtagct

SEQ ID NO: 45980 - DNA, 825 bp, Arabidopsis thaliana landsberg
gtgtgtgtaaccaatatggtatttagtattacaaaacttaagttaaatatgggctcgattttttttttggttttaatgaatttagtgttatgctagattattaattttacttaggaaactctacaaattaaaacttccactaaaataattttgggaaattgtaaaaagttacaacgtggtactttaatttggtttgcatttgacctttcgtttatatatttttttggtatgataacgttttcgtatattgttcaagtaattacgttgtcgtttatactgtgtttttaaaattgtaagacatgatattggaaccagtatacacaaaaacaaaaacaaatagtattttataaactattaaaacttcttttaattataaaataagaattaaaattcatcttcgagtggccaataataaagggggattaatcataagtgcaaaattattaggcataccctaaccaattcaaccgtaaattatttactgggggaacaattattccaaaagagcttctaattatactttttggaaaccaacttttaaacccttcttttggttctaaagggttttatttggctttatttttttttgggcctggaaccatttatttcttttttaaaccaaacgaaagggttttaatagggaagaacctgaatgaatttcttttattgagaggggaccgtaaaaaccctaaaacccttaaacttaaactttttgattcccccaattaaccggttttggggaattggaggggaaataaccccgaaactttaagaaaaaatttgtttatgggttcgaaaaagaaaaaaaaaaaatttaaagggttt

SEQ ID NO: 45981 - DNA, 544 bp, Arabidopsis thaliana landsberg
gaatacgaggatcgaattccattagtagatggtggaaaattgtaacaaccctatgtttcaattagagcattaagcgcatatccaggcacgtcaacgatttaaacccaagtgagtacctaatgttccattgtgactattagaagcgagacaagtgacgagactctcagcagaagtactagaccctagttctacgataagtctcgccttcatctcgagcctccattattgggtattagtacgtctcaaatctagcgttagatggtatctgagagtaatcgcaataccgcctcgaatgccattggtgatagagctcgagtatactcagcgcgtagtgtgaatcgtcgtaccggagaggtacacaagtgaattaatcgtggctatgatcgcctaggaatctgtggagaatgtgctagcattctaattagtgaatagaaacactgtagatatgtgcactgcgtagttcatctgcaagaatccgtaaggagaatcgtcgatataagatccgtgaaaggttactggatctactcgtggtgtatgtgaatga

SEQ ID NO: 45982 - DNA, 807 bp, Arabidopsis thaliana landsberg
ctatccattttctcttctttctttggcttcctcttctacttatcattcattttggttgtgaatttataccaataacaagaaaaacttaactcaaaacttaaaatttcttttgttaaatcaaatattcataaatgttaaggaccttaaatcttttaacctttataatgagtacacaaaacgataatattgttatctcttaacctttgtgaatgagtataaatatacaaacaagtaatggtttaaagaaattgctagtagcaacttaaaaagaattgtcatttacttaattaaatcttcttatcttgtcatttcataaattaaatcgtaatatgtaatgctttccattccttttccactatggattataatcccataggcttacctaaacttttctagtagttcacagagcttagcatataatcactccctttccttaagccattaccaaaaacccaaaaactcatcatcaaaacatacttctccattctcgtataaactacttgaaaatgtcgagaatgaaacagcttgctgctgcaaaatagcagataaatgtctaataaagaaccagacacaactgacttcaaatatatccatgtataaggtttagtttatcaaaatacagtaaaaatggctttttgatcaaatattccccaattctataattgctctgtatttctgcgtcttaattgatacgaacaaatagacatacatttttagatacgagagtgcaatggggaaagaaatgataacaacaaactcgcgggaaaaaacaaacttacatgtacatctaaagagcgaaaaacagag

SEQ ID NO: 45983 - DNA, 558 bp, Arabidopsis thaliana landsberg
attgcggaatatgtatatttttgtgtagatctttatgtacattagctttaatttttaattatataaacacttaaacagatggaatgatttggtagttaatggaaatggttaagctgacatatgaagtgcttccaaaagttccctaaatcttttgccgatatctaggattatttattttgttaattgaatgtcaattgagtgaaaatattaagatataataataggttgattcgattatgataaatagttgaataaagtgtataatatggtttttgtaaggacggcagattttatcttagcttaaatcacaattaatcattcatgtctggacttattcaaggaagttgtgtcaagtaatattttatgcaatcagaaacatacagcaacactaagtcacaagaaggtgacgacattctctgtctcagccatttactcatgtagaaacttggctctgtactaaaaaggtagtaatgcccatatcgggaaaaccaattatcagattaaaatacaggaaaatatttctttctactatataagtgatttaatgatatatttact

SEQ ID NO: 45984 - DNA, 592 bp, Arabidopsis thaliana landsberg
gttattgcttgagcatgaacctcaattgagtaaaacagtagctcaatcaaacgcaaccccacttgtgtcggctgcaactcgagggcattcagaagttgtcaatgaattgcttgctaaagactcaagcttgcttgagatttcaagatcgaatggaaaaaacgcgcttcaccttgctgcgcgccaaggtcatgtagatattgtaagaaccttgcttgataaagatccgcagttagcaagacgaacagacaagaaaggacagacgtctttgcatatggctgtgaaaggagttagctcacaagtcgtgaggttgctccttcgagctgatccggctattgtcatgcttcctgataaatttggtaacactgtgttgcatattgctacacgaaagaaaagagcagaggtaatgattgatctgctctttattgaatttttgattcttgattcttatattcttgttttgattcacagattgtgaatgagctgttacaacttccggatacaaacgtgaatgcgctaacaagagaccataaaaccgcatacgacatcgctgaaggaccactcattcagaggaacggcagagacaaagagatat

SEQ ID NO: 45985 - DNA, 944 bp, Arabidopsis thaliana landsberg
tccccattattccctcgattcgcgcatgtttctctcaagtaaatatattaaaaatcctcaacaacaaaacattaaaaaccctgtctctcttgccactttcacatccatagctaaacccttgaagaagattgtttagtgtgttctcgtctcttcgtttatttcttctccaccgatccaacaatgctactctccggtcaatctccgactctgattcgttaatctccctccgtctctctcgtctgattccttccgtatctctctctgattttggccagagcacgcttgataatcaaaatttctccggtacggttatgtaatccgcttcctgattagggttttgaatttcgtcttcgtattgtttctcgatctgttatgatcgtacgtttttcgtttattgttcgtcagttattttttaattttgattttgattcgctgtgaaattttgactgtaggggtctttatatgactgagatttgagaacattgtgtagaaaagtaaagaaatgttagaaactaacgagcaaaagggttttgatttaaacgtgtgtgcttcaattgaagatttcagtgagtctgacattaaggctgagggtgaaactgatagtttggttgatggtaatgtggagaatgtgattgagattaaggataagaaaaaagtgattgagcgtgagattctcattacgcgtagggttcttcgctcaggctctgtggcaagggatttagtaaacagtgataaacattgtaaggctgtgaaaaggaaaggaaatgttgttagtggtggtagttctgttgatgaggtgaaagaagaagtgaaacaggagtgtgttaagtctttggtacctgaggagattcgtggagatgattttcgaagtgaagtgaaagtgcaatctatggatgatcgatcagatgatggaaaagaagagaaagttcaacgtaaaagaggaa

SEQ ID NO: 45986 - DNA, 702 bp, Arabidopsis thaliana landsberg
aatttttcagaaaatgaaagtttagtgctctgatttttacaaaaaggaaagttgtttcttattatctacagtatcgagcttaagatgaagtttgaatttagagtaacagagtgtcacagggaccttttacagaatctgaaacaattttttttttcccttagatttcacatgaaacactgacacattgcgagtgtctgacacagaaccaagcaaaaagagaattttggtatttagacaattttagcccatacctttgggctttgggtgcatgaacgtcaatagcccgtgtccatatgaaccagtgaaaagggtgatttatgtcaaacagtcaaaagtaaaaaaaaaaacactttttcaaaagaatctatcgtctgaaaatgccgagttgccgacatttactgttttaccgacacatgctgttaccttttttttttttaagtctctataagcttataaaaatagttcacatttatgatttaatctttcgaattaccagtatgagaatatgttatatattactccatatgctcatgaataacaaagtacaacttcttgttgtaggtactagacaagataacttttcaacttttgacaaaaaaagataacttttcaaatactacgtagaataagataaacaaactatagtttatttccatataatttaatgatataaaaatcgttaaaattcttcatccaaaacca

SEQ ID NO: 45987 - DNA, 637 bp, Arabidopsis thaliana landsberg
gtagtcgatggtgaggggagagctatgcaagatcctcatcctttctagctttggtgaaccaagaagacactgtctctatcggaggatcctctactagtcgaggtcttgtattgtcctcaaccatagaaagagaaggaccatctttgatggtggtaagaaaaattgggtcctcaaatgttgtttgcgcaaccaaggtagcttcctcattatttgatgcgtcctccaccaaaataggttatgtattgtccttacccatagaatgagaaggaccgtcttcgatggtggtaagaaagatggggccatcaaaagtagtttgcataaccaaggtagcttcctcatcatctgatgcatcctccaccaaaacaacatcctcaatagaggttacaacctaaagcaatgtggaggtcttcgaaggcacctcaatgatctcctcggtggacatcgtttggcgagaatctgcttcaaatgtccctgcgaccgcctcattagtggtaaggttcgtctctctatgaatctctgtaccagatatccttgtggacttctcgcaaggacagagaatgtggtgtttgcatgctgtctgacacatcaaagagtcgacggtcgtgcaggcagcgcgagagagcaaggatgccgatga

SEQ ID NO: 45988 - DNA, 423 bp, Arabidopsis thaliana landsberg
  unsure (1)..(423): unsure at all n locations
nnnnnnnnnnnnnnnnnnnnnnnnnnnnnnnnnnnnnnnnnnnnnnnnnnnnnnnnnnnnnnnnnnnnnnnnnnnnnnnnnnnnnnnnnnnnnnnnnnnnnnnnnnnnnnnnnnnnnnnnnnnnnnnnnnnnnnnnnnnnnnnnnnnnnnnnnnnnnnnnnnnnnnnnnnnnnnnnnnnnnnnnnnnnnnnnagtcgctccgaagtctatggaacaattccattggcttgcttctgtcgtcggagggctcctgtctggcagccgggaaggtgacacgtgccacgttgggcctcacggtatagacgctatagcgtcctcgagtcgtaccgccgcagacgcagcttccagagtggtgcgaggaccgatgacgaactcgtactcctgggccgggccgttgcctgggtgagacggaaatgcggtcac

SEQ ID NO: 45989 - DNA, 808 bp, Arabidopsis thaliana landsberg
ttagtgtttgggtttatatataattcttaattattcgggtatatcctcatttgtgctgagcaaaaaattaatgaaaaatcatttagactgttttggtcaacttttggttacatattagaaaacaattgcaaacatcattactcagccaaatcaaaccgtttttatcggaaatgtggatctgtacgttaccgtatcagatgatcaaatcctaaacaactattatgtgcaagaaatcgtggaaattcaagaccatgtattaaaaaaaaaatgataaagaattttaatatatagggtggtctgcgacaaaaaatactgaataatttcatattttaaccggaacaaaatgtgacttatctcacaaggccacaacaatctcatgccttttactaaaagattcagattgttgcgaccacataccacttcaagattaatctagtaccgtaactaagtaatgtcatttgttttttgttatgtcattgtttgcacagaagaaaaaactaaattatgtcatcttctgatagaaaatgactactttatttattctgaaagcttactgagctaagttattttgctagaaaaattcaaataaattcaaaattacttcatacataattattttgcaacaaatacataggttataagttagtaggttacattatattgatcacattgcccacattggtacaactggtcatagtatatgatacatattatacaactgacagacataaaaatctctatctaaaccgttcaaatatcatgtagatagaactagaacacttcagataataaagctgcacactaatta

SEQ ID NO: 45990 - DNA, 622 bp, Arabidopsis thaliana landsberg
gtggtgtgatgaaacgacattatcatcaattttggtagtaacccccaattatttaactaatcaagatacaaggggtacaactgtaatatattcataggttggtgtgtttctacaatattcagaaacacgatttaagacgattgaaactaaaaataaaaagtgtcggacttgtaaattttcgctcagcgatctgcttccaatggcgatctacttcattctctatacacttctcacgatcatcttcgccgtatctctgagtttatttctttccgtgatcaatgcaagaaagagcagaaaacgtgcggtaggattcttccatccgtacacgaacgacggtggcggcggcgagagagtgctctggtgcgccgttaaagccattcaagaggaaaatcccgatcttgactgtgtcatcttcaccggagatcatgactcttcttctgatagcttagctcgtcgcgccgttgatcgattcggtgttcaccttcagtctcctcctaaggtcccattactcctaaagtttaaatttttatcaatttgaattggttctaataacacagaacctctcagatttgagggcaagtttcaattttgcaatttgggttagttttgatgcaaaacttta

SEQ ID NO: 45991 - DNA, 866 bp, Arabidopsis thaliana landsberg
aggttatttcacaattggtattgtatacctaatatctggtatactcacggacctggacacacaaaaaaaaaagaagcaacaagctttgataattgggtctagagggccaacaatggagcttcgctttgtaagatttcttacgttaaatagatgaagaaactagacgataagcttataaataggttattccacaaatggtattctacctaatatctgatatagtcacggactcttcacacatgcaccaacaaaaaagaaaaaataagaaagcaacaagacttgataatggggtctaaggcctacaatggagcttcgctttgtaagagttattttgttaaatagatgaagaaactagacaagacgcttaaagaggttgtttcaaaaatggtatattacctaacattagtatagtcacggactcttcacaaaatttataatttctctatttcactaattaagcacatcactttggttataggtataacaaaagagaagggttatgttaaagagcaattaagaaacctggaaatgggttcagggaccataaacagtaaatccccataagggatttaataagaatggtagaagcaaaattcaataaaagaacagtaaatgctaaacatatactttacatttcttcttttgtaaacatgtacgtccctttataaaggtgcatggattctctttttttttaccatattcgatttctcctttttactatttatcaaagtcttcttaaaaatttggaagtaatggagacgaatcattccctcaaccaaaaaaagttaacaagtgttgttgtgtaacaaatccacctgtgaccgaggatacatatgactgatgagctaatattagttggaacaatt

SEQ ID NO: 45992 - DNA, 535 bp, Arabidopsis thaliana landsberg
  unsure (1)..(535): unsure at all n locations
gcttgcagcctgccgaacacgcccttattccagattcttacggcaacgttaccaaaccctcgggtgaaagcagcaagcttcaactgcagatataccaagccgcctcccttcgtctccgatcacctccataccgagcagcatttnnnnnnnnnnnnnnnnnnnnnnnnnnnnnnnnnnnnnnnnnnnnnnnnnnnnnnnnnaagtaatttggccctggtcacgtacaagacaaggaaagctctgcagctcttaacatcaagcagacccggccaggccagcaccagccgcagcaatgacgtccatgacggcagctacagacgtgaagccggcgccggcgctggcggcctgcagctgaagctgctggtggacaggcgttcgcggcgcgtgctgtacgcggaggtcccgcaagatgcggtggacttcctgatcggcctgctgcgcgtgcccgcgggcctcgcggcgcggcacttggccaagcgcggcgagctcgcgcagggttccctgggctcgctctacgcgggcgcgctggccctag

SEQ ID NO: 45993 - DNA, 561 bp, Arabidopsis thaliana landsberg
attatcgttggaataacgtgattatatttattttattttaatacaagataattacatataatgatataatatgttgcgaaaaaagtctctgattcttgggagaaaagattcgaaaagaaggaaggatccaacaaaatccgaaattattattaactgaaaaaacaaaaattttgcgccagcgtggcaacacttctctgtcaggaggaaggatccaaccaccaataaaactccgacccggatccgaacccgaaagcaccagacgactcgtcctccacgatcccaatttctccaatttcaattttgccacagagcgagagagaaggaagaagatccatacgaagtggattgccttcagggtacgagagagagacatagattttaacaaacgatgtcgctgagtccgagcacacgcgcggagtaatggaagaagatatacaagacaggcgtcgaatgcgatgagctcaggcggaggatagacgacaatctcgtcgagattaggaaaaacaagcctgaggatagtcttctcaagaagcgtcgtgaaggaatgatgcttcacagcag

SEQ ID NO: 45994 - DNA, 471 bp, Arabidopsis thaliana landsberg
tgcccccgccacatgcatcagcctatgtttcgtattgtggacatatgttcttgtcgtcttatagaaactctacaaagatttaactttgtgctctgtgtgttatgtgaataatgctgtaatactcttttgacctagctggaacacaatgtcatgttatgtagcaaaaaacaggttacaaaatgcttgcatcccaagaaatctcctaagcttcttaatgttgtcagataaaatatatgaaggcttttctaatccagataaaaccacaatgtgtttttttcattactttaaaatttttcgtaactctgtttcacatagagtcctctgtttatactatgagacttcatatcaacagagtcctctgtttttctcaagtcacaattctgcaatttggttcagttcagataatataaaaaacacatgccaaagaaattcattattattttaatcaagagaaatttagttacgagatct

SEQ ID NO: 45995 - DNA, 424 bp, Arabidopsis thaliana landsberg
taacaaagttattgtgaccatcatcgacaatcattcaaaattacattcaccgagtttgggttggatcacaactcacaagtaacaaacgtcaaacacagaaccaaatttggtcattttgagattataacaggctcatgaaatataactgaaaagatgatatttgggcaacaatatctgatcgtaataacgaaatatacatatctaaaagttaacgtgaaagcaaagtagcaataaaacataatttgttacatgctcgtgcatagtctgaaaaattcaaaaccagtcgagcattagtgtttttaacactgtacaaagatgttctttgagtgaaaacaaaatttcacttcttgttgcttcaataatggttgaaggctgcgacgacatcaaatttactgattgtggattaaaataggactttgaactt

SEQ ID NO: 45996 - DNA, 785 bp, Arabidopsis thaliana landsberg
tatcacaacatgtgtgtttgcttacaacgttgttaataaccattataatatatatctaacataataacattaatttttttattagtcccaacaatgaactgacaaattattatctactaatagcgatttcaatgaggtatgcagcatgttgttgggtttgttttaagagtgacgcaaatctgtcttttctcccatctaatcaaagatacatagcgattcggtgacatcaattctagagccaataagatttgattaaacagagaaattgacttaatatgcatttataatataagctcttatgttgtagaaaaatccaaacctgttccacaagcaaaaactaagctgtatgggaccatgttgatatagactaagaccctaagcgatatgtacaaatacaggtgttatacatagaaagaaaaagaaaccgtttttttctttttcttatatctaattcatatacagctagatatacatgtaatttaaaatgttatctttatgtagtaatttattgcgagggatgaaatatctgacgggaggttttatgtgaaaactcgaaggtgtatttgatttgcggtcaaatatattttaatggctctctcgtatattgatgatcacggctcggtacattgtcctatacgaactcgataaaattaattatattattttgctgtgcaaatctgatttagtagctcgtcgtttgaccctatattgagacatataaaacatataacattttggcataaataagtaggtgttttgtgaatttttagttaaaaaaaaattga

SEQ ID NO: 45997 - DNA, 367 bp, Arabidopsis thaliana landsberg
  unsure (1)..(367): unsure at all n locations
nnnnnnnnnnnnnnnnnnnnnnnnnnnnnnnnnnnnnnnnnnnnnnnnnnnnnnnnnnnnnnnnnnnnnnnnnnnnnnnnnnnnnnnnnnnnnnnnnnnnnnnnnnnnnnnnnnnnnnnnnnnnnnnnnnnnnnnnnnnnnnnnnnnnnnnnnnnnnnnnacgggcaaaaaaagaatatactggctaagcaaaattcatgaacagatccctgccattacaggctttacaaatactttacaacctactggtatgctacgttattgtgaaacatatacacgaatgactcttgagccataactggaaccaccctatgtatgaaccgccctcacatcaataactagaccctgaccacgtatcggaactgtt

SEQ ID NO: 45998 - DNA, 589 bp, Arabidopsis thaliana landsberg
  unsure (1)..(589): unsure at all n locations
attgaataccatgttcgttaccgccgatgccaccgccggtaaaaaatacaggatggattatgatttaggcgttcataacggcatgttcttcctgaagaatggcgggttctttaatgaatccggggagctgcggaaacctgtaacagtaaacacacctgtgaataaaccggatgtagatcttgcgcatctgcttacattagcaaaccattaatcaaaaccatatgaaacgaaaagaatttttagcaaccaccggtatcgctgcggcaggactggccatggggccatcggacctgtttgcggctaagaagaaagcggatgaaaaagtgcggatgggaattatcggaacaggccttcgcggccagaaccacctgaaccttttgctcaggagggnnnnnnnnnnnnnnnnnnnnnnttgcgatattgatgaccgcatgctcacttctgccaagagcaggatcaccaaaagcggcaggaaaatgcccgatgtgtttaccggcagtgaatatgcgtggaagaaaatggcggagaccaaaaaactggatggtgtgatcatagccacctcctgggaatggcataaacccatgatcat

SEQ ID NO: 45999 - DNA, 728 bp, Arabidopsis thaliana landsberg
cgactttccggtttttgcttaaacgcagacgatctctgtagcaatcattagtgcaatgcttcttcatgcaaccagccacctcgcctgtgacttcccaaggattctagcatctactgatacagattacaaaagatacttggttaagtactttggtgtgaccagacccacatactttggtttggtgaatactcctgtgggaatcactggaattataatggttgcttttatgttaattgcattcacattagccagtagaagatgcaggcggaacttaactaagttgccgaagccatttgacaaactaaccggatataatgccttctggtattcacatcacttacttctaactgtttacgtccttttagtcatccacggtgtttccctctatctcgagcataaatggtaccgcaaaacggtacattccataaactctttaccattttactttttgcatgcttacataattggctgtggtaacaataacatatactgcatcctacaggtatggatgtatcttgctgtaccagttttactctatgttggtgagaggatctttagatttttccgttccaggctttacacagtcgaaatctgtaaggtaaaatctcacttacagttacattttgaactgaattacatgaaaagacacattgtcaatcatctactattatctctataccaactcaaatgatttggtttcagggtgtaatttatcccggaaagtcata

SEQ ID NO: 46000 - DNA, 587 bp, Arabidopsis thaliana landsberg
  unsure (1)..(587): unsure at all n locations
aatgctccttttgtcaccaactgacagaatgtttttgtgttttctttcccatttttttatttcatttatgtttttgatgaacatagaggtagataaatataccacaagattcttggatataagttaaaacacacacctgaaaagagagagagagttatatatccacatatttatcaaaagaaaattcttggattaatccctgcctgttttatattattgtgggtaaattactctcttttagtgttatagaaaaatattccattttaataacaaaaaaaaagagttttacaactgacaaatacagtttttttattatgagttgtattacatacatgaatacatgaactcccatcaacacgaggaaatgagacaattcaagaggaagggcacaattatattttatgaactaaaaagacaaaatgaaataagatcaaaatataaaaaaatgaaggaaaagagcaaaataaaactgatcatacggagacgacctccaaggacaaaaacattataaacaacatgtatgtataaatatatttaacacnaaatgtctatatgtgtgtgtatatacgcatgacatgtattgatca

SEQ ID NO: 46001 - DNA, 549 bp, Arabidopsis thaliana landsberg
tctgctgaatcacttcttctgcaacttcaaaaggtacaacctttgaacatgttttgctcgagtttttcaaccttgacggcaaacttttgttcctcttcacgcagttcctgatgggctcgttcttgatgctgtcatttttcttgttgctgttatttcttttgagctctggaatcttggctgcgtttgttaaagggccattgaacacaagctttctcttactaccatctttaagatctagttttcttgcttggagaagttgtgctctcatggatcttggagagctacctgcagaaactttggcattcaataatttctttcttcgaggtgacattgagaaatgcttcaaaatatcctcaggtgtccaatcaaatctctgttcatatggccagaaaagcggctcatcgacattactaccactgctcttagaatccacaatctctgcacttttctcatgcaaacatatctcacgaaccaaagatgttgccgtgtgattattcagatcagatggaacatcagaggagattatcagagaagaagcatgatttcctg

SEQ ID NO: 46002 - DNA, 612 bp, Arabidopsis thaliana landsberg
atttctgatggcgcgtggacaggacgcgtcgtcatctgaaaaacaaatgacaaaaaacaaaattggcccaccattaattcttttgtcttattctcaaagtcgtcaaaacatttggtgggcctcaagcccactgtttcctccaaacggattattccttcattatttgcttgattaataatttattaacgtttaatgaactaagattattgaactaagattagttgcttaagattattgaactaatgattggtgattaataatattgttgttgttttcttctgcgacagcttcgaagtcgtctcttggatttttacaagtcaaaagctgagtaagacgttaaccacgagtcttctcgccggcgaccgtcgtcaacggcggaaattttgttagttatgtcccgcatttccaccacctgcactactccttcacgcgtgagagctgcgaattcgcactactcagtgatctctaaacctagagcacaagacgataacggtctcaccggaggtaaaccgaaatcgtcaggttacgatgtgaaaaatgatccagcgaaacggcgatcgattctgctgaaaagagcgaaatccggagaggaggagatggggttttggctcc

SEQ ID NO: 46003 - DNA, 996 bp, Arabidopsis thaliana landsberg
gtaataatgcaatattctatttttattttatttctataaaacttaattgtggaaagatatatggacaaaaagtgtggcacacaaaaaacaaatgaattggaaaagagagaaatcatgaagaattatgggaagtgggagcgaaggccctcgtgggagatgatgccaagccacactcattctctttaacgtaacactcaacacacaacacgaaccacaaggtctcattttgttcctctttttgcttagcgttttaattaggtccactctaagttgacattaatttatataaatatacagtaacttatacaacatgatttacttgtgcattttatagttattataaatatatgcttagtatacttgaaattatatgaatttaggaaaatggagggttcttactgtataatacttgaagatatatgaatttgtttctatgtttttatttctttttttttggccatgatatagggtatatacatatatgtaattcttaaaaaaaaatcattttttaaaaatatttacattcttagtaaaaaaaaatatatattgtagtaataaatgtcacagtgacataacggtcacatcacattataaataaaccagaacaagttaagtaagtgtttttcggtatggataaatctcaaaacccatatccatgacccattccacacaaaaaaaaatactcacgtccatagtcaatacaaatggcacccataattatatagatgttaattgttctcatgcatcttatgtcagcatcatttgttcttgtagcgtcaacatcataaaaccaaaatagaaataactaatatattgtttctagaggcttcggagatacactttccaaagattattctcatcgatccattcatgtgttcacgttagctaacccaattgattcagccataaagttctatttattttatatatgtatgttctataacctttaacttcgctagacgaatcgcttagtctttggggtgaactaatgctact

SEQ ID NO: 46004 - DNA, 490 bp, Arabidopsis thaliana landsberg
ctcgggcaaggaagagagaaagcactgcagcacttaagggaaaaccctgctcttcaagacgaaattgagaaggtttgcttcctctattcttaatcttaacccatctctgaagattgcaaaaatccatccttttaacaagaatgtaattttttgcatcaattcgtcctccttacgttggcaatggtgttgcagaaagtgagattgttgatgttagatggagaagttcatcgatcaactcctttgatgagcagcagctcttcctcggcttcacatcgcgaagaagaagaagaagactcgcttgacgatttccaatgacataacacttaagcttgagactttcggatctatggatgtacaacacttgattttctctcatcatgttcacctcttgtttcaagtttcatcaattaaaaaaaaacactcatatggttcagtcttaaatccgaaaccattcttgtgcatggaaatcatataggataggaagatgaat

SEQ ID NO: 46005 - DNA, 616 bp, Arabidopsis thaliana landsberg
agaataaaatcgtaacttttttactgaaaaagcctgatcaataaacagttatattcctttaccacgtcagccgtgacccttttctacactctcttttcattgttaaaaaaaaaaaaaatcaaatactgtatgataattgatacatagaaataatagaagctatttagttttcagtaacaattataattactcttagagttataaacttatagtttattaatcgagaaaaacacgaatctaattaattacctcaaggaagtacaaacaaaagttgaattacatgttatttgattattcgagagaaagatatctacatttggattttgttaaaagaaaaatcaaagcaaagattattacagaagagaaataataagtactttggtgaaaacaatgatcatcattatcatcatcgtcttcttcatggattcaatttaacccactcgtatcttcctccaccaagtggctcatctttctcgaaatcgaagttatacctaacaacaaattcattatcagtttcaaaaattcgattaaaagatttggatcaaaaaaaaaaaacttacttcatagaacattccaaccacttattccgaagatctttctccggcacctgaaaaaa

SEQ ID NO: 46006 - DNA, 556 bp, Arabidopsis thaliana landsberg
tgaacaatcggatagcttcgttcggttcgcaagacctttgacttagcgttcgccgccgtctttcctatctatcccttgacgcgtatgatccgtgctctgacaaagcctactgcttacacattctgcctcgcaatcgctgtcatccttctttctcacccctctgtgctcgtcctctcccaaacccttctgcccttcctcctgatactacacctgcctcgcagcgcggcggacaccctcgggtcacggtgacacctgaagtcctacccgcctatcctgtatcgatctctcagaccacctttctctcgagcttctagtcctacctcatcaacacggttagcggttttgaccaccatcttcgatcgtgtcacacgccctacccgacaagcagcgcgtccagtccgtgtcgttcctgtccctcgtatgtgcctgtgttcgatagcaatttctccagcgtacgcttcgccgtctccctccttctgtctctacctctccctttaacttccccttcctcctactgcccaatgattgcatgcggactattctcgtccgtgtgtga

SEQ ID NO: 46007 - DNA, 717 bp, Arabidopsis thaliana landsberg
attattcacgcttccctccaatttttgttttggcatgcgcgttgcgcacaatttcacgcaaaaacagtttttttttttctttctaacttttattttattaataacataaataaatggatagagatattattattatcaaaaaacatggtgatgcgtttagacagagagaagaagaagaagattccctagacaccaaaagaacgaatcgtggatcttccgcccactcgcttcctcagatcgcgtgaacaccactcaccaatttttcttctctttctctcttcttcttctctatctccttttcgcagatcgataccccaactcgcacccgattggcgcgtgttgtcttcttcttcttcctcctctcgacgacgaagagattaaaaagagacggccttttctcagtttctgctccgattcgtatatcttctgtttcgtacgaggtaaagttttcatttttattttttgtttttgttttatagtgataaccaacacaaatgattgggttatacagtagttttgatcagcttcgttttaggaattggatttgaggatttcgtttatgtgatgaaatacccactaagaatttagctgcaagttgcttttttctgcaattgtaagggcaaaatgtgtatactttctcgatttatcatcatagaaagattgaattttgatgggtttctctggtttgttacatcctttggggtgtgactttagtat

SEQ ID NO: 46008 - DNA, 668 bp, Arabidopsis thaliana landsberg
agtgaatgatatttttaatcatctcattgatttcagaaagatcctcctcgaactatcctcactgagaatgcagaataattaccaagatccgcggcctgttgaataatttacttttcttcaagtatatcaaacttggcttctctattgggtgaagagggtttggtggtagttgtttgtcttctttttatttctctacgtataattattataaaattatactcttcttttccaaatttatgtatataattataaatctttgtttacagcatcatcttcaaatatccatcatttaattatcttctgacaaaacaacagaaaaacaaataaaacccaaactttggtacgtagttaaacggtttaaaaagtgataccaaagaaagaaaatagataagattagaggcagaaacttgaagtaatgtttttctcgatcagaacaactcatgatggatgatgagttcttggatcatctgtgatagaagagaagtcttgatccaattcatccatagacgacggagaagaatatttgtcatgtatgcctcctccaagcttcttcatggatgtgataacctgacgaagctccaagttttcttctttaagactcgagttctcttgaataacaagatcattgttgtcggagacttggttaagcttatctaaaagctggtggt

SEQ ID NO: 46009 - DNA, 806 bp, Arabidopsis thaliana landsberg
  unsure (1)..(806): unsure at all n locations
aggggaggacatttgtttcaattcgtctagaaattattgtttgtagaaaaaagaagttaggatatgaaatgaaataagagaaactatggatgcattgaaagacagaacattaaaatcgaggacgacacaaggcgtcgaagttgactaattataaaaagtaattaatcgcgaaatcatgtaacggaaatgaaagcaaaaaagttgaacaaaggagaagcttatttaagaacatatactgttttatttccgatttgaccattcatatatctcaatctaccttacacacaaacattatatataaatgtaccgagctagctaggcatgtatagtatgtcagcgacatgatctctctctttttttctttttttttacttttacggcactttccctcttgtgttattttttgttctaagtattttcaggtcaaaacctattgaacaaaaatcttttttaaaagtgttattgaatttttccaccgcctgaatgggtgagagagagagatgtcatttctcacacaaacaccttggaaaacaatcaacatctgagtgtatatatgcacgtgtatatgtctctctttagtttcattaacattcccgtttctagccacttatcttcgccatgccaccgttttgcatttcacttgacatcacatcttttcaagacctctaacaaaccagaactactttacatagtggatggaataacatatttctaacttgttcattntattcaatatatattaattgctaattagtttcttttcccgacaaaacaataatctattacactaaactgaagaaaaaaca

SEQ ID NO: 46010 - DNA, 957 bp, Arabidopsis thaliana landsberg
gtttattattatacagaatgcatgataaattatgtcatgatcaaaatcagtatatataagctacatactgataaataaaataaaaggcatataaatgattgattgaatctagatgagccttttcgatacttaaatgtttcaaagttttctttggcataaagaacggaggcaagggagaagaacttcttcaccaaccccactgaccattttcagaaaatacttaatacctaaattactaaaatttggaggaatttcggtgattaaattcactagattactttttcacctgacaataataaatattacccccattttgaggtattttgattgctttaagaattcggaagtttccaaatttgaatgtttagttatttgttgttacctaacaaataaagatagatttgtttagttcaaagagaacaaactttagtcgccattaaaacagttaaggatagatttgtagttacagataacatattatcatgcataaaaaaattcaaaagttactaataatatgaaacgagtacttacaaagcaattaatttggtctcctaggccccaacacatcttcctttctttagttatcaattttattaccgaattaaatacaacaaataacattattatcctctatacccactaacattttttaaaaagggcagatacctttaaataaattaattagtactaatacaagctttgatcattcttgctgcacaaccgagtgcattattaaatctgataaagtagaaacacaatgattttttattattttatatgcattcttcacatttccgagcacagtttttacacgtcattacaaaacgaccaaaagcaaagagagagccctatccacaatccaaacccgagacccaaacccgaaaggatttttttatacacaccgccttccgcgtgccaacttggatttttgacttacaccaatgcccggtcttagga

SEQ ID NO: 46011 - DNA, 631 bp, Arabidopsis thaliana landsberg
atcacaaaactactctccttcccacaaaactattctccttcccatttgtgtcgatgcccccacctattgtgtcgttgctgatatcatgggggccccggtctccaccttccctcaggtttacctcggtcttcctcttatacctcacaaagtttctaaatgtggctgctcccctctcctggcggtctgtgaccggtacctggctggttggaaagccaagctcttgaatagggtcggtcgcctcactctggttcaaagtgtgttaagcgccaccccctccattacctttcgaccctccctctcccaaaagtgccatccatgctattgacaaatgtagaagggcgttcctgttgtctgggtttgacacatgcaaggggtggcaatgcctagtggactgggacagtatctgtctccctaaaaatcttggtgggctggggctgagtcgcttggatacccaaaccagtgccttctgatgaaattaactaataatattatcaatcagtacccagtccgctgggtctattggtgcaccagcatcaggctcttgacctagttcctgccctctcgttctcctactttggagcatttttactctacattgatttgtacatgcattactaatgtatgttggaat

SEQ ID NO: 46012 - DNA, 773 bp, Arabidopsis thaliana landsberg
ctaccaccttgatatgcctctgatattgtctttaccgaatccaagcgtaggtaattcgtttatcaaactaccaaacgatagagatttttggatcactactggctgtggaatacttctctgccatctcgttgccggattcatcacacacataaagttctcaagatcgtatatgcacactagaccgtcacaactttgagtgactttgtaaaagttggcttttccgggtatagtttgaatcttgaaagaaaacggcatggtcgatgagtcaaacgtcaatgtcattagagaagcgtttttggatagactgggaggatcccaacgcccgagaaggaggatatcgggatcttcgagtagttgtccatgaatcatatgtctatccttgaaacgttgtgagtctatagtggatctccatgtgctacaaacgcatttgaatttacggagtgtttttacaggaagtcgttcaagaatatcttctaccacatgatgaggtaacgttacgtccattgaattgtctcgtctcttttctatttgctacatactcttttgataactatccattgagagtttatatacactgcagcgcgtaactaggataattttcaaatatcttcaatcattatcctccatattatttattatttatattttagataattatatgattattttactgtttattttgatttttgggttttattataaataagccgaatatacattcttatgtattcagttaattgattaattaaattaaagagtttttgaatactctt

SEQ ID NO: 46013 - DNA, 388 bp, Arabidopsis thaliana landsberg
tgaccgcgtttttggcgtcgccacgactacctccaattgcgattctaaagcttttcattcatcgaaaacagcctgaagctaaaactcgccccggacaggaagaacaaatacggacagaaaatccctctgaataaatcctatccgcacgcaggacgctcatataactttatcgataaattccacatttcttgcgtatacagaagcaactacagattgtgacactgaattcacatcgtcaactcgacggagtatgcgtgcctcacaactgaaaaccgctccctcataatctgagggattttcgccgcggaccgatgccccgccccaagagactgaatacactcgccattccatcctcatcctttgaggcgaggccgccgccacccgagcg

SEQ ID NO: 46014 - DNA, 739 bp, Arabidopsis thaliana landsberg
tcaaagagcgaagaagaaacgagtcacaagggagaaacactcaaattcgcgacctgggtctcaaagatctggaaaaagcttgagaaatgacgagcctaattacggatcagattcttcatctaagaacacaagcagcagcaacaaccctattgagtatacagagcatgaacgagctgagcttttaagaaggttagattctatcaaagatcatctacttcgcggtggtggtggtggtaataatgtagttgataaacctaaagaaccagatcagaatcagcctttccttagaccagttcatcttcatggtcatgctaatcataatcctggtccttcttattaccatcagtatccagaacctattcaataccctggaccggttcatggaatgtatcctcaagcttatcaagatccttatgggtaccaaagaagaccacctccagttcctaatccaaactggtatcctcctggtcattaccctaatcagatggctcgtcagtatcctggaggtcaatatgttgaacttggtcctgatatagttgagccacattcttactatccagctactcctggtaggtacggtgacctgcctccgtatagcccggtttcgtctcaccatcgtgaagagaaactcgctacacagtacagtgatatgcctccgtatagcccggtttcgtctcaccatcgtggcgagaaactcacgacaccgtatagtccacgtgttaataacgggtcgagtttt

SEQ ID NO: 46015 - DNA, 673 bp, Arabidopsis thaliana landsberg
aataattttaatttttcgagcatttaggttctgccggtggaaattgaaactcgccttaataaaagaaaaaaaaagaaactcgactatacgaatgttaattttggatatcccgaagtgaaactttttcttaaattgttaattcgatataatgaaagtgaatgcaccatgctagtttgttttggataatctacatcccatgatttggtgaaaagatttatttgtgagcttccttttagcttatagttgacattattaataaaaatgttataagacagaaaacaaacatcaaataacaaaacaagaaacagctaatcctttgcaaagtacatatataaatcacagggacccttgctcttttggaatcccatctttggactatctttggactatctttggtgaactaaattaaactgcagattgaaagaaagatatctccaattggtagtttctaaaaaaaaggccttagataacgctgatggaacccttacatatccaaaacttggtcggcaatgatcctcaactttttaagatgaaaaccggaaaaaaagaagccaatggacgtatatctagcaacgtcgataggaaatcaattgtcctgttccattgttatttaaatgacaaactaaagggagtggtagctactgtttttttttttcaaacattagatactcat

SEQ ID NO: 46016 - DNA, 578 bp, Arabidopsis thaliana landsberg
acagactaatatatagtcaaaaataattctttaattttgtctatactgagtttaaaagcctaagtatacgttttttgcaggaagcttttgctggttcttgaatgatcaaaaaactcgaaatcatttagaaagaaatatagactgtttcttgcttgtgatcctaagtgtttaccgagccacggatctcatgtttccgggagaacatgatcttgaagaagcaagaaaatatactcggaatttactagagaaaagtcggtccatcaatgaaaaaatggtaccaatatatcttaataaggtgaaagtgattaaaaatgcacggcctaatgcttcaaataattattgatttgtagattatgcatgaattaagtactccatggatagctcgactcaaacaccttgaccataggatgtggattgaggacaagaactcaaatgttttgtccatcgaaaaagcctcctttctaaggtatacacagtacatatgtagttgatctatctaagtttagatacaagaataataagctaattcaaggggatgatttttttcttgtgaattctggaattagactacatagttc

SEQ ID NO: 46017 - DNA, 977 bp, Arabidopsis thaliana landsberg
  unsure (1)..(977): unsure at all n locations
atttaccacccaaaaaaaaaattgttacatatattgctcctaatttctttgatgttttgtgataagtctacaatttttacagtgttaaaattaaactaaatatatgtcccaaaaaaataaaaaaaaaataaattaaagcctttaaagtcacttgggcttagcaatttgttcaccaaaataataatagtgaagccttaaataaaagactaggcaaagttataaaggcccattggttatgccctttttatcaaccaaaacaatattaattttttaagccaaaattattgaagaatgttttaaaattatatcacattctacttactgaagttttttttgccaccatgttgtttttcaaatatacatcatctacatgattatttagaaaattcacccttaaatataacagacaagacaacaaaatcaacaaaaatatagaaatcattatatattcaaaaaatatttggtgaaggaaaatttagtaaatttgtattaaacaaatgtatgtgtgaggctatattggatggccttgaccgagttgtcggatctacattaatttcaccttttacccaaaaaaaaaaatgtcgttaccattttctttcaaaaacttacttaaattatatacattttcgtatggttgaataaggagcaaatattgaccagtcataccgattataaatcttctcagaagataaagagacatagtggtattaattcttctttgtcatttccagttttttttacaacatagctgaacaaacagtgtgtgtaagcgtttagttattattggaatagaaaaattgaaagcagagaaggtggtaggtgtgtaattgtaattggtcgctaataatctataaataaaaattaagatcaagcttttagagaatattttatttcaaatatcatagattttacataaagttggtagacttatttttttttctttttgagttngtttcaaattatacatatgctcattc

SEQ ID NO: 46018 - DNA, 2069 bp, Arabidopsis thaliana landsberg
  unsure (1)..(2069): unsure at all n locations
aaatctgttttcagaattgcaaaatttctttctaataaaaaagattatcgcaaatatactcattggtctaaaatcgaaatctctatgctagagaggagaactaattaatataaacatgtttagggactaggttcaaaaatattatgaacctatttaagacttgcaagctcttggtaaaaagtaaaaacaaataatataccgatcataaaactgcaatctacgacagttttgactaccgccaaagctaacaaaatatcagccagtaggcaaaattttgacgcaaaaataagctggacagttttgtaaaatggtgtacatatgtcatatgataaagcatcttgcgttgaaaagacaaaatccaactctctcgcatctcttgagctttacattnnnnnnnnnnnnnnnnnnnnnnatatagatgagtcctttcatactctcttctaaaccgtccaacaaaacctttttagtcttttttccaaaaacatacaaaacataaaaaaaaaaacaagaatttagttttgtggcctattgattagcacacccatatgcttagaatttcttcatcatcttccatggccttgaaattttctcaaattctcttcatagttttatggctatctctcttctttctcctcctccaccacttgtactccctcaacttccgtcggctctactctctaaacgcggtggagccatcattgttgaagcaacactaccgtagctatagattagtgagcagaaaagttctctccgacagattcgacttcacacctttccatagccgagataacagccgacataaccatcgttccggcgagcaatacgacggtgatgagatagaccctcgttacggagtggagaaacgccgtgttccctccggacccaatccgttgcaccattgatgattacacgtgtatggtatgtgttgtaacattaaagacaaagatcagatcctttgcctagctagcttttttttataagggagaaaattaaacgttagagcttttttttgaaggtacatttctacaatttgggtgttcatacattttattttatttttcttattattttgacgattgtattcgtgaatatgttgatatatactagagatattgacatcttgattattgttttctactcgtatgtagtaatgttggctgctacgtatattgattactagtaggagtattagtttaatagtataaataaaaaaagattggtcgttgattacaatgatgaatgtttaaataattgctttgactttgggattagccaaccagtagctgcgacggcacgtcacaactcagagatattctagatgcattattgtaccaaaactaaataacaataaatggtaatgaacaataataatttttgtttcatgtgacgaaaattaggactacaagtatatatttaattcccttttataatacgcaaacaatttccatcgatcgtcaattctcattttaacaaaatgtaattgcagcaagagtattgatttcttttaaataaaccagatcagagaaactcagccgttttttttcttacaaaaatatatagaaattgtaaatttgtaaagctatatcgtaaagaaaattggtttaaaacgttaaagacatttatttggtacgtctaaacatgacttgagacgcgtctaacgttctgtcttttcgatatgaataaggaaattgtcattttgcaaaagcttcactttctctcattctcaagatgtgccgactttttactatttgatttctacaccaactaaatattattataaatttccttttgataatgacatttcacataatgcaaaaagggactaagaatccaaaggaaatggtaaacggcctgattaacaattttgagtaaattaagtgcgtcttgtaacagtaaagataggatgaatttatgaaaattctaaggatttggagaagagtttctattgtttacgttgcattggtaatgctaacataaatatttatttatcaactcatacagactactgtgtgttacacagataagtgtatgcaataatgtaaaaatgagctgactcatatacgttcatg

SEQ ID NO: 46019 - DNA, 967 bp, Arabidopsis thaliana landsberg
taatgattacgtatactattttttaataaatagttatcttcacttccactttataaaaagagacatgttgaagaactggatagttcgtgttgttcacgtgtatgagcttttgatctaattcttaataattccattagcgaaggagtaaccgatcaaacaagcaaatggttatcttattttcccaattactacaaagtgaagtgaacttttatcgcataatgatatatataccggtccatcatgttttgctgtgtgtgttgttcgcctccatgcaacggtgcaacccggtttcttaagaaactttcttatattatacacatatcgtgcttcttagaaaagaaaataaattacatgtcaattcgttacaaaatagatacaagaattcaaacctataatatttcagaacatcaatgattattattaggtgtttatggttcgctttctgcttcttttgcatgatattgttttatcttacttatcattcttcttactgacaaactcggaattttctttttatcgacatagctgaacattattaatatctaaatataataacttgtcatatatgtgcttaaaacaatgatagctcactgtttgagtgccacaaaatgttaaacatgccatgttagtaaaatcatgccatgtcatttcattcttagactccaatccacaaacttgatgttgatatatatcgttcgttgattgcattttgtttttaattatacggtgtgtcaagtaaactatctggtcactcgccataagtaaaacaccaagccaaccctaagtgatgcttagacgaaatctttgctaaaccttttgcaaaatagaatttgtatgaagatagccgtaagataaggacattaaatttagattgattgattaaatccacagattcaatacagcagtatggctattgatagattattttctggtgataaaagatgttatattaaatcttaactacact

SEQ ID NO: 46020 - DNA, 339 bp, Arabidopsis thaliana landsberg
agttgcaaacagactgagcgtgaacaacatcgacacagttttcaacatttttggtgacaatttgaagtaactcctccggtagaagagaccagtctgtcaacgttgatgatgatgatgatgacttatttttcgttgccatggttgtgtgattttgaaatctgaaaaataaataaatacaaaatctagggtttaagaacttgtaaacgagcatgaccaaataagaacgattgcttaactagaagtaaagcttaaactgatacatactacaagaacatgatttaacatacaatgaaaacatgattagataagaaatagtaaaactctcagttgatgtttacg

SEQ ID NO: 46021 - DNA, 703 bp, Arabidopsis thaliana landsberg
taggaactgtgactgattagtatggcaatagaaaaaaaaactaaagcaagactgcatgtaaaaagaatgacatagtgtcctaaaagtaagcaatcttcatgcttttcacacactagcttacaagtcacctcgatcgaatattccgcccatcaacacaataaatgttgaaatttcttactactactattaaacacacacaaaaatggcggcgtaagaaggaacaatattaattcttcttctcattctcattatttccatcttcaaaaaattgtcgtcaagctttttgagaccaaaactgttctttccttctttgcattttccgtatctatcatttaatggcaataatttttttcctaatgaaatgaaatctttttttttagtctttttaagttatatcaatttgtgtttagctcataataaaatacattgttcgatgtctccacttctccggtttagaaaactatcgtccttctctgaagataccattaaccctaaacccaaacaatcggcaaccgtcgagaaaccaaaacggcgccgttccgggagatgtagctgcgttgactcatgttgctggttgattggttatctctgtacggggtggaggcttcttctctttctttaccactttgtttcggacccggcgatgcttcaagctccggagtctcccggaacttcgttgagtcgagacggtgtcaaggcgttt

SEQ ID NO: 46022 - DNA, 622 bp, Arabidopsis thaliana landsberg
  unsure (1)..(622): unsure at all n locations
ctccatatattcttgcatattgcttcaaatgtaggtcagaaaacacagtttgactagtgcaaacattatgcaacaatctgtttgaaataacaataatttagtgatgaacataataattctgacaatgataaaacgagcatcaacatgtttccatcacgtataattcactagcatttcacgatctagtgctagtgattgagacaatacgagaataaccgacaagggatgtatagccattctcacagtggggttgtcggcgctagaacaactcagaagtagggggaagcagaccaacggagatgacgacgtcagcgtagacgaagcaaacgaccaacgagccatcgtgacagcgcttctcaaaaacctgatatggccccctgccctgtgtagggacacgagaggacatagacatcggagatcctgctctcccgaccctcgatggcacgtcggcggcgggcacaagaaatcgtcagaccatttacgtgcatgttgtgcgctcacgcccaatgctcggcccaacaacgtgagcgccacgtcggttctactttnnnnnnnnnnnnnnnnnnnnnnnnnnnnnacactcaattatgtaagttggctgactcctctagagtacatggtg

SEQ ID NO: 46023 - DNA, 764 bp, Arabidopsis thaliana landsberg
tttgtagatgtaaaattttaaatatttgtttctctgtttctatatgcaccggtgatggaaagaggcagctacaagatggaaacaaaaatattattgaaaagtttcccaccaattttttcacaattcttctaagggtatttacgtaataatacaatttctttctggggttttccggtttagaactaaccgagaagctctgtgattttctcaactacaaacaaaaaatttaacaaggagacagaccaccaatcacgttcgttaggggtttgtctctgggttgatttatttatcagtaaacattactagttccgttggatttacttaaacaaggtttaagcttttctcattggaaatggtaatttaaggttagggctcccaaaagtccaaaacatactcgcaaagaatgatacaggtcaccatcgattcttcatcgcaaagcattaataaagttcaccaaattatttgaggaggattgcaaaacctagaattttgaaaaagttcagcttcgtgttctgatatgttagaacttttcaattaattataaatatatctcaacatggtcaacaggtctgttgcatccacaaccatatacaaatgggaaagtatgtgtggaactaagaccctactaaaataaatttttgctaaagtttcatttttcatgttttccaaaggtgatcccccatgtacaagtcatttcatcaaaagtcaaaaagcttacttatggtcaaacttgatgcaaaaaactaagaaatacctgaataata

SEQ ID NO: 46024 - DNA, 609 bp, Arabidopsis thaliana landsberg
aatatagccaatttggatcatcgacttcagaaacttacgattatatagaaagaaatttacaatcccatatatgccacacactacaattacacgttagtatcatacatgcgcatatgagagaccacacagcacaatcacatgatgcgtctcgaactttgggacgttccatcacaaagggaattatcgctgacccacttgtcaacgttttcattttcacttatttttcgttaatagtcaaatttattttttattaattattatgggcattttattaaaataacgttatctattataaataacattatttatcaaatactaagactttctttttcgtatattatatttataatcactatagtatatctatgcaaagcaatagcatttaataaacgaaaacaacaatccataacgatatttattacataatgaaaatgatgtgtttgtttggtgtaaccctataactagcatcgatatatataaaatcatatttattaagaaactggtttatggtttatcctctttgacttccaaagtttaacaacaactacatttatcaaaaactgatgtgtggcataactatcatcaacatagaaaccagtggagctccat

SEQ ID NO: 46025 - DNA, 777 bp, Arabidopsis thaliana landsberg
ctcataaatctgtgatagcgatggacggtgggctattcgagcattacactcagttcagtgagtcgatgaagagttcattgaaagagttgcttggagatgaagtttcagagagtgttgaagtgatactgtcgaatgatggttcaggtgttggagctgcattacttgctgcttctcactctcagtatctcgaacttgaagatgactctgaaacaagttaattttaaaagcctttttttgtgtttaaccttcttctttgttttgccgttagggtttaaacaaataaaaaaaaagtaagaaggtaaaaatgcccttttgggaaattttatttttgacaattttcaggaacaataaaacctggattcttcatcaaagctctgggaaattcaaacgaccagccaatgttgtagaactatacatatatattcgagttctttctatgaacgttcattttttcccaaaactagtaatcagaaattctatcaagtcttttcttttgtattcttaacttgaaacacaaatcaggcattggaaacaatgtcttctctatatttccgagcaaaagaaatacttggtataaaaacgatctttttttctcgaatttaatttaatattatatttttaaaatattaatttaaaccctttagactaaaaataatgaattaatataaaacatttgtttaaagattttcgaatttactagcaaaggaaactcccaaatttaggatttgaattaatggaacatttgggccgaacaactagaacattttatttttgaac

SEQ ID NO: 46026 - DNA, 962 bp, Arabidopsis thaliana landsberg
aaaaaactctatgataagagtaccgcaatagacgtggtgcgttttaagtcaaaggtcaaaaagccgaattatatatttctggctccttttacaactttaggaaaatctccttcttttcaccaagtagttttcacttgaacccattttttaacaacaattcttctacttggattgataattcaaaaggaaactaactctcccatagctaaaactgaatcactgttaaaaaaaaaaaaaagtaaagtaaatatactgaatcaatgtctttttcttctctggaagtaaatatacaagtttaaaattaaaggagaagagaagctatatattgctttgcctcaccatttaggagataattcatatgaagcacagaaagcatatcctttggcatattcgataatatatggcatctaatcatctgtataagcttttcatatttttgttagatgctttttcgtacaaatgcattaagataaaattaaacaaaaaaaacaagatttgatattcagtttcgtgaaatattaaaagaagtcaaaaaaagggaaaaatgaaaagtcgaattggtggacagtggactcattggtccacttaaaagtcatcagaaccgtacacatgcaagcttggtccattttcgtatgacgacgtacaagttacaacattcaaaaaacttcctaatttacaagtttttgcttatgtttatgggaaatatctttctgcaacgaaaaatcattaagactatatttttctgttggcaaagacttgactcagtccttttttactgcccattagtaatctttggagtgaaaatacgaatttaactaattttctaaaatttgatttaagtctaagagagaaaaaaagatttcggctattaataagttacaactacacatcgaatggactagaaagttttcgctcttatatttttttaaaagaaaaaccaaaaatcctttgaaactttttag

SEQ ID NO: 46027 - DNA, 1025 bp, Arabidopsis thaliana landsberg
gtgtcgtccgtttgctccgtcaccgtaacggattactaaaaactacagtattcaattttatttccatatgaggtaagttgatgacgattctcatgctattttccactcgttggatcgcgatcataattaagtaaaactttaaatgtttcggttatttaaaatgcttgaaataatcaaataaaatttgatactaataaatatgacttcttcttttttagtttaatgtcattaatcactttgttgtgtccattctatactattatttattttatttattacacctaatcatatttgttatgcactatcgttcaacctttagtatcctatcattagttggattacaaaataggactactataataagttaatttcttaaagtactaaaatgtctagagtccagatcgacatagcaaagaaagaaacatgataattcattttttcatagaatagaaaatagaagccgtggaagcaaagataagaaaataaaatttaaatagtaacagaaacagaaagttgaaagaaaataaaataaagaggcacgccaatatgccaaaggcgcacaaagaaatagagcggtgctcagcgtgggccgacaattaagtggtgggaccttttttttaagctgcgttcgaggctaaacgggccaccacggcccagtactgaatattattattattttaaaattgtatgaattaatttgtgggtgattccgtaattctttgatttctttatcgatttaagaaagtttatggagaatattcggcggccgcacttttatgccaaaccaaatctcatctttaacaaagtactgtagtggtgagatctcgaatattatatttaaccgattaagctataaaggcaaaatctgtattgcacacttattcaattttcctaaatacccttaataagaagattacacctttaatgaataataaaacctttcatttcattgataatgacaaaattttgaacctttcaacttatcattgataaaatgatatgcataaataaaattaaatgttaaa

SEQ ID NO: 46028 - DNA, 314 bp, Arabidopsis thaliana landsberg
gctcatccatctctgccattcctgccgcgaattcctctcgatcagttatgtacttgtgaagagactcactcttgattttccagtgagaaccaacttcgtatcctttgagacgaccgcttttcagcaaattcataatcgtcgtgcgggaaactccggcgacttcacccgcctgagttggggaaagatcctcttctaacaagacaagcttacggtcgagcatcagctcaacaagtccgtaaatctgatctttagcttcggtgacttccggtggctcgtctgatcgtttggccgctctcaagaggctcagaaaaccc

SEQ ID NO: 46029 - DNA, 486 bp, Arabidopsis thaliana landsberg
  unsure (1)..(486): unsure at all n locations
atcacatactgaccctaaattgactacacccaatgtaaagaattgcttgtgcatattgagccatcagttgtttgtttgtgtaatggatttgacaatgcagaattcaggagcaaaaaaaaccgcaaaggagagagagggaaaggatctccgagtatcccacctgtggcgcgccttgtcaagtccannnnnnnnnnnnnnnnnnnnnnnnnnnnnnnnnnnnncatcccaacgagtgcctccgacaccttgtcgttgatcacccgcaccgcgtcggcgacccccctggcgagaaacttccgcctctcggaggcccggccgcgtcgccgggcgccctcgagcgcgccacgctagccgcagatgctcggtgcacggccttgttggtgtgcactcgacctcaacggccggcgcgccgtgcccgtcaaggatctggcgctcccgaccctcgtgataaggcgggcgcgcccgtcgatgtgagccgcgatgaag

SEQ ID NO: 46030 - DNA, 538 bp, Arabidopsis thaliana landsberg
ctaaatataggcgaaaaatagtattacttgattatttttagttcattcgcttgacttataaaaagatggtaaagttctacgttgatacagtctacttatgtagtaggattcgtggtttcgattgtaacatgaaaaatcaatcgattagagatttttaattacagtttaccgttttccgttcttcccaccattctgcgtccatctggattactctcgtaaatggatgataaaaacatcctgttttttttttgcgtattttaaggtatacagaatacttatcttgaatgattgttaaacgattattatggctaatttttttttcagaaaactgttttgatttttttttttaattcattttgttagatgaaaactgttagtgttgtgttgactgggtttttttacaataatttattaacttatcaaaaatcaacaaatttattaatgatgaagcctcgtgaatttaaatacttttcaatattattatgaattaataaatgatacgaccaatggaataatattggaatccaattcgtttagc

SEQ ID NO: 46031 - DNA, 731 bp, Arabidopsis thaliana landsberg
tcgttgaaaattctcctaagctcaacagtggattcttcatcattaaaagaggccagtgaacaagagtctgagaattagagaacacatgtaaactaagagcattttcaatggtaagagcccctcaactgctttcaccattttttaataataaatttttgaattttgtgagatgagaatttatgttatttttaaaatttattttatttcacaaaactgaaaaactattataattcataacattgatttataaattagtgaaacactctatatactctatatccactctattttataattttataattaaaatgtttggaaacattttaattagtgaaacacttatatccacttgggcctagaataaacgtagttgggcctgctttcaaatggatacaaaacatatcgttttacgtctttcgtctctcttctctcgccgaaggaaaaaacttcagccatggccaattgcttcgcgccacaattaaccttcccgtccttctcgccacgccatttcagccctagaatgtcgcaccaatcaccaaaaccaagcacgagcaccaccacaagcatcttcacctccgccacaaagctactatggggaccatctcttcctccaggtctacttatctccaccgctcgaacagcttggacaaccgggtggcagctcatgatgacccaactcgctccatccgattcatccgggtcatacccccgacccatttcaaaatttcgtc

SEQ ID NO: 46032 - DNA, 664 bp, Arabidopsis thaliana landsberg
  unsure (1)..(664): unsure at all n locations
aaacgaggaaaaaatagaagagatatgtcgtgacgtgggattagttaagttaagatgtatatgatgtccaatcacgtgttgcctttctgttcttgctgctttgggcatattacttctatccttaaatgtggttctacaaccataaattcaatccctactttaacaaatttcacttttttggccgcaaaatctataggctatcccatatcatactctaacattgtatatagtcattctaattcgaccagtgttcgccatagacattgtaaaccatttgtattatgaaacatgcatatgaacatcattccaagttaggattgagcactaaaacttgttatactttcatgtgttatatattttattatccaatgcgttgagaaacttggatccgttagatctattttcttgcttaaatgttatggaacgtgtaaatgtaaaatatccaaatcacattcacgtggtctttaatatatgaatagtgaaatacctaactcaaaatatcagaatgctgagttatattataaaaacatatcttatcaatccatttaaaaataggtgaaaagctaaatatctgattcaaaataaatatctcaatatcttaaaaagatanaaaattaaagttgcaaccaaaccaaanactatttttcggatatcaaaactttta

SEQ ID NO: 46033 - DNA, 621 bp, Arabidopsis thaliana landsberg
tgccatggtcgatgactccgcacgggatggccatgatccatcgcaggcggtcctagtgacatgtctcggccacatgctaagcccgggaccgtgacgctggggaaaaatccgggcagcggcttctctctgctccatatcgaacggagcgacactggtgatgaaccaccccgatctagactcgtagcgcacttgcgacgactggttgaagggaaggggtgcctcagcgtcacttttatattctgcaaagaagtccgattggggctattttggcgagatgccgggcggaccatgcgcttggtttgttacgcggagaagacgcacaatgccagctcgagggggccacatggcggcgaccggaagaatcaacacgtgagcgaccaactaatgtagtggagccatccgccagtgacggtcccacgcacgccacggattgacggctgggccaaggtgtcggcgggacgaaaccgcgcgcgtaagagtgatgcgaggctgactagaagtgcggtagttgggccacggggaggggaattcggctgggcaactcaaccgaactagccccaatgcaagttttgcctttttcttttgtaatttcgttttttattgttttacttcataattaaa

SEQ ID NO: 46034 - DNA, 535 bp, Arabidopsis thaliana landsberg
tgggggtactgattttctaagcgttggaaagatacggagagaaaatgagattgtgtatgagctttccgcaatttattaaccaggaagtcaagtcattgagtagtgtccttgtctacctatttctagatcataccattaaaaaaagaagagaaaaagcaaaatacatacaaattcctggcctagtcgatacgccatctaaagttttgatacccgtttacgacaagcacatgacatgacacattgagtattcttttttttttgtttaaagaaaagaatttgaaacagagatcaaggagtggggaggttgcaatgcaagggggctctgacacccgtggcgcgtggttacctaccgctaccggcaagcgtgattatcattgacagactggggcgacgcatcctgagtcctgacgcctgttcaaataaaatcgaattcaaatgttcactaccacccatcccgaaagagccccagcccgcagggagtcaagtagtcaaccgttctgccgctcccctcacacaaaaggcaaaccaccgccac

SEQ ID NO: 46035 - DNA, 432 bp, Arabidopsis thaliana landsberg
  unsure (1)..(432): unsure at all n locations
nnnnnnnnnnnnnnnnnnnnnnnnnnnnnnnnnnnnnnnnnnnnnnnnnnnnnnnnnnnnnnnnnnnnnnnnnnnnnnnnnnnnnnnnnnnnnnnnnnnnnnnnnnnnnnnnnnnnnnnnnnnnnnnnnnnnnnnnnnnnnnnnnnnnnnnnnnnnnnnnnnnnnnnnnnnnnnnnnnnnnnnnnnnnnnnnnnnnnnnnnnnnnnnnnnnnnnnnnnnnnnnnnnnnnnnnnnnnattgttttttttcttttttttttcatatttttattctcttcatttttttctttttttcatttttcttatatttttttctcttctttctatttttttttctttttttatttgttttattcttgttttttccttattcttttattattttttttatctttattttatcttcttttcctatttcatctttattttcatt

SEQ ID NO: 46036 - DNA, 589 bp, Arabidopsis thaliana landsberg
gacattttaatagcggtttgggttctgctttaaaaatttcaactaatatagcgttttgttgtgtgttattgttaattttacaatagcaattactatttgctattaaattgcgtaactatagctgtactttaaatttataatagcatttaaattatgtaataattgatagtttaagggttgctgaacaatagctttcttagagtatccgtataattactgtatttaagcgctagatattgtattttatactgtaatttatactgttttttataccatattttatattgtaatttataccgtataattactgtatttagtcgttggatactgtatttagagtatccatataattactgtattttatactgtattttatgccttattttatactatttggtgactctttaacaaaaaaaaagtattttacaaagtgtttatattgatattaagtctagttgtaatgggcattagaacaaaataaccattaaacaagtttacagagatattaaatattggatacaatggccctataactaatttgtgataaggcccaatatcagtagttgtagaactgaagcccgacccatga

SEQ ID NO: 46037 - DNA, 543 bp, Arabidopsis thaliana landsberg
tgctacatttcatactcattctcggaaagaatataaagtatgttaggtttgactttgaaattataaacacttgtatatttcttcttttgaatttataaatacttgtatttgaatatttctccacgagttagaacgtttcggtttaacgattctaaagaatagtatgattatcaaaaccttgttaatccaaaattatactcaacaaaagactcttgaatatttaactaaaaaaatcgaaagacataaacagtttttcatttggtctgtgtatgatatgtttagtattataacttgtttagctccaaaaaaaataaaaattagttattataacttggaatgggccataccaaacaagctaattagacgaaacaaagcttgcacgaaatgtggttctaaacatagtgtggataaggcttaactatgcattttgaagtgttacaaaaactaaaagttcttttttatgaacccagaaataagtgaagtgccgttcgcatgaacttctctcgagatagcttctaactagttcttccgttgtaatattgt

SEQ ID NO: 46038 - DNA, 737 bp, Arabidopsis thaliana landsberg
  unsure (1)..(737): unsure at all n locations
tcgaaattgtgacattctaggcgtgagaatcttaaagtttatttcacgatagataatgttctggacccactttctcttatttcattcaatcatttactaatactattttgttttagtttttttttgaacaaaactactaatactattttgtaagccttgttaatttctctgtgataaagttatatagtttcgttgttacaaggatgtcatctccattttctagtttttgataagagtaaaagtatatcaaccctcaaagtcgagaacacatgtttgcatgagctacaaaaacaacaaccaaccaatgtgtgtgaagtgtgaacatatttgttgtgaaatacgcaccaaacattccatgttctccttgtagtttcagttcaaatgctacactaaagagaaaattggctatgttcattaatttactacaattgtgtcaaaagaagaatgttcaatgagtgattgtggaaatgattattcacacgtatcccaaannnnnnnnnnnnnnnnnngatcatcattttgtaaataaatattaattgattcgatgttgatttgtgtgcgtgagattcattgaagcaataatgacgataaaggagacggcaacaaatattggcacgacacatgttccatcaccgaaagtcctcggcgcctatttcgcctcctaagtttttctacttagaccccactgtgtttttcgtttgttaaatcctcttattttgtgattcatatataaaaaa

SEQ ID NO: 46039 - DNA, 704 bp, Arabidopsis thaliana landsberg
  unsure (1)..(704): unsure at all n locations
tgggcttttcataggaaaaagggatatcacatgataatggggttggtgcattttatcgttatgtcattgctcattgattctccatctaattccattaacggtaccaagttcttgcttcatgtgaacacaaacttatcggtttgtaacacacacacatacgtattaaggttgatcatatgaaattgattcatcttaaaaacatatattgaagatacaccaatcctgtttctaggcattcacaagcctacacatttgagtttgtttctgttcaaataaccctacaattgcagcattactagtaacctttttaacatgttttccagactttacctcagttctnnnnnnnnnnnnnnnnnnnnnnntccccatttgatcagcggtaagatctccaacctgagaaatacagtaaaatgataatgtcataagtcataacatagtaaattttaaacaggaagctaatagaaatataagtcataacataatgataatgtcgtagcaaagtaaaactcttaaaaggagaagccaataaaattagaagtagaatatcattgctattaatcaccaagacctatcaatggttggtgttaacaggcaaacaatcaaagaatacaaaggtttgagatttaatcattcgtttaagacaacgaatgatatgagttctagtgtctgaaggagcataatcccttataggagtctgccatcaa

SEQ ID NO: 46040 - DNA, 775 bp, Arabidopsis thaliana landsberg
attgagtaggacactcacaatgatctcagcaatgactcggggctgtttgataggctttagaaagtaagctaagagccttgtaaacacaaccgccaagacgatttgtaggatgataagaggaagcgcgaaatcaagagggctttcgttttggaaggctccattggaggtagccttcattggacccgggcattgccctgtaacgttggtgcttgccatcctagtggagatctacttacaggttgatgattggtcaagaaacgagatactgcttcacccttcaatactgccttggctgctccctcattgcattgccaagcgaagtatgagacctgaatgggaggaaaaaaaagaaatcaagattttattctgctctgttactgtttttattaaacagaatctacattaaagaagtgagtatataaaaggaaaaaaacagaaaactaataatgtctatagtttgctaataataggtagatgagatagaagcggacataccaactccagggtgggcatatacctcgcacttttctatttatagactatcagttacttaacttccaaccatatcgcatctatacttcacagatatgaactgccttcactgcgccgaagttttcgtctctgtctttgtccttctgtcctaaatatgcaagcacttgtacctgtctcttaactaagcagcacatttgatgtcttaccttctgaagctttgtaaacatcaaccattttcaaatatattatcattcgatagacgatataaacattcttgagatgc

SEQ ID NO: 46041 - DNA, 349 bp, Arabidopsis thaliana landsberg
actccctctttagcgtacccaactctatataagattcctccttcttctctttgtcttctcatcgaactttcctctttcttctctcatctcctctctttcactcttcacaccagaagatacaaaaaacaatcactgtctcaagcctgtctataccgaagataagaaaacaaaagccatggtttctcttcttacaatgccgatgagtggtggtattaaaacatggcctcaagcccaaattgacttgggttttaggcccatttaaagacacccgaaggttattaaatgcacggtgcagatcgacgtaacggaattaaccaaataacggccattatttacacccagaaccacc

SEQ ID NO: 46042 - DNA, 556 bp, Arabidopsis thaliana landsberg
cttaaataagcacattgctaatctgaaatgaaacgtcatccacaaataggcaggccaatggatgagaaacctcaacctacagtacaacaagcactcgagctcgagtacaccctacatacattcatctccaaccataagaatcagcacgaccaatgattatttattggtaaacatgctactggatgggctcgaatcaaaataccaaccagggttgctccgctatccttttactgctcgactacctcccccgcaggagtgccaacagaagcggcattcgcctgaaccgcggttcgccccacagaggtaaaacttgcaggcagctggtacagaggctgactcccgtcagattcacccaggtaggcttgacccagacagtagcccagtgcccgtgcaacagggactgccactgcgttcccgacttgaatatacctatagccatgagaaagcacacattgttcagaaggattgcaatgcagcatgatccctatgggtctaaagcacgtagggccctaggccgacatgttagtaacacatcgccgtgcagtttatgtcagta

SEQ ID NO: 46043 - DNA, 450 bp, Arabidopsis thaliana landsberg
  unsure (1)..(450): unsure at all n locations
ttatagtgtagatagacttttataacatttctcataaaaagggaattctttttagaggaagctgcaactaaatagtttttcaagatgcaacaatatatttcttagtttgttctgttgggatttgcatctcaccagtagtgtacttaggaacctgtgttgaaaaaaataaaactggcaaacagtgtcttatcacacatcttacggtcttgcgtgtgcctaaattcaaactgagcaccaagcatccatttctgggaatttctattggttacaatcaatggttattgctacaagatattcaaattgcttttgataggtaaaataatggggaaaaccattttccaagtagaggaagtatggtagcatttaaagtataccaccccatatctgtagtggatgcttatgtaaaacntattatgcctgggcagacatttatnctctttcgccttgtag

SEQ ID NO: 46044 - DNA, 1774 bp, Arabidopsis thaliana landsberg
atcattctcacttttaggtctaaacttgttaatagctagattgtttaattcctctaacagtaggcctgttttgaaagatgtctccatttgttatgtatagcttaacttttatcatcaacgctataacaaattgttaggatcaataagtagcttaggaatgttcctttgtagagttttacttagaacaaagagtggtaacttgcaatttaggtgaaacctatagagaatgtagctcaatgggttaaggtgaattctatagacacattagcttgcgagtctcatcattctcacttcaactagaagttaacataatatttcatcaattcactaaagaacataacccaaaaatacattaaaaaggaactaatattaacagatctccggtaggtttacttctaataatttgcaagaattcttattgttgaagaatcgaaacgaaatatagtgtagaatcctttaattttgttcaaatactaactcaaaaaaggcttcatatttgattatttcctagttgtttaatcaataaaatactttaaaaaatggattaggaactattcgatcaatgatgatgactaaacatggaagtcaacgtggcaagatctagaaaagcccccgacctctgtacattgtatacacatacacagacaaattgaacgaaaatcacggaatcatcattcagttacagtttttttttctgtgtgtgtatgaacatggtgttcaacggccagacggttatgtctgtagcccatttgtcggctgagatttggcagcgtttacgattgatcccaccgtccgatcgtataagcagccgagagatgcttgagctagtctgcttctttccgctccagcaattaggtcgattggctttatgtctcttgacttgtctatgtcttccttctccaggtttgctctatcctgaaactgcggaagacgatcgtgatcacgtttatgtttatggttcctcttcttcttccatcgctacatatcagcatcactttcgtctgcattttgagtgatcaaaatcatcaaactcgataatgtcatcttcattgtaaagtttttcattttttttccttttgtaaaattcctctgttttctctctgttcttcatgtagttcttgcgatttgccgaaaattgaatctcgtttcttgattacagtttgtatccatgtgaatatgtctagatttttttttttttttttttgaagtatagtcattgatgattagaccatcatttcggttttacctcgagatgtttaagacaaatgttgctgtcttagatttgttttgtgtccgttcataacttttggggaaaaaaatgagtaaagatcaaaaggtttttgagttaatcatccggtttaggtggtattgaaagtagctacctcggtattggtgttaaaatgtctgtactccttgagctctctgcgagagacagattttgtttaatgatcaatcaaacatttatcaaatctctgagcttagtatatcttcatttttcatttaatagcaagtctcaatcgctatggctttgtatccagatataatcaactctcagatcaaggacggtgtttgtttttaagctaactttcttgggtctctaagtttggtgtggtgagttattggtttcttgtcttccaagagaaaacggctagtgttaatgggagagattcacgggtcttcatttcattatttcttttggtttgaatgaaagacttgtatggccagtactgtgcatggcaataggcaattacatgagcttgtacctgctaatcag

SEQ ID NO: 46045 - DNA, 714 bp, Arabidopsis thaliana landsberg
tccgttctatgaagaaaatcagtgaaaataatagtaatcctaaaagcattcttttcttcatattaaataatactttttagttcataggaaaaatatatattagtacatgcataataattccatttgatactatcgccttggtttttcttccattagatacttataaagtcgaaaatgaataagttattaactcttttgatattgttcacttttgaaatgtagattatagaaattgcgatggtctaaagggtccaaatgcaatatattatgttaagcatatatgtaataggatatttagttacgttacgtaaagaaaattttgtaacgtacaactatgttttgaccaatgcagtcagtgttaccactaatttattagattcatgatatcttcaaaaatacgacccaactacacttataaaactatatagtacttaaaacgaatccgaagccaagaaaacaaacaaacttaaacgttcaacatcacgtgcatgctcttcctccaagtctcgaacttttccgacacgccgcaaccgctgattaaatttagattattattttcaaaacatttaatcattaaagtaatttatagatacttgtcaaatactcgtaggatttgagcgttatactgaatcttaatatctatgtccgatttgaataattggatcgtgaatatatatagtacatatgttaaaaccaaatgtaggtaaaaaaaac

SEQ ID NO: 46046 - DNA, 445 bp, Arabidopsis thaliana landsberg
  unsure (1)..(445): unsure at all n locations
ttcgaacttctcaccgcgaccacgtttcttagtagtaggtgctggaggcgagccttctccattctaaaaatatttagcaaatatatcagctgggtcaaacgaggaattccctacctcatcttcgccctctgcgggcttcttggccttcttaggtctcggttgcgtgcctttctgtccgagctggttgtactcaggatcctacacacgtgagcttcttccaatcaacaccagatgcgaaacctacccccttccaatcctcatccgcaatcttcccctcgataaccgcagtcttaagcttcttttgatactcttctggcaactcactcagcccatccataaactcccactggtactctacatccggatcgccctgctttacgtactcgcgcagattttgcaactggaatccactcacacacnccctgctttatgatncagcactaaa

SEQ ID NO: 46047 - DNA, 739 bp, Arabidopsis thaliana landsberg
cgctgttattaccctatctgcaaaccatgtccacctactttctcgatttattcttctcaactttctaatcaattgcatggagaaaacaaaaaatgtgaacatgcatacatatttactatagaatatgttattatgtcttaatatataagtctacttgtccttatacttcaagtctatgtctattatttgatattccatagatcgctgttcaaagtcatacctcatttatgaaggagtatctatcatttaattctatttgaaacggtgttcttaagatttcacctagctagctaaatttatccagagaattgtgaactatccacccaaaagtatccaaccattactctaaatctttatttcaaccgaaacgacttcaacaaatactaaatatgccgatcaatcttaatggttatgattaagatctaaaacagtaagacgatcgatttatcatcgcagctaaattccttttttcgttctctgtctcaattaaccagcagacttaaacctttgcttccaaatctccaaaacatctttttactcaccaaaaaaaaaaatctccaaaacatcttttctctttcctttataaactcttaattaggtaaactcgaactttccacgaagttgagctgaaacgggatatatgtgtcaaggcgaataatctgttgaagagatacactgtggtttagaaattacgcgttttgtaatcacatatattttagaatacactcgttccaaacag

SEQ ID NO: 46048 - DNA, 962 bp, Arabidopsis thaliana landsberg
agtaaagaattgaaaataggaatgaaaagacaaaacaaataaccaaagtgggaataagatttagatgaaaaagttgtaaacaactccttaattaatttagaacccactaatttgagttaatggaatgagtgtggaaagcctctctgagtcaaaaacatatgcacaccacaagaccaccacacttcataaaatatggacctacctgttttttcttttcctatagttttatttacttctcctaagaacaagtggacatgaaattgttttgtgcattcatcatatcttcagctaccacgtaattcgaatttgaacctcttgaaatattgttaaaaatgttgggaaattgaactattcaggtaggagtaagccaagacaccaaatgataacaacaaaaaccattcgacagcttttgtagtttcaaacccaaaaaatgtcaatcaacttaaatcggatctcatgagttgtctgacttttaaaaaaaaaatacattttgaaggatctgtgatccaggtgaagcaaacaaggtgtgtgtcagtgcaaacaagatatatagttataattttttttttttttttttttttttatcaagtacagaactatagaagtatatttgatgaaaatggcaaatcttttgacatttgtttataacttaaacgcatgcataaatcaaaaagttttgtttagtactttagaaatattcggatgtgtatattatatacatttataattctaagtggtggccgttggcattggcacgacaaaagaaatgtgcaagctattttgttagtgcgttcaataagcaataaaagcattgttttgtgtgaggtaacaaatgcatttatatcatttcaatgtactgaacacagtgaatgcatttcccattcaaattttgaacgaatttaatatgacaataaacaatattccactcagtttttttctaggaaaattatttcatggcaaaa

SEQ ID NO: 46049 - DNA, 984 bp, Arabidopsis thaliana landsberg
acactggaatactcatttgaacaagaaacctaattcccgaaaacagaatgcacctgaatcaatcgtcggcgccactcctttcacggataagccagttatgtctacagaactgagaagaagccatggagaaggaggagaagaggagagcaatacctggatggaggagaccaaccactttggctatgacgtccacgtaggatctcccttgccacttatttcccactacccagacaacactctcgtgtttgacccatgtttttcctttaccgatttctttcctctgctttaggactttcctggatttatctcgaaggataaattcttgcatagacttttcgagtcattatgttattattgctttacttatacaatttacatcgagttacgtagcctacgcaagaattaatcctaaattgtgacaagtcctaattcgctgaggatcgtattcttaccttatgcaactgcagcacaatgcagcagaatacttatccctagcgatttgcgaaccagagtaattattaagtgggaaaaagaaaaaaagcttatgtcctttgccttaatcattgtatgggatttctagtaaaagcaatccaaattttggtaacatgtccagaagaaaaaagaaaagtcgtattacttacaaaacatcatcttcctgaggatataaggtaccgtcatcaaggggtagagaaggaggggttcctggaggaatgctagcagcaccattttcaccagcttctatgcaaagtgcttcggcatctctgactgttgaatcgagatcaatatgcccagacagctcattgatgaactttaagagagtgtcaaaatccatctgttctcccattatcttgctgcggcatcgcttcaagaccgccacacaaacatataggtgaaaatgttccgagaggtagtgggtccacatcacctcccacagctgcattgtcttctcatactcaaattccctaaaacacaatgtcaccagat

SEQ ID NO: 46050 - DNA, 336 bp, Arabidopsis thaliana landsberg
  unsure (1)..(336): unsure at all n locations
aaaaaaaaataaaaaaaaaaaaaaaaaaaaaaaaaaaaaaaaaanaaaaaaaaaaattaaaaaatttaattttaaaaaaaaaaaaaaaaaaataataaaaaaaaagaaaagaaaaaaagaaaagaaaaagaaaaaaaaataaaaaaaaaaaaaaaaaaaaataaaaaaaaagaaaaacgaaaaataaaaaaaatagaaaaaaaaaaaaaaaaaaaaaaaaaagaagaaaaataaaaaataaggaaaaaaatataataaaaaaaaaaaaaaaagaaaaaagaaaaaaaagaaacaaaaaaaaaaaacaacaaaagaataaaaaaaaaaaaagagaaa

SEQ ID NO: 46051 - DNA, 485 bp, Arabidopsis thaliana landsberg
ctatgaggagaggattgatagaaacttacatcataagattaaagagtaccaagatagctggggaaagtgtagagaggtctactatagtttctccggtgtgtcgcgaattcaccacttgaaacaacgatccaaccaacttctcgtacgaactcattccttctagagactcagaggtccattcaaaggcgcagaagaaaagaagctgtattatcagaaaccctagcaccgtcactccaagaagaacacatagacgaaccgagagtagatgagagtatcccatcttattgtggttcttgagaatgtaaccatactcgtcacgctttgtgatcttataaagtccccatatgagcaaaaccaagaagcaagggaacaaagtgtttcccatcagtacttgagggattaggagccagatgagaccagagtttttgcgaaagatgatcatgttctcattcgtggggacaaatccgcagtttgcaaacgtggaa

SEQ ID NO: 46052 - DNA, 567 bp, Arabidopsis thaliana landsberg
acttgccagttttctttataaaaatatcctaccgatcatttttatatcaatagatgtagttaaacgaaaaaaaataaaaaaaaaattgttgcactgtttgtgttagattttgaaaaagaatatatgagataaaagtaaaaaatttaagacaattaacatgaaacgggagcccaattagaaaatattgagcacaattgggtaccagtgagtggatgaataaatttccgtagcccaattagggcccataataatgtataaatatcgagatgatacaaccctacacaaggcagccaaattttttaaaaatggacctcaacctgatgataacgtcgagcgcagagatgaagaaaattaagagtctcgatgatgaaaaggtatgttaaatagtgtgaacgcctagaatcatcatctgtttataaattggtttatcaattcaagtatcgtctccgactctgtgtgtagctttaggctggatttgattgggaggaaactgataagatcctgagtggtgaaattaaaccaaagaccttgatcactagttatcatttcctagctatttgatatcct

SEQ ID NO: 46053 - DNA, 630 bp, Arabidopsis thaliana landsberg
tctatgtgtaggccatgtgaaataatttgaagttaaaaaggtagaagaaccgacggtatggtgagtggattagcttcagtttcatggtatctactgctatctacgagtctacgaccgatacagcctaaaagtcaattaaagtaactgtttttattttaattggataatgtttagggtataatctaaaatcaataaaaaaatctccttttaatgatatgtttgtctccttaaatcaagggtagattagtgtcttcttccgtactcttccaaggacaaaagtaaaaaacttaattcagactttactacgaaccgatacttttttaagaataaaatatgaaaatgcatagttgcgtacataagtcatctatatgaaattgtgaattgaaacatatcattatttaaaatggtaacaacccgaacaatcaatgtgaaacatgctaaaacaagattcattagtgcataacatggagagagaaaaatgaattgtgattaataattgtgctagttgctaattaattagtgacgttggaggagtgggtgttttcacatgggaagtttctttcgttaagttcatatagctaaggcatttggtactacaagaggcagactttcctttgggctgtcattata

SEQ ID NO: 46054 - DNA, 303 bp, Arabidopsis thaliana landsberg
aaaatcactaagacaaaacgaatgccatgttttcagggcttctttttatgggcggtgtcacatgctatgatgtgggatgcacaattggtaaaaaaaaacatctcacccgacacaaatattctgagaccgggcccatcaatataagcactggcttatcggactcataacaactagtctttgcgcctctttgctttactctcggccaagtcttactctcgaacgtagggtatatggctatatcaactcctcaaacctacctgattgtatctttctgaaggaatcctctgatgcagagattcgggc

SEQ ID NO: 46055 - DNA, 766 bp, Arabidopsis thaliana landsberg
aaaccagaccgaataatttggctttatatgaaaaggtcattggattctaaaatctcaaaacaattttggtgtaccgttacggctatattcggttcggatcaattttctttgcattttgttgataggttatatcattttgttttactttattttgataaaagggttaatattactcaatgttgaaaatgatatattatacacgtacatcaaatatgaaaacacgttatttattttagttgaagtactacatgtataataaatatcattttcaacatttgtaacaaaagattagtaaacaataataataacaaaaataatttagcttgagccagaatattcttgttaacttacagttttaatttaattagtgtaactgtactttaaccgaataaccgttatgtaagtatcgatattcaatatacacaatcaatcagagtatctatatcgaaaacaagtcgatccttgttctaattccatacaaactttttccccaaaattaaagtacagcaatcatcacatgtatctgcacaccaaagaattaatacacatccaataatagcacatcaatgaagttacataataaaactagggcttttttgaccgaccacatcttaattagatacagccacttctcctagaagggctgcacgtagattaaactctcttcatcacaactctcaaccttggcaaagtcagtcccgccaaaagcttatgtctctcatcatacccattttgttatatctatatacaacttctatgccttttt

SEQ ID NO: 46056 - DNA, 532 bp, Arabidopsis thaliana landsberg
  unsure (1)..(532): unsure at all n locations
agagcggggaggaacaccatcacagcagaaccccgggcaacaaacttgaagatataatttgtttagtattaaaaaataataaacataatttggacttgcctgtgtggcacggacctcaacaaaaagcggaaaagggcaccttacataatccgctgattgcggcgtatcggccggctgtaccgacgagatccacgtccaatccctcgaaggacgttccaccttcagcctgcgcgggttataaggtggttcctcatttcaacagacgtcaatcgaacttggtaacgaacatggaggnnnnnnnnnnnnnnnnnnnnggttaatcctcgttcgaaagcagaaggttgatcggaatttcctaaatgaaaacatttatagaatcaaagcagaccttcagctgcggactcacagagatgttaggtgcacagtcggtaagatttgcacataacataaagtcgctgtttacatgcggagaagagtggtgtacgatcgcgctactccatttagagacgattgtggatggtttgagttcact

SEQ ID NO: 46057 - DNA, 563 bp, Arabidopsis thaliana landsberg
aattttaatggttttgatgattctaaagaatccgaagacaattttgttaatttgaaagaatactgggtaagattaaatagtatagcatttatttcttaataaactaaaaaaatggccaaagaattaccctactcttcttctttttttttttttaatattggcagatcatagtttctttgtaaccgttaataatattcgaccttgcttgaatagtccaaatttaaaatcagtagttaaataagtcgatgagacaataaggagacatgttttccacattttccacgaaatgcatctcccttggcttaggtcaacccatttttattaaaataaaatcggtacaaggaaactaacctattagtacaatccatttaggatattaaatataaaactataattaaatgaaactaaaaaaaaaagagaagtaagattaccgtaaaaagatactcttttttttttttttttttttgaatacattaccggaacgagggtaaaattcgaaagtctgatagtaaagaagaccgacactgatattttacggaattgggcccctgcaagaaccaatt

SEQ ID NO: 46058 - DNA, 175 bp, Arabidopsis thaliana landsberg
  unsure (1)..(175): unsure at all n locations
agaaaaaacccgagccgaccagaagcggcggtccccaaccccaaagaagaagaagaagcgaaagcaaagaaccaggntaatatgcgaacaacacagattataactcaaactgagagaacggcggggcaagaaatagcaccaacgacaaaaccgacttaaaccagaggaacaacga

SEQ ID NO: 46059 - DNA, 600 bp, Arabidopsis thaliana landsberg
taaacttctagaggtaaatcatttccttgagataattatggattatcacatactaatttccattttttgctgtttagttctgttatatctgtaactgtaatcgtgaagaattacatggattttgccgattgaaacatttgaatcgcagtaatctagaagtctgaaccaattaaaccgtaccaccatcaatacattttgaaatttacaatggtttcttcttcttctttcattcccctttatggatcaacccgaccggattcacttttttcaatgagtttctctgatttcgtttgttatttcacttgcatcatccttgattagctttatgtatatcggattaggagttatagaagaaatggtcatataattaatcattcttttgcagtacttggagttatcagatttttgattaatagttttgtggcatatggttctcacttcattggtgaatcgatggatgtgctttatttgtaggattacaatgaaatcgtctgttgcatttaggccttcacataattgatgcaacttaagacatgtacattagtacatagtcagatcacttcaggtaatgactattcttttgttcaaagcgttatatat

SEQ ID NO: 46060 - DNA, 1873 bp, Arabidopsis thaliana landsberg
agtctaggatagactggctaaaaaccttaaataacatgacacatatcaatcttatatgttccctaaagagtctttagtaaagacaaaagatggctaagaaggggactagttctcacccgttgttttaaagcagtggacttagctttaggctccttgagtttaaccattgagttctcttttcctcctagtagtgtgatctcaggagccgcaagtaacctggaatcaaatcatctctagatgaatatatctcaacaataacgagagtactctattcgaagattctatccaatggcaaccagatgtgaccagtcatgcagacatataagcctattagaagcatcacattggaaactctactgtgacagataacacacaaacatctcaaaatccacaagaaaaaaacaacaaccaaagaagttaccactcataatctgacttgtcgttctcagagtccaagaacttttcaacagaactcctacgcaacttaacacagctcgttttcaaaagctccaaactctttgtgctagtcttctcaacactgtttgctcctgtcaaaaattcatcaacttgatcaaatcaatcatagctacagtcaccacgagcacacacacacaacaaaacgccgtgaaattaaaatgttgacaagaaatcagcaacaagagctgaccagtcaactctaaagtgaatccaaatgcacgaaactagttcaaataagcagagattaagcataattacttagtcctattcttagatttaggttccaggagctcagattcagagaaatcgaagtcaaaatttagagaaacgaagatcggataaaactcaccaggttgtgaaagagaagaaacgccttgaagcttctcgcgtcttcgcatctccagaaatagagagagttcttcatctccatcacgaaccaccaccacattctccatttctcaaaacctcttcgttgtaatatcacttctagctgatcatttgttgaagatcatagcaccaagcaaaaaacagcgaaacacaaggttaacaatggagaaacaaaacgaagaagaagaagagtgataatggctaacaaggaggaagaagaaattttacagagattgattcagtcgtatattcacgaaactgccactgttctgatttctcaggtgttctttaaatttttttctggaggtggagcgttaggagagggtatagatgtaaataaagtagggcctagtgactgaatctaagatctgacccgttggatatacaacggcgattgactgatttgacggttgatatttgaattggactgaccaatgaagcagcctcgtttttcgtgtgaattcaaactcttcacttcatttatttgttttacgcatataaatctaaatggcccaatagcttattcattgggcttttaacccacaaaagctcaccaataaaggtctgacccttttttttttctgacattctcaatcccaccgaaggtctgatttgatgagatatatgattatttgaaatttggatttctattggtagaaacaatgttctacctcgattataaaggaaaatcaaaaattccatttatttatagttttatagtattgactactcagaaaaaaatgataaaaccattaataaaaagagatagaacatttgacacaagacattcatagatagttcattgcaaaacccacccacaagaagaatttataaagttctcaaaactcatcttcatcaagacacccaacatttttgaaaaatgaaataatactcactgaatctcaggaatctctctgacaaatctttcaatatttataaatgaatcaagaaaattggtttttgttttcctttctccattgtctctcgcttggaaattttgttcaacaca

SEQ ID NO: 46061 - DNA, 683 bp, Arabidopsis thaliana landsberg
tgacagccctttgccgagtgccgccgttcgccgagcgtgttgacactcctactctcggtaaacgtggtcgttagcaagagtaggactttgccgagtgtggcgctcgataaaaaagcactcggcaaagtctcgaacactcggcaaagaccccaattccgatagtgcttaaagcggaggggtttcgtcaattgatcttcaatcttgatgaacttcatattgatttggccattatctacagactcacgaaccaagtaattcttcaactaaatatgcttactctgtctattagtttttgattttttatcaaagcaataagaaacttgttatcaatccttagaagtggtagacttatatcatatagcttctctataatagtatttataatttgaacatctttaaaataatactacctctttctcaaaaatcaaaattcgttttagataattaatgaattcatacaaaatacttgatgtatgtgtgtcaccccaaatttaaggataaactcgggcgcgtcttaaatgtgtgctaggattaaatcttatacagataatgactcatgatacagagatcaatgccacatctgtattatcttaaaaagttatagttactctaaataatatgaatgatgaaggcgagttgtttggtattttagtacgttaaaaatatgcaaaatacactttatt

SEQ ID NO: 46062 - DNA, 832 bp, Arabidopsis thaliana landsberg
  unsure (1)..(832): unsure at all n locations
tcttcttaaaagcagtaaaacgaatatctaattaataattatttatattcccctaaccttttattatggctggaaacatatattcaaagagtagtgatagctgaaaagatattccaccgttaactttattaccatcactattcactagttcactacaaaacattagtagtggtagaaacataattaatgacatagatgacattagtttgaagtttattctttgttatgcaacttagaaaacacaaacgatgcaaatgttggtttgacaaatatcaactctttaataatgagtatagtacctatcattctagcttatgtttatttgtggtacaaatatttatgacgagggagcaataaaaaagttacaagaaacaattttatttgtatcattagtattcacgaaaaacgaatctacgtaatgtacaccatattcataatgaacatattcacccataagggcgtaacacacaagattacgatagatagatttacttattgatcacgatgacgatcacaatgcaatgaacatatctgacaagcttgtttctattttataaaatacaaaaaaaaaaactttgataagttttggcaagaaccacgatattaaaatacggataatgaagattggatctaaatttatatttttggcaagagagtagattcggacccactttcttacaaacaaaaaaacttcgtcacctttacaattttcaattatccacccaaaaacaaataattaaaaatgccttanaaattcaaaaatagtggttgtgatatttttcaaacatgttcacacttgctaaaagaactaataaaggtttttttttttttg

SEQ ID NO: 46063 - DNA, 548 bp, Arabidopsis thaliana landsberg
ttttttataacaaattaatatgtgaaagtaatttgtagcacatattgttataattgtaaaggtttttaggacttgaatgatcagtacaaagctttcccactgtgccgaaacaaattattatcgagtagaaaattatgttgtatttaagtttaatttttggaagatatataaactaggacttttgtttattagggttgtatgggttgctttatattatttttgtctcaatggattaggattagcttatattattgtaagaaaatattattactttttctaaagtacatttattgtatttcatgagaaaattataaattcaattccttcttcactaagagatggaaaaatggcttgtaggtcaacaaatttttgttatttctttaatgtcttgtctctttctaaccaaaagcatacaagaggtggtctcatgatttcaaatttaaattttcattattggatacactttgacaaaagccccactttttttctgtaaaaagttgaaataaagattaaatattggtgtatcataatattattcagaacatcca

SEQ ID NO: 46064 - DNA, 580 bp, Arabidopsis thaliana landsberg
tagcagtaacccgttccgctcccgaaggtacgcttacatgtccgtttccttgagagattggctttctcaggaggagagttccacgtgccgacaagtgtagcattatcgccatgtgctttatcaaaaataatagtgcttctgccttcgtccatcgggtagtaagccagtaacccgtcttcagaacccgaaaagctgaccagactgtttacctgcaaagtagtagccggtataagctgtgtccagatgcgggcttcatgtattttaccggcaaaataatttccctgtttactaatgctccgtccgaatacgagaggccctgtaccattgtaaccggctacctgtgccttatcaattacggcctggaaatcatagaaggcagacacggtgctgtcagtagcattatattccactgctatatgtgcccaattaccgggttggtaaccataccggtctaaagttttgtcgctggtaatagttttgctccctactgttacctgcagatggaaatcactggtgaatgcccattcgatggacttcgatagattgccctgggtgaaataccgtccgtttattttattat

SEQ ID NO: 46065 - DNA, 479 bp, Arabidopsis thaliana landsberg
gacactcctatagactagagctgattgccgaccaatctcgtttacattatagtatagtcttagatagtttgacccgttcatctcagatttttctaatgcataacaacaaaataaattttgattcaaatttcttaacatgatgcagataatttgtaataaaaatattttgtttttagtttataatccacatatacgtttataagtttataaagttatatgacagaaaaagaaaaaaaaaaactcttcttcataaaatttaattgggatatgatatgagtctataaataaagtcggattatcgaatgcttgacacgaaagaaaagaagaaagaaagtggctagacacaagagaataatggatgaagtcatgaagacaagagaaatcgaagagctatttattctcccaacaaagaatagtgtgtattatatattttcttaagatagaccaaaatgctcttcaatagccaacaaaagaagtac

SEQ ID NO: 46066 - DNA, 1916 bp, Arabidopsis thaliana landsberg
cgtaacatatttgtccagaaaatatgatgcaaaatacatgaattctgaaattctgttcaatgtgtttttttctctcttttatgtgaataatatattttccaaatatcgattgtttctcagacatcttatcatggattcggtgagtgtaaattataatctgataatggatttaaacacattctcagaaactctccaaattcacataaagtggtatcagggtgttgtgtctcttttcagtgctgaatgaaagtaaacaccttcgcaattcctgtttgtccccaaaaaagacagaaaaatatcctcattatgttcattggagacatagatttgcatgcatatatcctcctctttccagagttccgtacttgtgtggagttgaaattgaactggtaagctcggatcaacatttggtttaattcgaagtagtcaagatcattgttgggagtcatggatcctgacccaatatgatgcttctaccattgcctatattaaattgagccaccgcaagttgcacaccacgtcctcttagaagggaggttcaaccataagatggttgcatgtgacttgtgatccttgtttagccgttaacaacgtccctcgtgagaagttgtccgcgtccgtgtcaatctttgtttacgaaattagttagtatctgatgtatcttccaaacttgattagtaagacaacttaataaaaatgatataagattgtaacaaaaaaaacaaaaaagtagagtgatataagtcatcgaagcctaatccggattatattctcttatggtgtataataaaaaccataactgtttcaaaagagaatataactttcaatgtttgtttcttccaaaaaataccaattcatgagcattctatatagttcagttcatttttgatcattcttttttccataattcataattattggaaatatgaatggtttatgtagtcaaaatgttgtcacaaatattgaaatatcaaatttatacgtgatttgtgtatttataggtgtgataatgtaaatatatacttttattgttcggtaattgtcagcaaaaacatcaccaatgctatttgtcggactggaccatctttattgtttactaggatcagaaaaatccgatattttttgggtccgtcatcataaccaaaccctaactgaattgtacaagttcctgttagtattatcgagagcagccaaagtaggcagttcgtgattgggtcgaatcgggtcgggttggtttcaaggtgggctcgtgggcgatccaaatggataggaaaatgtttagtaggaaacgtggaccatctcttaacccttcgcttctcttagtgggattcttcgttttcggtaagtacgtagccatcggacccatggccatgcttactttgtcttctattttttttttcatataattcacaaatttacaaattatttatagttccctttcattttctagataatgtgaaatctccttttcctctttctttctttctatcacatgacaatttctttacttcaaatttaagaaaaaaatgatttcaattttatgaaaagcaaactcgcatgactcatcatattaaataaataaagagttatagacttttctttcacaaaagatccatttctcttatcggaacaaaattttgttatatacatcttataagataaatacaaattaaataaataaatatataatccaaatttgagaggaacaaagacgtagaattagcgacaataaaaaaaaacacgtaaccaaatctttgatatatacatttcatattttacaaaaatggataacaacgaagttgtaatatggtctactattaaagaaaactatgttcttgatatgtatttgacatttgtctgcccttattatcaatcagtttggagtatcaacaatgccacccatatgttttctttaa

SEQ ID NO: 46067 - DNA, 619 bp, Arabidopsis thaliana landsberg
cccaattccaaaagattaatttgttttgtttatttgcttaattagggtttaaatttatatattgctttgcataaggttccattatattgaaagcttgtttctacaaaaaaatcctgcttgaacagtttttatctctgtaggaataataagtattgataaaaacagttcaaacagaaaaatatagaaataagttatacaatctcgcatattcacccaaaacatcttataaaatggagaggtatagttattaagtaaatctacatatgagaatgttgtagaacatctatctacataaacaaaaacttaagtctaaatcatatgttgtattagcttaatttcaatcgaatggagtactataaattttggaaaggtaaatacaaattgtataggcttataatcgatgtttgataagaggggtacattgatggatgtcgataagaatgtggggtcacacgcaccagctggattttgatattttaggctttttccttaatttttagttttgcgttttcttattagaatttcttttcaacaaaaaaaatcaagttagaaaaaaaaaaaaaagtttttatagtgcgaaggcccatgttatggaaggtttaaacgacgaatgcatgta

SEQ ID NO: 46068 - DNA, 668 bp, Arabidopsis thaliana landsberg
agaactccttttaaattatgattaacaactagatagatataaagagaggtaaaatacgagggatggttgatattttactaaaaaaaaagaagttgaagaaacacgaccatttgctttacaaaattatacgatgaaaactgagccaacacattacataccatttgtatcacactcactggccagatttcatttcccttatactagggaatataccataattagctatattataataatcatgtaatcacctgattatatagtcttttagtgcttccattttctttaaattaatttaaatttattcaaatgatttaatattatgaatgtccactagtgtgcactccagtttagtttatatttataattaaatacataatttatgaaccaaattaatatagtagttaatggcttaatgctagtgactaattgttgattataaaacaacaattgactaacttgagtttcctataatgtgatatcgatggatagtgtccattaatcactacatgtatttcctgaaaattatactatattatattctaaatcaagtttcgacgtgtcgttgtatttatttgtattggctcacacaaaaaagatggtggatttaaacaaacgtaaagttattgcgacacttactatataaatgatgtcatgatatagtatatact

SEQ ID NO: 46069 - DNA, 827 bp, Arabidopsis thaliana landsberg
ctgcaataaagatatcaggttggtttggttaggacaactaagtcatgttcaaaagaatgatcgaatactgggttaatttgtttttaaaagttttgggctaatcgaatagactgagaaaataataattgaatcgaacttcaaactaggagaaatctgatcgaatgatagactaagtttaaatttgatagatgatcggagaacaagtcatcaaagaaaggttttgaaaacttggccaagtgaggattgtatcagagctcaatatcgcaaatatgattaatctacttacatagtactaaccgttatcacataattattagacattttatttgcaattagataatcaatgagcattgcaatacaactccaattagttcagtactaaacatcatcatcaattctcattagttagttttgtaaagctcatgaatgtttgatttaaccattttcagtaatattttcaaagcatgaaatgcataaggtttaaagtttgagtgaacaaatcaaaactaccattaatcacaacttaaataaatgatctaacaagaagcaacatggtgagaggaaaactttggttaaaaatgactaaaaacttgcttaaaataggaaaaactttggactgggttaacctaacctatgacaaacccgatcgagttcgtgtctaaataagctctcgtgaaggtgtagccggtacataagatcatagtaataactttaagtgagaatttaagataactcttacaaatgctgaccggaatgacctaaacctatcgccagtgaaaaaaaagcaaacacaatttacaatgtcataatcaaatttgagctaaact

SEQ ID NO: 46070 - DNA, 561 bp, Arabidopsis thaliana landsberg
attttgcttacgatcgactgggcggtggaccagtcgccctgccgcgacacgacgttcagcaaccgttgtacgtggtgatgcagggggtgaatccagcgctggtcatctcgttgtacatcttgaaggcattagtcctcgagccacaccggccgtacgcagctatcagggtgttgtaggtgtctcggctcagttcaaccccacaggacctcatcccctccagaacccgggtgacgtagtctccatgccacgcttcccgcagactgcaagcattgtgttccatgtcacccggttcggtgtgcatccgctcctcgacatctctccaagcatctctagcatcaccgtgaaccttgacttcttgccaagcatgccaaggacaagattgtacgtgttcacgttcggcacgaacccggtcttcttcatctggtcaaacagagcgagcgcctcatccaccttcccaacattcccgtaggctgtcatcacggtgttgtacgtgaacgcgtttggcaacaaacccttggatgtcattgtgtccaggcacctggcagcctcctcgaagaacca

SEQ ID NO: 46071 - DNA, 521 bp, Arabidopsis thaliana landsberg
tgggtgggtaaggaagaaataggttcttttgattattttctttggtaatagtggatgttgatgaatgatgatctaagccaaagatgtttttttgtgcaaaaatttaagccatagataagtaaaaaaatgattactagttagaggattttatttacctttgcgtacaatgtagtgcactcccctcgtagtggtggcggcagaaattttttgaacatgagagagatggaaatttgataaatttaatttgttgtaaaatatgatgaatatccaataaaaatatgttatccatatcatatgcatttctatgcatacaaatctcttcgtccacatgataacttgatatatacatgacaaattttaatttaaatctccattccttaaaaagagttagcattatgataacactttaggtaggtacttactgtatatgtagttgatcatctatacaatggtaaatagaccgcagaacattagcgatgatttagaagataatcacaattttcaggtgatgttggtacgga

SEQ ID NO: 46072 - DNA, 647 bp, Arabidopsis thaliana landsberg
cactcatgtttctagatttcgtatattttagtaataatttggtttgtcttcttatctgcgagtcaacgagacccggtgcgctcaaccgtactacagtctaaattctagtttcacgcgcttacttacattacatacgcgctcatctcttctttactcaaaagttttaaaaaacgaatatcaaatcaacgctaacaaagtttgattttttgcttccatcttcttcccctccttaagttttcaaatctattcatcaaattttcttttgtctttcccttaagattcccgggaaagccaaggaaaaacgctagaagaaaattaacataataatgttaattgttgcttaaaccttccagctcaagtttggtagtaagtaagcagacatttaatcccccaagaagcaattgaagaagactttaattcttctgaattttctttccaaaaacccctttttagaaaattggttgcatcatagagattggttcatttattcccaccggagaagatcatcaaattcgtcttctcacccatatcgccgacgacattcttcacggttcgtttgatttctacctgttggttcttcgttttatctgaatacaatcggagatatatgtttttgagttcgaatttgataaaaaatcgaaacgttt

SEQ ID NO: 46073 - DNA, 542 bp, Arabidopsis thaliana landsberg
  unsure (1)..(542): unsure at all n locations
tcccaattttgtgctccaatatctacatccaaacagggtaataatggaattagctaacgtaacaaatagctagctaactattagccaatttgttaagagtacagttgggatgtcttcagctaattttagcagctattagctctaatacattcaagcatggcgttatccacacatgtctataatgactcattagtattaattgtgaaaaacttatttatatatttgtttgtgtacacctatatattgcgaccagatattccatgtcttagctacatatttatgtgtttgtggttgggtttgcaacagtagcagcaaaagtgtaggctatttagacgatggcagccttcattgatatagacagcgccatagttgttgcacaaattgcaacatagcaccagttgattatagagcgaccctttcctatgtactagcgatattgcagaaacaagacattatatctaaagaatatactattagcacggaagnnnnnnnnnnnnnnnnnnnnnnnnnnnnnnnnnnnnnnnnnnnnncctaagagttta

SEQ ID NO: 46074 - DNA, 478 bp, Arabidopsis thaliana landsberg
aaactgtcatttcttgagaatcattgacagtgcgttctatcaacgtgtcaaaacatctatggtggcttgggagaatttccactaagccaatcaaaggaagacaaatcttagtaaactagtaattctgctagcacatgtacaccgcgccgcactatatctgtatctcaacattaatcctctccgtataaaaatcaaataaatacattgatttataaatattaaaaaatctgagttaagcgaaaaaaaataaaagagcagaagtctctaaacatgcacgaggaagctctgaatcttcagatatgaaatcgtataaacagactctcgcatttatcgaatcctattgcagaagaatctgatatccctaaagtgcttattgttttcttcaattgtttgaagaataaactggcgtatcaaaaaaagggctggcttaattatagttgttatgggttgcttccctaaaagggttcctttaaaaaaa

SEQ ID NO: 46075 - DNA, 917 bp, Arabidopsis thaliana landsberg
cgcttatgtacactcacctcagacgctcaataccttagagctaatagcatttttttagtttatttatttcatatcttctttttgggttgtataatttctatggttttgccactcatacttttgaatatttatatatttttttcataataatttttcatatttagttatgggatacttcagtctcatccatttcatattgatttacaacttataagtatatatataactaaattatacttattcaacaacaaagtagactaagtagtacacaaaacatcgtataatgttaaagattaattatatctacgtttatgtggtcaaatatatttctccaattggacgtttctagggtccggaatatataaatcacgtgtttggagaataaatgattagagataaatactcgtacaagagaaaatttaaaaagggctgttcgatgacctcaagggtcggaattcttttgatcgttggatcttggaattatcgaacgaatgtgtaagattacacatgttcatacttattggttacaaaggtttttgctgatctgtcagacctagtggctgagttgtcatttgacacaagtcaccaatttaacagaagagagatatagtcacttggccagtacgcaaccaaatgggcaaatggctgatcaatgaagaatcaagaatgaattatatgaattagaagaaaaataattacaaaatcttatttaaatgttgatatttgatttcttctttccatatttttaaaagttaagtaaaaagtttgaatcgatatttatatgaaaacggatgaaatgatatatgaaaaaagtacatgggagaataaaaaagatagaagctacttattcaggtaatgtgtgatgtataatgaaaaatgaaggaattaaaaagaagattattattgtgatctaccat

SEQ ID NO: 46076 - DNA, 499 bp, Arabidopsis thaliana landsberg
  unsure (1)..(499): unsure at all n locations
tgtcatannnnnnnnnnnnnnnnnnnnnnnnnnnnnnnnnnnnnnnnnnnnnnnnnnnnnnnnnnnnnnnnnnnnnnnnnnnnnnnnnnnnnnnnnnnnnnnnnnnnnnnnnnnnnnnnnnnnnnnnnnnnnnnnnnnnnnnnnnnnnnnnnnnnnnnnnnnnnnnnnnnnnnnnnnnnnnnnnnnnnnattaatccaacagcctagctgataattagatggatacacaaggattcgatcattgtgtgctcgatcgagtaatgatacagggacagcgggattcatcaagtcaggtgactggatatgagacgcatggacatttgcaaggatgnnnnnnnnnnnnnnnnnnnnnnnnnnnnnnnnnnnnnnnnnnnnnnnnnnnnnnnnnnnnnnnnnnnnnnnnnnnnnnnnnnnnnnnnnnnnnnnnnnnnnnnnnnnnnnnnnnnnnnnnnnnnnnnnnnnnnnnnnnnnnnnnnnnnnnnnnnnnnnnnnnnnnnnn

SEQ ID NO: 46077 - DNA, 539 bp, Arabidopsis thaliana landsberg
aaaattaattggaatgtaaggaaaaaacaaggcatcacttggaaaagaaaaatatttatgagattagtaattaaaaaaaataattattatttttctttttgtcgagggtactttaaaattccatatgtataaatataatatactctaagagtatcaaaataaagttgaatcactaaatccaatagttggcgatttattgggacaaatttttattcatttattgaaaatttgaaacactgggcaaagtgtgcaatacgacaaaataaactccataggtgtttaccagggaatagtaacaattaagatgggtcgattatatgtgtgttctttcttttccattcatttgaatttggatgtatatatatgataatattattattatttataaaaataaatcaacaacacgtagcgtaatagttagttgatatgaatatattatctccgaagagaagataataaatcaaccagcagcttttgttgacaaaaataaaaataagaatttggagcttagaaattacatgttatcatttatgaatcaa

SEQ ID NO: 46078 - DNA, 695 bp, Arabidopsis thaliana landsberg
acaacaaaccggaagggataaactcaataatacatatataaattacatttggcagtttgctaatggatagcatgtgaccacctctcagttatacgtacgtgcattgaccacgacctaagctttgagttgactacccacgtgaagatcatagcgaatatggatacactttcgtcatccaccttcctttgtgaattacaaaaaaaaagtcgtcaggaccaaagacgaacaaaatcgagcccatgtcagaatatggaatctctagccgttataaacagagactcctctgtcactgcaaaaaccttccttatttcgtcgtgttgaagcgttttttgttgactaataaccatgataatgctataaaacaataacataatttccttcgttgactatgaatgttaacataaaccgtctaattataaccactcaaaccggggttttacgttagctgttaaaccgggaaggttaggaaacgagacagtgaaacataggcagtgatagaattcaatcacaagctaagggtacaatattaggaagaaaagattacggtcggggacagataaacgaatattataagctgtgttttaactttgagcattacatgggaagagaacaatttatataaaatttggagcaacatatcaagaacggttttggttcaaccgggtttgaaaatgtacatgtggctttgcattacc

SEQ ID NO: 46079 - DNA, 800 bp, Arabidopsis thaliana landsberg
attagcgatataaattttcttggtgtaactcattttgtagcaaaacaaaagatcaatattttgaaaaattctatttacgtttgtagagtgaacttttttgtgaaaacaataggctcaaaggaaagttagaaggctatgtaatgacaacgagtcgaaagttcacaaaattaaatttcatggttatttgaaataataacagtttggaaacataaaattatacatagatttgacaatgaaatgtggttgcaattgttagacaacaagactaaatgatcaaactagattaacatttattacacatattacacactaacaaaaacaattatgtttacatttgagtgaaggaacaatgcagtgtaaaatatgtggcttaaatagagttttcttttgtcctaagcagaaataagctgttcttgtagaggtctcttggctggagttgaacgttgtgactcagacgattgaattagtatttgcattgttatagttgcaatgaccaagaagaacacaaacaaaagaatgatcttccacgaggccactattgaaagccattgcagtagcttgaaaccaccgaatacaaggaaacctaaccaaatgatgaccacctgtttccaacaacattaccagaatttataagagaatcaatttaatagcatttcgatgtgtgatgtttcttacgaataatggcttgagtggccggttaatttggtgaacttgcaagtcgctgaaaacgtcttttgtgaagtatttgtcaagttgagcatcctgattttaaaagtaagcaatgtagtggcatgagtttt

SEQ ID NO: 46080 - DNA, 912 bp, Arabidopsis thaliana landsberg
  unsure (1)..(912): unsure at all n locations
aagagaaatttcccacatcaattgcgattgaaaaagttttcaaaggatcatcatagctcacattaagattcatgatgatgaataatctcatcaccactatttatttaataattccttataatgaaaaccaattttgttctcactttatttggaacccatcatagtcctccacgaaaaaaagaaaagagcatatagtacattagtttaagaaattttttaaatattcgttgaattacatgaatattgaattgaaactaaatttaattagtaaagtaagatatcatttcaataaaaaaattatattatgaaatctcaaataaaatttcagtagatacatatactgattactagatcaataagttcaaaccataataacatagttgaaatactctaaagattaatagtataattgtttggaataaaatgattagtcattccaaagaaattttaacagttgtttacccactcactatcttcatatattccaatagtgatccaaaactaaacccaaattcaactttttgtcaaaactggtacttagctatacgttttcacatatttaacagttgttactatgaacatgatataaagcatagctaaccagataagatcaaacgcagcgaatacaaaataaactctaatatagcaatcatcaaaacgaatacaaattcttgcaaaaatagaaaagaaagtgtgatgcaaaaacaaagctttccacaaatacaaacacataacacaaaaacaacagtttatatatttaatatagtttaataagatatgtttgtnttgtttatcatattttttttataaacacaggagaaaacaataaggtaaacgggagcacgacatgtttgataatgtcgggaagaaaagttaaaaagaatctctttgttaataataaaattagggaat

SEQ ID NO: 46081 - DNA, 573 bp, Arabidopsis thaliana landsberg
taaggagttgtataagctaatataagtctcctaactccttatttgctcattaaaagtatggggatccctaaaagaatgcatgagttacttaaggttaattccacccacatgctatcaccataattaacaaaccactctcaatcaatactatcaaatcacataatctcatgcttaagagttaagacacctaaatcgttcatacaatcatgctcacattcacatatcatatacattcaatttcatgcacatgttcgtatgcactattgttcgtaaccacttagctatctcaaccatccatcatttcactatcttaaccatcgagccctcagatataatgcttggcatctctccatctcttagtcatcttgaccttcaaacttatctgattctcaagatagtgagagctcaggactcataatataggagttttagattttgctcaccatattgggccattaagccctgtttccttttttagtccaatcagatcctataattccagtgtataccaaagcttctgatcttaaacacttttaggcaaatataatttcttgtcctttcttacctacacta

SEQ ID NO: 46082 - DNA, 591 bp, Arabidopsis thaliana landsberg
tgcaaattcactgaggcggttctccaaataaatacaatttataaaggaagaaaaactaaagtaggagcagattatcataattaaggagtgagagagaaacctcgaagttgcagaaggaaacggcggagatgcggttcttatctggtgtatccatttccggagaggtttatactaactgggtcgttctactccaacttcgcctcccggaaaacaaaaacgaagcactaaaagaagaagaagaagaagaagacgaagagagtggatcggttactgaagaagaagaaggtggagatttcaatggaggaggagcgggaaagcgggaaacagtaatgtgaaaagccgcgtgcttgctttcctctctctataattgggcccacacattacaaaaaaagtagaatcgatttttattagtgaaagtgtgaaagtaattgggcccattgggtttgaatttaaggcttttaaatcgtataggcaaactatactttttttttttgtcggattaattcaagcaaacggtgcacaatgactaacaaatttggctatttttctttgcataattattagggatctttccaggaattcttaaagaac

SEQ ID NO: 46083 - DNA, 665 bp, Arabidopsis thaliana landsberg
ctgttgaatcaacggaagctctaaagatgatatgccatttttctcctgcaatttcaccatagtaaagaacagaattttgaataacttcagaaaatttcatgatcccaaatctaattcactgtgaaatgcataccaaagctttgatgatttgattgttcttgcctcgttctcgtgttacgacgacctgaggaatcgaattggagctactaacggaggaagaagatgaagagacggacgaagaaattgaatttcgaattggggaaggagaagcgaaaactggtttgctcagagattggacatgtgaagaatgaaatgaagaagaagacgataatggaggttgaaaagataagatagagcagtgagaaaggagtaataatgccattagaaaaagttccaagatggagagatgttgtctcacggaagcgccggtgaaaatggaatcgtagtcgctttattttgccggtggtttttgtcagaaacagaaagaaaccaaatccaaacgaagatgatgaatagttgaatacaattctatctccacgtgcgttttaatgtctctcttttttgttttttgttttttcatttgagcccaattttgttacactacagcccaatagtgttttttagtctattcaagttgattacacactacggcccaataaaaattt

SEQ ID NO: 46084 - DNA, 376 bp, Arabidopsis thaliana landsberg
tcctatcgtctttaaagatatctcacgtctcttacattgcctagttgccctaataattttctgccggtgcgactagttttataagactatttgtagtttgaatgtgaagattcacaaaatgggtcttcataaaaagttaaaaacccttaccagttttcgtgatttttctattttgatgtaagtttctgtgaatcgatgtgataatatgtcatgtgagtcttttttctccggctgacatagtaacatgtgatttgataagaaaattattttagtatcgtgataaattttgtgaggtgtttaactttttgtttaaatcttaatgcaaaaacttccaaaccctagatttcttttttgtaattgggtttgcatcaaaaca

SEQ ID NO: 46085 - DNA, 620 bp, Arabidopsis thaliana landsberg
gaatggaacttaaaaatttacatgttacatcagcatctaaatttttataaattaattcacgacttatggattagtatgtatattcaaaaaaatagttggcacgatcaaaaaagaaacattaggtagctataatctgatagtgaattaaatgaaaagtatttataaaaaactaagaggctgctcatgatttaggattttacctttttacaatttccagaaacacacaaaataagaaaatttattttgtgaagttacattaacatttatatccaatattacacactaaaaaaacgaaaccaccatatattcattattataaacatatggcttattaatctaaatctgttaaactatatatctaaatctgttaatctaaatctgttaaattatataaatatgttattataaacatatccttttattatataaatctgttaaattatatatctaaatctgttattataaacatatccttttatcttctaaatcttactaatctaaatctgttaaattatataagggtgtttaaaaaatggatatatatgtttttgtccacaaatgaatatatacatttatatcgattttttttatatactttcgtaatgttaattgatgacatg

SEQ ID NO: 46086 - DNA, 750 bp, Arabidopsis thaliana landsberg
atcatgtaaactaaatcatttatattcggtaataattagatttatttatctatcatagtctgttaactatgaaaggaacgagttctatataaagcagataaaatcatagactctattaattttcatgattagtagaagaatctatgcaaaacgcaagagaaaagtttattgatacactctcatatggtatcatgagtatagtgcttataagttataattagcatgaaatgattattaacagtaaaattgtggttggaaataaggtatctacttgcattatctcagagtagaaaccttgtagcaaaatgatgatgaaaatagtttggcaaactttaaataaaagaagaagaagaagaaatcaacaagaaaaagtcaaagcgctccatgtgaaatctataaagcaacctttctggtttgttttccttgtgtatctgtctaagtctataaatatgtacaagctctttctaaactttaaaaacccattaaatagattctacttttctttcaaaaccaatctctcattatctcaatcttattcttgttcaatctctcttttgaacttgaaatccatcattctatcaaatcaaacacaattgttagggtttcttttttcttatactccacgaaacgtctggttgagaaaaaatggaagaaagcaatgatatttttcagaacaatttcagtcctaaaatctcagaaatcagagcatctctgtctcagatcatattagcaggaggaccaacacactcg

SEQ ID NO: 46087 - DNA, 659 bp, Arabidopsis thaliana landsberg
tatctcacctggaggaatcaaccgcagcttatcattgattagttgtattagtgcaatgttagcatgtactgtaacttagtttatggcatgctctatggctagcttttgggcatttgtctagttaccatgtgaactagggtctctgtgaactatgaacagcttgtagtcttatgccaagtcgttatgcacggacaaaattagtattatatcatattttaatgtgtttatggcctctttgatctgttatattctacgttggaaggggcaagggcatttgtgtcctatttaactgtgacttaacggatgtggtgagcctcaaaagaatgcaatcttttaatggtatacaacaaagaagggatcttttaatggtacattgtcaaacatgtgttcttttaatggtacacagccaattctccccaaatagaatgtaatatgaaggacatagttcataaaaaatacctagaggcggacgagttccaaatgaaccagatgtgttgttatcaacattgttagtcgagcctataagcctattcgatgtagtcatcgagatgtgacatattgtagatcgccatcgggaagtagttgaccctctggaagtattggacgcacgagtagtcgccagatgcgtcccaaaacttgatacctctatcacgggtgta

SEQ ID NO: 46088 - DNA, 434 bp, Arabidopsis thaliana landsberg
cttaaaaatgtaagttgttggtagtttccggctgtgttcaaaattactaaaactcatattgatttttgtacatatacatatttttacaatataatcagcattagctcttaaaaaccccccactttctatgtaaaaaaaaagtcaaaatactggttattgttgtaagttgcaccactacaccaactaaatttagtgcaatctcttgtccctcacactcacacggacaacaaaatacaatatttgtaattttataaaaaaaaataggcactaagattacccactctgaagagtttcaagcactttaatcgtatacctaaaaagtgggtccaaacacttttttgataaaagcttctaagatcatctagtgaattaatggaggtacaagtttagttgttattattgattgccatttaatttctctgtactcgttttgg

SEQ ID NO: 46089 - DNA, 869 bp, Arabidopsis thaliana landsberg
cacaattaagaaataattcatatttagttataaatatacatttaaccattttcatttaatagttttttaagtttacaattcatgaatattaattacaaaaattatataacaaacataaagatacaatatttatgaaacaaggaaaaaaaaatctagaaaattaaacttttaaaaacaaaagaagtagtaaaatggagaaaagtcaaatgaagatggagagtttgggttaaaataatagatgacaaatgaattagcgttttttaaaaagatgcgcaattacgtggaagcttcagcattcttcacgcccattacaaaagctttcttcttctcaaacatctgattaaaaattataacaataaacagatctgtgtgattttgtgttttgacttttgatctcgagacaaacaagaaactaaaacaggttcttcttctcttcttttacctttttgtttgctttcgtcctgattcttgtgacatttattgtctgatgtgaaacttgtcctttatctattatgcctcgatttttatttttatttccccctcatatattgaatctagatctggttttgataatcttggaatcagacagtgtttgtatatttcggacaaacaagacgttaaaaagctgccttgtcttacaagaaactagattttgtctcggggtcgatcttatctccaaacagagagaaattaacagagacatgggaggtgcagtgacgaaatctgaaactctgcaaaaagaatgggttccagagacaaagttggaggctaagatcatagaaaccgtgcaacgcatggcatcgaggggcaccacaatgaaatctttcaacagtattgttcttaagttcccaaagatcgatgatggtctt

SEQ ID NO: 46090 - DNA, 479 bp, Arabidopsis thaliana landsberg
ggcaactacgaaatctcgtaaaaagacaaagaaactggttgtttatggaatagtccatattcgggggggttttaagaatacactcgccacgattactgataaccaaggtaacaccttaggttggtctagtgccgctagctgtggttatcgtggctcaagaaagtctaccccttatgcagcaggcgaagccgccggttaagtggcccaaggcgtggtagaaaattatggtatgaaaaatgtccaagtgcgcgttaatggcccgggacctggtagagaatccgcaattcgttctttacataccgctgggttaaaaataatgtcgatcaccgatgccacaggtattccattcaatggttgccgtgatcccaaaaagcgtcgcgtatagtgcaagagaaagttaatggctagatatttgggaccaagatgtaagctggctcgtcgcgagaagacagatttaatacttctcagtggcgtgcgtg

SEQ ID NO: 46091 - DNA, 862 bp, Arabidopsis thaliana landsberg
  unsure (1)..(862): unsure at all n locations
gaatcattttagattctctcctgcatttttttttttttttttatcgcattattgttgaatactcgtatgtttttatcaactagtgttagtcccttatcaaactatcttttaatttgtgtatatgtagccttgttagtatattgtataagattgttagggatgaaatttaatcatggtcgtctccgcgagcatatttgataatggttcatatagttgtagtggataaatttcataaagagtttattgtttggtggtctacttccaactttaccaactttaccatttcaaaatgcgaaatttttctataagaaaagaagtgtttaaccacatgagttctattcttcgtgattttgaatacaccctcttagtgggtttgttcccttaatctaatgtaagagatatgagatagttgttcaacaattacattgattctgtaaatcttaaaactcttgaaaccgaaagaaaattttggttgaaaaaaaagaagcaaatagtacttggtggattagtaactattcaaatcgccgcatgcgtctcaatttttccaatggcttcttctatgttgcttgttttaatcgctgttttgtggattagtaacttattggacggttaaaaatccaacaactagaagattatagataaaagctatacacgtgtatatggataatcataactgatataaaaaaatataaaagtgagaggtcaacatcacttctcctcttggtacagctctaacaacaaagacagagatactgctttctttntataagtagtcttcttccttctccttagttntattgcataaccacattttgactntattcactctctagtcctttgctctctatctctctcaattcta

SEQ ID NO: 46092 - DNA, 634 bp, Arabidopsis thaliana landsberg
ttcctgtattttcaagacccacaagacagtcaaggaggcaaaaactatacccattagagcccacaaaacaacgttagaagtagcacttagcaagtttacatgcacattccaacccgccaccccaccggacatggccacgcgcccacacatgacacagtcacacaggctcttagacacgccaccagccatcagcttatgttttgtgtacttttgtgaatgagacttgtatgtagctgtgaatgaacaattgtgtggttagaatttgtttattgtgagcttttcctattacaattaccgtttctcggtcaatttcgaactattttgctcggatttatccgttttcgatataacggaatttacctgccattatccatttccgacttccggtttacgacctaacaaaaaattatacgagtgaaaacgatgagaggttttttccgaccattattgaccgttttcacccttacgtacgcgctcgtgctcgtggatcggatcgaccgaggcactcaatccgaaagtgtaatgttactccctagactaaaatattagatgtctgagctcttgatttttatgtctatgttcaaactgatgataataaatataggcaattttctatattggttaaactatgttt

SEQ ID NO: 46093 - DNA, 743 bp, Arabidopsis thaliana landsberg
catatgctgtcgcagactaaggttgcactggtctttttcttgaagctgtttattgcgtcttgccaaattattgcttagttgcagacaatgtcgaaagctaaagatgtttgatgttataaagttccaatattttggggattttctattcgcatttatgccaagttgaatcctataggttttgttacttccacgttctgctaaactttgtagtttgtaagcatccgtcttctattcaaaatggaaatacaaaatcactacaggattcctgaaaattgtgctaaacttcgtcatcagaaaaacttttatgtaatttttttaaaaactgtcttatccaatttaaagataacagtaaaagaatatttttattcgtaagagcggcccaagataaaccactcgttataccgatttccgaacacaaccctaaagaggcttcttccaatacgttggttcttcttcctttgtcctgcgccgcgatctctccttctccaacttccctcgtcctgtccaaaggtaagcttcttcaatttctggctcataccaatcttgcttcggcaccctccttttgtttcggttcttaaccctaaattttccccttctatcccaaaacacagagattgataaaccctaattgttcaccttctattactgaaactttatctagactgttctggatttatattgggatcaaccctctgcgttgtattggatgtagccttgacgctgaaacccctattttcgggaag

SEQ ID NO: 46094 - DNA, 718 bp, Arabidopsis thaliana landsberg
agacggatctattttcttgctgacaaatcagaaacttttgaaaccttcaaagtcttcaaaagctcagtcgagaaggaagccaggtctgttgttcgagggctgcgcacagatagaggtggagagttcaactcagacaacttcaacaaattctgtagcgacaatggcatcaagcgacaactgacagccgcatacacgccacaacaaaacggagtagcagagagaagaaacagaacaatcatgaatatggttcgttgtttgctgtctgagaaggaaatgccgagatctttttggccagaagctgctaagtggactgctcatgtgttaaatcgaagtttcacaaggtcagtcaaagacatggtgcctgaagaaaaatggtcgggaatcaaaccaaaggttgattatttcagaatttttgggtcagttggtcatgttcatattcctgaacagagacgaataaagcttgataaccgcagccacagatgcattctactcggagtaagtgatgaatcaaaagcttaccgccttttcaatcatgttacaaagaaagtcacagtaagcagagacgtcattttcgaagaagatgcaaagtgggactggaatctcagcacctcagaaccaaacgttcttgtttggggagaagatggagaaaatagtgtcgatgctggggaagacacagatgtagaagaagctgatgttgctgcccgatatgaaactgcag

SEQ ID NO: 46095 - DNA, 850 bp, Arabidopsis thaliana landsberg
ggttgttttgacccaccgaccccgacacaggtgtattaatctaataaaaatatgttattatgatgtatcaggttaggggtttttggtggactatttgtcacatgctgcacttgttgggttcatggctggtgctgcaattgtcattggtttacaacaacttaaaggtttatttggtttgactcattttaccaataaaaccgatgtagtttcggttttatcttcggttttccactcgcttcaccatccggtacgaaccgttttttcttttttctttttgtcttcttcttttcaagtctttttttcgttaaatatttgttttaattcttaattacttttttttcagtggcaacctctgaactttgtcatcggtagctcattcctcatcttcatcctcctagctagatttatcgtaagtaaaccaaaatttgccgtgcatttgtaatgtatatccacttcacaatagttttacttttgaattcaattttttaataatgatttttgtaaatacagggaaaaagaaacaataagttgttttggattccagcgatggcaccgctaatatcagttgtattagcaacactaatagtgtatttatccaatgctgagtcacgaggggttaagattgttaaacacattaaaccagggtttaaccagctttcggttaaccaattacaattcaaaagtccacatcttggtcaaatcgccaaaattggtcttatttctgcaatcatcgccctaacggatagtaataaatatatgctcttacttataaattattaatcactgatcaatcagtaattaattgatttaaaatgaatgaaataatacaggaagcaatcgcagtgggaag

SEQ ID NO: 46096 - DNA, 465 bp, Arabidopsis thaliana landsberg
caaacatcctgatggcattctttgcctgtccatattgcgcatatgctgaaattacagcattccacgtgatggaattcttctcgggcatctcattaaatgttctgatggcttcatccaaacagccacattttgcatacatatcaagaagggcactgcctgagaacacgctggacatgtgccctgatgttgtgaggtaagcatgcaattgccttcctatcccaatcattcccaggcttgaggaagactttatgatgctagaacatgtcgccctatcaggacttagaccagctcttctcatgttacagaatagttgcaatgcttccgcatggtgcccattctggacacacccagttatcaaagcggtccaggaaatggcagttttgtcacttgtgtttgcaggaatagtctttgcagcatctagcataccacattttgagtacatgtcaatcagggcacttccatgaa

SEQ ID NO: 46097 - DNA, 872 bp, Arabidopsis thaliana landsberg
ttttttttctattcttaactttcaggtaatgaaagagttcgagattctgatttatattatgcgtgtgtttttctctgagatacaagatacaaatgaattgggattacttgaaaagaagctgaacattttgatgattcccttgaatgtatgttcttacttcactgttacttgtagtgtatgcttttggtatacagtatcttagtacaatcttccattgatactgaacttatttttgtttctcatgccaggaaaatactaaagagactatccctgcaacagaaaactgtgactttttctgtgacatgaactatttcttgccttacgatacatttgaagctatacaacaaggttagtgcttttaacaattgatcttcaagtttagcatttcttttcactgccaactggattagataaaatgctgcagtttttgaagataactaagcatttacagatctttcaattgtgcagagaccatgatggctattagtgaaagttcaacaatatccagtgatactgatataagagaaggagctgctgccatatcagagattggagaatgttctcaagaaacagaaggtcaaaaagaggcaactttgcttgacctttactccggctgtggagctatgtcgacagggttgtgcatgggtgcacaactgtctggtttgaacctcgtcactgtgagtcatttttgcttgctaataatcttctcagatttgtttaatctctcaatgcttaacttttgctttttttttaaaatgattctcaagaaatgggctgttgacatgaatgcacatgcatgtaaaagcttgcagcataaccacccagagacaaacgtaagtttttagttttcctttctcccaatcgattgacta

SEQ ID NO: 46098 - DNA, 1051 bp, Arabidopsis thaliana landsberg
  unsure (1)..(1051): unsure at all n locations
tcattatggggttaggacgtaggagatcgaattcgaatcatttcaaatgttcaatgcgatgtcaatcattgttgttcactgttagcactttgatatatataagtgtatctaacaatttcaagccttatagattaatgtggacttcgatccggaattctgcgacgactatcaaacaatttttgttttatccgaaatatagatcatttgcatctctcatcatcaagccattcattctttttattattattcagtttactatagagtatatgtccctccctttatgcaccgtatcaaatactatacatagtatgcatgttcgaagaaatttccaacatatgtaatttgaaatcaacgaacacatcaaattataatgcgttgatgcagaatatatgctttctatatatatagcttaagtacaaaatcctaaattttccatatgccttcgtaatttagtatataaatattcattcattcttaatacagcctaggactcggtagcattttgaagtaggaacgaattttgttaattaagatacatgagtgattagatcgaatccaaaaggtatggaggcgtagnnnnnnnnnnnnnnnnnnnnncattttacgtatctttcactaaagaatagagagaaatcaataccatgcaaaaacctctcaaaaattatatattgaacgcttagacaaagagccaaatttattcgtttttgatgtttacatcagtatttgtttctagctagttcatattctttaaactccataatcatttgaaagacataaaatacagatgcttaagatctgtggatgtttatataggatcttcgaattcggataatgaaatcatttatacactattaagtattaacttttgagaggacttaagcattcgaaatcttgattcaggctgtcaatcaagaacccgtaatgtttgatctattgagccatgtgattaatggatgcttaaagaataaaacactcgagaagaagatacacgtaaaattactcacacacaagaatgtgagactggagaagatactcccaagtgtctgttttt

SEQ ID NO: 46099 - DNA, 709 bp, Arabidopsis thaliana landsberg
tgttgccgttaaaaaggcaaagcagtgagtaagaggagataaatatgcggcaatatttgcttttggtgggccaaatgaagacaaacttttttatttgatccgttgaacttcgaaatttgaatgagaattattattacaaggttaaaacttgacttctgcatcattaaagaaaaattcaaaagaaacaaaagagaagtatactatagaaaaagctatctcattgtggatcaataggtccctaggaaccaatagtaagtaaaaagcaaagtggtaaacatacaaaagcgagattattctcaagtctcatttcaatgtcaaaactctctcttgtgtgctaagtaaacagaacctgtgtgaaagtaaaacacctctgaactcattttcactatctcacaaacctgcattatcgatccaattctcccatcttatatcttcttacatattaaggatcagagaaggtgatcaaacctgataattatgtagatgtagctgaagctaagatataaggctcaggaaccacaaaaacatatcaatgaatatttcaaattagcttcagcattttatgagtcaaaatactaagaaacaatgcaaattctctcatgaaaaggctctcacattgcttttgcattctccgcaattatgatccaaaccttaaccaaaaacaactaccctataagagtataagaccatgtctgcagaaatcagtagt

SEQ ID NO: 46100 - DNA, 753 bp, Arabidopsis thaliana landsberg
caaagttctatatattctctccgttttaagactttattcttttttcataaagaatgtcgttttgtatttactgtattttgtttaacataaatcttaattttatccctagtatttcgcttacttaactagaaagtgcaaggttttggtgtatttataaacattataatagatttcgtaactaatactatcgatgtaaccgtatcaattaaaatgtggatgtattcagcttttatgatcgccataaacgtataaatagtggactatagaaaatcatttgaagttaataagtcagccatatatacacacataccaatttattgatgagaaaagttggatatctaatccaatcaatctataatgtgattggttgtggtggcaacataaatcaactttgttggattggtacgaatatatgctagaagaattttttttctaaaaatggccccaatattttagtctgttcataattaagaacatcattagtatctagttgactaattaaaccttcaaacttgactcattcaatcaaccactcaacgtgaatcatataatgattctcatccacaatatttaatactataatatacatagttgcctgccatggccaagttggtctttcttacatatattctgcgaaaattgaaatcaagctcaataattgaagaaacataattaaagaaaagaaaagattgcaaatgattatagctttggccaatataaatgatgatctagtaaagtcatattaatttcctt

SEQ ID NO: 46101 - DNA, 578 bp, Arabidopsis thaliana landsberg
cgaaagctcagccaggcttccgtacgcgacacatcatgtgtttcctgttcagcgtttcccttccgcgacggacggttcgaaataagttttgtgcgaagtcgtctgaaaaaaaatgaacagcagatacaacagcacgcaaaccaccgccgtaaaaaccagctgcacggaattgtacatcgggcccggcgtggtggtggtgtagttcggcagcacgaaaacgagcatcgagagcgtcaatagcaccaccagcaggcttttcgaaccctgcacttggaactcctgctctttgtacctgagaccgcccagaatcaggcaaaccgccaccataccgttcgtgatgatcatcaccgcggcgaaaaccgtatcgcgggccagggtagcggcctcggcaccggcctgacccatcaaggaaataatcaggcccacttcgatgatggtcacgcaaagtgccagcaccagagtgccgagcccctccccgattttgtgggcgatcacctccgcatgatgcaccgatgacataaccgcgacacccagaaaaaccgacgtgagcaccgagagccaagggccggtgaaggcct

SEQ ID NO: 46102 - DNA, 614 bp, Arabidopsis thaliana landsberg
gggacacctagagtaaataatcaccacagcaaaaaaaaagattaacagactaccttacacaaccaaatattggattgccatatagcaacaagtaaaaggtaactcaaacaatagcttaagcgaaagccttaactctacatgatcaaattcaactaactcagtaatacgtactgcagatcctatcctaaatcctgcctgaatcttatgtacaacatccagaataataacaagagcagccttttacagatagattgcaaccaggaaatttcaaacaataccataattacggaacttaaatccccatgtcagaatttaaaattgcgggaaaaaaaaatgaaggacttcactgacctccttatccgaaagagagacaattccaccactatccatatcaagagtctaaaagtgaaaaaatgaaaatcgttacaaactcgcaatagcaaattccatccaggactttgctgttagaagtaaacaccacaattcaatgattagaaaaatcaaaacatttaccttaggatctgaagatcgtatcttcttctccaaatcagaaagtctagccctattttacacatgtaaagtaatagtcaataatagtaaacaggtaaaaatgg

SEQ ID NO: 46103 - DNA, 605 bp, Arabidopsis thaliana landsberg
ttgaggtgtaacttaaaataatttacactcctatttacctcaacgcacgtggattaagtcattaagatcaaactatagtacgcagacaaagcaaaggcaaccaaaccctccatctccaacaccggggcaatgccgtgcgcgtcaccgtttctccagcagagcgtgctgcgcgcgcgccgcgtgcatcaatcaaacaactgaaaagtcaaagctggaagaagaaaaaaaaactacagttggcgaagaagattagccccggcaggccgccacagccgcacagcacaggacaagtggcaaaaaaaaaaaacgatcgtgtcccggccggcggtgcttctcatgggccaatgctcggcatctccagccgcgccctcttgctccggcccgccgtggccgcgaacgaggaggccgcgtcgaccgactcgtacgtcgtcgagccggagctggatggcggcggtctcttgtccgccagcttgctcggcgtaggcgaggagctctcgctcagcatcgtgctgtagcaggcgtgcacgtcgtcctgattgatcccgggagaaccgcgcgcacagacgatgtgaggttttcatgagttcatctcgagacgtgtgggg

SEQ ID NO: 46104 - DNA, 489 bp, Arabidopsis thaliana landsberg
cgactctagcaggatactcatagatggatcccccttatggttactcaaagctgagaatagatcttgaaactagaatttgaattatgaagttcataaaataaatatgcagtaagattttcaattttttttatgaatgaattgctttattcattaatatttattcaaagaaatggaataaataaataagtaaaactatgctttgcatcttcatgctagagttttatggttgtgcatagtagctataatttaaaacttaaaactcagatttgaaattgaaataagaatttgaaacttgaaagatcaaactagaaatagaaatagaacaaaaaggaaaacaataatatagttttgggccaaatcccttctctcccggtccaactcacctcactgctccgtgccgcacccacagcagaagtgggcgccgacgcgagggcccacctgtcatcgtcccacacctgcaccgtaactctactacaactagtgtgttag

SEQ ID NO: 46105 - DNA, 354 bp, Arabidopsis thaliana landsberg
atacctcgttaagattgccaaccaatattacgtattgtaatcattccttttgattggagtcaataacacagtaaaaaggagtaattaacaaattcttaacctaagatctacacaacgttagttttatcatctatatatacaaccatgaccggtccaatgtttcaaaattttcttggatactcgatgcacaactgaaaatttgtgtccttctgttaatgtaaaattttgttctaaatagaaattctcccaatatatatatggtgctttaaaatgtgatgcattaaccgatatattcatttgcttatgtttcgaccggtccggtatgaaacacaataagctagctagaagacgtat

SEQ ID NO: 46106 - DNA, 581 bp, Arabidopsis thaliana landsberg
aaagcgtgtaaattgttagaaaacttgtgtggtcatttcaaaacaaaacaacaaaaggtagtaaataaaaattacattatcgtagttaatgaccttggtataaaaacaagaaaaaaataacgaagttgggggtagttgcgttgcactttgatttaaattctattcaaatggttattgtccaaacacaacactcttttctatatatagatagtctcttcaatgtcacaaataatcgaatcacacaatattaaacactaaattattcacagttttcttggagaaaagattcaagttcaagtacaagcagagaaagtgagagagagagagaaatgatgggtagcttgaaaataatatctccaccacctccggcgacaagattccggcaacgagtaacggcgaacggagatgggttttcggcatttctttcgaaggagatacataacataaaagatccattcgcaagagctttagctcaaaggattgtacgaattcctgttcctcttcagggtcttcttctttttctctgtctcttgcatgagtagcttaaacagagaatcttggtccttagtttcttgaatttt

SEQ ID NO: 46107 - DNA, 588 bp, Arabidopsis thaliana landsberg
  unsure (1)..(588): unsure at all n locations
acaagaaagcacaaacgatatattgaagcctataacatgcaataccaatgcagattgtgccaagttttgcaaaggtccaatccacaactgtgtctatcatacttgtcaatgcgtacccggaaatcctcattgttgctagaaacaccccaacacattttctgattcaacatcttttatgttggaatttccaacacaaaaataaataaaactatgtttcctttggtcatctactctttttttttttttttttttttttggctacttaattttgtaactgcatttacaagaagcacagtcattacaaactaaaccgagtaactcaaactcagttgcgttgaatatgacaatgaaaccaagaacaagaaagatagataatattgaaagaaacgggttctttgagtcatgaggaagaagaacaaacatttatgatgctaaagttctaaacactaatatataatatcccggtagctagattctggctgatatttatttgtatggtatgtatagngactatatatgcacataagagggactagagattgattactttgtgatgtgtttttaaacccttgagattggagagaatgt

SEQ ID NO: 46108 - DNA, 275 bp, Arabidopsis thaliana landsberg
cgactctaggagcaatgggctgcgagacaacaatgtgtaaggactcgtcaaagccaaaatatttgatattgataatgcaaacaaaggagactaatatcgaatattattctcttatatgattttcttctcaaaataagtaagaaatacatgttatgaatttaactttcttagcacaacaataccatataaataattatataaattcccagctgcttagcttttttcttcaaagttgaaaacaaaatgaataaacccatctccgagttgaatctaaa

SEQ ID NO: 46109 - DNA, 1618 bp, Arabidopsis thaliana landsberg
aaataagggtttgtggaattagggaaagtataattaagcttggttgggcaaatctgcataattcattcgtcactcttcagggtttttgaaggtttaagagagagtgaaaaagttgagtatggataagctttatttcattttacagtgaagaagaaatgttaagtttttttgatgaacccttatatttatccaatatattgttttgaccccaaatgtttttgattgatcagttagacccattttaatataaggtttagacgtttagttatggatgaacccctacatgaccagtactatcaacaccgttggttaaagatcataaagcttgtttaggctaaagtaataaacacatgattgagaaatgttttgatacaggcatctatatagactccttactaacaatgtagttaaattgtacataatcaaagtacaacacacatgaacttgggatacatttgtttacaaatcattcctgagtctctgtcttcatgtttcgtgcttgagcttgattcttgtacttgctaaacatggatagtactgatgggttcttgctctttatctgtttcgagctttcacacgagtctatagccattgcatcatgagtgtctcctaattgtgtatccgaagacaagacatgagacgatgatgttgatgacagattctcttcaccttctgtttctgatgaagtagtgtcctgtcttgttgacccttgcttaagtttcaacagtgttgactctacaatgccattaaaagaaaccaaggatttcaaaacctagagatttctattggacaatcagaatcacatgaaaatggaaagagtgtgtatttattataccgtagaccgagagaggatcgtctttgatgatcttcgccggatatctctccagacaatccggcggcgacggcggtggtctcagcctcccaaacatacgtctctctctctcgagtcaattagatctgatcgtcttctttgaattgacaatctgaaagatgacaacaaataatcgattctttgtgttttggcgcctcgatcgataaaaaagagcgggaacctgagaccaacaacggcccaaataagtgctgttataatgggcccttcgctcttattatgattttatcattaatcacgtttttcattattattaaccaaaaaaactttttatataaaataactaaaatagataaaatttccatcaaatctagtattaatagagaaaatatattaaacgtaaatattgtttaggatattaactttttatttatgaacttgttttaggataattgattatttcagaaaattacaatactgaatagcatgaaaagatataatttgatcaaatctcttactgtttattatgtacacatatattaaatttataatctactttttttttacataccattatgttacgtagatttatcagcaaaaggtagatattattgagaaataaatttatgtgaaattcagtatttaaatacacctaagtaaatcccaatcacacatatgaataagaatatgggtttcttcacagatgatatatgggcaattatacttgcacaattaccactaaaaatgatcacgacttctaaacaggtttgtaagcagtggaaatgtgtt

SEQ ID NO: 46110 - DNA, 919 bp, Arabidopsis thaliana landsberg
cgtatatactcaacataccctaatgattaccttggtattcaggaacaagaagcaatttaggttcaagagttcgcatgcgagcataaatctctggtcttcttccatgttcataaggttcattttctacgtatctttgtaaaagaatgtgaaacgtacggaattggtcggcgattccggcgggacatcctacgtcgttgaagcttcgttgcgtggttgatctttttctctcgaagtttttgtagttccaacttagagcttcccatgttagacatatctgtgccacgtaagcggattctagttccacgtaagggtttggtctcgacccattgctgcctggatattgtttttgttttttcttgtgaccgtttgatgataacttgtgaacgatcctctccgagatagatcttggctccaccataattgacttcaaagattctataaatagacaaaaattagaaaataaaatacaaaccaaaacctatatattgaacactcttttcaatatttactgtataatatatgatgattttcacctgcttcgtgaagcttttgagcagagattctagtgagaaaagtcatttcttcgtcgtacttttggaagacggtgtaagattcccatttagggcaactccggcgagaggacgttgagaaagggtcgtcagttttgacagagtttctccattccgatgagcttttcgacgttgacccattcgtgcatgactctccgaatatttgtcctctctcttcttcttcttcttcctctaattcctctgcttttatctctctcatgtcaaagcccgatgatggctgtatctcgtcgacatcattcttgattcctccattggacacaaactctcttgctatagccaaagagcaaaccaatccacatatttttagctcaaccggtttatcttgattc

SEQ ID NO: 46111 - DNA, 612 bp, Arabidopsis thaliana landsberg
aaattagattttaaacttaaattatacttcatataatttgaagtattttacaataaattgttatttaatcattggtttaaaaatcagatcaaaagttcaaaagtacgagtctgataactcacatatttacctttaaacatgaacctcgaagggattttaggcatatcaaggagaacttcatatacgcaaaataagattcagaaacagtcaagtgggatcaaacctcgttcagaataaaaggtttattgggtctaacccaagcgagttagagtctttggaccggcttttaaagctcaaacaaataattttcattccaaaactaatttcttgccaacaagaatttgtaagatagtaaaatgagttgggcaagactgaaagatttgtgggttttgaaattctaattcagattgggtccaagcagcccaattgacatacataatgtaatggattcaaataattgcaaaatatataaaagctgattaatttttgtataactagtccattaaattaattgcaaaattattattcttaaactttttttgtttttgcagcaattacaatattatttaaaaaaggcctgggttacacattctctcttttattaaaatgatt

SEQ ID NO: 46112 - DNA, 623 bp, Arabidopsis thaliana landsberg
  unsure (1)..(623): unsure at all n locations
cccccccccccacccccccacnccccccccccccccccccccccttaaaccccccccccccccccttccccccccccccccccccccccccccccaccccacccccccccccttctcccccccctgggtccccccccccccaccccacccccccccctcccccccccccccccccctccccccccccccccccttcccccctctcccctntctcccccccccccccctcctcctcccccccccccccttctctccctccccccctcctctccctcccccccctcctcccccctccccccccccccctcctcctttttccctcccccccccttgttctcggcctccccccccgcgccgtcccctctcccccacctcacaacaccccccccctcttccccccccccccccccccccccccctcccccccccccccccccccctcccccccccccctccctcccccccccccctccctccccccccccccccccccccccccccccccaccctcccccccccccccccccccccccccccccccccccccccccccctcccccccccccccccccctcccccccccccccccccctcttccccccccccccccctcctcccccccc

SEQ ID NO: 46113 - DNA, 1146 bp, Arabidopsis thaliana landsberg
  unsure (1)..(1146): unsure at all n locations
cgatcttgcccatttactacaaaatgtattattttagtcgggcagtagtatttttatagatatattggcaatagataagacacattaaaaaaaagttcaattactttgtaattctacaagtaaatcgactttctttttcacagtttgaattactcactaacctttttaccgactgttttacgttgtagttaataacaaaaattaaaattatacaaataatatatacttttaagtgtttctgaatcaaaaaatacaattatacagagaaaacatctaacagtcattttgagaaaataaaataaaatataataatatatatatatatatatatatatatatatatatatatatttaattgacaaaagaaagagcataaaagcaaggtgggattagtaaagaaaaaggtacttggagttgggactttttgttaaatgtgtatatattagtaaagattagtcatttgtattgtgacaagtaatatgatgatttcgtatgtacccatctaaaatcttagaatagaaaaatctaaactaaaataggtttggtgtttcttttaaattgagaattatataatcttacaaacagagtttggttgatgagctggttatcctatgaaagcaactaattccactagattcttgatgttcttttttgtcttctagaaacattgatcacacgacatggatgatcagttacataattttcgaaaaaccaaaaatctgaaatttaccaccccttatataaaatatctatttaaatatgtagctaaacaggtaaaaaggtcacattaccaaacacctttatccaatgctttttaaaaatccaccaaatattattactcaaaaacatgtgtcaaatttaaaccataatatcacacatcaacaacactaccataaacttttatcaaactattatgctacatgatttcttatgaaattttgatttcaaaatgacatttaccccatccgaataatataaactagagaaatntttgtaagttgggcnnnnnnnnnnnnnnnnnctttttcagatgtttcggtcaccgatactagcgttaattgtagacgaggctcgttcgtatttcgtaatctacacgagctttcagtaatctcgaggaacaatgatccggttatgcanaattgaatc

SEQ ID NO: 46114 - DNA, 485 bp, Arabidopsis thaliana landsberg
agtactagttaccggtatactaatcagctaaaattagttaaacaattatcaattttagagtatacttcgaaggtaagatcaatgtgaatcataacactatcggtatatacccatcattacactatgggttcgagaatctatgggttggtggactacatattttcaaaatacctttgagaataagtgttgtctgaaaaacagaagttatcgacatagtatgtgaactagcaaacaaccaaaaaacacacaaaattttgacaggcacttttagttttcattcaaccataaaatgtgaaaaaggagtatttagccgatataatacctctaaaagatagtattactctcatgttcatgtacctaactttctttgaacaaacattaacattgagcattagtatttgtttacgccgagttctacattcatgcatcatctgatcatataattaagaaacataattacaagagacaaattagatattttctta

SEQ ID NO: 46115 - DNA, 604 bp, Arabidopsis thaliana landsberg
ggtcccaatgtcaggtattgctcttcctcctaaaaataaatggaaaatattggtttggtttactctcattcgctattccgtactgaatccatgatttttcaagatgttacttgtggcagaaaaaaatctgaacaacatgacccacatatgtatcttcttggcaggtcatgcctttgaggccaggatatatgctgaaaacgttccaaaaggatttcttcctgcaactggggtcctcaatcattatcgccctgttgcagtctcaccatcaggtgaagtacaaaattgtgtatacaactgttttttcctatcttatagaaagtttttttttctctcgtatatatctgaccctgtttttgtcctgttgtttacctctctcatgttggaatttgtctgaaacagttcgggttgaaactggagttgagcaaggagacactgttagcatgcactatgatcctatgattgcaaagcttgttgtctggggaggtaatcgtggcgaagctttagtgaaactgaaggattgcttgtctaactttcaggtagattccctgagaacctgtattttggagctctctgcaattttaattatacctcagcataactataa

SEQ ID NO: 46116 - DNA, 599 bp, Arabidopsis thaliana landsberg
  unsure (1)..(599): unsure at all n locations
tcagagtaacttgatttggtgactatatactgattttatgatataaaagttcaaaccaaccaatatgagggaaggttataacttgttaattagtctagttggctgcacattacatctgctgtttgctgaaaatatttcttatcgcgatgcattaccttagccacatatttaagaagcatttatctgtcaacatgtagtctaatctaaattaatccatcctgtcaactttgttctatctcttaacatctgttgttacatgagcaatagccatagtgcgttaaagacgtttacattttggtattttatgtaggtatcaaatacctgaggaatggccatataatgaagctcgaaaacttttcaaagaacctgacgtaataacagatgaagagcagcttgatattaagtggacctctccagatgaagaggtagaaacctagttctcccctattctgctccacgcatattttggattcttcgggaattnttcttaggtacctccttttgtcttccttgccagggtatagttcaagttttggtgaatgaaaatggattcaacatagacagggtaaccaangtatgcttcacgagtggtatcatac

SEQ ID NO: 46117 - DNA, 720 bp, Arabidopsis thaliana landsberg
attgaatctctttctggctgattgattaatggctgaggattccgatcttttgcctaattcgccggatgtaggcagaggatggagaaggatttctactggaaaactgagttttttatacactcaagagaaagttgttcctaattatctcagatctcccactggttcttgtcatgatgcttgtaaatacggaaggaaagatgaatctgaagacaagccaagagttccacatcgcaaaagggttagaagaagcttttctggagctataaacttggattcaccactgaggaagaaggcattgacaaaaccgctgttgagtccttctcgtagatgtgattctgttgttggctttgatcatgcgaagagccaagttagaaacttttctagcggagtttgtgatgttaagaagagacatgcagatggaacaaatgaaaaggtagtgtctgtttctgaatctaggttagctgattcgactaagcgaaagaagaagaagaagaagaagacggtctatgtgtctcgtggaagggctaaagagattgttgaacaaaagaggcgtgtcactgctttaaagctgaaagctgttgcacaaactgcagagattgctcttcggcgtagtactgtgaagagaaagaagatgaatggcggatcaaaagctgcagaacagaagaaggcagttatggctttaagaagagcctcaatgtcctcaaaagggctgtctcgatg

SEQ ID NO: 46118 - DNA, 265 bp, Arabidopsis thaliana landsberg
gcccatgtccagaaggcggtcatattcctgctgcgcgcacagcgggttatcgcgcagcttctgcatctggtaggtgggttcggaccacaggcggtgcaagttggcgcgcatctcggcaaagacgatctcgccatgcttgcggatgacgatgccatgattgttggcgactgcggcgccgatgatatggatgcaaccgggcatgacggcgtcgagtgcggtccagatcgtggtcgcttcattcgccgccacttggatcaccggaccc

SEQ ID NO: 46119 - DNA, 533 bp, Arabidopsis thaliana landsberg
gatgattctgtcccaacccgtactttgaaccaaacaattttatttgagatatcgttcagtcctatcccgtctgtcattgtaatcaaacacaccctaaacttttgcccctcgcacgagtggtcgcggcgtccaatcgggcaacagggcagactcggacaggacgtacggaaactcaggaaacgcaccggtgcgcggctcgctcgcccggcggcacccgcccgctcggtccccgcgcgcggacgggctgctgcctgctggttcgcgtcgcggaggttcgatcggcgccgtgctctagaaaaaaaaacagcggacacgtcatgcggacctcgtcgcggcgcgccggatgaaggccacctgccacgcgcgaggtcactgcctcaccccgtccgtcagacgagcggacgccggatcgccgtagagcccgcagagcggtaagctcgcggactcctcgccatatacggcgcataccacgtccaacaagctagatggactgacacgacatgagacctagcgcgcgtgaaggctggagagtc

SEQ ID NO: 46120 - DNA, 2055 bp, Arabidopsis thaliana landsberg
aaatgaatatttgtaaataactcggtcaaatgcaaagccaagtctgcgggctataaaagagcaacataaaaaaaaaagtacttaccgtgttggagccaacaaaagaacaagcccttatatcttcatcatcacagatagcattcacagtatcctgtgcaacagatgcattttcagtgacaacaaagaaagtgaaggtaatagtgcggaatctttacaaactaggttactctaattgcaaactagaatattcaccataatatctctcgacgggatccttactttaacaattcaaatgctaacaaataagaaatttagaaagagcagaaagtttaaacataacctacattggttccgtgaacgatattgagaaccccatcaggtaaaccagcttccattgccaactccgcaagtattacagaagcacctggagaaagcaagtaatatcaataatcaaccaatcaatagaagggacctctatagctatagtggaaaacagtcaatcaacaatacatttcgctcatcacattggcggtggtagtaaaatgcatgttcactacactggcatcaacgatatgttacaacatgatctgaaagtcaagacatcttgaacttcccatacatcaattaaacaccacagaagtgtctattagtaactggaatagttcgaaggaataagggtattttaccgggatccttctctgatggcttcagaataaaggtattaccacatgtcactgcaacaggaaacatctgcactaacaaacacataataaatacgcagaattcacataagagaatcacaaagcattaacgatatacataatgaagccatataaaaaagggcttagcatgttacccataaaggaatcatggctggaaagttaaaaggacaaatgccagcacaaacacctaatggctctctaatactatatgtatcaactccgttcgacacattggggagatattcacccatctgtaaggttgccattccacacgcatgctccacaacctctgcgtaagaaaccatgtaccaaaaataagcactaaggttctcctcttcttgtcaatcatataatcaaacctacaatacataaataaaatactaacctaacccacggaagatatcaccatgtgaatcctttaaagtcttcccttgctcggttgtgatgttcatagcaagtttatcctacagaaaaatcaaaactttcagccaagcacatatcaagatcatagcaaactaaaccaggtagctaccatattcttgcgtataagctcttgaaactttagcataacacgctgccgggtagtaatcggcgtgtttctccacaacggaaacgcttgcttcgcagcggataccgcagctttaaactcttcattagtagtcaatggaactttagatacaacctcttgtgtagcctaataatagcaaatcagaatttacttcaaagttcaaacctttaagtaatcaaacaagagtataggactcataagagagtttgcttacagggtttataacatcgataaacgaagatgattgagactcaacaaaagaacctccaataagatttggtactctctgaaaacagaacccacatcgaaaaatcaaaacttttgaataaaaatcacatcgaaatcgatctaagaactcaccggaggcatttgtggttgagtagattgctccggcgaagttgataaccaagagcttcgaagagcgagaaattgtggtctcaaaggtctcagattgttacctgaaaacagtaacaaaaactagcttcgatagtatcgaagtctgcagattttgattcgagtacaagagaatcgagattttaccagaaattcgaagcagcatcgttgtttgatttgttgttgttgttgatgatgatgatcggagtttggtgttgccgtctgcttctttgtataagcgtctccttttggttacgggattgagtgatgagtgaatgctgactccatgttgaacgggtgcgaatgaaatggttggatttcgccccgtggagggatatgttccggtagatttataacattcacggttccttt

SEQ ID NO: 46121 - DNA, 919 bp, Arabidopsis thaliana landsberg
tattcaatatattcaagaggaataaaataatgcaaacacttgttgtatgcacaaagcgagtaacaaagtttttctcacccaacaccgtattataattatatgtcatcttcattaaacacgctaatcaaatatattatattacgtcatctggatcctcatctttttttgcttaatgattagctagctatcatatacaagcacttgatttaaacaccgaatgcctaatctgactagattgtcatcaaataatactctggatccactgacatgtgatgtcatgcatttttatcttcttctctttttttctcgtctcactaaaatcatctaaacaaaaacaaagatcacaagcaataatacacgtacgaaatcatttaaagaatttttggaaattcagtttatttttttgcctatttatttttagtatataattcaaagtctccaacacatacacttacaaatttgaatgaagttatgatacgacgtgggtactagactactagtagtacaaaccacttgattacaagtatttattttcaactacaaattcgactttattaaataataagtaaatgtacagtcacattttatatcatctgaattagaagaactttttgcaatttttcaatagcaatgatatagcaatcatccaactaatctatatatgtaagtgtgatatatcaatctctgtgttcggaattaatgatgatgccacaaaatttggttattaaaaaaaaaaagtttctgatcaatgaatttctgtccgtactttttacagattacatacaatggatgatatgaattattgaattatcatttagaaaaagaaaaaaaactgaactataccaatattctaatttagtaattactagaactgatacaaacacttttaacctaaccactttttgggtccaatataagt

SEQ ID NO: 46122 - DNA, 457 bp, Arabidopsis thaliana landsberg
cttcttcccaataacgtagatatattttatttgtttcgtttcatatttgtttttgacaatttttgtttcgtttcacattaataaagtaatcaattatttttgtcaattgggaacagtttatccattgtttcgtttcacattaataacagataaactgtttccaatttaaacagaataagaattaaatatttgatcagaaacttatccaaaattaaattaaaaacaactgattataagttggacaaacttttacgttgaaatatttaattataaaataagatcaagagcttatccaaaactaaataaaaatgaataaatacgacaaaaatattaaaaactattacgttgaaatattaataagtcgtagataatccgacaaaagataatttttttaagatgacaaacaataccaatgtgatgtatttaataaaagtttgaggtaaaaataaaataaaaa

SEQ ID NO: 46123 - DNA, 589 bp, Arabidopsis thaliana landsberg
cggctgagtgcctatgtataaaagttgatatcatagtttggaaaaaaaaaaatcactctctctctttcgctctcgcttggtcgtctgtctcgtgtctctcaacagaaaaccatggcggacggccactccttcaataatatctctctcagcggtcgcggtggaaaggtaccatcttctctctctgtctccttctatctctcaagatctttcaattccttcaaagttttcaccttttcctcttccttcgaaaaccctaatctcctttctctgtatccccttttgcttccgccgctcgattcttaaagaactcaatgagtcaaatttagggttaaaaaaaagattgtcgctttcatttttcagttgtgttgttttcttgtttacaattgttaaagctgcggtagtttttagggttttcttaaggctaattagggtttcaattttggttttttagaacccgggtttacttaaaatcaattctggaggaattcaatggaagaaacaaggtggtggaaaagctgtggaagttgatagatctgatattggaagtgtaagttggacgaaagtgacaagagtaatcaattggagtcaa

SEQ ID NO: 46124 - DNA, 453 bp, Arabidopsis thaliana landsberg
ttgagttgtacatttcataggtgttgctgagaatactatttatatgaatataacaatatgattggattaatgttgctgacattaccaaaatgtcggttccagagctctttattgttgagacttgagacaattcaagtatatgcgtagacctcacaccactaccagtacccatactacaattcttatctgttgatttaaaaaaaaagaaaaatggtaaacataaatggaaatgagacgtttatgtgcaacgattttaaaattgtcatccaaatttgatcctgtaacaatggaggaagaatttgcgcaagagaaagaatcatgaggaaaaaaaaaaaaaaaatcacgaggaagcaaaagtcagcgcaaagactcaaattaatttatttttttttttttttaaaaagactctgaaatagctgaataagaaaggtaactgggccatgggggaggggg

SEQ ID NO: 46125 - DNA, 1007 bp, Arabidopsis thaliana landsberg
gccatcttaaatctcttctaatttgcgatggctttgtgatgattgtaatgatttaagaagaatttatgttataaggttataactgtatatataaaataaaaacaaattttattttagatcggacgatccgtgtattaatgactaatcgcgttagatgcggtgcattaaaatataagtgacctaaatgttacttgattccatagtctatgttatttaatgataatgtacttatgacttgtgtgagtacaacttgttatgtacgaatattagtcgataaagcgacgcatgcatgaattattgcaaaacaaagttgtactctcagtttccacgttatctatatgcaaatgcttattgatcagtttccttatcaacttaattcactgaatcagaaaatattttttttgtctctttacataaacagtttgatattcttttgaacttaatcaattgattcagataataatattattttttctgtttatgctttttaagatttcaagtttagtatgttggtgtcatgattttattacccatgacgatttcacgatactttgtaaatttgtaatcaaacttcggtaaagaaggtgaatctgatgtataatgcggtaaataaaacagcagaatatatcaatcaagtggagaagaaacttagaaacaaaaattatctatcatgcactgttggaatttactgtaatgtcacgtggagaaaattctgcaggataattgggcgggaatatatgcaaggcatggctcctgcggacctctctatacattattttaatttatcgtacagttgaaaagaaaagaagaagttataagctctcaaattctcaatataggcggtggttgaaaatctaaaaacattgagccatgccttaacataatatcatatatcaagcatacatgatttacagttgtaagttgaataagaataatttgttcatgctgaaaagaatgaaaaaaaggaatcatatgttcatgattgaagtacataacaaacgtctgtc

SEQ ID NO: 46126 - DNA, 530 bp, Arabidopsis thaliana landsberg
tataacaatacaaggtgatcgcggagctctgcgccaggacaccttcaagcacgagttttgtatcgaccaagcagacggacccgatgctcaggattcctcatcttcgtcttcgtcttcctcttcttagtaggtccatccccttgcttctgcttgtgatgtaatgtactcgtagctgggtagttcagttcagcaagtaacaatatcctatacagcacaacacccatcagtgagctttcgctatactgtatctgtctattcctcaaataaatcatgtcagttttttttggtttcctccatcatcaatattaactcgtaatttcagttcatatatttacatataggtatattaactagtggtgtgtaattgtacaacaacagtaggttggctggcaccagtagcatctttttttttggatgatgagaattcactcgaaatatgttgcaatgtaccttttcaactggatggaacactatactactacaaccagctgcttccttctttcttctggcaaaggccattggactcatgc

SEQ ID NO: 46127 - DNA, 673 bp, Arabidopsis thaliana landsberg
gttgaatatttaaataataattatgaataagagacttattctaattataaaaataattatgtatagaagtaaaagacgatgcaaatttatcaaactaattaaaattataattaatatttaaatatttaatgttacatgaactaactagctaaccacaccaatcaatcaccccagggtggtggcgtgcttcctctgtcgtccgatctgccgttatcagagcggacgacggggactcggggagagagataataccgtggacaaaattgggcacgtcttcttctccgcgaacctcgcgtcctcctcgcctgcctgcctacaagtctcccccctcccctccccgtgcctccctcgggcctcgcttctcgcgctcttcctctcttgcctccgcctgcctccaggctccaacaacccgggaggcgccgtccgccccgcctccgggagcgatgatgatcggcgacgctgctccgatcaataatgccccgcccaggtgatcatcatgaaccttcctctgtctacggagcgcctttctatcgcctggatgggaaggaaaaaaacgcgttttttataggaatctcggcgtcgcgcttcaggggaagtggggactcgtgtggctggtattggatggataatatcatgttcgatctttggttgcaaatagtacgataatagatat

SEQ ID NO: 46128 - DNA, 647 bp, Arabidopsis thaliana landsberg
tttttggcgttattgttatgcgtgtggtatccactatgatcacaacaaaataaacagaaaaaccaagaaaaaaagtagaaagcgaagaaatttcaggaaaaaaaaatacagttttgttacatttcgaaatatgatatttcttagaaaaaaccatcaaaatactaaaatcagctgatgtgatgaaatatcaaagacaaaataaactaattttgaccgatttagagtgcgaggaaaagtaagagctgaggtccattacgcaatattgtcctctcacgtgatcgattttgtattaagtttgcctaaagagcaggcaaattgtcctttttgatgtgtgacactaaagtttttagtcaagctaccctatttattttataattgacatctaccttttggttctaattttcttttgtagtgcatagtgcatgaatattagctacaccgtttcgtttggctcaattctgaataaattgtgttgattttgttaacttatttaatgaactcgcataaacttgagtgtgaaattgactctgacaataaaaaaacattacaatagaaaataagttagtagctgtaacgaaatcacggatataaaagttaaagatgttatgtcgatgatctctagaatatataatcaatctgggttttat

SEQ ID NO: 46129 - DNA, 240 bp, Arabidopsis thaliana landsberg
ggactcacctctggtgtaccaggatcgagcccacggtaaacgctgggtagccaagtgcggagcggtttactgctgaaagcatctaaatagtaagcccaccccaggaggcgtgctcggctatcattactctcgcagaacttaactggtcgcatacttgacaacagcgattattcaggaatacacattgaatgcgaacattacgcatttcatttctggttgaagattcttaatcaaaattgt

SEQ ID NO: 46130 - DNA, 847 bp, Arabidopsis thaliana landsberg
ccttacaacaaaaaaaaactaattttggaagtatattgatggtgattggtgagtaatataaaaagaaaagtatccatgatgatatgtttctacaaactatttaggaatatacttattattatttcccatatatagaagggaatatatatactttttagattttctttttttgtcaaccattatgacaccagttttttgttgttctcgaaatatataattgtaacaataaatctgttttatttactcacttcgcatattaataagaccagatttagatggaactatagaaggaaagaaaaaatcctcacttattatttacaaaaatggtttctccaatataagattagagctaaaaatatgtagtcaaaaagaaaaacgctaaattgtataaaagaaatcaagaaaaggtaaaaccttgtcaatgctctctctggatttgttgtgtaagattttaggcgttgtaaatttggaaccgttcttaatttggggtgtgagatagagagttatatagatctctctttattcttctccccttagtgttcatttttttaatccacaggtaaagaataaaagtctcttcttctatctcacctaaaccctttgaatctcactgcttattgaatcatcgagtctttagaagtttcagtctctaagtcacaaaaagtttctggtttactgttaattcatcataagtctttaaaggatctgtttctcagtaattctgtttgggagttggaaatgtaacgtgcttccgatgaaaatgtttattgttgtgttattgtttgaatattatatgtttgatatgtcacgacaatggaacaatgaacagacgttttccattgtgttg

SEQ ID NO: 46131 - DNA, 815 bp, Arabidopsis thaliana landsberg
ataaaattagcagaaaattaattgaatttatatgtagaaaccaaagcttaaaaaccttaaatttgagtttttgagaaaagtgatctattgggttggatttaaaattatccgatccattgggcttaatgagagacctctttgtgataaattgacaagaaataaaggccatcttttatatgagctcttcacatcaatgtggaccatcttgtaatctatcatatggttcatacttttaaaatcacatgggttctatatgtgaacaagtttgaataaaggtggtgaaaggctttttagtggttgagaagaaaacggttaagagagatgtctttaattatggtatgatgccattgggatacacatatggtccaaacaagcgtgaagcgtctccaatacctacatgaaagggtgaattctttcacgatgagtctgcgtttataataacaaaacgctagctagagagacaacccattcaagtccaatgaaatgttgtcgagcttttaagattcttccatttgacctttcaggtttatcaccgtctaaaattgaacatagcttgatctctttgaccatagtatttaagaggtttcgcgtcaaaccactcactgccacaacatggtccatagtatgtagagactagtgggttttgcactaagctctagattccaacaaaattgaatgtcaacaatttgttgttttcgtttttggttctaaaactaaaaaaaaaaatcaatgtccccatatttcctataaaatataagaaaactagttttagtacataatctaaaaactcttttaatttttgtttttaaaagtta

SEQ ID NO: 46132 - DNA, 595 bp, Arabidopsis thaliana landsberg
tattccacaaatggatgctcttaatccagttacaaggatgcgagagggagaaccttgccaagcagagttatttctgattacgggccagtcttggttttaagctgaggcgcctaaaatgcttgaaaaaggacgagccagtgtgctgtgaagttcaaaatctgctgccttttcggtggaactccccagaaaaaggtatacatgatttgggtcttggctaatgttttgtttcagatgaatcagggattgaatcaaaagctgtacgaaaacgcacaccagaaccgatatgccttgatgtagggcagagccaagaaagtatgttcggacccaaaatctgtagaagaaacagttaaaacttgacatagaataaacctttgactgatactgaccatctaagaaaaggataagaattattaccaaggttaggttttcatatgcgccgatgtcatatggatgcttatagacttgctcacctttctctgctaaccacatagctctcactccttcatggaactgttcatttcccgaaaaattgatagcagaggaacaatatctaactagggctaaggagatccataatctagcaattgaagaaatg

SEQ ID NO: 46133 - DNA, 895 bp, Arabidopsis thaliana landsberg
aggagggggggatgggtaatcggtggagttggataccctacggaagatgcatttagtcaacaattttgaaagtcaaacaatatttgagtgtgcgaatccgacatgcacaaccaccatagaacatcagccccaaaatcagtcttctcttaacacactagtaagaactcaggttcctcgcccagatttggatttgagtaccaatgacaataatctctgtacttgatcaatcctttcagtttttcatttgtttactgtgaaactgaatgtttagtatctttttttggattgtaaaacttaaaaccttaaacttatgtatcggaatgtattttggattgatttaggatttgtgttggaatttgtgaattgtttgttgtatttaattgtatttagattcagaataaacgaaacattgttcagtggcgaccattgaacaaaaagagattgccactattatttcaaaacaaaattagtggctaagtttttgcaaagatggtggctaaatcagttccaaatattcaccaatagtggttacgattacagccaccactaattatggtgacaaaatagtgccattttgctatgataataattagtaactcaatagctaattgctacaaaaaaaaatagtacccaagcagtagctacattagataccatcattttgtttctgattcagcagttaactactacataaccaatggttgccaattggtcaccatatagccactagtaagtgacgtagcaacgtagtagctaatcagccacacatggtgattacggcgactgaatttcatttagcttatttccataagcaaccgaataaaattagtgcagtaacattggcaaatttaaatatagcgaccgatttgatatattaaagactggaaatgtagtg

SEQ ID NO: 46134 - DNA, 559 bp, Arabidopsis thaliana landsberg
cggcggtttcagaacgccgaatttctcatcgcctgcggcttctccacgccacgattgtcatgaggtttgtttctttctacaaattaattatttaataatgattacattattgatcatactcgttagttagaaattgaaaaaaaaataccccgaaaataattgatgtacataataatcattaatatgatacttaaatttgaaaatacaaaactatagatgtttccaaaaattgtgtatagaagtttaattaatgacttagtttgactcgtttgaattagtgacaaagtaagaatgattagtaaatgacacgaatacccctcaaacttaaggtttggttgttttcgaagatgcaaaaacagttgaagacaaatgtaattttcgtcttttcgaaaatgaactcagccttttgtgctgttgaaaacaaagttgatctctgtttctgacatgcaaatcttactctcttgtttttgtgtttttggtttttgtctaccaaaaattatttagcaatagagtccaaaatatttgtctttgtctgtgtattctaactcaatcagtcaaa

SEQ ID NO: 46135 - DNA, 384 bp, Arabidopsis thaliana landsberg
cggcgataatgcgcaacggcgcgcgggcgcgcaggaagtccatgtgcaagtgctgggccctatctctttgcacgaagaattgtggcggaggcagcagcgggcggcttgcaagtatgctgcaatgcatatatgccgccgtgaatgatgtggaccgactccgcccggcgatcggccaggcacaccgcggagcacgcactgtagtgcgatccttaccacctcaacaacatcgtgatcacgctgccgaaattgcacagatgctccacagctgaacggtgggatgcaaaccagacacatggcgtggttgtttagggttagggaacgactcgtcagtggcacacgagctatcgtgcactgccgccgctagggactctcacctaggagcac

SEQ ID NO: 46136 - DNA, 679 bp, Arabidopsis thaliana landsberg
taccgtactccgatttaggcaaaaaaaaaccctgacggccctctaatccctacctccaaaccatttgctttacgtataccatgcccttcaatattcgtgtacgtcaaacattcatcttcataaattttatcatgtacacaatgaccggtgcatgtacattgctcagatgcttgaagatcattctcctcaaacgaatagatacttagtccatcacgtacactgtccatcacgtacatgtgtacttagtccatcacgtacatgtgtactttcacaattataatagttgactcaatatctatgataaaccaacaggcggttgagtgtcaccaacagctccgacataacatgtaccatattctctaacaacaaaatcaaaccatttgttgcaatcgtaatcttcgttttctccttcactattgtctataatcggttccagtacactccctattggggttggatcccgaatgttacgtaacactcgaagattgccacatgaataacaagtcgactgaactagaatcaacaagtgaattaccgaaccaaagtctcaagataaggttagacgaaaccgaaagctcagaggacatgcccgaaggggagcaagaaggttaaaaaggtttaaaagaatatgttatggcttttattacataatcaataataaaaacagatacatttaata

SEQ ID NO: 46137 - DNA, 583 bp, Arabidopsis thaliana landsberg
ggcggccatcggcagaccagcggctagctggctgaaaagccgacttcatgccgtccatctttttccccaatcgttcgaacagttacgaatggtaggcctaacagcatcgaactaaaagggtttcttgaattttttctgaacattgtccaaggtgcttaataggtgagcgcacgggttggtctcagcgtgccggtaatcagcccggccgcaccgcgtcgtcgatcgcgccggcctccggagcgcaatcgcccgcgccgggcaccagggtggccagcgcacccgccgcgcaagcccgccgcagcgcatgctcaggcccggccggccagctcgcggccagcacgccggcgaacacgtcaccggcgccggatgtgtcgacggctcgcacccgcggagcgggcacgtcgatggtgccggcggcgctcaggtaggccgcaccccgcgcgccgcggttgatcacccgatgctcgaccggccatcgccaatggtcggattcggtctcgttgacgacgacgacgtcggtcaccgcggacagctgggccagcttcgcgcgatcgccgcccgtcggtgaggcgttgacgatcac

SEQ ID NO: 46138 - DNA, 703 bp, Arabidopsis thaliana landsberg
tgttccgataatggtgaggtttatactgagatttattttttgcggtgctcctttgccataatcttttagttattgacgtaattttgatcttgatgtaaaactctctctaagaaaagtttgtcaaaactttctcgcaccgcaccatgctctaagtacaatatttttgccaccgtaatcttcttttctctaacatgctagttcactttgttatttagtgcatacaagccaaagttttctcatggcacacttgatcctgatctacgactctggcttatactatatgtgtagctactaccttactcactgtttacatgggcttgtgactttctcatgagatttttcaaaggctttttatggacattttaataagttataaagatatgttttggccaaaaatatacaaaggtcatcctggttattatataaaaaaaatgtagaatctaatgaagtatgaggcaacatattcggtagtagccatctttgaaaagcaggttgaaaagatggagaatcatgaattatagcaatcgatgttgaatgagttgaataacattcaaaactgcatgatctcatttgatgcacaatatgttcaagctccatgaaattgaaattaatataggtacactttctttgcttaaaatatgtttttgagtggcaatgtaatttataactgaaacttggattccactttcattttaaactattt

SEQ ID NO: 46139 - DNA, 781 bp, Arabidopsis thaliana landsberg
ttttgtttaacaaactttatattcgaaatcattttctagttaattattttcttaccaatatgcttgtatttaagataattttcttatacttttgtttgtttattaaggatacactcttgcgtatgaagattcttgttcgacagatgaagaatgcagaagaaactgcctatgtgatgtagcatattgcgacaaaagccgtgataagtgcgattatggatttatgaatagagttgatgtccgttttcccaaacatccttatatttcaaaaaataaagatggtagtggtagatgatctccactgcagtgattgaaattgtaatgatacaagtgaatgtatgtcgtactcgtatctaataaaaaaaagttattttttgaaaactatattttttttaattttttttttgatgtgtttaatatgttgatgatcataattcatacatatatgaatactgcctaaagttataaatgagattgattaaagtcacataatatatgaattctctacaaattttgtttgatcttaaaaataatttttgtaagaaaaatatatattcatgatggatatatgtggtttattgtgaattagataattacttacaacattataaatcattcatttatttaacaaatatttatataaattttgttggtttgttttcgttttaaaaataggttaaactaggccaataatagttttcaaaacacaataaaaaagttaaagttagtagtgaagaaaattcaagaaagggatattaaacatatgtaatgttaaagaagaaat

SEQ ID NO: 46140 - DNA, 529 bp, Arabidopsis thaliana landsberg
aaaagtatatatcttcataattaatgaatggtaattaaccttttaaattttcattgatttatgtataatggggatgtgtgtttatattacatatatagtttactacagtttaaacattccaacataattccactaaaactcaaccaaaaagggggtaccaaaaaaagagaaaaaaaaaattaaatgttattgagtgatgggtagttaaagaacttatggtgttaggctgtccaaaaagagaagcacttaaagagtttggagtacaatgtcttaaacaagaaaatgtctgtcccattataacatctcgaaaccaaacacacacacacacatataacaatctcttcttctgtgacattacacaatggtggtttgagtttacagaagataataatggggaaaactagcaaatggtttcgaagtctcttaacccggaaagaaagagagaacaaaggaacatatcattcaaagcgagtgtgtattcacttcttccattccaggcactcctaaggagaaacgtcgatggagtttt

SEQ ID NO: 46141 - DNA, 615 bp, Arabidopsis thaliana landsberg
  unsure (1)..(615): unsure at all n locations
nnnnnnnnnnnnnnnnnnnnnnnnnnnnnnnnnnnnnnnnnnnnnnnnnnnnnnnnnnnnnnnnnnnnnnnnnnnnnnnnnnnnnnnnnnnnnnnnnnnnnnnnnnnnnnnnnnnnnnnnnnnnnnnnnnnnnnnnnnnnnnnnnnnnnnnnnnnnnnnnnnnnnnnnnnnnnnnnnnnnnnnnnnnnnnnnnnnnnnnnnnnnnnnnnnnnnnnnnnnnnnnnnnnnnnnnnnnnnnnnnnnnnnnnnnnnnnnnnnnnnnnnnnnnnnnnnnnnnnnnnnnnnnnnnnnnnnnnnnnnnnnnnnnnnnnnnnnnnnnnnnnnnnnnnnnnnnnnnnnnnnnnnnnnnnnnnnnnnnnnnnnnnnnnnnnnnnnnnnnnnnnnnnnnnnnnnnnnnnnnnnnnnnnnnnnnnnnnnnnnnnnnnnnnnnnnnnnnnnnnnnnnnnnnnnnnnnnnnnnnnnnnnnnnnnnnnnnnnnnnnnnnnnnnnnnnnnnnnnnnnnnnnnnnnnnatgcccgaaaaccaagggttcctcgcaagttcgccacggagggtgagcagggctaagataggcgaaacgtagtcgatggcacaggtgatattctgtataccttg

SEQ ID NO: 46142 - DNA, 601 bp, Arabidopsis thaliana landsberg
tcggttttaaattaagtaccttcttatgacttattctaatcgtatgaaagtgattaatatattatcacacaaaatctatactaatgtttttttttgggttatagccatttaataagtacaatttctgaaaagtctaagacagttaatttaatacggtattgtttaaagtaacttgttagctatcatatacgccatttgctcattataaattacgaaaagaaacacacacatgaacagcttgaaggatttttataaccctaagaaatcaaaaagtcaaacaaaataaatagtatcctttacaaaaaaaaaaatagttatcatatgatcttctttatctacttttcgttctttatgaccactatctaatgttaaacgtggcttccacttggcataattaaacataaaaagatcctccataaggcaaaaaagtaaagaaagaaatggacaaaaataaataaagatgaattacatattctacaattttagaggatatagaaaaaagttgtgtaacaccaccaccactacgagccacgtactactaaaccagccgccccaaaagggtaaacgccctctaccacaaaaaatagatcatcataatact

SEQ ID NO: 46143 - DNA, 842 bp, Arabidopsis thaliana landsberg
atttcatcacaacaaatcaaataattagaagtcaatcggataattcaagtaaattttatcatgatttcgttcaaatatgattttaatcattcacactttttattgaaaatattttaaacatctaattcaaacttcttttgtaaattatccacgaaaaattagttttggaatatatccgtaaaaatatttacaataatatcctccattggttttaaactaaaattaaaagaaattattttatttgagtagtcaatcggataattcaagtcaaatttattatgattttgttcaaatatgattttaatcattcacactttttattgaaaatattttaaatatctaattcaaacttcttttgtaaattatccacgaaaaaatagttttggaatatatccctaaaaaaatttacattaatatcctctattggttttaaacaaaaatcaagtaagtctaataacaacaaattttcaaataattagtagtcaattggataattcaagtaaaatttgttatgattttgttcaaatatgatttttatgaaatatgtttttaattattcacactttttattgaaaatattttaaatatctaattcaaacttgttttgtaaattatctactaaaaattactaaaaatatccctaaaaatatgtacattgatatcctccattggatttaaactaaaattaaaataatttattttacttgaacatatcctgcattagttttctcaattacttgatcttcaaggttctctagatttgtataaaaagcagataaaaactctcttgaccaaaaaaaaacaaaaacaaatcagtctctgtggatttgcttctggaagaa

SEQ ID NO: 46144 - DNA, 356 bp, Arabidopsis thaliana landsberg
gagagagagtcttcttgaagaaaccttaaaatttttctgaacatcttatattaagattgtgtgtacttattttgtgttttgtcgaataatccaagtattatgtataatgtgtgtgacctccatgctatgggttcccctgttctcagccatattgagatcgtcaatgtcttgagtttgctaagccgcctattgtctttcatctcgtgcagcgttgaagcggtgagatagatgcattatgaagcaatggaagatatcttgtttgtttttgcaaccttcttactcttaagacctgagattacgaaatcatgagacatttagttatatagtggtgtacttttgggatttgtttttggttt

SEQ ID NO: 46145 - DNA, 614 bp, Arabidopsis thaliana landsberg
tactgattaacttgtgccttaacaaaaacaaaaaattattcgcaaacacaaaaaaaattgttagtgaagaacaaaatggataataatggtggtgggagctcaggcaatgaacaatacacttccggagacgccaagcaaaatgggaagaggacttgtcatcgccatacccctcaacagatccaaagacttgaagcgtaaaacctttattgtttttttcttgatttctaaactaataattgatattcttttattacaataattattatgataattgtttttgattttttgaatcaagttatttcaaggaatgtccccatcctgacgaaagacaacgaaaccaattatgtcgagagctgaaactcgagcctgaccaaatcaagttttggtttcagaacaagcgaactcagagcaaagtatatattcaacttggcaaatcctttttaaatatatcttcaataattttttccaccaactaatatatatattttcatatgctatagactcaagaagatagatccactaacgtattacttcgtggagaaaacgagactctccaaagtgacaacgaggcaatgctcgatgcattataaagtgtgctctgtcgagcttgtgga

SEQ ID NO: 46146 - DNA, 589 bp, Arabidopsis thaliana landsberg
  unsure (1)..(589): unsure at all n locations
agttacatgcgtcggtcatatacgcaccaaatcaaaggttttgtttagacacaattttcattcaaacgagtttttctatgaacgcattgttgacaatttctagctaaccttattctacaattcttttgtttcttacaacgtctccatcgaccatcggattacgtctctatatggatttttttttcttcttctttttaaacaagtgtcaatagggctgcctgtttttgtccgtgatagggaaaaaacgcggaaaactttacgagttgaaattgggctactatgttgcagctttcagcccaatgattaaacattacgggcccataaaaggcccaattttatcgaccccgttcgtgtcccccaagtctgaaccctgggtttttgcccaaatcgcctcctctcgagaatttctccgtctctctctctctctccaatggcgtggctcaacaccatcttcaattcttcttcttcgacattgatcaatggcggctcttctttatttccctaaaatctcttccaaatgacttcctcacatttnctcgcttttctaccaatggatttgaggagactctcttgcgcaagctacttattc

SEQ ID NO: 46147 - DNA, 541 bp, Arabidopsis thaliana landsberg
taaacactttggtcataatccacattaaaatctaacgctatgatattgtaatctatagttaactaagttatctaccaatatttgaatatgattagatattgatgtctttaaaacatactttaattcccacaagagatatacagaaataatatatgtgatctatcaaaaatgaaatctatagataatatttgtgctagattccaaatccacggaaagagttcatcaaattttaaaccaataattgatactgtgtgactcgatttattatcagttgagctagatgtatgtacttttagttaaataataatagctattatatagtattgtaaaatccatggatttgtaactttcaatcggtttgcaggaaaccgtacttgtcattttcaatacttggtagggttacttatcgtataggggaacaccacatgcaattttgaccgagactaatcctgagcgtggactatatattcatgaacaaatataaaaactcatttgaatacatatacaaaaaagggaatgattattgtgactattaagcaaa

SEQ ID NO: 46148 - DNA, 478 bp, Arabidopsis thaliana landsberg
tcgtcgatgatcgctgaggatggtgtgccacgttaagaaacgattaacaagaagaatcgtgtctcattccaggactatccacgatgcgagacgtgcgtacgacgaaacgatccggttgatgaagagtcgttcatccgcgtcgacacgcatcatgatgcaatgatggatcaaggggatggtgaagatctgcgatcacgaacggatagacatgtaatggacagtaatgctgtccatctattcgatccatgtcaagaattgggtgcccggccggattcgaaccagtcgtcttccgggccaacaccggatgtccttccactgaacgacggggcaacgcatggcttcctcgacgtcatgggtgccccgctggattcgaccagggtcccggattcagagtcgggtgtcctacgctagacgaagggcaacggcgcattaccgcatcgacgggccgtcgacctgtcgtaggaatggatccccggta

SEQ ID NO: 46149 - DNA, 483 bp, Arabidopsis thaliana landsberg
gaatgcatgacccaaatgtaggaataagaatttatgggccatgcatatctagttttctatataaaccaatatacatatcataaaaataatttaaaaggaaagatatcttactgtatttaagaaataaaaggaaagatatcattatttcttcttttgacagctcatcatgttattttctcaaaaggacagatgataaagttaggataagtgtctatgaatacttatgttaaatttagaagaaatgatatcatatataggatattttcctcaaatatgagtgttgaaatgaggtcaaaatttgatgggccgatttaatccgacctaagttactacccaattgagttgggtatgtagctatgatgggccaatatggctcagaggcactagcactagtagcatagttgttgaataaaaatagggcttaaaatggtccttatataatgagcttattatgataggtcatttcaaattgttgattaccat

SEQ ID NO: 46150 - DNA, 769 bp, Arabidopsis thaliana landsberg
cactattattgctactacttcactgagtcgccaaaactggccaatgaactctgcagatctgcagcatttctaggagatcattgagttgactatcgcttcttcgagtatcctcttagcatcagtgttcaaatcagctaattcacctggtgtctgcattatcacaaccttgttattatcgctaaccatacttcaaaagccaaagatagaaattgctttcaattgatttttttcaccttcccataggagttttgtgtcgttggtgaagccccggaacccagcaaaaacctaaccacgtcaacatgttcacctcttgctgcgtgatgcagaggctgtgaacaagaaaaactttgggatgaattacattatagagagcaagagctagagggaatgaggcaattcaagattgagaatacttacagtatcaccttctatatctgctgtttcaatcattctcttcacacattcaggactactagctcggctaaaaagaagctgtactatttccaagtatcctgcgagcccaagttaaagagaaagaacaataagccacagaatgtgaccatgccgtgagacagaattaccaaaagaatggtaggaccatgacaaactttacctccagcacaagcatcatgtagaggaattgcttcgtcttcatctttcacttccatatcagctcctctttctaagagcagctgcagagaaaatcaatacaaaaattaatttacagatacattagctatcagagtcgatggaaatacaaaagaaaaag

SEQ ID NO: 46151 - DNA, 1078 bp, Arabidopsis thaliana landsberg
aattaactgaattcaccaataaacttaaacatcggacaagtgtttacatttttgctagcgtttaaaatttataatgctaaatttacattaatctttataaatgcaaaatgcttacacaaatacaaatgtaaattaaaatttagtgaaatgtaaatttacattaatcttttacaatatgcaaagataatgtaaattttagcatgaatgtaaaattacattaatctttataaatgctaaatacttatatttgcatcaaattcacatttgtctttacatttttgctagcgtttaaatttacattaatctttgcatattatgcttgcgattatgtttccattaagtgctcacatcactttaagaagaaaaaaaaaatcatttatcgaatcattttagcattttccattctcttttatatatgtatatattgtaattataacatgcataattttgtttgtatttttatacatcgttcacactttttgttgcttttgacatttatgtttatattggatagttttcgtatttgtgtttacagtcttaaggttagtctttagcggttacatttgtacttgcataatccgggtttggttttgcattgaaacttacgtaagcttttgatttttgcacttagcgttagtaattgtgtttggatttgcgtttaaaattcagaattttatatccacttatcgttttgttttcatttaacactccttttcgtgattctctagttttaaaatccgcaagtgttcggtaaaacaagtatatcaatccacaaggagaaaagtggtacaaggaaaaatttggatgcattgaagatgtgggatttgaactaatatatagagcataataaattggtggatttgtttttaaaatcatttataacatagaacaaaatgaaagcctatacatattatgcaatagaccagtgattataagaaagcaatcagactactaatttaaacacaataaagctgtaaaacggataagcattgcgagaggacactggatccagggttttaactaagggaagcatgaatttgatcaaacaattttaaatataattttagcctcaacttta

SEQ ID NO: 46152 - DNA, 444 bp, Arabidopsis thaliana landsberg
taagaaggaaaaaaaggtaaacccgacccttgagatcaaaaattgagggacgcgaatcttctgtacatatactccgttctaagatcagaaagtaagtttcttcgtcttctacttcatggatatgcactatcagatccggcgacggcggtttccttgttacaatctccgtgcgatggaaaaattaaaattaaatatatataatcaaattaaagttttgggtcaaagaaaaaaaatgggtcgacgacatggttatttaattaagtaatgttagttataaatatacggcggagcacaaaatataatcggattgtttgaaaagatctaaccatacacgtggctatgtattagtggattgtatacgttttctcgtgacagtattaattcttagatcttcatccaccttctctattttttatttattggattttgtttgaggataatgca

SEQ ID NO: 46153 - DNA, 604 bp, Arabidopsis thaliana landsberg
  unsure (1)..(604): unsure at all n locations
ctgtctcggccgccagtgtgctctaaagnnnnnnnnnnnnnnnnnnnnnnnnnnnnnnnnnnnnnnnnnnnnnnnnnnnnnnnnnnnnnnnnnnnnnnnnnnnnnnnnnnnnnnnnnnnnnnnnnnnnnnnnnnnnnnnnnnnnnnnnnnnnnnnnnnnnnnnnnnnnnnnnnnnnnnnnnnnnnnnnnnnnnnnnnnnnnnnnnnnnnnnnnnnnnnnnnnnnnnnnnnnnnnnnnnnnnnnnnnnnnnnnnnnnnnnnnnnnnnnnnnnnnnnnnnnnnnnnnnnnnnnnnnnnnnnnnnnnnnnnnnnnnnnnnnnnnnnnnnnnnnnnnnnnnnnnnnnnnnnnnnnnnnnnnnnnnnnnnnnnnnnnnnnnnnnnnnnnnnnnnnnnnnnnnnnnnnnnnnnnnnnnnnnnnnnnnnnnnnnnnnnnnnnnnnnnnnnnnnnnnnnnnnnnnnnnnnnnnnnnnnnnnnnnnnnnnnnnnnnnnnnnnnnnnnnnnnnnnnnnnnnnnnnnnnnnnnnnnnnnnnnnnnnnnncagcttgaagtcacgctagacaaccttacagagatgtgattgaataggggcacaactcagctttgt

SEQ ID NO: 46154 - DNA, 602 bp, Arabidopsis thaliana landsberg
ctttaacatttttggtagaaaattactgtaaatttgaagtttcaaaaaaaaaacccattgcaaatttgaaacttttttaagttgtggtgctgacgtcaaaacatttgtggtcataaagaaaaacaatgtaatgttttgacaatcacggttaatttccccaagaaaataaaattggtgtcaattagaacatgttttgttaaattaggcaacctctctatcggtataaagttgacaattaaacatctatagccagccacaaattaatataaatgaatcaaggaaaattaagcgtaaaattggaagtcagaggtttgctaaaaacaaagaaacacgatagtcaaatctaaatgctcaagtaaaagtaagatctaacaaaaggacaataattaaaacaaagcatatgcatagttaaacggtgttctcaatagttgacatatagatatttcataaacttaacatttcacttttatgtacaatcgaatccttatatattattcttaaaacttaaatttttatacatgccaaagaagtcaaaacgctgtaattttagtttttggtatacctatatcaaaattaagaattttctataatttttggcttac

SEQ ID NO: 46155 - DNA, 672 bp, Arabidopsis thaliana landsberg
tcctttttcccgcctttttcaatttctctgatcgtacattactggatctcggtttttccattttcgtcttcgatcgatgctttagaacgttgtctctcgtcctctcaagttttaaacattttcgtctattagtctctaattgctttagattcggtgttattgaccttgtcgtttgatatgtttttgatctttgaccgagtagtttcgctttttgatcttcactggcttttcgtttatgattgaatcgatttaatcttctccttgttgttatacttcgtcgatttgttagcttggatctgagtttttgttttcgtctcatacgttttggtctttgaatctctgtttgttttgatatcatagaagcgtcaaattctttaactgtgttctaatcttccatgattatttgatcgtatgtttcttcgaagtttttctttgttgatgaagaatcggtgatatttttgtccaagttgttaattacctgagtttttttaactgtgttctcaacaattcaaccaaagaatgggaaaaactaatgtgcagatgtgtgattttgtatcatgtagaagctttcatgtttcttcttgatctttctttgcttgttgatagggtttcaaggtcatgttgctcagattttctcttgatttctgagttggttgttatgctaactgatgt

SEQ ID NO: 46156 - DNA, 542 bp, Arabidopsis thaliana landsberg
aggtcattaaaatgaactaaactaatcaaagactaataaaaattttgtttgagttgcgatagattcgaggttcgggcttggagaagacttgaaaaccaaacaaagtaggaggccgataggtgtacggttcgatgacttcacgtgatttgcggtgtgtgatcagttgactatacaatacattatcaaaagacatcactccattttcgatgctcccaaacattactttaattcacttaatactatactatatgaaactcatatatatgtacattttttattaacgttgtggtgcactcaccataattttatgttataaactacttcaaatacataattaagtacagtcaagagtctctttccagttttatcctaacattactcagagactattcatagtattagtattaatttgttgttgtatggttgtatcaattctctttcaccaacaaactctcacacatgagaacacacacatcttcactctctgtctctttctcttattcttaaccagttgataaccatggcgatgatcccgggctagc

SEQ ID NO: 46157 - DNA, 1031 bp, Arabidopsis thaliana landsberg
  unsure (1)..(1031): unsure at all n locations
tgatcatactttttcattagatccacaggtagagaccatttgttttaagaaagaaaccaattagtgtctctaggtgaaataacaatagaaggtttttcgcttaatttaatgatttcaatttatttttgaaattttgagtttaccaggaaaaaagaaacacatcaatttaatcgaccaatctagttaggtggatcattagttcgctatctaggtcatatcaatctgtatgtttatgcaaagtacacctagaaattagatactagcatattatactatcaagttgctcgatctataagtgggacaatgaatagataatcaagatctatgtccaatgttgggtctactaaagtcacatgattttgactcggcctaaattccataacactagggtatctacttaggcagcgtcttaaatacttgaacaacccttggctgcgataacagactctcctttatgtgaatattaactccccagttttctttttgcaagtttgcaacccaatttgttccacattatattttcaatctttaacctctatttattgtctttgatatgacggaacaactggggatcatatgaatgtagtaacttgttaaacattagtagtggtttcacatagatgaaacaatttaacaccaaacaactaattcgacccctacatggggtttgagtatctgcttttagtatatgcaaactaatattgattttgccgtagcgttacgtaaatgtgtgaattaagagaggacctacttcttgactttgagatcaaaatcttgacaaaagtctaagaaaaatacctcgttttatctcaaaagtcttagatatatgaattcaagacagaaatcaacttgaataaagaacaaaatataaatgggccttaaagcccantttagacccaatatttatataggcttgaaaaggaaacaaagttccaaggcaacaacaggtcattcgatattgggtcaaaactgggcttttaggcccattaatgaaaccttgatccacaaaattagacacccggcgactcatt

SEQ ID NO: 46158 - DNA, 274 bp, Arabidopsis thaliana landsberg
aggctgcgcttgaccagcgccgcatcgacgtcacgttcttcgccgcgccattgcctagcagcagcgcgaagtagcgcttttcggcttcaccgtttttgagcgttttttggccacacagcaaagccgggcggttcttggcaagcagcagtacgccactggtatcgcggtcgaggcgatgcaccagttcgatgaattcgtacttgttccaagcacgcacggtttcgatcacgccgtatggcacgccgctacccgcatgcgaggccacaccagccgg

SEQ ID NO: 46159 - DNA, 498 bp, Arabidopsis thaliana landsberg
  unsure (1)..(498): unsure at all n locations
cagcaagggcatcgctaccttgccgcggctagggcatccgcctggaggtgctagggtcggccgcgtcgactcgcgcgcacccgctgctaccgaggctgcaggacgacggggtacgacgacaatggcgcggcgcacaagggcaagaacaccataacggtggggccctatgcgcggcgactgcccgacggcaacaacgaggacgagacgaatagcggcggcacagatgcgagggcgaggcatggcgcgcggcgtgcggacgtctcggccacggccttgctgggcggttttgagtggagcgcggcgtgggagattgtggtcgtgggcagttggggaagatgaatagtacaccatggaccgagctgggcgggtggggcccccacagccagtgcggcggtggcctaggcatgcacagccgggcttggcaagccgcggccccnttggcatgtggcccagcgcacgctggcgacggagggcctgcgggtggacccgtacgctagg

SEQ ID NO: 46160 - DNA, 1814 bp, Arabidopsis thaliana landsberg
ccagaagtttgcacccaagtgagccaatactgagcactatccaatgcttcagcattgaagattctcccggcacttaccaatgcactgatcaaggccaatggggagctgaaaaacacaagaatcaacagtagaatagtattaacaatcactcttcgcacaataagagcaaccttttgtcaatcccagatgattccaataaatatcagtagccaagggtgctctgtccactttccactggtttctctgtaatcgcagctctgtgacagagaagaactttccagtacgccttgatctctcgtttcgaaaatcctgaacagccttattagctgtgtacacatccttaaacatcacaaaagcaaccccagcgccttgtgctcgtccttctttataagctgctaactgagactccaaatcagctctcagttcttgcagcttcctcagtttttcatcatctgtaaatccaaacctctctgtaatctgagaccacaaaaccttcaccctaacccacaaagaacacacacagaacactagtccattatctccaacattctcatactcatccggtagaagcctagagtccatcttggcaactaaccaagtaatctcatctcgaacacgaaccaactctgtagcaagatcatccaaagcacacaaatccatgggaacaataatcttataaactttcccagggtacttcagcctaaagcaatcttcaaactcaactctatcagaccctaaattcttaggcaaaccctgcaccattatagtaaacacagcagtagaattcgcgttcgggtcactgatattcccattcccatctctaaacctagtaaacttcaacctagcttcaatagcagcgattccaaaatgcgagataacaacaacaataacaacaaacacaaaatgcagccaaagcaaagctgaacctttctgaatatgcgtaatcatcgttttcgaaagctcatcactcaacaaagcagtcccagcatataaattcaacggaagcataaccgaaacagctaaaacagcaatggagaaaagaagcacaaagcttccaccttcaattaaaagaaactgagcagcatcagcaccacagtgacgagcgatctcgcgacacgtggctttccaaacggcgaggagcttagagaagagagcagaaggaccaggcatacgacggtggtcgctgcgtagcttaacgaagagaaagatggagacgcagcataagagaccaatgaccgagatattaagcagatactgaatgttgccgtaccaagcatctgggatttcaggtaagtcgccggaagatggaggaggagagaatgaattatctattgtcattgatgaaatcggtggcatcgcagctggtgaaaaattgcgattcatcgcgaatttctcaaccaaattgagaaacccaaatcttcgaagtttcttcagagattcaggatttatacaacaaggttttgatcaggagaaatttgggggctttagggttagactttgggggaagtagatcgacgaagatgatggcaaaagtagaaaggtaaatagaaaaggaggaacaaggaatgctatcgcggtttcgaatctctcaaaagattcttctccttaaatcatgaaatttaatcccatctttttaagataaatacacccaaaaaaaacgaattaacacaactaaaaaatataaataatttgatagaagtatatcaaattggtaatttacagagtttttatgaataaaacgatagttcttgtaaacgataattacatattctctaaatatttcgtgattagtagaataagagaatataatcaaa

SEQ ID NO: 46161 - DNA, 710 bp, Arabidopsis thaliana landsberg
catataccattcactacacgtccaatcaatttaaatttagtccaatccactaacttaaacacatcatataatctatgttccctcttataatgataatgactctcgtacaagcaagttaattttttttatgatttaattttcttatcataaggaacgtataaaattattttaggttttgagtgatagtgatcttttctagatatccattacaatttgcactggttttatctttgttttcttagtttagcaaataataacatatgaactgaattgcaaaaaaaaacttgtactattcgattcatttttgcatggtcacattcagtctcctaacaaaacaaatattttctttaaataaaagtaataactaaaggctgtttcaagatgtgtactcatatgacaaattaatttttatgattctaggctgtttcaattacgattattgcttgtcagtatagaacaattactacaacaaaattcgttactttataaacaagtttcaatcaaatcgagtagattttttttctttttaaccttgtagatttgaaaggctattgatgtatgttttccatcataagttttagtgttttacatattttgctttcctaaacagtaaacacccttaacaatgtatgttatgaacgtcccgtttcaattaagaatagttagtggcaattaacaaaaaatggatgtttgggaataagccaatagca

SEQ ID NO: 46162 - DNA, 939 bp, Arabidopsis thaliana landsberg
  unsure (1)..(939): unsure at all n locations
tcattattattttgtcggcgccaaatttatattaatatacaaaaatttgatatattttgttaaaatgagaattgtcaagttcagatatgcaattatgtgataaggaaaaaattggccatcaaactaaatatcaaagtttttttcgtcaatatcacttttcaatgttgacccaaaattaaaaaaaaaacttttaaatattagtgtctttcaacttttcaactagtcgttttatcatataaaaattctcaaaattctttctttcatgataataactttttccaaacggtcaaatgttctcacaagttgtaattattttggagttagtggcaatttcaaaaataaaaattgttgaattttaggaccaatattgcctttttgatgcaggagtctctctctcaaaaactaatagtataaactgaaattgttgtggatggatacgtgaccatttattctacaccaagagagtagtgctcaaaatttcaaatcttgcaacaaaactataagctacgacttacgaaccaagctacgtattatccataaagctttttcgaataatctctctataaacagcatttgaatttggatctataacatcatcggagtaacattcttctaactaattgaattaccaatgcatggatcattaatagtatagtttgcaaatatttgcttataaaactttttatggaccggcgaaaaataaaaatatacatacatatctatgtgtataatcgtaagtgtgtctatatattatacagaaatgtgtatcaactaacatgtaaaacaaaagaagacatgagtgagagaagcatatgataataagcaaatgattttgaaaatgcgcatgcacataggncgtgtgcttgactcattttacgcaatatattcattaatttcatcaatattcttctattttattaaaattcttgtacaatataa

SEQ ID NO: 46163 - DNA, 600 bp, Arabidopsis thaliana landsberg
tttcaggcctcctttggaacaaaggaaaagtgaaggaattttaaaggattaaaactctatggaaaattttcctatgtggtcctttggaacaaaggattgagttgctacaaatcttataaaatttctatggaattgggcattgtagtgagattttgtgagatttttaacatgaggtccaacctcttgaaaattttcctatggaattgaagttgacatgcaactatattcctacatttttcctatccctatgttttactaatcctccattgcaaaggaggcctctacatattttttgaaaaaaatctaccaaagggaggctctttgatgggctattactagaaaagagggagaggctcctccaaaaaaaaggacccaggagtcagaaaaaaaagcttctacccgctgctctcccatgtttttctctttgtcgatgctacattgtagaatttataggaggagctgtatttacaaccaaacagggtgctctttctagagctcttcctgaaaataaggaaggagttgttttcttagaaaagtcagagccagggctaaagctgacagaggaagaaccctaccaacgatgccttactttcagtggtg

SEQ ID NO: 46164 - DNA, 588 bp, Arabidopsis thaliana landsberg
tgggacacctaatatgacagaagatcagaccggccctcggcggcaaaactctgcctcgcctgacgctaggctcgccctcgggtaccatctccgcctcgccctagcttggcctcggctacatgctccaacgcgaatcccgcagacgaccactctgtcaactgtggcgcacgtcaggagaagctcgaccatcgccttgggaagacttctgcctcacccgagctgggctctgacctcgatatctgtagcaaaggacacccaacatcacctagcatagggcgcgtcccataagtaggctttttacacatgacgaggccctattacaaccactacggtatgggcacccctcccctaggggctcgggtatgtggctgaccgctcggccttggctcttagcgggaaaacaacactctcaagtcaacaatgcagtgcaaggtcatgtcatccatagggcgccaagacatctccccctagtagcgcgacggcttccggctcaacagcgtgcatcccctaggtgtataaatagggcagtcatgactccttcaagggggcaagcaaacacttagtagtttttctcttgtctttcggtat

SEQ ID NO: 46165 - DNA, 642 bp, Arabidopsis thaliana landsberg
aaaatcaacttttaaaagcaaaaaactattttttttgcttttgatatttggtgcgagctttattagcctttatgctctgcttttccaaaaaaatttggaaaatatcctcctctatataaacagggaaaccatctcatcaaatatgttgcctcttctctccaacgtttcctaagtattgacagcgttgccaatatgagagatcaaatgattattggatcgttgtcttgctttttgtttgatgtgtagctttgaatctggtttgtttttattcatattttttggatatttgtagatatatttgaattaaaaggagactttgcatttcttcttttctttcatgtgtttttaaaaaatggtagaaccagggaaaaaaaaaaaaaaagaggtcgcattttctttttcgaatatgatattgtatgagtttttaaaagaggaaatagtttgagcgtggaagaaggaaaaagataccgaatatgggtattaaaccagattcgaacccagggctgggcagacgaggtatcaaagccactgggctaatgcgatattacacgtgtccgtctgaaacaatagtatttatttttgttttttctgttgacggaaaaataaagtgtgggctttcccgcttaagccaaatgaatatcc

SEQ ID NO: 46166 - DNA, 543 bp, Arabidopsis thaliana landsberg
taccgtattcctctgatttccagtttatattccgcccattgccgcagcctacatcgaggacctggctcgtcacattgagatgttcccgcccgtgctcgcgcatgagccagcgtatgaatttctcgagatcctcgctcggattgaacgagagggcaaggtgtccgcctttcttgtattcctcattccagaatgcctggccgcttcgcttcttttgcatggcatcactatgccatacctccgactcgtgtgcgacctctgtatttttcgtcgcagacgcgatacactcgcttcatgaatgaacggatcatccatatatatggcaaacatgcagtccgggatgcatgcatgctccatacaggagcagtgcgtacggactatctcgctgactctgcggatacgggcgtccgggcggaaatacacgaggcaggggccttgatagaccacttgatccgaagaaacttccttgtgatatggaacaggacgcggtccatagggatttattgcagagatcgatctgggacgactcacttccgcatatgaaac

SEQ ID NO: 46167 - DNA, 669 bp, Arabidopsis thaliana landsberg
cgctaacgagggaaaagaagagaacaaagcgtgagagagatagagataaatccggttctagaatcccggtttaaccgccataccggtggaagattacctttactacgctctccgcttcttcttctcctcgattcgattctcctcatgggtttatcatgaatttttaggtgagaatttcgatttttgtaatttgatagtcttctctaggttggagcataattggcgttaggtttggtgattggtggattcagtttccattggtttttgataatttgtgctggcttttggccattgattctgctttttcagttttcttaatttgtgtgtggattatttgctatctgacagtattatcctctgctctcgcaatttggacttgaggaattttacattgatgaatttgattttcttaggttttgagtaattcagaaactcgagtgatgatcccgaatgatgatgatgatgcaaattctatgaagaattatccgttaaatgatgatgatgcaaattctatggagaattatccgttaaggtcaatttcgacggaactttcacacacttgttcattgataccaccttctttaccaaacccttcagaagcagcagcagacatgtccttcaattaaaactcaatcaaatcatggcaaggccttgtgatttgctccctgc

SEQ ID NO: 46168 - DNA, 718 bp, Arabidopsis thaliana landsberg
gacgggcataggaggatgatcaagatcagtgtccatcagaccagcttcttctgtctctccgtcttcgatttgaccggcctcttgaccgttttctgtatcagaaccaccgagtctttgctgttcctcaggcgtaggagtgtctgcaatagcatcactctccatcgtctctgcatcaccccttcctccttcagcttcagcttcactattagaaacaccaatctggtttccctctgtttcatgagatccacctttggtttcttctttcttcgctcgtttggctttttcgtttggtttagcttggtatttggaccggacctcaggcggcaatagttcaactgggacaactccttcgattcccatttcagtaaactgtgaaaaagaaagaaaaaggttttaaaaagcaatcatatgaagcattgggaaatcgaaatcgaagaaaattttaccctagaaaatccttcaaggtcttgccgagctgtaaaccgaagacctttccagcagtaaacctatcaaaacagtaacaattatctgccttagactgattcaattaagcatcataaaaaaaaaagttgtaaatcagaggaaagttatatactctgttgtttttatgatggtactcatcttctatgccagctgatggatccatctgagattttaacaaaacatcaggtgtgctaataagacatcaaccattttttttaagatgtcctttgggaaa

SEQ ID NO: 46169 - DNA, 902 bp, Arabidopsis thaliana landsberg
  unsure (1)..(902): unsure at all n locations
tgttatgtatttatatgctaaattttattaattggctgtaaaatattaccgctgctcaaagaatgggaaagagctatttgtacataacccaaataaatatatatatatatatcatcaagattgaagtcaattatctatctatttggataaattattatttgtggttgaatgaattgctgattagtagcatacatagttgcaacttggtcatgattctgggtcgtgctcaagagttgcctaacttatttctatttttcaataatttcttaagtgaacaaaaaatggaaatattccacttcagttctgtgattctgttatacttttcatatattttccaaatttccaaatcataagaatacgatcgagtttctataatcaggtcaaataagctagaaagaaataataacataggtagaaatagttacaatgtaaacagcaaatggcttaaagtattaaaccaacaatcaaagactcatgaagaaccaccaaagccaaactatgacaagagaaatatcagatcatttgaaatcttaaaaggtatagaagtgttgattaaggataacggactatcgatgatatcctcttcgtatatttttttttaaaaactgcagaaaatcttcatcatatatacacttttcattccgttacttaaacgttagtaaataaccaatatcataactcataagttcattaatcatagggaataataaagctgtaaatcatattatgttgactttttcttaatatatgcaatttttaataactaaaacgtttgaaatcgaagatgtattttggaaaacacaagtggtatatatatgtatagatttggtttaaaatgtatttaattctttaaaaatgacaaatgtntagattttactgaactgtagaacctatggatttgg

SEQ ID NO: 46170 - DNA, 769 bp, Arabidopsis thaliana landsberg
  unsure (1)..(769): unsure at all n locations
tgcttgtcttgtagatagctatgcaatgtgggttttcgtctcttcttctttgtctatttattatatcatttgtagctattttcctgagaaaatgtcatcctagggttgctcgattctatctgctatttgggtaatttcttattatcatacgagcggctcaattttcggatctcaactgtaatatttgtgtggatctattgctcttgaatgttcctcaggtcaagatctactaggcattaaaatgnnnnnnnnnnnnnnnnnnnnnnnnnnnnnnnnnnnnnnnngtgatgtgaaattttggggtctaagctttctcatgtttgtgatattcatggattgattatgcccaagcataaagatgaatactttatttcattttacgagactgtgtgtatattattagagtgttcattagctgactaccaactgttcgatgaaatgtctcactcaaatggactctattcctgatgcgatccttcaatacattctttcctacctgacttctgcaagggatgtggctgcttgcaactgtgtctccaagcgatggaaagagtctacagactctgtctcccacttagaacatctacataggcttgtcaacccttcaccatttaaactgatgagcctgactccatctatcggatgatgatcttttcttctcgacgtgttgaagagctcgcggtgtatctcccattcactaacattggcctaacatcttggatgatgcatgtgagttcatgtctaaggctattggacaaaacaatggata

SEQ ID NO: 46171 - DNA, 709 bp, Arabidopsis thaliana landsberg
  unsure (1)..(709): unsure at all n locations
aaccgaatctaagcttatgagaaaaatcaagaaggttggtaaaaacgaaatctttagcttcatgctctcaaattacaacaaaggattgtgctttagatgttagaagttagagagtcaacttcaaatactatttggatctactctgaagattatccatggcgtaaaagatgaacaatagactgattcgttgactttaccaaacccttataagctggtaaagataacaagaagacaaagacatagagaccccactaatgataatgataaagataatcaaacaagtatnnnnnnnnnnnnnnnnnnnattccttgttatgttactctattatagtgtacatcagattcgttgaaaaccaacaaaaaaaacaagaggaaactgttgtcggaaacatacagttagagaattgaattgttatgaagtcaacagaagaatcttggagtataacaacaaaactttacacgaaaatcgttttcaattcatacatcagaatcccaaattagattccaaacaacaacaaagagtcaaaaatgcaacgaaacctaaattttcaatctttcccaggcaacacaaaaaagtaatgcccaaattgagcaaccatatcaaaccgtaattttagtaaccagaacgagactttttactaatgggccgaagaagaaatagaaagaggccttttaataaacgagccccatttaagttttgaataatatc

SEQ ID NO: 46172 - DNA, 633 bp, Arabidopsis thaliana landsberg
gctttttcttccctgaggaaatattttcaggactgggtctccatttggtataagacatgttctaatcatattcttgtctggtcacttgatttataattatttctaacgacaacacaaaaaacgcgacacagcttttgttagattttggtacgtggttcggttagattctttttcactaagtgggagctttgttcagataccaagcccaatctctgtccttttcaccttcctatctctcttacattcctccttttattagcttcttctcttcccctaacacaaaaacgaccatctacattattttcatcatttcatattcaaaaagatttctaagtgttgagctaaaattctccttaataaagagaatgtcgtcgaagaaatatcgatattcttcatcttcttctttttcttcttcatcttcttctcagctaagtactccaaggtacttgctttaacgaggttaatgattggtattgagattttctcttgtttgattaatcatgtttttttttttcttaaaattatcttacagaacctttgcaaatggggtttcctcagcccatggtggtaggtcctattaataaagtttatctactagtgggttcttggcccacaagttaatttatttttttg

SEQ ID NO: 46173 - DNA, 567 bp, Arabidopsis thaliana landsberg
atgccgttctcctgcaggaccgagttaacatgtggattcaactctcattaagccattaaaaatgtcaaaatcgtgagggaaatggatgataaggaaggctggtaacaacaagtcatcatcatgtaatagttttatacccaaaaaatccattgctaatatagaagaatacatgtaggacattcattgatttgagattcaatgaggattttttaatataaaagaactctccagttaatcaacatttgctcctctaccacatagttactccatctgaaaatagagaatatgcaacgcagaactcgggatttctgcgaccaaatccttttcggaaaaccaactgtcaatgatgttcccaataggagattcctttgaatttgcagcccatctgtctgcaagcttaaacccaaacttagatgcagctgacaaaagagaaggttcatcaaccgttctgaaaacatggcatagaatcaacgccggcttctcttgcacctctaagtcgtctcccattttccgtaagatcaactcttttgcggtttcaaataaaggtataatggcgtcagatacata

SEQ ID NO: 46174 - DNA, 1354 bp, Arabidopsis thaliana landsberg
tttttttttgttggaaaagcaaatttcattgaccaatataactaaactaacacactacttccatgtggttaagggccgggatcatttattatttgcatcttttatacgacaatgacaaggattcgttctcattactccatcccattttgtggtatgtaaaatcctaacttttttactgcattgatacaacattttattttagcattagatcaatacgatggacatatgtcatcaagtgagggggtagaagtttgcaactaatgtttttgtgctcatgaatcaatctcttctaggtaacattatttcactcttttctatagcgaatactgcaatgcttttacgttttaactaaacatgactaaaccaaataccaaaaaaaaaacgagtaacactttggtggttcctatctaagttgaccggatcactcgatttgataaaaaaaattatagtaaaagtttttgtttttgaatacaaattatatatttgactaaaattcgaaacttaaccgaaactaaaaccttagcagataatctatagtatagtagattcataaaccgaaaaaacaaaaatctaaacctaaactgagtaattactaatggtggatccttaaaacaaagccataatttgcaattgcaacaaatgtttttgtttggagtaaaaaccaaaaaaaaaatgatggggagcaactaaaaatgtaaaatggtcccaatctaatcgcataagttgggaagatagttagtagttctcctactcccaactacatcctcttcaatgctcaatctcgtcttcttcttcctctctatttaatttcccttgtctctctatctctctcaatttcctcatctgggtcttcctcgttttctccgcttaagcaccatgaaggtcaccgtcgtctcccgcagcggcagagaagtcctcaaagctccccttgacctccccgattcggtactttctcgtttcttatgatactctcttctccgatctgcttcttcttctgattcgtgggtttgtttccaaaatgtgattgaaggtttttgttctttagtttgcttgctcaatgtagggaaagttgcatgctttctgattttcgggttgttgatttcgatttcgtgtgttttgttcttcgcaggcgactgttgctgatctgcaagaagcgtttcataagagaggtaaagtttccaaagttttcatttttacttgaaatgtgacttgtcgaatgttggtatagatctcacctgagtgtgtaagcttaagctagtgtttatgtgtttgagttctccttataccatttgatgcttatggggttatataatcaagatctgtgtggaagcttaaggagtatttagatttgata

SEQ ID NO: 46175 - DNA, 609 bp, Arabidopsis thaliana landsberg
  unsure (1)..(609): unsure at all n locations
tggaaccccgacggtgtcttcacggtaaaatcagcctacaatgcacaattcattggttcgtacaaccacattaattctgattttgtttggcgggcacgggcagagcaaaagtgcaagatttttgcttggattcttctacaggacnnnnnnnnnnnnnnnnnnnnnnnnnnnnnnnnnnnnnnnnnnnnnnnnnnnnnnnnnnccctttgcaatggtcccttggagaccgacccccacctctgtttgcattgcccttttgcccgagcggtgtggcgtcagattctagtttgggagggcttgagcctcctggcccaggctgaccctactcacttctccagcataaaagactggtgggaagctacatcctccccgctcccaaagaaccaaaagcgtgacttcaacggcctcatgatatacacctgtggaacatctggaaggagagaaaccggaggatattcgaaaacagcgccnnnnnnnnnnnnnnnnnnnnnnnnnnnnnnnaagaggacgtgtgcactttcaagagagccatgttcctccagtattagggttgctgcagttgtttcgcggatttgtgcgtgtctgttgggagcggtctcacgttgtgtt

SEQ ID NO: 46176 - DNA, 591 bp, Arabidopsis thaliana landsberg
tggcaaagaacggctatagaaagatttatttgcaaaattctttaagtggatgaatatgtttacgattttttctctatatttttcatgtgccgcttgaattaccaattttaaactaacttggccatctagctaattaacttaaattatacttcaaaaacggttttccgcatacatctcatcttcatgtgttccactgcattagttgtttgccctcatcgttgcttttgcagggtacatatcatatgttggagatattatattaatcataatgtagagaaaacatatttgaaattctacatcacagatttaggaaattaactaagcatgtaatatatttgatcgacaataatatgatttatatcttcaacatatggtatgtatttcggcattaatgttaatttccatttcatgttgtgcctactataataaaatcatagaatgtatacatattatatatataaggtagcataaatgtttttctttataagataaataaataataattgatttagatattttttttcgacgatagagaaaagaagatcttagtggactttctgcaactaaaaaaggctgtatgacacatacaca

SEQ ID NO: 46177 - DNA, 545 bp, Arabidopsis thaliana landsberg
  unsure (1)..(545): unsure at all n locations
acgtactacctcaggaataactgcaccacttcttgtttgttttttttaaaatgcaaaatatcttgaatcaagaacaacacgactgttctttacaaagctgaaagttgaagtggggaaaaagagaactgaagcttgaaaacttttgaaagaaaaaatgaaatggaagttatgtttttctttaaccctttttcgtatttcctaaattttatctcttgttttaatcgatacaaatgataatacttttttctaacagtttacttattttcttatatgaaccgtaaaataagaaaaacatattttaatttgactcanattatatggattattgccaacattcctctaaaaaatagggggaatttccaaattgaccatcatttaaaaaaaaattaaaaatttctaaccttttaaaactcccaatctaatgttttcaaacatttttcctccaatttttattcacacaaataaccctttttttttttaccaaccattgcaacctttaaattccattcaaataaaaaggtcctaatcccaatagatagtttttt

SEQ ID NO: 46178 - DNA, 839 bp, Arabidopsis thaliana landsberg
gtctctctggaacacatcaaaagttgtccctacaacaagactttcccaccttttctcagctccaataaaataagggaaaaagaactagcattataataccacctttttatcttggttctattctttttataacaataatttctatgcagatgtgagactgataattctttttgaatacctttagtgaaaatgatgcatcaaatcttcttcactatagtgcatctccacacatgactgatgacccaattagaaagaaaataacaatcaatgagcaaattctccatcgcttattcccaaaatctctgttcatgtctcccataattgtttgctttaaattgtacttataattactttcatatcaaggaaaaaaaaaacacatagcttcatactgtacaatctaatagtttacatatttgttacatgaaacacatgtttgatatctaacttactacctgtttgaataaaatttaattgtttcggatcgagacaattatacgaaattacaagagagaatgtattatttattaaagtgaacttcgaatatatttgatttgaatcaaaacaaactgaaacttctcaacgggattctagtgtcgatggtcgaaacttttataaaaaaaaaaagctatgtgtttcagaaataaatattaaccctgatttttatgcatattcacaacaatcagttagttatcttatgggaatacactagttaaccattctattagacatcccaaaatcgatattttcttgccatttcaatattaaaaaattaggagaataaaaggattctgtaaacaaaacttaaaaaattaaacacgtaacaagtcagatcatatctt

SEQ ID NO: 46179 - DNA, 582 bp, Arabidopsis thaliana landsberg
  unsure (1)..(582): unsure at all n locations
gcaacaactaaagaagaaaaaaaaaaacatgttttaggaagaaaaaaggagaaactgagaagtgggggatgattttgttgatgaacattaccttcaaagttaacacctttgtctgtgagttctgcagaagaagaagaaagaaaacagataaagaagaagaagaaagttgaagagaacatagcataactcttttttgcttctcttcttccttgcaacatctttgtccgaatcaaaacttgctttccttgagagtattaatctctaaggtgcagagtttgaggtttatttcttttgtataagaaatattctttttttcgattctttgtttggaggtttctaagaaaaagatggaacagaggattttgatttggaagtatttgtgagtgagagttaaagagggaaagagaaagagaaagatttgtctgccaattatttatctaatggtcctctagactggaaactggaaaaggccagagacaaaatcgggaaatggttagttttcactcatgtgatanagaaacagaattctataagatttttatgggttatatacttcgcgcacacaaaaaaaaacttgattta

SEQ ID NO: 46180 - DNA, 553 bp, Arabidopsis thaliana landsberg
  unsure (1)..(553): unsure at all n locations
ggaaaatnnnnnnnnnnnnnnnnnnnnaaaagactttttatcatacacaatattattcaagttataaactaggtatacttttttggtaaattcatgaataactgctagattagaagttggcttactttggacgttcatcgttgagggtaaaggagtataagaaataaccagttgcatcctcaacatcatacaaacacgggttgataatgtgtgatctgacttattattatgcgattactaggggattactggtatatactatatcctttaagataaggatgttgtgcaaaacctttttaaaactataataatcaaaacgtacattcgagacagcaacaacattgagtggccaacgaaaaattatttgctacctcaaactaaattggaatcaaatctatgtcaatcggattttagcaagaatatgctacaaatccgatataatattgagtaatgttactaatttactatgtttactaacattatttcactcaagatatatgtttgtttctgcaatgaaaaaatatgatcctcttcttttggaaatttaactgga

SEQ ID NO: 46181 - DNA, 465 bp, Arabidopsis thaliana landsberg
  unsure (1)..(465): unsure at all n locations
nnnnnnnnnnnnnnnnnnnnnnnnnnnnnnnnnnnnnnnnnnnnnnnnnnnnnnnnnnnnnnnnnnnnnnnnnnnnnnnnnnnnnnnnnnnnnnnnnnnnnnnnnnnnnnnnnnnnnnnnnnnnnnnnnnnnnnnnnnnnnnnnnnnnnnnnnnnnnnnnnnnnnnnnnnnnnnnnnnnnnnnnnnnnnnnnnnnnnnnnnnnnnnnnnnnnnnnnnnnnnnnnnnnnnnnnnnnnnnnnnnnnnnnnnnnnnnnnnnnnngaccagttatcaacccttaagaagattctggcgcatcttcgtaaggcgcagctagatacgnnnnnnnnnnnnnnnnntgacgcagtgttttgcattagtgttccagtgcatcacagggcgctatggttagatcggagtgaccccaatatggcgggtgggacctccgtgctcatgtgttgcatcagactctcaagaatgaacatg

SEQ ID NO: 46182 - DNA, 429 bp, Arabidopsis thaliana landsberg
agttgcaattattagtccaaatgatatagttggattacacactatctgcaatcattagtcctaatgatatagttggattacacactatctgcaatcattagtcctaatgatatatttgttaccaatgaagtgtagtggacacgaaggtgaaatatctgatacataatacattatgtatacgtccttgaggatgatctaagtggattaggagagataaatttgcatcttaatggagtttgtgtatgatctttctttgcttagattcaaaacctcaacctcacttttttttttctttttttttttgacacagcctcaacctcacttaatatcaacatatcatgagaaatgtatatgtctcacagtcacagattagccacccgtaaacgtttctagtggaaagaaaattcgatttatgtatttcgaaaatta

SEQ ID NO: 46183 - DNA, 195 bp, Arabidopsis thaliana landsberg
gagacccggcagagcgagggcaccccaaactgaccgaaggggaagtgtgccccttatacccaacgccgcaaagaaaaagggacgagcaaaacacacaaggccgaacaccaggccaacaaaaacggaagaggccaacaaagagaaacgcaaaaaaaccaggaagacggcccaaagaccaaacaggaagcacaggac

SEQ ID NO: 46184 - DNA, 193 bp, Arabidopsis thaliana landsberg
gaggattaatcagattgagtcgatagatattaacgttaaggagcagggaaggagaagaatcacgaggatttcaacgaagttatcatgatggggacatccgcttcatacttaagtaatagaaggacaataaacaagcagtggacacttggtatgtgtagtgtggtcggttacttacaggtgaacttgcagccgc

SEQ ID NO: 46185 - DNA, 847 bp, Arabidopsis thaliana landsberg
ttccaaataagtatggctttcttagccagaaaactccaaaacccaaagagggaccaatttcaagttcagtttttttttaaaatattcttttgccttggaaacaccgccctattttctgtcataaaaataaattaatatatttttctcaggatttttttttcttggatatgaaattatacttatactatatgggcaattcacgtgctgctaaactatataatatctagggaggttgttgttacagtgtttgttctcttatgtgtaaaattttacgaaaatacaattacttcatatgattcgtttgtactctgtaccatagccacatattagtttggttcactactctacacattttgcataaaatggcataaatttgcatagacgtgataactaatagactaaataattatttcgaatatagagtttttttctcagtcttggctggcattgctgtgtttgtgtgtgtgcgtgcatttagaggagttctataaatagaaagaagtaaataaatatgtggtgctgcaaatatatataagtagctagttttcttaaataaaaatataagtagttcattgaatacatgctcaacttgcatttattgaacatacaagatcttgaattaggacaaactcagatattcatttgacaatcattctctatacattagtgtgaaacttaactttttccacctacctttggaattcgttgaataccacattaatttattatatagatagctatattcatagtttcatacataaattatagtgaattaagcataatagttttccggagttgattaataatggttatgttttattattattgcataaaactgatattgata

SEQ ID NO: 46186 - DNA, 886 bp, Arabidopsis thaliana landsberg
ttttagatttctcttaggtgtataataagtttaagtttttagccagatcttgtaaatatttatattattatatatagaatatttggttcccaatttcggatatattgtacctaatcccatatccgaaatatacttcaaaaatgctaggtataaattaatttaaggataattatcagagagctgtgtcaactttcataattttattagaatattatatttaaaataaggatgttttgttaaaatccatatttttctaaaactaattgcacgtaaagaaaattattgcatccaaaatcattcacgaatttttgatgtaattcgacaaaacaacatcaaaaagttcggatacagtagaaaaaagctaattcaaaagaaaaaaacaaaaacactatagtcatatttcattacaattatacatatatatatattaataactgtatttaattctaaatttatgatatttgcgagagaatagatttacataggagtttcataaaaaatatattattttattgttttcttattttattattttattaaattttaattaattaataatggttattaatttataaagatttattgtagttattggtttgagtcaattcaggttgaagccatgaatcacacacttttgggtgcaaagaggagaaattgtgatgcataaagcggacctaatgcccatgggactagcccaagtagtactgtggcggggcgggcttggacatcaatatttatgtccatgaattatcgggcttagcgggttggcccatcatgggttgcgggcagaagcggattgacccgttgcggacagcggtttagcgggttaacccgccaaagtagaagcaattcatttaaaaccctctttttcacttagagtatttaa

SEQ ID NO: 46187 - DNA, 733 bp, Arabidopsis thaliana landsberg
gaatgctgttttggagtacaatgtcatgatcaaggcttatggtaaggccaaacttcatgagaaagcactttctctcttcaaagggatgaagaaccaagggacttggcctgatgagtgcacttacaattccctattccagatgcttgctggggttgatttagtggacgaagcccagcggatcttggctgaaatgctggattcgggctgtaaacctggatgcaagacctatgctgctatgatagctagctatgtgcggcttggcctgttgtctgatgcagttgacctgtacgaggcaatggaaaaaacaggggtgaaaccgaatgaagttgtttatggttccttaattaatgggtttgctgagagtggaatggtcgaagaagcgattcaatactttagaatgatggaagaacatggcgttcagtccaatcatatcgttctgacttcccttatcaaggcttatagcaaagtggggtgtcttgaagaagctaggagagtgtatgacaaaatgaaggattcagaaggtggcccagatgttgctgcatcaaacagcatgctaagtctgtgtgcagatcttggcatagtttctgaagcagaatccattttcaatgatctcagagaaaaaggcacatgtgatgttattttcgttgcaacaatgatgtacttgtacaagggcatgggcatgctcgacgaggctattgaagtggctgaagaaatgagagagtctgggctacta

SEQ ID NO: 46188 - DNA, 673 bp, Arabidopsis thaliana landsberg
tcttaactagaactggatttgacttataatgtattagataatcattgtctaatctttcttcgttggactttaattgacatccaaataaatttctccacaaaacaccacaaacttttggtttgtccactaacaaaactttggcatccattttaatcgccatatcacattgagcgctcctctcataacaaacatgtagtcttacatccaatttttaaggaccaaaattttgaatcttgctagtagttaagctatgcaatatatcgaatcctcccatccagggatctttactatcatctctcttggtgttgtggaggttccgttggtctgttttcccgttcaatctcatcattaacaaggtcatgaaagacctttatgttttctttcgaatttgcttttagttttttacgatctctaacaatactggaattgcaattttacattcttttatggaagttcattaatgaatattttctattaatgtatatgtatttcactatttctccttgataaacttatcatgtccataaacccaaatgcatttcctggtttcactaccacatgctagctaaatttaaaacaatgaaagttaattccttattaaaataatatagaatgtgatatataataaatatctcctttgacattccatattgtttattcattgcctcttttg

SEQ ID NO: 46189 - DNA, 875 bp, Arabidopsis thaliana landsberg
agtagattgttatctttgtccagcttctgtgtagtagaattgaaggaattcgacatggtcaaagggcttaattagtcgaggatgctcttcgtcaacgagttcatctggtgaactcacaatgtgtcctgcttttggtatcgagaataatccgagggagtatcttgtctctgttcccgtcatcatgacacggcgataaggagagtgtagtcgaccatttagcaatgcctgtgacatcaaaacatttgggttgatcttgctttttcaggaattgattctgtatttgaaggaagtataaacaaatggcttacatagagagaatctccaatcatgacggtgaaagagtcttgtgtcggcttcactttgatccagttcttgtctttggtctgcacctctagaccctcaacatggttctggtaaagtacagtgactctgtttatatcagtatgagcgtttagccccacttttgtttcctaggtatcaggtcttttgcccttcatgactggcatcaggtaattcgttaagtaaaaatgttcatcgatgtatttatcgagtcccaagctctccatgatcattcctttgatagttatgtctagctctgataccttcttagaacacgactgctttgttgtgctggtagtaatagaactgtctgatcaatatacgtctatctatacgatataagtagagacagtcttctgacgtgaaactgatgttgccttgaggccatagtttttctgtaaaggcgtctgctttctctgcaatatcagaatcatcaatccccatgctctcgtacagtggcaccatagggtgctggccaaagtatccatggcatggtttcttgtactcgtctgtcagttcggtcatctaatgtaaga

SEQ ID NO: 46190 - DNA, 176 bp, Arabidopsis thaliana landsberg
atcgaaactcgaaagtcaatcactacaaaaaaaaatttgaaaaaaatttaaattatatcactacaaattgtgtaagtatatattatacttacaacattaaacttaacactttccgcttatgaaagcagacgaatagaagaaagccacctaggtttctactttggaatattctctct

SEQ ID NO: 46191 - DNA, 621 bp, Arabidopsis thaliana landsberg
  unsure (1)..(621): unsure at all n locations
ccccccccccccccccccccccccctattcccccgcacccccccccccccccttctcccccccccccccccccccccccccctccctcccccccccccccccccccctttttcccccccctggtgtcttcccgccccccaacccccccccccccccccnccctcccccccccctttcccccccccccctccccccccccccctctccccccccccccccctcccccccccccccccttcccccccccccccccctcctcccccccccccctccccccccccccccctccccccccttcttttnccncncncgcggtttgttggcgcgcacccccccccctccccgcccgcctccccccccacacaacacaaacccccccctctccccctcctccccctccccccccccccccttctcctccccccccccccccccccccccccccccccccccccccccccccccccccccccccctttcctccctcccccccccctcccccccccccccccctcccctcccccccccccccccccccccccctcccccccccccccccccccccccctccccccccccccccccccccccccccccccccccccttcccccccccccccc

SEQ ID NO: 46192 - DNA, 629 bp, Arabidopsis thaliana landsberg
  unsure (1)..(629): unsure at all n locations
gcctcatcaaaagagtaaagagccttgtcgtaatactttgattattagatgtaagattctttggtacggttatcagtcgtgctattagcaagtaattgtaactgattatgtgtatctaaggcattttgttgagcataatgaatcaaacatttggcaacgccaggaagatcaagttttccaattttaggatctaacttgaaaaacttgtagcaaaataaaggatttgatgttggagatgagcaaatagtatggacttcactttgtgtaactgcgaggcttaattgtataactgtaaataaaacaagaagaacaaacacttttagaagagaaaaagaaaggttgtcttttgggtatctaaccattttatatatctttagtttcaagaagagaatcccaaatgatggaattcttgtgtgagagatagagttatataggttcaattagtagatttatagaatttttgttctcaaaataagatgatgcacattaataagattatgtcaaatatttcttgatatcggtctacttttggctaatctatggtaattaattntaaaaattaaagatgtcatttaatggctgcatatcattttataannaataagtatatgcaaaataatgggatattg

SEQ ID NO: 46193 - DNA, 645 bp, Arabidopsis thaliana landsberg
tgttacgttgtttcaatacgaaaaatgagcatctagatattacaatagataaacgtatataagcctttatattttttccaaaaataattggataggcgaaagttatattttgcctcacacagttctgaatgcgggtaaactacctattcactttttagctgagatattattactaaaactcatttgacctaatgtttgttttataatttaactagctccataaatagattgtttcataaatgaaagtaaattgttttgcacaaaaaaatataatattatacattgattcatttattactccaaaagttatctttactccaacaataatgaattactactttcataggttttatggtggtcactgctatatatttttgtatgactaaagcttgctcggctaatcaaacagaaattcaaaaccacctccctcatggtactgaaaagagataataccactctacgtctctatgactctatcattgtgaaaagttataaacatggtaaaccttttcttaattatggcgtcaacttacatagggatgctaaaatgtatagataaagaattaaagataccttatgtgtctttatttcgaggcactagtaataaaagatacagaaaagcatgtgtttatgtatttaaattga

SEQ ID NO: 46194 - DNA, 777 bp, Arabidopsis thaliana landsberg
cgcaagtgtggattgttcgaacggcggcgtttatgcgatttgtgtttataacccaccgggaaattacgaattgtgaaaatccgtttggaagttatgatgatcagattggtcttgcccgggatgatccaccggcggtgatcggaggaatggcttgagagtggaggacacggcggtgtcacaatccacttttagttactaatttttttttcttctctcaaactttttttggatgaaacttaaccttgggtttttattcagtggaacgatcatctaataactgattcaataaacaagtttataatttcgacattttatatagtgaatcgttagaattgatgtaatcgatgagaaatacgcaagtaaattacgtgaaaactaatgtttaaacatgaagaaccataaaagaaaaaattatgtccaaaatttcctacgttttattggctgaattaaaagaaaaaccccagaaaaatgttatatcacctcacttggtaaacaaaagaatggcttggctttttctcacctctgcacaacctttccggtcaaaatccaaaacattgtaacttcatttcgagtctatcacaagcctcagtttcccatgactgtgaatgaaactacctgccaattagagatcaacaagttaaaataaatacaagtgtatacatgtctttgaagatttagtttaagagtttagagaagctaacctttatattgtccctatgaaacagcaaatatcagagatgtgtgtgtgagtttgcatttcatcgaattagctcaatc

SEQ ID NO: 46195 - DNA, 569 bp, Arabidopsis thaliana landsberg
ggtatcgttggatatggggcgcccgatccgaatcctacgcccacgattaaatcggctcgcgtagtgaaccggtacacattgcgggccgatggatttaaatcctctggtctagattttaatacatcgcgatcgaacaccatccaacgatccaacgatccacggctgagatgagctgggccgaaccggtacgcaacatctaatcctaaccgtcaacgcaaagatctacggtccaacccttcccttccccagatctaatctcatccgctcaaacctcatcaaacggccataaggcatcttccacctggcaacacccaagcagcggcacccacaaccccgcggcggcaagaagcccaccggtggtcaccgacctccacaccccaagccccaaccaccgattcaatcatcgattcgtgcggagaagaacaatgcgaacacctgagggggtacctttttggaagaaacggcaggaacactgttggccacggcagggagcggatgacggtgagggaaggggcccgatgagcgattcggtgagtcggtgtgcaatttgtccaggtgttgcaagacga

SEQ ID NO: 46196 - DNA, 772 bp, Arabidopsis thaliana landsberg
gggagctcatttttaataatcaaattagttacgactcttgtgcagttgtgcacgggtgattttgatttctttcattttttgtttctacgttctcttgtactttaagacagaaactttgattggtttgaaagttacaaatcaaacaagaacatatatcaccgttacaaaaatgctattttatgcatgtcaataatatgatttttgaagaaatatcagtaagttatatcatgccaacattgcattacaaaaaaaggataatcaatacactagaataaaaggtcaatcattcctaatctaacatacttgaagatctaaattttttaatataatattatgaattgctttaataagacaaaactaaactccgaaaaagtcttgttatctatttacaaatcgtacgttttgcatacaaatgattataatgttccctatgatttgtatatttttttgtcgtcatatccttataggctcatataaccatgaatacatcttggtggaggaatgatcccgcaagtccacaatcaaccaatcatttttcatgaaattaatcaaaatttacacctcctcctctttttcatcttcttcttatgattttctttccgatatatagttttaatattctttgccatgccacaaactaaacttccaagactaatcataaccaataatttcaatctaatatatagcagcaaatacaaattctcatcaccatacatacatacatgctgcatgtgtccaatgaatatggattaggtgtatatagagataggta

SEQ ID NO: 46197 - DNA, 512 bp, Arabidopsis thaliana landsberg
aagtctgtgtgaaagtatgttgtgggttttttatgtctaatctttcatttcatggggatataaaattagctatcaatcaacgaattaacaaacaaacaaaaaagactctagctaacattgatctaggctgaatctttggaccttctagtgttcttcatgttcatactatatgaactttgattccacgtaggtttgtttggatggttttagtgagattgaaaaggattgatagaaatattttataagtaattcatagttagagtgaggtacaaagttgatttacaataaaattgagaaagacccaaactacaatctacaaatttaggaattgatttttttatttcgatacacgaacacggaacctacaaacactatctatttgatctccattcatatgcgaggaattaattactcttgcattattgatcatatgtaagtagataaatcaactttctaagaacatttcggtcgccatcgtattagtgaaggtttttgatactacttatgtaagt

SEQ ID NO: 46198 - DNA, 798 bp, Arabidopsis thaliana landsberg
acaccaatctccagtagttcctaagaaagaaccaacctagattactatctaagctattgttataccttttttatggaccggtgttagtttcttctatttcttcacctaattgtcgtaatggagcctagtaaacttaagaagcttctgagaacttaggggacgcggcaaggattacctttgtaagtgcacatctctctgtctttgtgcagaaccagaatcagcttctgcttttgttgatgggttaagttatcagattcttgggtatttgattctcatttaaccatacttttgattaacaaaccaatgaataataatgtttttctcattctttggtttgtttatccaccaaagtactctcttttacgggacttcttgctttggttcaaccaaaatatctttatattccttgctgctgaatttgtcggtacaatgggcactagtaagctaaatattgttcagctaccatttgcataaatctttagctgtttcattttttctacaataaaaaaagggtacatatgcactaaatagtttaactcttaccatttaaaaaaaaatagattgcaaaattgtaaataagttagattatttattgtataattcttttgaaaaatagtggaattttatgcttatgttaaaaatatcacttatgataacaagcggttttacatgatattacgttatttgtttaaagtttaacccacacccaaaaatacactacttatttacggattcaccattattaacgaattttgacggaaaatttggttaagtattgaaaaggcggaggaaaacatt

SEQ ID NO: 46199 - DNA, 493 bp, Arabidopsis thaliana landsberg
  unsure (1)..(493): unsure at all n locations
ccccccccccccccccccccccccccccccccccccccgcggggggaattgatgggggggcacccgggggcgggaattncccccgnncccccaccccccccccccctccccccaccccccccccccccctttccccccccccttgcccccggggccccccaccccaacccccccnncccccccccccccccccccccccccctccccccccccctccccccccctccccccccccccccccccccccccccccccccccccccccccccccccccccccccccccccccccccctctttttcccccccccgcttgtcccccccccccccccccgggcgcccccccaccactcaccaccccccccccccccccccccccccccccccccccccccccccccccccccccccccccctcccctcccccccccccccccggtccccccccccccctccccctcccccccccttccctcccccccccccccctttgt

SEQ ID NO: 46200 - DNA, 558 bp, Arabidopsis thaliana landsberg
gtgactagaccaatggtgaagctacggtcaaaggaaaccgtagtatattgatttttctcttttctgagttcactaaacctgaggtttcagttgcctaaattgacaattaatagcggactccaataataacagaattcaagcattttaaaaggaccattattctactaaatcactgtgattgtttttggtctgataaaatctgaataagaaagatgagtactccgtatatgttgtttcaaagttgtagctattgttttgggtgatggatctactatcccatgcgaagtttgaattctagttcaaactacacaaaatttctttttttttttaaggaactacaaaaaaaaaaaaaaaaaatactttccaatccagaacaccacactagtttaaaaattgatctacaaccacttgatgtttagattttttagtggttttgttcaatctagtctaaaacgcgacttaaatacaaattaaactaaactcaagttcataattattgcctaactgttaagttttatggactttcaagtcaaaaccaattggtatagggaggctcat

SEQ ID NO: 46201 - DNA, 796 bp, Arabidopsis thaliana landsberg
  unsure (1)..(796): unsure at all n locations
agatgttaaggaagggttcgttgcgcacgagtttatgatcgaaaatatcgaaattaattaaattaaatatatgaccgggttaaagccggttatacagcgacgtaaagaatctgacaaacaagtaagccggtgacaagaaccgactcacatgattaaccggagatgtcattaggatttattatttttacatctgacggtttaagatagaccaagtgtctcccagactattgggttttcttttgtcattttctgacaactagtactagtgtattgcgtactgtattttgccaatttaaaatttaaaccaatcaacggtcttggaaaagccatgtagatattttacttgctgtaagataataatttattttaaaatggtttaattaggagtgtgaaaatagtaacagttttgcaagaaggtaggctaaaagagtgggtcccgtagtgtccatgtaatctggcgttaactttgatgtgtggtaagtgttgcgatttgcgtctatgttcattttgctctctttggtatcaatatttttacatcttttttttgtcttcagttgttttgtattgaaaacgaaaatacgtctgattcaactaaaaatcgtagatcgttacatgaaatgtgggatcaaaactntgtaatgatatgaacgaaataattgcttatataaaatttatgttttaccaaagtagtgatagaaaaaaatctccgttctagggagattttgattacactgtttcttatattggtatatagttggggtgactatatagtggatcctactattttttacttgat

SEQ ID NO: 46202 - DNA, 540 bp, Arabidopsis thaliana landsberg
ttatttcttttaaggtttatcacgattgtcataatgtcatctccacttatcgatttgcaattcataaatatttggtccacctattagtactgaaatattttgtcttaaattttaatcttcttttatcacgttttcctatttttcaatatttatactcaatgaagaaattatttatccgaaaatatttgtatgactattattattatttttttaataaattcttggtcgttggatattttttgattattttaattatcgttggttatgcgagtttaaatcataatttaaatttgatatagtaattcactattaaaattattatatgatatattaggattttaaaaagtattttgattttcaaaattgttcattttacaaaaaaaaagatttaactagtttgaaatttcgggttttgttaaaagaaaaatatgttccatttaaaacatgaataaactttgtcacaattgcatatttgtcaattgaaaaataaaaataaaaatagaagatctgagacagtggggacaagtattatcttctttc

SEQ ID NO: 46203 - DNA, 562 bp, Arabidopsis thaliana landsberg
cagtttgttatgtaggtatgaaaagtaccttgttaaacctgccagttttgtgcgtaattcattaaatcttcacttggacctttggcatctaagtatggtagcagctctttttcagcacattgatgaagtcgttcaaggcccgactcagcttcgcctaaattcatggtaaaataagaagaagtaatataataaaaattttgcataataaagcatgttacaaacaaaagtccttatacctatgaagtatgatcaaatcgaaattagtggtcaaagatgggattgaaccctgaccaaattggttaagatttggattaaggagcttgatcaaattcttatgagtgacgcttgactacatagtccacatgatctcacatagggaaaatcctaaaccattcccaattgtactaagactacatggtgttctataagaatcacgacaagatccatcaatgcacgtatgaactactgatggatctaaccatcactaagtactctccctcaatataatatccaacaattggaaaagaccatagattaatggttgtaccctattatatcttcc

SEQ ID NO: 46204 - DNA, 744 bp, Arabidopsis thaliana landsberg
tgaggaatcaatttttaaaaaaacaatgggaaggatatatgatcggtcaaattttcatatgtaccctgcgcaagtcaaaggccgtacatatattatttcttttgtcaagttgatatataaacatatgaacaccaaactttcagtatcattttcttaatagcacttcaaatccaaagatttaatcacctattagtctctttggcaagggaaatagcttgtcacagactcataacaaaactcagaaattataaaatgtgtatatcaattgtcataataatttattttaataaaaagtttacaataaattatatttattatattgatagtggatgccaactgtaaaaaagttggcatccattgtttttttatcatttttttcttggaactgatgaaaataaaccataaatataacatggaaaaattacatcaattccatcaattcaatgacatcctctttaaactctgctttcttgtaacatttttcttacgataaaaagaacaatcatatacatcaaaatggacgtatacatcaaaatggagtctccaaaagctctcaactagtaacacgcattgaaaagctcataagaaacaggatcacgtcccttgattatgctagaaaaccaagattacatcatctacaacaactttgattctttaaaagtatctcgagtccaataataaaattccaaatagtatatgctaataaaatttaatttatctattgcttttgaataatatatcatc

SEQ ID NO: 46205 - DNA, 993 bp, Arabidopsis thaliana landsberg
  unsure (1)..(993): unsure at all n locations
tgttttggctagatgcttgtggaggaagttaaatttaggtcaagacggtataattaatgtatcttccttctcttcaaggatgcaaatagaagaagcgattgatgagtacattagggaaagaagaggtagactcgtggggctttcgacacaaacttatcttaccggtagtttaatagcagcttcttcgccggttagaaagctattgcttgtagttatgttgatgattctgtttcgtgatcaaattggtcatactcgatatgattgtggcagtctataaatttatcttannnnnnnnnnnnnnnnnnnnnnngagttgtgtgcttcgtgagatgattgtatcatgaggttggttactcattgttcttgcgaatgtttcctgtttgttcgcttctgataatttttgttcgattattaaaagaactatgatattagtctttctcacttgtgagttgtgaaagacaaaagaagtccaatcaaaaacttatttaagaaaattatgggcggtatcatctgcaaaaaaatattctcaaaaacattttaatccaattaataattctggattcaagttttttggaccaaaaataatcaataattattcaaatacatttttcgtatattttgatgaaggaagagaagtccatatcatttgttttacaaaaaacccaccctagttgataaaagacttaaagtctgcattataacataaacagaaccaagaaaatgtagagagaaatgtcaaattatccagtagcccactcaaaatgtagaagctgaatcaatggaggtgatagaaaacttatctagagaaaaccagaattgcaaaggctcaattcgaagatgttttttttgatgatcccatctttattcttatatatatcaaaagtttaatagtatagaagatcgattttttttttgtcagtttagatttttgatgagctaaaaaagccaaaaagataagtattgagtcacactcattacaacaggtacacaaat

SEQ ID NO: 46206 - DNA, 497 bp, Arabidopsis thaliana landsberg
gtttttaaacgtaaactttctataaaaaaccaagtagcaccctataaatagagaacctgaaaatttatttttgggctcacaaaacttaaaataaattattattggtatcttcttcatatttatgaagatatctgaactatatctatatcgtcgacttaaagcaaataattatgatttaacacaatctataataattgtggctactcggtttggtgcgagtgtgagcacttatgaaataatcataaaacttaagagttaagagatagattaattagtccaaaacgaatggctatcgttacaaaattgcctgcatatgatagagtttcacgagctgtttttttattcctctcttatttttcaaggagtaacattatatatttacgtttttattaattcccctataaaaaaccattaggtatttaaggtatattgtagtctcactctcaggccgatcaaatgggacttattaaattatgattccatcttaactaaaaaaa

SEQ ID NO: 46207 - DNA, 454 bp, Arabidopsis thaliana landsberg
aggcaatataatacaagccgcttcatcattggaactcccatgtgtcctcttttcaagttttgagcatttctttaagctttttataactagagtcacttttattaatttcttttgaatgttcttctctactgttgctatactattctctaattattcacaaatagttattattagtgttttcaatatattttgtatccttaactttgtaactatttatgcccattaagtaaaacaaaataaaataattggagaaaggttggtaacaagaagaattaagaagcacacgtgcgcagaccatcttgttgtgtgtgatggctttttgagcaaaccctcgtgcgtgtgtgtggctgccactcctttacctttcttttctacttttgttactttcttctttattaagtctctctacaatgaaaactaattattactctttctttttaccttttctctaaag

SEQ ID NO: 46208 - DNA, 753 bp, Arabidopsis thaliana landsberg
agacattttaattggtttcgacgtgtgtgttgcttatataaaaatgttgagatttagagagaattattagaaggaggaaaattattatccagggttgaaaacgaaggaaagtgtgacagaaatttgtggtggccgtgtcttcttgtaggatcacatataatagtaataccattatatggtcgttgacgtttctacgtctcatggcatgtttggtttttccttcaccggttatctagacccggcatgagcatctaacgtctagtcgaagtatagatgaccgcttaaaccgctttgtagaacatgcataaatgttatacacatagaattcactgatttttgttttatttttgtgagttctttatttatttaatgagttagctacattttaacataatctgttatttatagacatcacatacataatttatagagttcgattggtaatatagtttacacataacggtttagagcttctttagtggttgttgaaaaaacggttagaaacaatgttagataaaaggcggttaagttaaaaccaagcagctaaatttttggtaattgataagaagtggttgaatacaaaaaaagttgttatataaaataaattaaaatataaataatatttcagaatttttttaaaaaaatcctttagataatagtataagagaatattaatatttaaaattttaaaaattaaaatatataagaaaaagtccaagcatttcattgccaaacaaaataccttaatcttta

SEQ ID NO: 46209 - DNA, 723 bp, Arabidopsis thaliana landsberg
cgatcgcccaaaataaataaaatggcatttcatacaggtctaccacaaaacgttatgaaagtttgtttgcggtatagagtctacatatactgtctacgatttgtaaccactaatctataatctatgaaactattaaatcattgccctatgaaggaataatattaaattcggatgctaatcagcgagcactaaattattggattatgtaacaagtggtcttcgacgaatgaccagcatttttaaaggggattttgtatacgattgacaatgactcactgattaattaagcattcagcgcataattaattatttcatttctgataggtggcgaaaatcggcgattaatcataataatcaattagagagattttatttgtatagttttcatgatagtcacaattatgtaaataaaatcgagatattaattagtttgcgtaccgatgggttgtcgtcaggttagaactttgatcatcataaacaaagtatgaagcatcatcatcattctcatctccatctttttaaaataatttacgatttgaaattatgcactttgtctaatcgctgtctactgtctattactttcactatatcccaaatccaaatttatatatgaacaaaacttctttttcatttatttttagaaaaagtctttcagaaattttcctttatcgaaactgaatacgaatatattgtttttattggccgacttaaactatatgtaag

SEQ ID NO: 46210 - DNA, 783 bp, Arabidopsis thaliana landsberg
tctctttgggacctcaaacttacagagttaacagttatgttggcatcaatgattgtaagtcaaagtcagatctaaaaacgaaaaaagactgtcacagactctcacccacatgcatacatgcccatcactctttttctttcaattttattattttagtataagatgtagtgtatattctttcatataatcgttttttaaatctaaaaacatctcaatttagacatttatatgggatcaaagctgtatgttttctgtcaactagctgtatcttaaattagttttaaatgtcacatataagactaaccacccatatgtgaaagtattaactcaacatctgcttattacaagttgcgcaatacgaacacaatctttttttaactctatcacacgtagtcacgtaacatgttctcttgtgaaacaaatgtcagaagaaactaaaataatttcacaaaataatactatacaattttctattcatctctttcataaaatgtgtattagtctaaatcaactacaacaaataaggtgattagtgtcagttgttttttaacgacatcattagaaaatagaaaccaattttgaaacacaacgacaacaagtcacaaaaattattatataaaaaataaattacagcgagaaactaaaacggccggttcagatagaaatcattaaaccgagtaattggttagctggtctaatcgtatttgtttttataaaccaatgaatgagctgacggagcttcacatcgccgagagcttcgtcacgagatccaaggaggccatt

SEQ ID NO: 46211 - DNA, 687 bp, Arabidopsis thaliana landsberg
cacaaaaaacgaaaaagatgtagctttccgatgtgaagcagacgaaacgacaacgaagagggattttaggtttttctcttctctttctataatattcgcatttaagtggaattatttatattttttaaaaatacttatttcccttcttttttttttgatcacctaattttattggcttaaactttttaaaattaactatatttaggtattttattttctcttttgttttgtcagtgttatattcttaacaaaataaataaaagaacaattgttaaaaaaaaaacataaaagaacaattgtttaaatataattcataactaagattaataaacattttggaccaaaataaaaaaaatattaataagaatttatttttgacgaaattaaaaatttagattaattaagaaaaataatttcaaaatgatataaatttttaactatcatcagatgtatttcataaatattattagtaaaacgattttcataagacttccaattttgatataatacaaaaacacaaaacctaaaaagcacaaccacaaaaaacacaaaacctaaaaagctaaaccacaaaaaaaaatttgaaaacttagtttttattagaaggaaaatatcactcgataacattttttttaccccctatattatcagttttagtcaatttatgaattggagcgaaaatattat

SEQ ID NO: 46212 - DNA, 693 bp, Arabidopsis thaliana landsberg
ccaccaaaaagattagatttttaacgacctgaaaattaaagagtagagtttggaattagatcgatccattgttgaaagtttcgattttttttcaattttctgggtaaaaaagaaagtgaagggtcgttttcaatcaaatcttccaagagatttactcaaggaactcaatcataaccgcaataaattgaaaacctttcatgtgaacatgataattaggtcgttttttttttccagaaatctcgaatcaatgaaaattgtagcaaaccaaaggtcggattccaagaagatgaatttaagcaattatctcaaagagagatccagaatcaaaaaaaagattcgcgaaattacctgaactctgggaagaaaaagaaataacagcagctaatcaggtgcacgaaccaggtaagcgatctaaatgtttttagcaacagagagagagagaccaaaaacaagaagacctgaatgatattttctagaatttggtatccgtacaatacgatgccgttttggtaacaataagcccaatagagtaggcccaaatatagtttgtatacaaaaagaaaccaaaccagacaaatttcagttgtaaacataaaccggtttttttgctaatgattgatcaaaattatccggaaccaggctttttcgagtttccaacttcatccggtttagcagaggtctttgtgatcgcac

SEQ ID NO: 46213 - DNA, 558 bp, Arabidopsis thaliana landsberg
tagcattcccaaatctttttttaaaatgaaattcatcactttcagacaataaaaaaattctgattactgatacaattggacatccaagtcttgtaattaaagtgcctcttcgaaacataaaaatctaaaaattcgaaaagcaaaaaagtttgtcaccttagccaaaaagctgccaaactcgtccagcttctttttcaatggagttgcctcctatgacaacagcaaatacaagtaataaataaggaaaattctagtagttataatgcacttcaaaaaagatagaaaagaatctccatatagaatactgaaacgatactatatagcaggatacaagtctacagtcccataagtgcaaaactgacaaacaattcatcacaggaaatttaagccactcaaagttacactataacctctgtttataagagagttctgaccagtaacaaaggatactaaaagtgcaaatggtgcattaccagataaaaatgaaagaatattgatagcttacatcatctgtctgcaacatagaatcgtgtatgctacccattgcggtgtttgaac

SEQ ID NO: 46214 - DNA, 585 bp, Arabidopsis thaliana landsberg
ccctttaccgaaaagcaaatatgacagatagggtacgacatattgcttattcctgattgatctagttgacgacagttgacttgttggaccgattgtggagtggattggaatagaagtttcttatatacatatattcgtgtttactgatttcgcatactgggaatggaacttaacttgatgtaacccattggaaactctctttgagactcattatctgttatatacgacaggctaattaagtccttaaattattgagaagaaaggagtctttccttacacaaaactgttatgttgttatgctgctcgtgcaatcaaaacttagaatagaagaaaaagagttccctcgggacgcatcctcttctccttcgcttgtgtgactatcatgagaagaattccattccaagaagtcaaataacaagaaaaagaacgaggtcaagatctgttgttaccagtaccgacgaaatggagaaagtgtctccgggaacgcaatctactacattagttggtgtagcaaagaagaggatatccctttttctgccgactctttgatcttaacttaagatgctgggtttaagacgagtgatg

SEQ ID NO: 46215 - DNA, 947 bp, Arabidopsis thaliana landsberg
  unsure (1)..(947): unsure at all n locations
ctagtgcatcaaacatttactctcaacattttgtcattatctacttagttaattaactaatattctggcgaaattcgattatgatttactctaaaagtttctgaaatgtatcgatgtgattcacaaaaggatatgaacaaaaaaatacggtaattttttcttaagtaggaaaataaatctttaagaaaattaaaacaaagaatcttaagtgtttaagaaaatacattttttaactagtacaaaatttaactattttcctcatgaacaaatctattttgtttaagaaactacatttttattttttacaaaaacaaatctatataaaattaaataatatgatctctacttacaaaaaaaaaagtatttctactcagaggaataaaatgataaaataaaataaaatctgaaacttaaaaggtatgtaaaatagtaataaataagtccaaaattttacaactagatgaaaacaagttgtagaagattctgttttggcatttaagatctctctctcatgcaacaacaaaattttcaaaaaaaaaaaaacctgagaactaattgactccgttgggatggaccccactttagaaaaaaagatctaattggtagatagacagaacgaatcaggggcaaatccgtaaaataatccaacaattaattcaaaaaaaaaaaagtaaagaaagagaaagaaactcatcaacgccacgcctgtacaagagagagagagagaataataagtttacagagtagagaagcttttaaattcgaatcaggggcaaatccgtaaaatattcctttttttttttcctttttcctcactactttatatctctaacctttaacttttttttttcttcttcttcttcttactcttcgncttcttcttcctcctctgggtctgttcatcggaaaaggagatnttgttttttttgtttggtttttttggtttg

SEQ ID NO: 46216 - DNA, 2027 bp, Arabidopsis thaliana landsberg
tctttactctcccttctactagactctctatgcttcccatcacttttaccactactcttcttcgtctcctcaccatctccctcatctctcttcctactcttctcactcgaaaccttcgtcttcttcgaactctcacctttatcatcatctttaccattccacctatcactaccactctcaccactcttccctttcctacgcttcgacgaagaagaagtatactcctcataatactcaccattaacagaatcataatactcttttctcttatcaccagaaccagattccttcgaaaccctaacagtagtactactctcctctttactcttcttctccttcaaactcgtctctttctccgaatcggaatactccttcgtcgcatctttatgcttactcgatttatgcctcgtactccttggcatcttccacaatctctaacaatcgcaaaaccccccaaaaatatcgaattttcaaaccctaaatcgagattgaggtttttagggactttggtttgattgaatcttacagcggacttaaagattaaaaaaagactctcacggcggcggaagaatctagatcgccggcgatttgaaagccggcggcgagatttaattggagaaaattacaaaagaaccacggagcgggagatatagagaagatagagagagagagagaggaggcttaatgccctttcaatgttgaagaaaacgagaaactgttttttttcagacaagaggaagactaagggattatttgtttaatgactatcttatcctttaatcgtgggttttattacagttttttgccacgcacgttatcagatcggattttgctttcgtccggtttttgggaaagtagtggttcggttatttctcgctagcgtcgtgccacgtcacgccgcgactcaaaaactggaaacagctggagcccaataaaggcccattaagaagttattggcctagtaatgcccaatgagagtttttattagctaatgaccatattaaccagtgatcgtgggtattattacggtttatgccctgatcccctaacgttatcgctttcgtccggtttagtaaagcagtgcttcggtttattacgtcacgtaactcaaaactggagacagatgaagcccataaaaggaccattacgtaggtagtggcccaataaggcccaatgagagttgggatgagatatttgagaggcagaggttgacgtgggtcgacctcgaggcgcgatgcctcaggcgtacttcatcacgcaactatcacgagcctctctgtcgttatatacgactttcagtttttcttctgatttgggaaagaatcaaacttttgaatgtgaagttgcttctttcgtctcaagatctctctttatctctctatctgtttgattggtaagcttttgattcgagtgttgtaatgattgatgaaatgattgtctatttacggcattaagttgttcacgtagtctctcttcgattctcttgtgttaaaattagataaagattatgactttctggattatttggaagatcagtgttggtgaattgagtttcctttaatagtaatgtgaagtagctgtgtttgctttgtttgtgagtgatttgatataaaagttgattacttttgaatttgtatgtagagggtttttgttggatggcactttgtggtgtttgttcgactccaaatctgccgaatttacaagtgtttcgttctgttaggaactcgagcattggttataaacgaaaccatagtctatggcagctcagaagttcatcatttcgtgctaaatctgtgatatttcattgttcatcgtccttaagacagtcaccatctaatgtggaggagatagatgataatccttcggtatcattagaggatgaatcagcacatgtgatgcagttcaagtggtctgattttaggattcttgatcgtgttagcattggtcatggcggcaggggaatacccaatttgaaggatggccaaaggttttctatctttttttgggattagcttctcatgacttta

SEQ ID NO: 46217 - DNA, 771 bp, Arabidopsis thaliana landsberg
tttctcagaatctctacgttcttgcatctgctctcttagcaacctgtcaatgttctttcctgcctgattagaaaccgataaaagttcagcttctcttatttttctcatttaaattttcttagtgaggtcgaatcgagtatttttacttggattccgcaacgataatttgtgctcggaagatctatcggaacggataaagtcccaacaacaagcttgaagaatgcagttttgaattcttcaacaaatggttttcttaagttcccagcgatttgtgtcagtgaagataaaaatgccatctgaaacccacccaaaaaaaaacatttaaaaatactcaaaatacacataaataaacaaaagcaaatctgacaaatattcttggatataagcgaagacaaatattctcaattatttactactatacacccatccatataagattatcagtttgtttatcagtttctatcagaaactgtaaaatttctttacttaaaaacagagaatttctaaataatcattcctaataaaatcactaatcaacaactacttcatttttaaaaaaaattatctgacatataaaaacagtgtagactgaaaaaacagagaaggtaaaacagtaaaaacagagaaaggtaaaagattaaaatacacatacatgtttggtcttatcttggatatcaataacctcaagctcattccactgatcaagatagcttctcatgaagtgatcactttaggcaagatatgatctctcacatggtcgagcttatgaga

SEQ ID NO: 46218 - DNA, 160 bp, Arabidopsis thaliana landsberg
ccaagaatcaccaaaattcaccctaaagaagccattataagatttacatgaccttagtcgcgtacacacacacacacacacttttcttcgatataatcatgaacatgtcttatcaattctccccccattaaccaacatgttttgcctttacattctgttt

SEQ ID NO: 46219 - DNA, 1631 bp, Arabidopsis thaliana landsberg
ccggcgcgagaacacctcagaagaagacgggaaaatcgccgacacgaaagcgaattccggtgcaagcgagatgatagccaccgttaacgtcagaaacaacgtccacgttgcgccgtagacgaagtgtggaatccgccatgcgaatctgtgagtcagagaggagaacatatggcgaatcattggttttaagttcttaaaagtgttcttcgttctctttatatatttatagttccatcgatcgtaaagagttccgccataggaattggagtagcttcgatgaaaaagagaagtagaaagagaagataacctaatctcttacctgctcttggtgacgaacgaataaggaaaagtgaaaaatacaaaaattatgttatcaatcctaaaattccaaaatataccaagttactagtaaaatttacaaaattatcttaaatgaatttacaaaccttacttaaaagttaaattaaaccgttttagttattaaaggcttgtataatttgtgttttgggttgtgatatatattgtaggatattttattcaagttaaaaacactaaaaaacatctctaacacaaaaggtcccacatatacatgtggatattcacttaaacagaaactgaaatgatttgttctcttctcgtactttcttccaagttgtcatcactcaccagcaactgccacgattttcttcccctttttctttcgatttacataatcactccaaaggttttaatttattcttaaacagtctccatccttttaattatctcatattttcccctcggttaactacaatatccaattttactctcataatttcgtgtaaccgacttaaactgatatttaatatcataaaattatacatagaaattatcatcgcaaccaaaattaatacttactcgaatcaacatttttttttctaaaagcagattgaaatttaagagataaagtaatccggtcaaaaagttacatttaaaaacaagggccagtttgtattttctcacgattcggatattattttccttctttttatctcctaattactattttttccaaaaatataaaaaaatatctgttttttttttctgttttcttttttctttcttcatctctctctattctttgctttgaaaagtaatctggaccgcgaacaaagctttttcgttttctggttcgttgccgccttgcacgttccttcttcttccttctctcccccccatcttatctctttccccccctttaccctaaccctaattttcttcgccggcctctcttttctctctatctaatttcgttcccatattcgaaatctcttaccttttatctccagatcttttagatccgtaattccctactattgattatacccaaacttttactcttatcttcctcgtttgattcttatgcttccttttatgaattgatttcttcataaagtcatcatctttggattgaattcgactcattaatcaatccgttaaccaataaccaccttgacagtttcttctccgaggattccagattacaattctagtggagctgtaattggattcagatctaactcaagttagtgttactgctgtgtctattggatgcaatcgtgttgtgatattgaatatatttctgatgggag

SEQ ID NO: 46220 - DNA, 839 bp, Arabidopsis thaliana landsberg
gtatattgaatgtaatcgtgactatacgtgcatgagatgaaagtgataatgtgtgatcgatttataaaaatataagtatgaggctatgtgatctggttttgattgagtgatttgtggatctcaattaatgtttgtagacgagaatgatcttctagattgaatgagttgaaagccgtggtaagtcctagttatcattggatgaaggaggagatttatagatttttggatgtttcgagtagatattaaacagtagaacatagttggatttaaattttagtaaaggcttaatggctttaggatattataaagttgatcatgaacaatatttaggttggacggttcaagtttctcatgaatcaaatattcaagtgctaattgccgaaaggaaatactgaaccgaattcgaactgaacaaccacaaaaaacagctaatgtaaatttgtttgagaatatttttgataagaacttgaatccaattcgaaaccgaaattgtaccaaactttttatattttatatcacatcaaagattttactttgaaaaccattattgataacaaaaaatccaaaaactcaaactaaaattcagattaaacaccggtttaccatctagggaatgggattaatataacataaaaaatactaagttgtttcatttaataatcaagtaagattttgcaatgctaaagaaaaacgaaataacagaataaaggaagttccggcattcttttcgatatctacgttgatagtaatatttaatttaacagagtttttccttctttctaaaaacaaaaatctcaggtttaccaactttaacccttcccaagatttttcaactttta

SEQ ID NO: 46221 - DNA, 586 bp, Arabidopsis thaliana landsberg
tggttcagatcatgatcaccatcagccgtttgaattcaaaatcgaacggcttggagtcgtatcatctgaaaaggatgctgccgttctctggcaagtcgcaattggtcggtcgtaactcgtttgggaaactcgtctggcaagtcgcaattgctattcacacatgaaacgaccaaaagacgagataaatttattaaacttaattaagtatatatttcatacttctaagggcatgtacagtggagagacaccaaaacggttcttcaagcacgagagacaactaatagactctattatacaatggagtgtctataaatgtagtctactaataaatacagaattaaatgcatttgtacagcagtagattgatagaacagacgacaaattcgtacagtaggaagtgaggcgtctattactacttggtttacgagccagagacgtctcttcacggagagacggctctaagatttttttgcaaatacacccttaaacaccttaagagcaccacattaaacacgattatacatgccgtactaatttttaaacgtttacgtgacataactaaactagtttagtcagggaccaatac

SEQ ID NO: 46222 - DNA, 531 bp, Arabidopsis thaliana landsberg
gggggagagccccagcgcaggcttgacagatggcttaatgtgcttgactttgacacttcttgccccgaaaaagaaattgggcaccggtacagttatcactgctttttgcttctctgtcatacaagcatgttcaggaacaggacagggaactgtcagggaattccctctctgctttgtcggttacggcgtttgcaaacacaaacggtggggttaatatctaaaaggtttaccgttggccattacttcctgtgtttttccatcgaaggtaactttcgccccggtacgtaccgaggcattggccatgatgggggcaatggaatgcctgtaacccgctttcacaggcgcattcggttgtatgcggctgctgatgcaatccatccagttctttcgtgggccgtgtgaagctggtcgccacctgtattggcgcccgctttcaccttaacgggaatttctgttaggttcatttcccgttacaggttgggctgtaatgcatggtcgcactttccttgtccttaatagacttttggagat

SEQ ID NO: 46223 - DNA, 944 bp, Arabidopsis thaliana landsberg
  unsure (1)..(944): unsure at all n locations
cgaaaaaattcagatatttactcccatttaactattttaagactatgtgtagttttgtaagtgaaagcatgctgtggttgtttgctcaaatgtacgtgaaaacagtaaatgtttccctaatttctgataaaaggaaaggcacgtgtgacgccattactcaacattaaagcttaccatttggttaatctaaaaagatgagtaacactaatttattagttgctgtctccatctcgccaccatcactcatcaaatctaatctaagaatcaatctcacattttatatagaaatgactatacacgaatcttcgccgacaatatttttttgttaaaacggtttaatctccgccgacaatatttagtactggtatgtaatatagatacgtcccacacgttgaaagaatcatacttcgtaattttgtaattatgtagcatcaaaaaaagtatacaaatatattttaaagttacattagttttgttgcttgcattatctagctagctagagagacatttctttgcttttaatccaattcatgagatcatggctcttggcttatatggaagttgttgcacatattaataactacgtgtccgtttgtagaaacttctattacttcaaggctaaagaaaatgaagtttataaacattcgtactctagctagttcaaattgaatccaacgattataattttagaacattcttggggtagacttttttctttaagacgtaaacaaagagttactctaattgttttctgttttgtgggtgtttaaggtgatttttagttaaatttcatggttttaagttttattttggaggttttcaaaaatacaaattgtagcagcttttttgattcacccaagtcttaaaaccattttttttttttggggcagtctttaaaccttctaaaantcaaattcatttcaaataagtttaaacaaaaaaac

SEQ ID NO: 46224 - DNA, 952 bp, Arabidopsis thaliana landsberg
  unsure (1)..(952): unsure at all n locations
gacatccattctatccatccgcagattatttatttctgtatggcaacttgaatttgatctttgatatctccagaaagatcaagctaaactggaatttaacaaaagcagagaagcgatagaatgcaagaaagttcctacagcttcgacgatgatcaatgatcctgaggcctctgcagcaactatggtgaattattttctttcctcatattttggctgaattgaactcaggttgtttagaaactgataatatttatcaggaagttgtcccagggttagttgccaggaaaggaagaactaagaagaaaaggaaagaaaagaataagagtaagaagtgtacaagtttggaaaataacggggaagtgaataagtctgtagtgaatagttcagccatcgtaaaagcttccaaatgtgattcnnnnnnnnnnnnnnnnnnnnnnnatcctcaggaatatatcaatgctcagattattgaagagcatggttcatttagctgtgaaaggaatagatcaggtacttgtgcatctgtgaatggtgcagctaattgtgagtattctggagaggaagaatcgcatagcaaagctgaaacgcatgtgatttcatccgatttgagttctgtggatcctgccggtggtccaagctgtgagaacgtgaaccctcaaaaatcttgctgtcggggtgatcgtaaagaaaagttgacaatgcctaatgaacgatccagaactttggatgaaggggaatcccatcgaattcaccatcagagaagagaagcaggttacggttttgcctccagcagttcagaatttgtttcttatgagtggcctgctgtagctcctatgtacttttcgcatgttagttctcaccttccaactgcaactgacagactgcaccttgatgttggtcacaatttgcatccatacgtacggcaaccttttgtgtccactgtgcaacatgc

SEQ ID NO: 46225 - DNA, 808 bp, Arabidopsis thaliana landsberg
ttatatatagcgcgccataatatgccaatcgttacttgttcaactataatttcgctagtatgttagttcaaaagactatataagcgtatgtaggaaatcaaagaaaaacttacgagcggattgatcattaatacaaagagaggctatgatgaggagagctacagagccaagctttggcgatttcatctttcgtatactttttttttagtcaccacaggaacactaagaagctatagttgttccatttataggtaaatttgaaacaatctcaaaataaagttaccttttaaattatttcaaaagatttttactgattaaaattacttgacatttttgtataaaattcacatatgcgatttgaacatagatacccattcaaagatttacattaatgttcagatattacttgccaagtttattgatcaaagaaagacgaagtcaacaattaaaacacgtatacattaatatccgatttactaaccaaatgttgtgccagagcccagaagtggtatcatataaagatagtcaacatttggttggtttgtatcttattaaaggaatgtcaaatacctggcaatatgagatttaatatttaactattttatgaccttcctttttttttgggtgtgcaacggatgattttataccatttagaattgttgtaggcccattactaaaaaggataaggcctcttaagccaaagagtcagcaaatagtaatagtctttgaagagcgagaaacaaaacgaaacaatatcggaaagagaagatatatcgatccaggatatcaaaatgaatttcgtggagct

SEQ ID NO: 46226 - DNA, 710 bp, Arabidopsis thaliana landsberg
cagttcaacaaaaaacaaatatttttggtttggtggtccccaatcaaaccggccatccaatgagggcctttcaggccaaaagttaaaccctaattttaagccggcgaattgccaaatttaagctcagttgggttcaaccaaactttcagttcaggttggttcgaccaaacctcagtggccaattcgattcggtccgagtgccatgcttatgtagattgtagaaagcaccactttgaaaagttttcctatagcaatgaactacaatcacatcatccttaatagtattgaccaaaaaaatcaataatattgacaataaataatctgtattgacaattacatcatgagcgaaaaaaacaaaaaggttaattaacacatgagctgtttcacatgatgatttgctcatcaatgacaaattaaaatttgttgattttttcttacggcgacacgcctaccaccattttctcagccattggctacacacacttcgccacgttttttttttactttgggtcaacggttctgttttcagtcagcggctctgtttcggtttataatactaactttatttcggacagccgacagatcattctcatttttcattctttatctatttttgtactaagaataattcatagattttttcctagaaaaattcatagatttaattggttcattgagatagagatagagatataaatgtgtttcgcgac

SEQ ID NO: 46227 - DNA, 256 bp, Arabidopsis thaliana landsberg
aacttggtagcaagaaacatcggatagttgagttgtcgtttaaccatattcacctgctatgaaaacaagccccactgctgtatatactcatcccaggccacacaatggacaactatgatgttcatgctatgatcaggtggtgttggcctctaatttttaaagaaccgcgagcacaccgcattagaccaggagcgttgcaccagggcagcaccatgacaccaagcgccggcgcccatcaaggtactcagctttactg

SEQ ID NO: 46228 - DNA, 588 bp, Arabidopsis thaliana landsberg
atccaaagcttagttcatgtgttccacatatgaaagatcaagatttacccttcaagtcctggtttctttgggtagtagacgtttttcaatcctagtcttctagcagctgatgcagttgtctctccaatgcaggcaacgtaattgctccattgctcctcattttgaatcagatgcagccaggcgctgtcaaaatcacgtaagcgatggaccaaacccactcgatcataatagaagagattatatgaatgaggtattgctgagtgatcaaaaaagagacagatgacgattgatggcgcttaccgaactgcagaaggagaagctacagaaagaacaggagcagatagtgcctgttgcaggagcaccgtatcaacactctgcaccggaacctagtaataaaaaaaaaaacagaaaatgaccattacaatatctttaaataagcacataccaagggctaaaacatgtgagcccatataaaaattatgactaagccaaataatatatgcaatgagttactttttatagggcttgtctactaagtgtaacgacggcttactggtgtgtatgtattcagcctgacaacttcaaacc

SEQ ID NO: 46229 - DNA, 470 bp, Arabidopsis thaliana landsberg
cctttcaaggaattacgaatatttcatagcagcactttaatcattatcatcagcgcatgcatggagttaaatgcgaaagtctttaggcgtgacagaagtgaagctcaacgaattattatgtagtagatgtagttagattaaccaagtgtaatttagttttgctggttgttgttatatatcttccaaagaggttatattacataacttacataattagttaattactacattccatgaatcacgatttaaactttgttttaaaaggattttggtctagaaatcaaaataatagagagaaacttcaaattgtttatttggtttactcgcagcgactagtttcacttttcaggttgatgtaaatggataattttattatttcgttgatatcttattcattattaaaatttcgtgtaaaattagttattacttgtgcatagcctattttaagtactagaatgttgggttaatac

SEQ ID NO: 46230 - DNA, 783 bp, Arabidopsis thaliana landsberg
  unsure (1)..(783): unsure at all n locations
tcatataggcactaccaactttcaaaagtatgaaatggcaagagaggaaagcagattataacaacctttcatgaacaacaatgtgactagagtagcttcctttagtaacagagccatcatgatcaatgccattgaaagtaaaaactcctttcgcacaattaacttcttgtccttcattacaatattcacactccctgcaggagttaacatacgttccaacaccaacatggtctccaactttgaatcgttgaacattaggcccaaccttagtcactattccagcaatctcatgccttacaataaggaaaaacaaatgaatatcaattccactagtaaggtgcaatttaataatctaaagtttggtttttgaaaacatacccaggaaccaaagggtacttggagtctccatgttggtttctactccagataacatcagcgtaacacactccacaatgagtgattgtgagtgaaacatcgtcagttgtaacagacctggatgatgatgattgtgtgtcaaagattgttgcttgaaaatgatcactaaatcatatgaatctcacctgcgagtgatagtatgaggagaaagaagaccagatggatctcttgcagcccaacacatgcactcgttttccacactctctgaagaactcatctttaaaactaactgatagagaaacaaaactgcacagacgaaatcaatagcgtcgagagtgtataaaagncttcttcttcttcgcttnctttggttgatctgatcccaaaccaaaacagagtaatcaattt

SEQ ID NO: 46231 - DNA, 562 bp, Arabidopsis thaliana landsberg
tgtgtgcggggctgctacaaagatacccatggattgaaaaggaccacaaggctaatggatgtcatctacatcaaatcgcatctaactacaactaactatcctactcgtgattgcaggcatgctccttaagctatatggtatgcggtatcaatgagtacatcatcaataagtgttgtagttttgtgtgggagacaaccgagtagcggtcgaactggtgcggactatttggcagcgagacgttatgacagcgaggaacatgtgcgaagcagccgatcctacctactgcaccagtgtcgccctctatatttccaaccctggcgacctataggacttattcatcatcaagccgccaacttaattaggcaggttagtgagactcaccgagacacattcggtgacgtagtaatcacgcttatgcctatatttaagagcgatcatgaatcactctttggttccacattccctcttttcatcttttgtcagtaagggcactgacaaattaagcaaattattactcacgattattcacgcactccacaatgtctgacgtgaatgaacaatc

SEQ ID NO: 46232 - DNA, 518 bp, Arabidopsis thaliana landsberg
cttctttttgagatgtggaaaggtaaaactctacccaattttctttttttgccttggacaagtttttattgtttggtttctgcgtgattgaataggaaagctgcttaagaaaattctcttctcttgatacttaacaagccaatgcatatctttgatgattgctgtttcttttacctagtcaggaatttgccaacattagtgtctgatattacgtagttaagagtgatacaaaactcatccggaggcttactatattgcatcatcttgatgtgatgctgatatctttgcctacgtactgcatgataaaagctaatttggttgagcaagtaaatgagtaattactgtctgaatactagtatttaagaagtatccaattttgttttgctattctgcaaatatgaacgtatggggtttgttttgacagtgtggatcaagacgacctgtggcgcccatcaaaatcaattttggtcgcaggtagctcaagtgattgatatattggtagctcaagtgagtagaga

SEQ ID NO: 46233 - DNA, 687 bp, Arabidopsis thaliana landsberg
tttaattatatatattttcactacaaatttacagtatataggagatcctttttgtgtgttgtgttaaaaatgcagttctccatgtttggatccatcttaactatcggtgcaatgcttggtgctgctatgagtgggaaaatttcagatttctccggccgaaaaggggtaaatatatcttgccaatccttgtaaacttaaggggccaataatacaactaaaaaatacaaagcaatgcttatatatgtcaaaactcatttcaggcaatgaggacatcagcttgcttctgcattacaggttggctcgctgtcttcttctccaaggtaacacagaaacttattttcaattattttgcaacaccgaaactacatatgctgaaattagtatagattttgatcttaatatgatgttaaaatgtggtgcagggggcattgttacttgatgtaggaaggttctttacaggatatggaattggagttttttcttatgtggtaatttactctctttttcaccaagtaaatcttacataataactctagaagtcaacattttatgtagtagtcaaagataaagcagtgtgattctaattctactggttttggcaaattattttgatatttatgaaccaatgtttataaaactctcagtctccaaagtaactgaatgcaataaatcaggtccctgtgtaca

SEQ ID NO: 46234 - DNA, 448 bp, Arabidopsis thaliana landsberg
ccacatcgctcacagcgagagaacctatatgtccgctacgtcactgatgccactggcccctcccccttctctcctctctgagacctagcgttacagcgagtgctatttgctagtactatagctggagtttcatcatgcatcgtccttgcgtgtgttccccgtatgctagcgaaatattaaaagtgtagataccaggattcgaaccatggtccttaggaagagagcactcgtctccaacactgtagccatgttggtttgtgttgtataaagaaatcgtacatcatatatggaaactgtagtaatgcacaggcctctcgagctcttcgtcactcgaataagagaccaaccttgtaggactcatgctcgagctcgctcagggacgcaagaaggttaactcgcctaaaaggggggtaaataggcgaaacctaaaaattataaatttgaacat

SEQ ID NO: 46235 - DNA, 886 bp, Arabidopsis thaliana landsberg
atattagtattgtcattgtgttaccatcttattcaaattcaaatattgcatgttgtcgatagaatattatttttttaaaaaatctcacttttgatttactatatacactaatacactaaacaatacaaacaaaattagaaatgtttaatttattaaaattcttatttgtttgttatggtcaaaaatagatagacagaggataaacttgtaaactggcaaaacctagcttaagcgttgtgactcatatccctctgtttttttagatgatcgagtgtttagactttagagatccattttcttctaattaaaaaagcacagtactaaaagtattggaccgaacccaaattaagcccagtatcgagaaaacattaatgggtagtcagatattaaagaagcccctcaatcttaacagttatataacaaacggttaatcaatcagtcaacggcgttatttgaatttgaaatttcgaaaaataaacaaaacaaaaagaagaccccacagacaacggaacgtttggaaaaatgaggtccctcagattcctaaatcaatcgaatcggacggctcagagtaactctctctctctctatcttctcccaaagagactttcaaccaatttcccgctctcaaggcaaactgcaacagaaatttaggttttacggattattcaaaaagtagaccctttaactttagaaatcttcatttttaatcccaagctaatgtttttacatactaaaacctttatctctgttcccaaactaatatatatgaatattttcaaatatatataaactcaaataaatttgtttaaacttttaatcaattcaatttcaaatgaagcatcaaatttacccttattgggtagagtaaaaaatgggtcagaattgg

SEQ ID NO: 46236 - DNA, 675 bp, Arabidopsis thaliana landsberg
aattgcaactccctttaaccattactctctaatctgtatttgttttccgtctaaggctacatttgaaaccttcatcggtatcgagatgataaagccacagctgatctgaaactctttggtgacaatctaaaggtactgctctcttcgtagctgctgtcaatcaaagttgcatttctttacgttttcaattttcttttctctaagatcatttttcattttctactttccggtagctattggaagataatctcccgcttgagagtgtatacaaatcgacagatgtatctgctgctcctattcgggtcatccagttaatttacaattccggggtaagttcccctcggcatccatctgagataggaaaaggaagaaaatgtattgccgttattcatggttcacttgtttcttgattgtgacaggatgtgaagggtcctcagactgttgcttacaatttgccaaacgatgaaaaaatcgtgaaggatagaggaacatcaatggttatgctcaagaacgtccaagaggcaaagtaatgtcccttcttcctccatatttcatcaataaacggtgtcataattacatctaactaatgcttttttcttttctaggtttgaacatattttaaagcctataacaaaatcaccatcagcaaggaacagagaggattagttgatttta

SEQ ID NO: 46237 - DNA, 568 bp, Arabidopsis thaliana landsberg
accccggcggcgtgaccggtgcgcgcgccggggcccgtgtccgagtgtgcacccctgagcgcacattcatttcgcttttgtattaatgagaactctgtgatctttggtgcttacggtgccagagggcgcaattttcatctttgtcgctatcgggtgcgagccgaaaagaaacgtgttctcatgggggacatggcgcttttccgagcgcgacacaacctggctgaatcgctgcgccgggacgcgcggcttctcttgccggcggatccgggaacggaacgcctgctggagtacgtgcacctgttcaacgagaacgcgaaacccgccggcggagggcggatcgacgttgacgggtggcaggaactctacctgagcagcccgtctgcgatcagccgcgacattgctgccgagacaggcacgatgccggggatgggtgtcgccttcttcctggagaatcacgcgcatatgcggtccttcggcctgtcggccggctcgccgcgcacgcgtaagcagtacgacatggggatgcggctcattcacgggctggcggtccgcatggacggcagcgcgt

SEQ ID NO: 46238 - DNA, 769 bp, Arabidopsis thaliana landsberg
tgtttttgttctattctcctttacatttaaccaaattaaatacttcaaattaaatacggtttttttgtaagcttctggtgagaaaaaaagaaatagctaattagtaatacattatttctcccgattgtgtcaataagtttcgaacaagattgtccaaattacttccaaaacactgtgaacgatttttatttagtttggtatacataacttaaaaaaatcagtgatatatgaatatgaagtcgattagttttgcaatttagcatagttaaatgcaataatttagtcaaaaatataagtattagacacgaaacgtataatttgggtggaccgtcacgtggttttggcggttagcaatttggaccgtcggtttgtttcgtttacagactacacagtggcccattatggtttgttccggttcaccaaaccccacatgtggctagacttgagttaaaaattggtattggtcaaaatatggcttcttgaccaggaggagtcttgtattttttctgcctcaataaattcaagaaatactcgattttgtaaagaatactaaattactaacaattgatcattcacatgtctcatgtgttacctgttgaagccctaatctttttatatggtaaatgttatgctaaagactaaagttgtatcactgattatgtgtgcatgtctacttgtctagtcgttggtcgaatattcgaaatatataaaatcatgcttacactattcttcactttatgcaaaacattgattagataaaaaaaaaaac

SEQ ID NO: 46239 - DNA, 625 bp, Arabidopsis thaliana landsberg
tgtgtaaattggcaaattggtgttagtaagtgacttgttgtgtctttgttgcttttgttttcaggaaaaccccttgtgatcaaaatttgaggggtttttgttttagcttgagtttctgaatgtatatcaattcagctacccgtttatttaataaataatctccaattttaaatgttactctcttttctttttgtgtgttttcttcttactagtgaccaatgtaacttgacagtgtcttcttgtactagcgtactagcgtttgcttgtcccagtttgcagttactgtgtaattctttgtaaccataccagtttgaagatgcaaactggtaagttttatgcttaagagaatgttgaatcttcctgtgttcttctttctcttttcgttgatacgagttgataagaagaacaatgaactgcttatgctaaaggttatatgtttacattgtttaataaacagagccatggtaatcgattgatgtaaagatttgttctttaggtgtttatgatgtaagtggtatcaggtcatggttaatgtggaggagaatcacatatgtatgctgttgcattcgccaatcagctcaatagccaatttattatcatattgtcaatgagtagcattctaatg

SEQ ID NO: 46240 - DNA, 626 bp, Arabidopsis thaliana landsberg
aaaaagtttttccaaaagagctgaaccaaaatatattttaatcagaattttcttacttttaaagatacttctcccaaaaaatatgttttctaataaggattaaataaaaggattatttttatataagaatttagttatcccttattgaaatatctttataggtgttgtctaaagtaataaaaggtattctctaaagtattttttatacactaagaaattaattcttaaaataactatttctctgagtatgagttgcatatttaaaatcttttgttcaaataagttaacaaataaattgataaaattatataccttgcattcatgccggattttgtgtgttgcatttgtgctttaattaaagagtccaagatagaattgaatttgaatgaatagaaatagaaaataaaataaaaaggaaagagaacttacctcattgggccaaaaccacccctagccagcccaactcttcccctttatcctccctcgccgccagccaaagccagacttcaatgctgaagtgtgagcctgcttccggtgtggctgaggtgctgcgcatgcatatcacgttcgccgtggcactggtgtgtgggtccgtgtgcaggataatgtcttcccgcgagtcgcgg

SEQ ID NO: 46241 - DNA, 565 bp, Arabidopsis thaliana landsberg
ggtgttcttgctatgaaaaagtttgttgataatctcttatatctttcatcttgcattccttgttgggtttatggattttataggtggtgttgactccaacccatcttgccattgccatggaatatgctgctggtggtgaactattcgagcgtatatgcagtgctggaagatttagtgaggatgaggtgagcttgccatttgaaaaattgtgctgtgcttttgcgaatatgaaattactagtatttaggataatctgcatggtctttggaaagattaggaggaagggaacaagagaaaacatgtgaacctccttttatttagtatcaggcattaaacagttagggtctacgttctaatcctttctctcttttccaggcgagatatttcttccagcagcttatatcaggtgttagctattgccatgctatggtaatgtagagacaatgacttaagaaaatttacttatccattggctgtttgaagtcgtttttttttaatcatgtgttgactattttgttgcagcaaatatgccatagagatctaaagctcgagaatacgctcttgg

SEQ ID NO: 46242 - DNA, 885 bp, Arabidopsis thaliana landsberg
  unsure (1)..(885): unsure at all n locations
ataaagttgtcttggtgataaatttagtcaatatgtgtgggttaagagtgttgactataccaagctttctcgtgattgattggcttttattcaatcggacaatttgcatttatattcacaggtcatgtttattaaactctacattgctgtctatagtnnnnnnnnnnnnnnnnngattgaaatgtcggagaacggaatagtttttctgctcttacaataaaaaggtacttaaagaacactgattaactcaatgtaacccatacacttacacgttttgtcaatcttgcgcggggattttttgggtttacctctaaccccggactggttaaacacttttctcacctcaccacatcaaagccataatcagggcccaaatttgagtgcatacagcaaaaacattttggcccaataacaaaaaactgtttttaaaacaaattacaaaattttcgtctaaattagattcaaaactgtataatgtttgggactaaccactaaactacagtcacatttttgaaaatgatgactctaaaacaagttataattatttgctgcgtaatacccttgcttcatgggattacgtggagaagaagagtaagtatcaatcaatttattgctagacatttgcaaaaggggaccggaatccgtgtgcagaggtgtctagatgaagccatgagtctacagaggagtttgaagttgcggtggatgagttacggtggagatgacattttccaaacattacaagccttaacacgtgtacctactgagattttgatggaacttaaaattgtttcccaaataaacctcttattcggaaaataagatttggactcaaaatggataggatgcatcatgaggtgtgagatatggatcccaatgtgtatccgg

SEQ ID NO: 46243 - DNA, 2519 bp, Arabidopsis thaliana landsberg
tttacttttggaattaaactgtagaatttatgtatgataacaaaacaatatttgagaaataatttatattctgtcatcttaaacttgagaataatgaaatctatgtctacaaacaaattatctgtaccatgcaaagaaatcatctgtagatttaatagaaaatagtttttcacgatttgaaaagaaaccttatcaaatataagtggtcatacaattttgtgcttgtaatttgagtaatatagcaagttaatttgagaatgatcagatttgttgtttaagaaagaaaaaaacctataaggattatcaaatttattgtgtcgaaaaataaatcatctattgcatgcaaataattaaggtggcaagaaaatctttaaattcaaataattcctaacgtcaaatcatttgtctgctgcaatttagatgcattgcatgtgtactggttatatcgcaacgagctttaaccatattgaattgccattatttagctattttggcttgttgctaacaactgatattatattatcgcgtatatgtatgcaagaagaatcaaccgatcgtcaaggatatattaaagcctgctcatgttatgttttccattctttgctagagaatatttttattttcgtattcaaccttaaggtagtaaatgtaaatcatattttgttacaaaagttaaagtagtggtcggaaaacactagtttccttttattcgcattacaaacaaaacaaataaataataggtttggactgttcgaagaacagagtgttctaaggaaacagagtaattgcagtcaaacacctattttatgtagctaaattattttttctattttaatataaggtgctagaaaacacaaatccctctaattaaaaagttggattttatggtcgtcaagccacagctagggacactctttttctacttagcagcaatcccaaattaccaaaaataaaaataaaaaaatgaaggcccaccgttgaaaaattagaacatgcatggaacaaacccaaaagctaactcaaaatattcaaactctcatctctcttcactactttagatatctttcttctcattgttgtatcttttcactacattaaatccccactttttcacacacgaacacatgtgtaatttttagtttttggtttcaagtgttcaattggtttacatggagaaaaatcagaaaataacatttttttataatactatacataacatagcatatgatcgattgctcttatagaaactagaatcagtgtttcaaaagaggccaattcagatcaaaatgtcttgaaattagccttctctcactactactctcatcacttacgacgccgtttttgtggaaacaaaaataaaaatgaaaagaatacgctaaaacgacaaggccatttctcacagcgtctgagttggtaaaacagagcaaagctcaatggaaccgtagtgaagcagctcctcaatcatttgctcgatatgatcttcctccattggcctaaaattctgttgcatattcgcatttccatcttcccacttgatctctgtcgtctccgttactcctctgttcaaatgactttcgttagccgtcacaccgtcactgtccgcggattgtgatcttgcggtctgcgtttgcgtttgtgtttgcgtttgcttggtcatttgaagagaagccatgtagcatttgtggagtttagcggtaagagttgctgatagaagcttggaagaggaagtaggaatggcattagggttgtatgggaaattagtacgagctctcgggccacacattagcctagccgcctcgtcgtaggcccttgctgcatcctccgctgtctcaaacgtccctagccagattcttgttttcctaaaaaaaacaaaaaaaaaacaaaaaagtttagcattactcaaataaaaagcgaccgagggtaatttcgtaatttgagaggatgatgagggagagtttttacaagagagggtgacgaatttcggagacccaagagccccaatgcctctgtctaacgcctcgaaagcgttgttgtggtcgtgccattagtgtgaatggtaaatggaaatagggtttcaggtgagtttggtgtgtttgtggaaatgttttgaaagaagaaagaatgatgagagtgaaggagcgtttttggaagagtgaagggtagctatataagtagtgttggctttagcttcatgagagagagaaatgtttttgtgttaaaattttctttggcaataaactggcaatcaatttggtcctaaattggacccacaccattaccaatacgactcagaaaatctcatggattttgtttgatgtgagagagagagttatattaatttatttaacttaaagtattcttaaatttacttcatttgttgtattcgaagttgctgcgacatgggcaaatggattatctaattctgtcacatattatagtgaaaattgaaagcttcgaaactacatgctaaactgtcggaaaagtgttttttttatttagagatatttttggaagctgtt

SEQ ID NO: 46244 - DNA, 621 bp, Arabidopsis thaliana landsberg
ggcaaaacaacatatccctttctctatctctctagaacacacggaaactttcctgcaaagaaaaacagagaagatctctcaacactaattcctcaatcttctttataataaagccttataacttacaatttctcgtatttttttggatcttaccctttgtgtctgcctctagcgtgaacaacgtaataccgattggaagacaaaggttgatcgagagccggtatgaacaagaccttcttaaccgaagtctctctgttaccagaactgtctaagtgaacaactgataagatcttgtcctgaggtaacggaagcttctctatttttgtcctcgtacacatcccgaaacagaacgtatcctctgtttcagcttcttcatctgtgataaccaaaacgccggagaacggaccttccggtgactcttccgagagcgtcttctgatattttctgaactgcgacaatgttctcgtcacgtacattttttcgttcttgaagctttaagggaattagtgagttatgatgaagttttagtatcaatctgagggattttattaatgaattttaacaattgtaggggtgtaaacgacgagattataaagtagtttgggtggctcaatgtaactt

SEQ ID NO: 46245 - DNA, 388 bp, Arabidopsis thaliana landsberg
ttcatggccatcgggtcgcgccggatggcggccacgtccacggccgcggcggtggcttcggacgccattgacgcaccgaccagcacgccatgcgcccagtcgcgtgcctcgaacaccagcgggaccagctcggtgcggcggccgccgaacacgatggcgctgatcggcacgccttgcgcgggctcggcctcgggcgaccagctggggcactggcgcgaggccacggtgaagcgcgagttgggatgcgcggccggatcgccgctggccgggtcaaaatcgcggccttgccagtctttcaccggcacgcgcttgtccaggccttcccaccacggctgcatgtcgccggtcaccgccacgttggtgaaaatggtgtcgtgctgcagcattt

SEQ ID NO: 46246 - DNA, 1133 bp, Arabidopsis thaliana landsberg
  unsure (1)..(1133): unsure at all n locations
gaccaacaaaaggaaatcaaacacggtttaacttcagcgtcgctctacaaaataaatcgaatttgtttctaattagggttcatcatcaagtcgtacttctgccaaacaaggtttttactttttagtgatgtcgtcaaaaggtacaacaactcaatcaatccacgaaatatcaattgttaaagcgaggaaatcaaattagggtttaaccgatttcgagagatcattcaagagggtttaatgggtatcgttgcttccaagggagatagtaatactccattgttgaatctatgtaaggagaggaaggaattgatcaaagcagctagagatgctcgttatcacttagcgagatctcatcttctttactttaaatctcttttagatttcagcaaagctcttaaacagtttgtttcataaggatttggttgtgattccnnnnnnnnnnnnnnnnnnnnctagtagtgatataatttgttctggatcagattcagactctgatacggattctgattcagattctgattctgattgtatagtctgtgatcaacctcaaacagctccgttgagcaataatgacgatcagagtcagcgaaaacccgtggttggtgatggaacttgcggtgcaagtaacaatggtcaagagggtatggagaagtcaagagaaggtttagggtttgaggggacacagttcgttagtgatccaagtgaagacgagatgaaaagttcgcaacacccttatgatatactcggtttctacaaatccgtgtataacatgcagcagtgcgaaattatcgaactggatcatagagatgatgaggttgagagtgatggatttagagaaattagggagagagaagggattcctgatttggaacctgaaagtgattataatagtctgataaggaagaataaaaagaagaataaaaagaagaagaagaagaagaatgttagagaaagctcttctgttgcaagtgaaattgataagcgagatgttgaagcgaatacttgtaatggtcaagttgcagatgagactgataattctaatgaagcttgtgcgcaagagacagaaaacactccagagattgttacggaagaagtgacgagatcagatgaggaagttgaagtagtggcaagat

SEQ ID NO: 46247 - DNA, 565 bp, Arabidopsis thaliana landsberg
  unsure (1)..(565): unsure at all n locations
gatcgcccctggttcaatatgnnnnnnnnnnnnnnnnnnnnnnnnnntccggtcaccttagaggccggtgacctggatgctgggaatctgccgcctgctgtcggagctgaggtccccccgagtgatactctcaccattgtccctgtcaacactccatcattagacagtgcaccgatgcctccagctctgggatttcctttatttctttctaacctccaggcgagccgatctttgcctttcattatttatgttgacaaacgagttctcttgctaacttttgagcttgcagaatgttctcaactctgtatctgcccagttggaatcttgcggcactcctgtccccgatcatgtttcgtctttgatgcagtggaatcctctcctgcttcagaggcaaatagatgatctaaagtctgccaacattggttagtgggtctgcaacttccttttgctatttattgcttctcttgttttaaccttatattttnnnnnnnnnnnnnnnnnnnnnnnnnnnnnnnnnnnnnnnnnnnnnnnnnnnnnnnnnnnnnnnnnnnnnnnnngaactagg

SEQ ID NO: 46248 - DNA, 757 bp, Arabidopsis thaliana landsberg
ttcaggcgggcataaagataagatgacagttagaaagagttacctttaagacctctacatcttcttctaacagctttgactcgcttggatgaaatacacgagacgcgcctccatctaatagtacacgaagcaacccatcctggtaaatttgaaatattatcaatcaaaaggcaaacacttgagagctttctataatgtaaataaacccgactgagattaaactacatacaagtgatgcttggagcaggctggtgactatccgatccctcaatggctccattatgacactacatagctgtccaagttcctggtcaaagtaattggacatttaatttatcaatgtaaagaaaaatgccttttctaatattcattggtgccaaaacgccatataaatctaaaaatagtcaaggaatttcatgctccagtgacttctaggttccatagtttttagacaccctgaatcatgttaccagcaccttgactgtggcggttcagacttcatgtaaactgtaatgtctggctcagctaaaaattgccttgtctaaggggagacttcttaccgtgtctagggcttcgattaatccttccaatcttgattgagaaacatttggcttatacaaattttcaataaatggctcccttaaatcgcagaagataatcttggttcctgcagtgtgaaagaatcatgattaatttaaccctttgataatgaatttttcaagaatataaacatacgacatctcaccagtaaactcgc

SEQ ID NO: 46249 - DNA, 1486 bp, Arabidopsis thaliana landsberg
  unsure (1)..(1486): unsure at all n locations
cttttggattgtttgggttggtagtttttaaatgacatttattcttatttaggtttggtttaattccatgtttaggtcaaattgcacttaagtcctcagattggagagaagaacaatattagtctaacccttatcgccgccaaatcctcagattcgtaatctttaaaaatgattttctgggtttactttcttacacgtagttgaactaccgagacagaggtagatgaaatgattttgtttctcttgttaaactttgaaggtcttaacattttaaatgttgaaatttgttatccatatttaacaaggattcacattttaatcatatatcgtaaccggattcaaatttgaccatatccacaaatcgctttcaaacagaataaattaatcgcatatagttaagttatatatcaagtacaagttaagcatgaaagcaaaaatgagagagagtgagactcgtttctatattcacaagatggttagcttttgtctacttcttctaatcgcataaaaaagaacgccgaaagtgaaactttttaacaaagtgggttcggagttcgcattgtgtgttcttattcaataaacttttgttgtcttttgagaagttgaaaatctgagagttcacaaagaaaaaggaaaaaagaaaaagaagagaggagaggttagtagtagaagacaatcttttagtgggatactcttgcctagcaccgggtaagcatcatggggtctactctcacgtctcattccacattacgacaacacnaacatcatcaaaatatggcaatctgacttggtcaatttcttaaccatatttgtaaattctctcttttcagttatctattgattaattattgaatgcatcaatagacacatatatgtattgggggaaaaagcagattcttttttctgttctttcattctaaagcataagattgaggcagatgcatttttttcaacataaagaattagtgggtttctaatttttataagatgtttaaacaaatttcctatagcttgtcgttttttttttaatgaaagaacatgtacagttattttcaaagtttattaagttattcctacaactgcctcttattatttttagcatcaatcattttataaaattttgtaataatctgatataaaatgaaatggagaactactattttgtgttttcctttttgaatcgacgtgttattatattctcaaacacaaaatcgaaaatgagcctcgaggcccaaaaattccaaaatcccaaaaccaagttattttatatgaaaaatatcatgcaagattttgaaattggattatgctatgtttgtttacgggttctcgccagcaagtacccgtcaacaattcttatttgttatgtagtttttgatctagtaataacatgtttaaggctttaagctaacgacagatcatgtgtggaatgtggtcgtttcatagtcgattacgtctgactaagaaaaaattaaaacggaaataatca

SEQ ID NO: 46250 - DNA, 651 bp, Arabidopsis thaliana landsberg
tcgattacggttcctaatctaaataataattaacacagccaaaacttttggtgggttctactatttttttccgtccaaaaaggcaaaaacagatacaaaaattgaatacaaatcaaaaacagttaattaaaaactcaaatctgattatattcattcaactactctaataaaaaaaaatataatttttgtattttattttatttttctttttgaaataaaaaaaatagttcccacactcaaattgcaactttcggcagccgtttttgtaatcagtagccgactttcctgtctctctccacatctcaccatcttagttttcaatcttttgcctaacattttataattattcggaaaggaaaataaaactaagtgatttaattgtgaagactaataattataaaatgttatttaaggactagtagtaccaatattaagacttttttttaagtctgttatgttaatctttttgttttccctggtttggtcaataaaatagatctctctcattcaatgtctctcacaaagaattttattaattttaaaattaagtgattttagttgtgaaagactacgtgcagtccttgctgggtctgccttttgagttttttaaaaatatataaatgggatcaatgttctctgtgaagctctccc

SEQ ID NO: 46251 - DNA, 666 bp, Arabidopsis thaliana landsberg
ggtaaattagagagggggcataaatgtgataggggaatcaaacagtccatgtttaatgtcttctcagaggggtttgatactccaataatcaatgtccttagatttgccttggattgtttaagttgacatgtaaaactctatttcatgtatataatgtcgtctcaactgaataaatgaaatgttgcgtttaaggagtgggagatatcaaaatcataactcatttcttggcttttggcttcttaggggcagaatttctagccttctttgctggtggctgcttctctttagatggtcttcctctcttttttcctataacctgcaaatattccacatgtaacaaatattcttttactgtaatggatttacatcgatttcataggaggaaattctaagttttgtcatcgtacagtttcgccttttgctttggctttgggtttggcttttgtgttggtttcttcctctgtgcctacactttgatcagctggctatacagcagtcttggcgtttttgatactttcatcatctgattcgaacgtaaatccttccagagtgcctaaatgggttattgtattagccagagaagtagacatttgcgtaaaatcaggttactatatccagaatagggcttcaagaagactggcaataatgaagtcacttggaacagag

SEQ ID NO: 46252 - DNA, 616 bp, Arabidopsis thaliana landsberg
taacatactgttgttttttgactccctaatctacatatatctgtttctatttgtatgtaacggtaggtctaacgcgcttcatcacatttatcaccatctctatcttgaaaaggagaaataaataattaatcactaagcgaaagagatttgatctaaagtaatacaaataaaccttgattgagattgtaaaggagaagagtttaaaagcatggatacagagagaggatcaataagttcatcagaaatatccagaactgctcatctacaagatagaacagttgcttgtcttcctccttcgtacggacaacttgtgaccattcttagcatcgatggtggtggaatccgtgggatcattcccggcacaatcttagcttaccttgaatcacaacttcaggtatatgtaactgattctaaattgaagattgtgtgcaaatcttatatccattttttattattaaatttattgaaaaagctagcggtgtaaattaatgtcacaaaatcagtatattgttagtttttgttttttttgaagttttatgcaaatcaacaaaaagtatattcagtgttgtaattgacaaatagagactctagttccttttttttttttttttttttt

SEQ ID NO: 46253 - DNA, 530 bp, Arabidopsis thaliana landsberg
agcttatcaatcctcggctcctcgctataactgttagcttaaccgaatggtccggatttaaaatttctaatttagtaacagaaccatccagtcaaaccggttaaacccaaattttttaaaacagggtatactatatactattttattgttttgatcaggtctttctttttgaacaagataggttaaaaaggtctttctttttgaacaaggaaaacaatcttcatttctttacatgtatgttttgaagacctaaaaaacctagtaattactatatctcgttgctatggacgccaaagtagaaccgcagcagaaaaaggaaactatgatatctccgtcatctccatcgttttcattacttccaaattaactcattctaaaatgcctaccccgaatgtcgaaaagttactaccgttccctctctttagtctccaagagcttctactatctcctcacttctccggacatttacgcttttccaccccaaatcagaaccacataggtttgactctacatatgccttaaatcaccca

SEQ ID NO: 46254 - DNA, 499 bp, Arabidopsis thaliana landsberg
  unsure (1)..(499): unsure at all n locations
ttgaccgacccctaatgtacaccgcacgtgcgctacatcaaagctttgctccctatccgggcttacatggtaggctcgttatcttggcccagtagtactgtagaagtaaaacgacagtgttatgatgtattctgcatttcgattttcatgtctccagnnntttttctttttttttttttttttttttttttttttttttttttatccaggtacgaaatatttttttttaaaacaaaaagtctaattttttcttacaattttttttaatttatggaattttttttttcaaattagggccaaagttgttttacaaatgggaattttgattgtttaacttggtttcattctttaaagggaatttccttgttaccctcaaattgcccagaaattttttaatggtttttgcttcaccccttttgtgtgggtcaaacattcacttatattaaaacttgatgcttttacaaataccccagtttctacaaaataagaaatggttttt

SEQ ID NO: 46255 - DNA, 548 bp, Arabidopsis thaliana landsberg
gggagaactttttttttttgacaattcaactaacgagatatgtaaagacactttccatttaaagtttcaaatttatttaaataaaaaaaattcaagtcttttgaagttgaatagaatgatttttaagaaatagcatttgtttactttatttgtttttgaaagaaacaattatttgatttggtgatggatacatatagagtacaaactttctttacattctcttcttttgccttcttcatgccgactcaacttcctttgttatattggccgagttttcctacacaacccaaaaaatagcaagttttgaaagagattgcatataatctagctatataaacaatcttcatgatattgagatcaaactaactactaatataaaccaaccaatatcacgctatatatgttaattgaattatccgtacctctacaacatcaactttatcttcatcctttaaaaccggaatttcatcattttccctggccgcgatatcatcattgtccgtgatatcgcgatatcgtcattttccatggctgcgatatcgtcattt

SEQ ID NO: 46256 - DNA, 499 bp, Arabidopsis thaliana landsberg
  unsure (1)..(499): unsure at all n locations
cgtgttcttaaggtataaatgtgtttcttcatcaacaaacatgtagaatgggatgttcttcctccccatttcactgatgttcaccggttcttgaattatgtcatactttcctgagaatagattgaaactttgtaagagaagtaagaatatctaaacaatcaatgtcacacaatgaatttctcttctaagcaaaataccannnnnnnnnnnnnnnnnnnnnncatcatgggactggtccaactcatgaaggatatcctcatcgatgtcaaatccagtttggtggcccggttttgttcctttaataaacctgcaaaaataaatacaggaatcagaaagtaaagctcgatgactgaagaagaaaccacggggttaagcctagaagcatacccgcaatgcactgtcatggactcttttatgtcaaaagagttagtcctatgctcgagagaaggataacctccgaattcagagcctccttcactttcttcaggttttacaggac

SEQ ID NO: 46257 - DNA, 407 bp, Arabidopsis thaliana landsberg
gaaaaggtaaaaatggaacaagtcaaaccagagtggcatgacctgacatgacctctcaaaaaaagtccaaaatccgccatgatcacaccagacaatcacttcttttttttttcttttttttgccaattaacgtatagaatttatttcattaggaagtaaccaactgaatgtcaaaaaaaaaaaattaggaagtaaccaactagttcacaaaggaaaaaattaaacaggaaaaagcatgagcaactgatcagcaatagaaacactatgggattcaacatgtcaaggaaacattaaactggctacacttctataatcagaaaaatgagttacctgtattcacttattgctctttgtattatcttcttggcagcttcgggatggtcaacgtagtgcacctgattattagc

SEQ ID NO: 46258 - DNA, 695 bp, Arabidopsis thaliana landsberg
ccccttctattgtttatataaaacaatacgtttacaatattaaggtttgaaaataaaccatatggtgcacaagcattgtggactcaatcctgacaaaacccaataaatttgaggaactccctcaaaaattacggctttgttcaaattgaaaaactggctcttacgatcttagtttggtacacaatcacgtctgatttcccaagttctacttattcacctataatgaactataaatataatctgtaaatatcaaaaggtgggcttaactaggccttgggaaaatattgaattatttaaccttgtatgaatctgacaaactctgattaaagtcttggttcttactctattagtctaatacaaataaataaacatatcttatttccttaaatgtaatttcattctcttaaattatactaaaaaaactctacttgagaaacatgaaagcttaatttggcttgctgtgattgtagatgaagctgagtgttggacgtgctcgaaatgctattttaatttgagagaagaagatgttgatgagttaacgcgcgtctcaatattttgttggccagtgttacgattttcgaatgttaagattgggctaaaaagggaaataaaaatgtctaaaattatggatctcggttatggaaaaccagaaatatacgtcaaaacccgaacattcggttcgattaaacgataaa

SEQ ID NO: 46259 - DNA, 524 bp, Arabidopsis thaliana landsberg
  unsure (1)..(524): unsure at all n locations
gcaagttcctttggtacattcttttattagtcttggatagttttgtgtgtttctggttaagacattgttcttctccattgccttcactttgagttcacataatttgacttccttttcttctatatgcaggagctgcaggtgactcatcgaaatgcagtgaaatgagtgttgatgagaagagacagcttgtttatgaactgtcgaagcaatcacatctagctgctgaggtcttgcaggcatggagccgccaagagattctacagatcttatgcgcagaaatgggaaaagaaaggaagnnnnnnnnnnnnnnnnnnnnnnnnnnnnnnnnnncccttttgaaaattgtatctgagaaaaactctggagagtgtgaagggaagaagagagattctgattgtttgcctattcagagaaacactaagagacaaaggaaggttgataatccttctcggtatgtgattccagcaaccaacattgtaacaagcaacaatgcctcagggagctgcagctcggttaatactaaa

SEQ ID NO: 46260 - DNA, 709 bp, Arabidopsis thaliana landsberg
catgtttatgtatatacatgatcgtgaagcaaaatgcgctgtcatgtctcttcagtgtaatcgatcaatgtaagcaacatataagtatcactttttttaaccctaaatgattcccacgttggcagcaacctgacatcaaatttaattatcttgctttctttctcttctcaagtgtatatccaaagtcatgtatatcttctctctcaatacgctttaaattttctattttatctggtttcgacttggactataagattttggcaactaaaaggagattaaaaatagtctctttaattcggtctgaaccgaccataatctctcttaatgattttaaacattttggtagttcttttcctaattaaaagagtcaatcttcatcttgtatatttgttgtatacgtagttgatatttgccatgcaaagaaaagaagatgcaaaatattgaaccacttttcttgtgactaattattgtatttgttggacgaggattaatttattaccaataagtaagggacatatgaaaaaaaaaaaaataaagaaataatggtggtgctgcaaagcttatcatttgagatataaataacattcagaagctaaatatataataataatatttttactaattttacaattaccaatttgcattcaagtcgcttctctatttatacatctccttctccaatccaacagaacacacacatacacttaca

SEQ ID NO: 46261 - DNA, 621 bp, Arabidopsis thaliana landsberg
  unsure (1)..(621): unsure at all n locations
gtttctcacatcctggagcgggacaaatcggacaatcgagcgaccatgtgttagttcaagtcgaaggcgcacgcccacctgcagccatgccacgcgtcgacgacccgagacagcaaggctatgttccacatcctcgggagtttggttttggnggagtcatttccaaacccaactcccgaacaatggtacacatgatcaggctcccttccatcaccatgtaccattttagtaccatgaggaatatgcgcctgcgatgaatcagacgtactgggattttttggggggttatggtcagggtccgccaagtttgagttccttgggcaatcttccgaagttgaactttccgatgtttgatggagagaaccctaagctgtggcaaccctaatgtgaggcctatttcacatgtacacagtggatcctagtgtgtgggttcaggttgcatatatgcagtttaacggtccagctgcgaggtggttacagtctatagagttcaggctttcacacatttcttggggggaatttttccactaattcaggataggtttccaaaaatcaacacaatccttgctcagacgactgttcatacctatagatggcactgtgtcgcttatgtggaggagt

SEQ ID NO: 46262 - DNA, 419 bp, Arabidopsis thaliana landsberg
taaacagattcttcgggaaaaagtactaaatttaaaaagcaaaacaaccactcaatgtatattttgattccagatatatgatgatgggtcaacattttcaagcccatctatgcagcaaaccatacacctacacctatgttgacaactgtgatggattattcattacactcaggagtgttggtgtggaatgactgaaaaaacagaaaactcaaccctgaatcagacaccctgtcacttctacacttatataaactgacctattaaaccatggaccaagtaactccaactaaatattagatatccaaaaaccgttacatgtaaccctgaacctcgatctctctaattctaatgaaatcagaaaccatagcttgccactgaccaaataaacccatggcggctaatatcttcgtttatgttct

SEQ ID NO: 46263 - DNA, 903 bp, Arabidopsis thaliana landsberg
gttttgttgaaaattagtgttagtttatcacaaattacttcaaatgctcgattgaatacaccatgctcgatgaatagaccattggtaaagtttgaagactcaattcctccataaatttgtttttacaattttggtgcatttgaataaaaatggtatcatggatcagaaaatgaaaagcgagtaaccatcttgatataatccaataaaaacgtattggtagaaacgtaaacttttgttcccaaaaagaacacaatgtaaaaatgtgaacctaaaaaaacataacaaaaaagagcttcgcatctacaaaaatttacactagtatatgttgtaagaacttgtttaaaacctaaacgcttcaccctttaatccatctttcactaaatccatgacttgctttgcctcaacacaaaggatgaacatacaactcattggcttgtttcaaatcaaaattttcttctaaagatgcaccggtttcgattgtcttgtcaatgatttggtgtgaatcgactggtttctgcagcatggatgctcctttgaacctcaccatttggtagcatatctttatatacttactgagctgtagcaacgaaggatttaattgttgtcagattctcttagaacaaatttcaaaaactacacaattcacaaacgagtcaaagtcatcgtttttacctgttcaggtgcaagttttctgaacccaaatttgttcatccataagggctctgcctcttcagctgctggaaccacgatgctttcaacattcagggatgagagtagcttctcaatgcaggaaaagagcaattgaaagtagccctgttttatataaaaccccatgaaaccttaagtcaatcacgaaacggtatttatcttctagatcccgaatttcaagagacaagaagacat

SEQ ID NO: 46264 - DNA, 755 bp, Arabidopsis thaliana landsberg
ttcctgaggtttagtttatgacttcacgtagaaagaagtagaagagtttaacataccgttggattacatcaaggtaggactctgcacgagggtatcggtatcgtaatttgtccttttttcgagatctgcagtcatatgcaccacaagatgaggtagagaagtctgagagtttattttctgttctacgagggtatagctgctagtaacacttttttacattacatatacggatttgatcaagtcacttactcgtattcttctggcatgttcttctttacctcttcatatgtcatcccatcacaaactccagcattgatctcgtccagggcacgccattgcacctaagatgaaaatatgagaaatcgatttcctcgcaacaaaatattatacacctcaagagtcagaagacattccgacagtaggtaaacaccaaccttggggaatccgacaatggaacgtgctgttaggtgtgttctctgaagtgaactggtccaaatctgggataaacaaaatcaatcgatattagcgtatgattaagaattttatgattccaaatcaaccaagtacggaactgactgatcccttgagaaagggaaccatgccaaaaaggcttcaaggatgcgtttaatgtgtgggatggtgaactaatactaaattgatagcctgtatcaacccagaattaatagtctcctgaggtccagcgacattttctataattgagtcctctgagcatacggtagagatatgtgtgtcga

SEQ ID NO: 46265 - DNA, 624 bp, Arabidopsis thaliana landsberg
  unsure (1)..(624): unsure at all n locations
acaactttatcacttcaacaaaggaaaaaagaacttgatcactttggtgaaagtgaccatggagttaaaaaaaggggaaaacgctttcatgcatataaagtaccttcagctcaaatctctttgtctgttcctctatctgcgtatgtcaggatggagaaaaaaaataacaaattgtgaagacaccgaggttttagccatttagcttctttaaatgaggactagtagtaatttaagccaagtttgccatagtgaccttgagatcatgggggccaaaagcatcccttatnnnnnnnnnnnnnnnnnnnnnnnnnnnnnnnnnnnnnnnnnnnnnnnnnnnnnaatgtctgcactggtgtgcaacaacctgcatgcaacagacgaacttgcccatgtatcagatgaacttggccacaatcctaaaagctgctctgatacgaaactgcaaggcaaactctgaagcaacgtttgcaatgtggtcgtgtgatcacaaccagctggtagagctcggcggcgacggtcttgttgcagatgaactcgttgaggacattgggccggtacttgtccgccaaacgtacttgtcgtcggccacacgggcaatgcggcggagtcgcgaggggcgagggg

SEQ ID NO: 46266 - DNA, 664 bp, Arabidopsis thaliana landsberg
ttgtttttgattttattattggtaataaaagtgttttataaatgttgatggatgtaacctttttttacatgtgaatcctagagatgatttattagtggaaaaactaattactagttagatagacctaacctaaagaagctaaccaataattgaacatatttagaaaagcttttatgatcgttgatggtgtaggtagatccggcacttacttatttaacatgacagcatttaaaggaaattttgtcttcttgaactataatttcaagtttataagagaagaaggaaaatttgtttagttaaaggattttatgcattaatttttaaacgaacgagaaacaaagagtgtttaccagccatacacaaaatttgactatatgtttaatctagagctcacaaaccgaatcagttggaaccggaagctaatacgaagttaccaaccaaccaataattgggaaacaagtttcaagtgtgtgcacataaatttattgaaataacaaatcgagaaactagtgtttgttacatgatgagaaatatggcgcccacagatttaatgctaatatttttgtcattaaaaaagagaattattttgctaagagttcattttcttaggtttctcttagttttaaacttttgttggcaaataacatacatgttaaatgtgttt

SEQ ID NO: 46267 - DNA, 511 bp, Arabidopsis thaliana landsberg
accgggtgtgggcggggtgctgacgaggaacacggtgaaggagaccgggcgggatgcttcgaccggatcggtgtcttcagatgccgtcccggtgccgtgtccccgagatggtgtacgcgaccgccccgtcgggtatctggccgggggcggcctgctcgacggcggtctcccacgcctccgggacgaacacctcatcgatggtcagccactgccgagtcgcgtaggtgcgcagctgcgcccacgtatcgttcgtcggcaggtaggcgcggacatcaccgacgaaggcgtcggcctcgctgccgtgcgcggcatccgcgagcacctgcgcatagtccgacggcgtaagcccggtcgtggtgtcccaagtgaacagtgcctctgcaactgctcgggcgaacgcttccggcccaaggtgctggtccacaggctccagctctgcgcccgaggtcggggccggtgtcacgggcgcggtggtggaaggccgctcgctccgtgccgggtccgacggggc

SEQ ID NO: 46268 - DNA, 595 bp, Arabidopsis thaliana landsberg
ttaagaacattccttaatcaatgggatctaaaaaagtcacttgcctaagaaagtcaccgaaactttacattcaaagtaactttatcctcttctcagcttttcacattatgaacctcccgtgggaacaaagacatttatacccttacgtgagcttccaagaagaaaccaacaatttttaagatttttccccattacatgtagattagttggcttcaagtttctatggatgttccttctcggaaatccataattctcttcctttatatataaaacttactcacaacacaaaacccatctctcaaaacaatcaatttctctcaaactgttttactttttcttcttttgtaatggcatctcctaaatcctcaacaagaccaaaccaagaaaaccaagaacctcagttccaagatttcttcccaacaatggcaggaaaactcggtggagaaggtctgatcgaagagatttgcaaagggttcgagcttcttatggacaaagacaaaggagtcatcacattcgagagcttacgaagaaacgcatcgacggttcttggacttcgagatctaacggacgacgatgttcgatttatgatcaacga

SEQ ID NO: 46269 - DNA, 461 bp, Arabidopsis thaliana landsberg
aaatacctgcggaggatcatatactctacgctgactctatccgtctcatccgattttttttttcaattccttccccttcttcttccggtggaaagaatgtcaaaaacggattccgaatcgcgtcaacatctgctttaccactctgctcattttctgataacggtagaggatgctgcttgcataatagcttaatctacatctacgccacgattgctgcatactcaacagcggagacatcttctcgtgagcgaaatctaattctattagcgccacgaacagcagattcgcgacatatagagaaaccacgaacggcagaggggcttatggttacatgaaattgacacttcgatactttgtcccacgctctaaaatagatacattgtcgcacatgaccggagctactaatcaacgacgacgacgaccacgctgtgtgtataggaagcgactcacatggctgacag

SEQ ID NO: 46270 - DNA, 624 bp, Arabidopsis thaliana landsberg
tgcatgtgcccttataaacacgacgaacgcttacaaaatggagtttactgaacgctgcagcatgtgctttcatatgctccacatgtggtttcttggacttctaagtggtggataagagggactgaaagagagtagtttacatccgggatgcacagattttttttttcccccttcggaccggctgccgctggtgacaccccaactaacagcatttacatctagacgagacgacccgcagaaccaattaacaaatcgctaatcctccagaacgggcagcacatacggccaacgcgaaacggatgtgccgtgcaattgtaaccgttaattaacaaatctgctgctggagatgttggttaggcacgcagctgcttgcaagttgcgtgtttcagcaaaagggcgcttttaatttgctctactggtcgtagattgcaactgcaaggcatggaatgcgttgcgtcgctctgtttgttgtgtggtgtggtgtggtgtggtggattggatggagtaaaacgcagcggtccacctacaacttaatactgctgtcagtgtcagactgtcaggcatgtatactgctgctactcgtgcttaactagtatatatgtttggtgtagtagaccgtagatc

SEQ ID NO: 46271 - DNA, 486 bp, Arabidopsis thaliana landsberg
tgatgacgtatctcatacaaaacttttcttccaggactttccatgatcaatcgagatcgatcctcacaccagtttctaggagaaggagatctaattagcaggagagagagagaatcaatatatttttcttcacaccctaaccccaaaacatcagcactctcatcgatttaaccataaagtttgaattaaacccttgactaattacataattaattagagcatggagatgaattggaaggtgtgagacaagatttgatgacatacctaagcacgatttggtaatacgctcggagagagagatatagagatcggcggcgaattgagaagagagaacgcagaatttactgccgtggagaagatccgacagtgcgacctccgatggtggtgactgtgatgaacaaatttcacgaggaaggagacgaccggtgaatgtgaacttcgccgacgagcagagaaagtgttaaggcgttatagatctttaattgg

SEQ ID NO: 46272 - DNA, 703 bp, Arabidopsis thaliana landsberg
cggcctaaaaagtatcattaaaaataaacataattgatctaattctattaaaaagatcatagaatctgattgtgttctgctgaggttttatttggttatgtagaaaagttctccttatgttacaccatggtctgtccgtgacgttgtttacaaacatgttccttatattttatggggtttgtcatatacgtcgatagagttcgattttaactcaaccgtatcgcccacaagtttagagctctcttggtggattcattgttacacacttacattagttccaagatgctaaatgagatgagtgaaatttgtctaattcaaatcagggtcaaaacgactacgaaacaaacaaaatgtggataaacgatgttggcgtttgattgtttttcttcctttgtgagtaatggatctgattcattctctatattttctttttctttctcttttgctagattcactaattctcttattttaggaatcatatttccaattaagacttaaaatatggcttcaacaacattgtgagtccaatcggtttggcttaggaaaatgatatattgggatggctaatggttacagcttgatcatagcaaccacacataaataacgaggttttttttattaggtgacatcactgatacaaaaatttgagtggacgtctacaatatatcaatccttgtgttcatcatcttcaccttcagaatct

SEQ ID NO: 46273 - DNA, 667 bp, Arabidopsis thaliana landsberg
tttttattgcccttttaaaaaatattttgaaaaataacattgttggctagtgatttacatttacaatgtgtattttttttctatgggtataaccgtatagcatagcctacagggaagagatcgattcttttcaagagtctgatttttgttttttttacttcgtacgttgaccacccataaacatctttaacggcaaaaaaataatacacggaatctatgggccatgaggattaatttgggttttggcctaagattcaaaattgttaccagaaaaaaatatattaagtagtcataatttacaacttacacggactaaataaattatatcaaacaaaaaccataaaattgacataatgtatattaatcactaatgttcttttacttcaaataaatgatgtaaagatttttaaaggcatatcaaatcacttagctatcgctttttttatcccttacagaaatgacattagtatccacaagtgatgaataattgaaatcacttttgtatgttcatccttggtcaatttcaagcagacttgtgcgttcggaacaaggtttctatgcaaaaggctcaaaatggagttcaatacttcaattagtctcctgatctggttttcacatcaatactcaactagttcgtcttgattttgtaggagataaaattagcagc

SEQ ID NO: 46274 - DNA, 416 bp, Arabidopsis thaliana landsberg
aaaaacctgcacacgcttacacgcgaaatggcgaaacaattattgggagaggatttggttatctggattttgatatgctcatagacaaggggccggacacggatacacccacgccatggcaccaggactgcgcttactggataaccatgcctgatagaagggccgcaagctgctgggtggcattggatgatgcagttatcgataatggttgtatgtggtacgtagcaggctcgcacctgcaaccggtacgcaaacaccatcctgcaggcaaaggcggcgcattgaaatgcgaggttgatgaggcagaaggaaccccggtacagatcaaagcaggttcctgtatctggcatcacggcgctaccctgcattacagccgcggcaataccacggatatgcggcgcagggcgtatattacc

SEQ ID NO: 46275 - DNA, 621 bp, Arabidopsis thaliana landsberg
aactaccaaattcaaattaaaagttcgatactgaaactaaaaattgcaagaagacaattaactgaaaactttaaagttagaattcaaccaaacacattaatcagacgacaagtgaacaactcaattattcaagaacaaccgtgaccaatacgtcatatagtccaagtaaacaaatgatatatatattaagatcatgttaattttcattggcaaggaatcctgaacctttgagaaattatcctttctgaattttatatattgagtagattaattatccctttcgtattttttgtttcctgtgaaagaaacacaattatgatggttatctctcgagatcaattggttaaaattgcagctcaaaaatggaaattacgaaagggtctgacaattattggtgaggtgatttttttggaatgaagctgttaacgatttgactgaggggaaaactacaacaaaaagtaataaagaaggcttgttatgtccaaaaatagtactgtccagaagtggggcccatgggatatgcctattggagtgggctttctgtgaccttttacaccaccacgtaggacctacgagccgagtgccaacggtggagaaagagaaggtcgttgtcgttgagaa

SEQ ID NO: 46276 - DNA, 135 bp, Arabidopsis thaliana landsberg
tgaatgcttcaagtgtggccgggttgggcactgtgcccgtgattgtgatgctgctggtggtggtcgtgaaggacctgttggtggttgttcttcacgtgctagtgcgtatggaggatctgatggacgtgttgaccg

SEQ ID NO: 46277 - DNA, 782 bp, Arabidopsis thaliana landsberg
  unsure (1)..(782): unsure at all n locations
cagacacaagaaggcagttttgagcttatttccctagacggattaaaaagtggttatgtgaaggactcatttttcccatttggcttatcatggaacatagtgcaatcaaagaagaagagatcattagcaatgatttattatgaaaaaaaggtgatatcaaagaggtactttctttggcttctattttcgttttgcgataatccatgaattttagaagggttgacttgtttagttttggaggtgtttcttgattagtaattttttgtgatgtatgatgaattatgacggtattaatgattcatagatagttcttttggtgatatatattgttgagccgtgaatgatcaaatcgtatgaacacatccaattaatcttcgagtcatttttctgaaatggaccaaagatatatagttgtatgcaaaatgtgattgttagtagaaaaaagtaattaatgtcaatgactcttattgatcagtatttgactttttcttatttctttttcttcataattttccatttgaatacaggaatctgatatatccgaaggtacgcaaaagatggaactacaacaattgtgtcaaaatcgaaaactatattatataattttcctttcttcataaaagctctacaccaatattttttttttaaaaataagaattattgttccaatattcgaaaatgttagaaaacattattaataatttgttagatcatcaaatgttcaaacgtaaaaatatcatggctttttaaaaaatntaatatttcttgctactagaaattat

SEQ ID NO: 46278 - DNA, 458 bp, Arabidopsis thaliana landsberg
tctggatatcgtatgcatttacccactccccacctatgttaaatgctgcctggacagattaaacacataagttatttgatttctcatatgatcaaatcaacaatctaacaatacaataattgaccaaagaattcaaaccttcaagctcattaatgtgcctgttgtctcttcaccaaatccatatactatgtattcctgtaagagcacacaacctttagaccataataataacaaaagaacatttaaatatatgtctggcgactaatatgcttacgtgcatcaccaaagcattatgtatgttgatccagaacgcaagcttctcttcccgagcgattcttgccagatcaactttctcgagcttttgaactaatgatctgcagataagttataaaaagagtaagccactttataatgcaagaattcttacgcattaccaacgtgttagccatagtggtaat

SEQ ID NO: 46279 - DNA, 699 bp, Arabidopsis thaliana landsberg
gtggacagatgctctgctgcatcaaaaaattcaggggtcatgttttttaacacatattgggcaccaccggcctggttttctttttgatgcaccagttctttacttattcccactatttcacacattttatccagcacatccattcccttacttactacatagttatatccgaggtaatgcctggtatcggtcacataccaattgtgtccttcaatcatttcatgcaggtattccgggaaggtggtaaataaaatatcgcagtcatggtaaaagactgttttgtggatggtgtccacttctgcaaaatgctgttttagcgcgttaaaccggatagaactgatataagaggggtttaccctagtatcttcatagtaaaaaaactctgcaatcccttcaaatgtgtcatcaagttttaagataagctccacttctttcggctgtgagggcaatgacttgttatacgaccaaacacaatggatgtcaaaatgttcgtgtaatcttagtgctttaaagttcgtgagcattacctctacctgccaggcataatagatggtacagggttgtacacatataaacgttataggacttttcattttatgggtttttttaaactacacaacaattagcaaagcacctgactcgttgcattgcctgagctgtctacattaccgatgaccacagtaccgggaataacagtaa

SEQ ID NO: 46280 - DNA, 815 bp, Arabidopsis thaliana landsberg
acatgaattcgaccatcaacttcggtagcggttgttgctactatcattaaaaatatggccattgactcatttacaattttcttttcaaacgtcatttttttcttctagtaatgtattttttttttctttttctttttcctttgaatattctggctgttgaatatggtttaactattagtgtatttatatgttaagccaagcttccaagtatagtaaattactaattaagacaacttgttaaaagtttcttgtggatggtatttgaatatcgcttttattgttaattatatacgtttagaaatagaaaaattgatggctcaaaattttaacatttttggaatttttgtttgtaaatgggcaacaaaacttttttggcctttaggcaggcctatatatgaaatttgaggacttgtttttggtctacacagagtgtgggtgtatgaaatttggttaacaaaaacaaaaaaaatacgtagatacaaatataaacttagtgaaagtgttttttatgttatgaacccaacttttattaacatatatatgaattttgataataaataataatatttgtgataaccattatgggtatgaatgaatatagatgttaatttttttcagttggatctctcaaaaatttctgattttcttataaacaattgcaaaaccttaccaaatatgcaaatacatcgctcgaagtcaaaactacgtcattttgacttgtgacttgtgagattagttcaacacgccatcgtttctgaatatatatagatgactatgatgggcccaagtaatgagtgattgggcttaataaagac

SEQ ID NO: 46281 - DNA, 646 bp, Arabidopsis thaliana landsberg
ggtatgtttggaggaaggggactagctggtgtttcagctgctcaaagtgcaccatttcctccttttggaatgattcctggagttcctaatggtggcttggatggtttccatcacttacaagggtcccttagaccgcccttaaatgcgccacttaacatgggtattcctcggcaacgatgcagagactttgaggaacgtggtttctgcctcagaggggacatgtgtccaatggagcatggaatgaatcgtattgttgttgacgatgttcaggtatgtttcttgaattaatttttgcttcaatgggattagacttatctcgaaaaacacaataatacctataggttctactggatatttgataactatttgcatgatcctcctttgtgctggaaatctcagcacatcgatgtttcttgcatatattgctagtagcatgaccactttatccctttcaactgttcttgttagtgacattaaattaaattattatgttttcagtgttagctgtacctggcatggctctcagaaacagtcaaactatattctgattcttagatgcatgttaatgaaatcttggttgtcgaattgctagtactctgtattgaaggataaatttcttatgactactattttattacactattct

SEQ ID NO: 46282 - DNA, 617 bp, Arabidopsis thaliana landsberg
  unsure (1)..(617): unsure at all n locations
acgattgnnnnnnnnnnnnnnnnnnnnnnnnnnnntcatggactgttatggaccatcctttacgctctttcccaggacgttctctctcactcccgaacgagtttagccagctccgtgaaacacttgtctcagtcggcaatgatctgatcaatcaaacaaaacaccattaatcaactttattttaatctaatcatattaattccctttaaagagtaaaagtggttaaatatcataagagtaaagttttatactaagaataaaagtggataaatatcatagactaaagtttatactatgaatgaataaaagtggataaatatcataagagtaaagttttttcaatagatacgtactaaagcaaaaattaaaaacaaggaatgtgatttcagtatttcgcactaatctttggcagtggatctaattaaagcgtatatttcgatttgattcctcgggaaaataacataattagaaataaaataaaaaattgatatcacaatttccgataattgtggtgaacattgatttgatttgattggctggaaaactaaccttgatctctgagtacgatcactggtgnnnnnnnnnnnnnnnnnnnnnnnnnnnnnnnnnnntggata

SEQ ID NO: 46283 - DNA, 521 bp, Arabidopsis thaliana landsberg
  unsure (1)..(521): unsure at all n locations
ctgcgatagtaggatatcagcacaagagacaactccgggacaaacattctcgagggcggttttgatatcatcgatcacttcgaatccatcaagagaacccgcgttttggaaagcctccttttcaccctctaccccatccgctggagcagcgtccaatagtaccgaaccatcgcacccctgtgttcacaaactatgacttcaatattttatgcatatctaacttttcaaattaaagaaacctaattccactaacaaaataaacctaattatgttttcttgacgaagactctatacttttcttagttaacgattagcgaaggaaaaaaaaggagatattttaatttgggttaagaaagaccgttactttctccatatgaaaccattaattaagacagaatctatagtcaaacatatatataatcaaacatcaaaaagaaattaacgtcaaatttgtccttgaaaaatgattccactaatgcaaactctannnnnnnnnnnnnnnnnnnnnnnnnnnnnctttt

SEQ ID NO: 46284 - DNA, 512 bp, Arabidopsis thaliana landsberg
tgcgacgcaatttcgggtcacatgcatacattcaaattaaatctagtagtctattatctatatatacacatgtctgtgtatgtgagtactgactactgagtacatgtatatcaaattgcgttaaatgtatatctttttgatgacgaacgtgtagctttattaaatcggctccatacctcacagataaatgatttcatcagaaatcaacttaacgtgtgtctcttccatcccagcacatttccctcaattattactgaaaggttatttaaaataacagatttgtgttgcaagtgtcatttatagctgtaaaaattatttcaaagcagtaaattaataaagaaagatgttttagaaaaagctacaattcaactgtttagttaggatttcatcatttctattccaggatattataagagattaatatatgttcatatgagaatattaagtctgctagactaatatacaatcacaccattggatgtctgtagctggtgttgtgtgtgtgtgtgtgt

SEQ ID NO: 46285 - DNA, 559 bp, Arabidopsis thaliana landsberg
cataaaagggcactacgtgatgctaaaccataaaatagcaccgcgagtccacgacgcgatatggatttgtacggtttcgccatctggttataattataaggatgaactactactccagccttacagctgcgcaatagtcgagagtgccaacacgtactgtatcctcccggtacatgtttcgcgttcagccgcgcgttccggcaagctcccgcatcttgtagggttcgcgcgttcatgcacgtgggccggacaccggcgatgtggctcccggcctgggaaacttttgttccgcgtttcatcataggcccatgccaacttttgttccaacgctattaggccctatgagcggcggacgttggatcggcagtccatcacaaaaataagtatagacccacctacaggtccatcagataaagttttagttatattattggtctacgggtggggtctatactcatttttatgagaggctacaaacagcctgatttacagccggtctgcagcaaatttttttcccatcaaccgctttacttgcacgaatgtttactaatctaattag

SEQ ID NO: 46286 - DNA, 419 bp, Arabidopsis thaliana landsberg
taaaattttgttgccgcatattttttttttcgcataacataataacataattcttttttattttgtttcccattacaacataatttttttttgtagcttaatttgttaacatgagttggaaaaaagaaaaagtgttaaaccaaaaaaatataataatgagaagaaaaaataggaacataaaagtagaaaccagaatataacacaaaataatgattactcttagcactttgaatataattttcgatcttagtttctaaaattttattcattcaattgttgaacccatggtatattgatctttaattcagatttctaattaagtgctgagtgaaagaagttagaaacgattcatacaaaaaataataataaaaagaaatagaaattgtcgacaaattaaaaaaaaaaaaaaaaaattgaag

SEQ ID NO: 46287 - DNA, 769 bp, Arabidopsis thaliana landsberg
atactacaagaatgctctacgaataatcggggggtcaaattatatgacaatagacaaccgtatcttggaaaacatgaggatagatcttgctgagctgcttcatttcgttggaaggtaaaagtttttccactaatcttcttcctgtgactgaggaacttaattaagccactaacttttgctttgcgcacaggggagatgaaggacgagagttactagaacaatgcttattaataaatgagagattcaaagggaaaaaccatcctagcatggctacacatcttataaaccttgcagcatcttattcgcgttccaagaattatgtggaggctgaacgattgctgagaacttgtttgaacatcatggaggaatcagttggttcagaggatcagtccataaccttcccaatgctaaatcttgcagtcactctttctcaactgaatcgtgatgaggaagccgagcaaatagccttaaaggttctacgcatccgtgagaacgcatttggcaaagactctctccctgttggtataataactctcttccataatatcatcaatgaaatttcttgtttggattgaagaagtttcaaagtttgttttttcgaagtgacggtaaaatctacaaattccatacgcaggagaggcgctggactgtttggtatcgatccaagcgagactaggaagagatgatggagaaatattgggtttgctgaaaagggttatgatgatccaagagaaagagtttggtccttcagctcaagaactcattgtta

SEQ ID NO: 46288 - DNA, 602 bp, Arabidopsis thaliana landsberg
gtaatgtcttgaattttgattatgattgtgttgaatttatcacgccttagttatatgtagttgttcattgctatttctggctctccctcttgataaggatcttggtgtttctctaatgctgcctcttgctgtttggtgcgatatagataggcattcgggtctgaaatctaacctatacattgacttcgatcttcgatttatggtttcatttcaatagcttttctcgggttttagttttactgaaatataacaattgaatgatcccatgagttttgcttgttgtgtgatgtgttctcggttccttttgtttgtaatttcaattctatttatgtcttgtgaaagagctttataatggtttaattggatgagagacaaataatatacattctctatggcacacagtaactgttgatcttatattacacatgtaagataatgtcggaccagaaatgtcaacatctttcgagaagctttgtgtggcagtaattcagatatatgttcactctgtgacgcaagcgtttaatatcttggcactgaaatcgttgtcgggatactgagagtttgacatctggaacattaggattcctttggagttcgaaaat

SEQ ID NO: 46289 - DNA, 642 bp, Arabidopsis thaliana landsberg
  unsure (1)..(642): unsure at all n locations
tgtgttatcgtggattggttttactaactagaatcagattctcaatcttggtcggctcttttttaaccattcaagaaataaaagtatcaatgacatgttttacgtcatgtgctatataggtaattaacggttttagtttcacacgttagttgtttattagggaaaaagtacaatatataatatagtttgtataaaattaaaacatgtaagaccaatttaacaattcgattccttgtggacactatttacatattctttgtcattaaatatgctttctgaattcttaaagcatctcaaaaccggcaaaagccatccttctcttcatatttatcctcctttccaaattattcttattccctttcaccaaaaatctctctttttatttctctcggaaaaaagatttattcctctccaagtccaattattctcctcaaatgttattctaaattttgcacccaaaaaatgatattcgaaaatagtacactacttcaccacgtcacttncgtatagggtatattggtttatatgaaaaccttatgttttttatgcattacnaaattcgtagatcataatgtatacttaaatcatactagaatttatgttgttgcaatcatgtcattttaaatctatcaaatatatgta

SEQ ID NO: 46290 - DNA, 1031 bp, Arabidopsis thaliana landsberg
gattattgattggttctaattaagtatgcaacaaatatcttatggttatttcattcaatttgaaaaaataaactgtataagtttatgtattttaacaattaattactgagtaaagactataaatatgatcctatatataaaaaagttaatttgtgttgtttcgtataaataaatgatatatcgaacaataaaaaagcattccactattgtgcataatcagacacatgaaaacagaaataacagattctaatagatattttaaattttttgatttaaacgcttaagccaaaaatcctctagatctcggttagatgttttaggcaataggcgatggatcaccgttcgcttagcatttatagcggtgaatcaccgttagcttaacatctagcatttgtttggaacatattaatcctatcattacaaaaaaaattggtaaaagaaatttactatcaaatttttactattcatatttggtaggaaattagtagaaaattccctacaaaatagttgtaaaaatttggtaaaaaatatgaaagatgcattaatttgttttaaggtatagaaataacatgttaatttttcttacgtttatgatttatcgagtgtttttcataaaaaaaaagctaagaaggttgtttattataattccagtaaactatcgtaattgactaattgttttatttcgctttaagaaaaaaaacaatatgtttggattttttttccgaattttgtatttttttacctgcatctgcaaaataacccaacttacctgaattgtcagtttgaattttctcattgaaatttcagaaattttttttttttttttgtttaggttaatactctttaaactcaaaatgggcctcccactagaattttaatttgtcacaacattttttttttttaccccttttacttatttaaataccccccccaaaattttttatggttggcttcttggtcgctttccacttttctacaataaggctttaaaagaaattgttttttttttttttttaaaactctaatttttt

SEQ ID NO: 46291 - DNA, 490 bp, Arabidopsis thaliana landsberg
gacagtaatgacagtgcatcacacatttctctattgtctcagaaaccatagtcctaaggacaggggttatttaatcaacatgtgctccccatccagctacttgaggtttggtttttagatgaacaattgacatgaagttttacctgaatatgattgctggctcatgagagacagttgatggatttgtacagtctgcagagacaaagttaacagatcctgtatgtgagctggaattaacatcatcaggcaaaatcggttcttccacggacaaagactgataaccgagtgctccgcacgtggctaacttcttgtcttctgcctttttgctggaaggctcaattcttagatttctttactcagataagttcttttctatttcccaactcaataatcttgtcatacttgcttgaacgtgctgcttacttcaatttcttaacccatgataggtaagaagctttattaagctcggaatccagacttgcagaagatg

SEQ ID NO: 46292 - DNA, 564 bp, Arabidopsis thaliana landsberg
cttttgtgccatttgacctcatttctcttaaatctatagagttacaacttataacttacaaaactgttgacttagttttacttggattcatctaacaatatgctttttttagattccttaataaaaaagatttgtatatcttaaagaaaaaagtaggcgaaaaacactttttaaaggagtgaaattaattgaaaatcggtaatgatattggtggtgataaaagtttggaaattgattttgggatcaccatcactaagtggttttactagtgaatttttagtgttaaatttactactcaaagataaatttattgatatgagtgggaaaaaaaagtccaaaacaaaagtatgtatatgatatagatataataaatatgtgtgtttacttggtttgaactgcacttgtatattgacaataaatttatggtataagaatgcaaatttttatgttttttacttttttgatgataaaaaagaatgtaaattattcttttggaattaaaaaagaattgggtattataatcaggctcttcgctcgctattattgaaggttgatcttaaaatc

SEQ ID NO: 46293 - DNA, 1969 bp, Arabidopsis thaliana landsberg
tagactctagaggatcataaaactggtagagttcttatacaagattagacaaaaacacagattagttggttttgaattatacgttgatactcaatgtgaaaataatgaaaaacatcttagggttgggatcaatgggacaatgaacttttaagttagatctcccacgatcttgtaacaactaatttgtcagtacatgtttttttctttttttcttaactaataattccaacctaaaatttgaatctaagagattagtcaattgtttgaaatattctccattcgacaccttttctcacgaatcattattaaaacgtaacaatacaccacatttaggagatatataaaatgaaaaactggaccttataaagaggaaaaagaatcccccatgtgcatgtgctatacagataacatttattgctttgccaataaatttcagacccttgcttaactgtccatctaaataaaatctataaaatatcattagaatggcctcctcctaagcaaaaccatcccaaaaacttaatagccttcaaatgaagactgtatactttgttaagaactacgaattgttagaactattagatacttaagacacatattcacctaggctatgttatgccttaagagatttccactaaaaatcacttaaatagtcctaacgactcatttaaacaggttttatgcacaatttaaacaacatcgattttattgacaactgtgtatactcgtgctgcagtggtacgtagtcatctcaaaactgaagaaaatctataaatataaacattctctagtatctctgtagatcaactcattttggtgcgtttagactgacacaatagtcttaaacttctgtatgccgctcgaacaatatttatgttgtcatcatcaattcgacggtattaagaaactaaactaaacatattcaagcccgcgtatccagattggtgggcttgagagtgtagtttttaagcattttaacactcaacaaaattcgatggctttcaatttaacttcggcccatcgttagggagccccgttcactgaaagacaaacatgttatcacaatctctaattggtaggatcgaaacttcgaaagatttagcgatttttacaaacgccgcgtttcgcgtttattacacaaacgcgaaaaaagcgtcaggaaagattggccccttgcgcactcttgcttttttctggaaacgtctctgaacgaccaactatagatcgtggaaaattcagattccattgcgacgaaaagaaggcggcggattcaaagaacacccaaatacaaatcgaagacggagccttttcagcaatttcgttttattcaacctctggaacaccaatcatctcaaactgattgaatgagaagccctcccccgtctctgctctccctcaccgtcaacgccgccgtcttaaacatctctcgcatcaacgatctctcccatcttcctgatcacatcgtccttgacctcttcgcggtaaaaccccttatctcaatacttggtttgattctggctctgggttttcgaatttagtgtaaagtttgaatttttaggtcatcatcatttgattttgagtgaaagttttaagctttagagaggttagggtttcagaatcgaagtatactactactctatatgctttgtgaggaacagttgctcgtgttattgatatctcttatctgttcttaaatcactgtttgttgttgttgtttttgttttttggctccattacatatgtattgatattgctgttcctaattgattctattgctgtttttgtaatgtaaagaggacattggaagctgggaaattgaatgagagagttctgagactctttatggcatctggaaacgaagaagttctttctgttatcgacgccctcaaaatcaaaatcaacgtttccccgatccttcctactcgtaagttttttagtgttactcttttccccttctgatctttacatg

SEQ ID NO: 46294 - DNA, 625 bp, Arabidopsis thaliana landsberg
attgatgttaggttggcgaatgctggatcaatctggccagtcagtccactggaggataagttcctgcgaatcacaacgttgtttgagatacatgtaacagcaagagcagagcagagaaaagcagagcagttgtgaactgaaaaaattcttacagagcaatggatcttggagaagtattattatcactatggagacattcaagaccttcccaagaattgtccactggaacacatgggtctccttgccagttcttctttactctatacttgaacttaatcttcgtcatggcatcaactaagacaagataaaacaaaatcaaataaagtacagaagaggaaatcttttgagtcagaaagccttaccatcctgttgatctgttggtaactgaaggaactcgttgatttgatagatctctatagcgttgatgatcggtggaagggtcgatacaccagttctctgaaggacaatttcattcatttttctgccaactggatctacagtggagcgtgtgtctgtaaacaaataaaaaggacggaaattctcggcaagtataacgtcatttatgtatatatcgaattctcgtgtctcgtttctttgtagctctcgaacttcagcgaagtgcatg

SEQ ID NO: 46295 - DNA, 523 bp, Arabidopsis thaliana landsberg
agactgctgccggagaagtgtgtttgtttaatctttatcttcttcttttattgatagttgatcaattgtatattgattgaaatattcatgtgtttcaggaatcatacgtggagctggagaatgtaatccgcgctttggcgaaattttactcaaaggcaggtccttctgcaccacttcctgatgaggttaagactgagattttggatgatcttaacaaggctgaagagtttttgcgacatttttgctgtaacatgtttcacccatgttatacatatcaaagtattgaaagcaatagaagaacgcttgaccacaaaaaaaaaaaaaaaaacagaaaagcagcggaagatctgtgagataatagagctctgatatgcaaaactagaatggccccatatatataatcggaacttcatataatacaatggtgtaaaaccctgaatctgggtgaaaaataaatacaggcaaaggcagcaacaacaacaggactctttccacactaatcgagttgaatatgagatcactc

SEQ ID NO: 46296 - DNA, 676 bp, Arabidopsis thaliana landsberg
ttgagtacacgttttatgtttcatgatgatactcatattaataattacaacttattaattacagaagttctactaacgtattttgggacacgttttatgtttcatgatggcttcatttcatgccacttgtttaaaactcagttaattaagaatcatttgaagacttatcataaattgctatgttttaccaaatatatagtataacttttttgcttacgctgtatggtctataatcaaatcaggagtcagattttggtataagaatatatactcaaataaacaaaaagaaagactcaattactgtttagttacgtcaatacgagtgatcagaacttaaaagagaagtcaaatatgtgaaattgaccttagctaagaacttccaaaaaaagaattcaaaccccagtggcaaaatagaagcaaaaattagctttaaaatcaaagcttttctgatcaattttttcttgggactctgcctctctatctctctgcctccgaattttcttttacctttcacatgagtaaagcgactcacaaagacaagtttcaatgaaacaaagaaagttatcataaaataagacaaaacagaacctaaagagacaagacagaaggtacatactacatctctgcgactgagaaacaaattgcttttgctctcttgtcttctcctagaaaatgc

SEQ ID NO: 46297 - DNA, 242 bp, Arabidopsis thaliana landsberg
  unsure (1)..(242): unsure at all n locations
aaaaagccaaanaaaagagggagcctttagaaaaagaaaacaganacacgaaccccncncacgcacaagacacgccgagggacagcagaagaaaaaacngcaaaanccgacccaaaagaacggaagcgacaagacaacaagggggacaaccgnanncagaaacacggaaaaaaagcagnggcccaccaaaacaacaaacgagcccngaaaaagacncaacaaaagacagaaacaaagccact

SEQ ID NO: 46298 - DNA, 412 bp, Arabidopsis thaliana landsberg
atgtgagtgattgggtgatatcgatcttgaggtctacgaatgatgtgaacaatgttatagattcaaagatggcgaaagattttgatgtaaactctgtatggaaagttgtggagcttgcattatcctctgtttcgcagaacgtctctgataggccaaacatgccacatattgttagaggattgaatgagtgtcttcaaagagaagagagtaacaagaactattgatgtcacaacgcaaagggtgtagaataagtcaaggggttggaaacagaaagatgttgaaaacttgggagtgtttatatatttaaatttttgaaaggctttttaaagtttgtgttgctaatgctatatctaaaagcccaaagtaataatgtaatggaatagaaaagaatccataataaataggaaaaaac

SEQ ID NO: 46299 - DNA, 791 bp, Arabidopsis thaliana landsberg
aacatccaaaatctccacagattcaaaagccaatataccataatcttctcaactactaagtttttactgacacacacacacatatgaatcacgactttacaaaggaaaaaccaaaaaacattaaagttggtttctacaagttatctcaatgagtcacgaacaacgcacctgaacgaagcttccgtggtacagaggcatgatccacaccattagtgtctttcaaattctaagttgagagagagagagaaaaaaaggagagaaatttaatgtgaaaaagacttagagataaaggagaaaggtgagaaatttaagggattgtagagagtaatttaggtgtcgtattgatgaagaagttaccttttttggaagcttagatttcttcttagaaacctcgttttctaaatctggagaaggaagagtatcgtagctcatctcttgtttcagtttctcatcagcaaaaccaagttttttcagcattcctttcttagattttgtagaaaacccagatcctaaatccatgagttgaatacaaaacaaaagtgagacaaaaaaaaacagagctaacgacgacaaaaaaagaaagatttttatattttgttggtttctgaaactaaaaagattgaatttttaccagattgttgtttattggaaaatcgattggttgttccacgtctcatcaaatctcgacgacccatttccatcttctttttttcacaccactcaagcaagaggtgaagaaggactaatagagaaggacaaaaaaagactcacttcttcaaacatctctctga

SEQ ID NO: 46300 - DNA, 161 bp, Arabidopsis thaliana landsberg
gaagcgtcgtataacacggaaacgatgcatgcactagtaggtctgtgaccgccatatatcccctatcaccgaacatgcgcgacacagtactatcaggtcagtatatagcgtcggccgacactcgatgtaaaccttccgatgtcccagcgcgatcgtcatag

SEQ ID NO: 46301 - DNA, 487 bp, Arabidopsis thaliana landsberg
gtgacgaaatggtatgtacaaattttatctgcagcttcacgagtgtgcaaggagttcttagttgcttatgtcaaaatacttgggatttgctgggaagtcatgctcaacccgcagctacgagagagaaaaaaaaaaggatctgttagccgtgtatctaagcaagaatgtcaaatggaacatctgcaatattcagtctaaatgacatcatgtgctaagctttatgaaacatatttaaaagtggcaaagtgacacatccagtaatgcaaatgcaaatatattcgaatgacagtcaagcaacaacacaataacccagtcggtagtttttggatcctagaatactttttatgttacaggttcggataatagtaatacaatcttactagttcataaaagaattactgcctctgttacgagttatagtcactgaatctttgtctttgagtcgaataaatctagtttcacctatctgtaagcaacatgtcaagtc

SEQ ID NO: 46302 - DNA, 630 bp, Arabidopsis thaliana landsberg
  unsure (1)..(630): unsure at all n locations
attttgttaaataatacaaacactacctttaattacctgtgctactataaattcaacatccaaaaattttagcatattttttaaaaacataatttatttcagatatttagtaaattctgctatttttaactacttttatttatggttattaatatctgtttatcacagaaattaaactttaactatttatctttacatataaagttattaaaagaaccaaaaacataataaaggagaatttgagtggatacaagttgtaaacttttttaagatcataaacaccatatatccctataaagataaagaatacgacaaacttagatctttttcctccaacgtgatatctagtagtaatgaaaaaacacatgatagttaataaatagatcttgaccctataaaataagtaaagacttttttaaagatagcaaaagtaaactctgtaagaagtctccaatggagaacaatctaactcttccaatgtggcataggcataatttggggatccttcttatatttcgggtaaaacacacactcatgtaaaaatactgcatcactaatcatattacaaacagtacttttctttcattattatagtttagagaaaanaataactcgtttatttatataata

SEQ ID NO: 46303 - DNA, 528 bp, Arabidopsis thaliana landsberg
cttctttttatacaaaaactacgattctgaaaatcttattcaattattaaaaagcaaatgggtttttgtaagattccgctttctacataattcttatataattggcctgagtaaattatagagtaacaaattctcggatatcaaggagagcgacagtgtgggtaaaacaaaatttacgagtgggttcaaactctgaaagtgagtaaaaaagagaacgatgttcacatgtacatgcattttatttcattttgtcaacaatataaattacttgaatttaaatatcctgatgttgatacttcacccatactaatacaaaccactagattatatactttggtcacgtattaatgttttatgtgtacaccaaaacatttatttttgaaacaaagatattaagtagcattaacactcaaattatcagagagagaaaggctaacttcaactatatgtttttctactcaccaaaaaaactagtatatgtttttctgaaaaatatcatctattctataaaaccatatttaataacta

SEQ ID NO: 46304 - DNA, 425 bp, Arabidopsis thaliana landsberg
gaactgtatcaaggtgaagagctcactgatacccactcaccaagaggcacgagaggctacaagagcgcaataaagaaccagaacgagtcacaaaacttcgagtccgtattcaaacaggtgttcagacagctgtcccacatggagagttggatactgagatcgataaggcacacgcagaaggggcaagtgcggcaggccaaaagaacacagggtccaagttgatagaaacgttggacggactaggagctacgcctgtgcgatcgcatgaagaggatgccaatacaccagcagcagctggcatcgttgtcgatgaaactgacacgggtgtacactatcgggaaggcggtcgcgactcaggtaatcacgaacgttaacaagacgacattcagatcttgagatcgaatcacaatgtgaatgaggaagtt

SEQ ID NO: 46305 - DNA, 576 bp, Arabidopsis thaliana landsberg
atctcctttcggtgaacatgagatcatatgtcctcccagcttctaaccagctccagctccagctcggtcctcactcttacttcaatccccaggatattctggttcttaaacaaaattcaaatacataatcttatagggtctcatttagcttattggaagtaatctcaagcctcaaggatataaatattattgtaggaggagctgagagatgcaccgtctaacatgaatatgatgatgatgaatcaacatcctactatgaatgacataccatctttcatggatcttcatcaacaacatgagattcctaaagcaccacccgttaaccgccgtaagatactaattcttctcacttttatgatattaacttctatgctaaccgtgtttataatttggttgtgatgatgaatcgccattaagacatgcatagcttttcttatttaactttcactggatctcgttcaaaccctagcaccattgaattaagtctagaaggagattttttacctttcttttctttgtatactagatggacacgagagattatgattttgtatatttaaaatattcattgatcca

SEQ ID NO: 46306 - DNA, 484 bp, Arabidopsis thaliana landsberg
tttggtttctctgatgctgcagattttctgacacaatgatgcttcctgttcttggtgattagtcacgtgcattatatgtttctcataacatacttctgaatactattttcttaactgcagcgaaaattggagtagatacctcaggatgtgtcgaactagcaaagcatgtcagattgaacaaccctaagctagtgaagtcaggttagatgataatcgggatgcttgattactcctcagatccgaagaaattcaaggtaatgtataactcagggttatagacgtactatcgaaatggcaatatggcatgtaaatgagcactaacgcgtattatgtatgtccaattcataggcactagccaactgtcaagcagatgtgtgccaagagcttggaataccggcagagcagctcgtactatctgtggacatgtcatctgacttatgcccagcagtaagggacatactgtgatctatcagtcttgaagagg

SEQ ID NO: 46307 - DNA, 842 bp, Arabidopsis thaliana landsberg
  unsure (1)..(842): unsure at all n locations
cttactgatcctgccaagttctattgtatcaagattagttcactaattcattgccagaaatacatgtaatatgctcttacctagattcacagatgcaaataggataacgtatataaattcaagtttaagccataactatgcgagatgcatgcatgcatgtccgagagacttaattttaacccatacttctatggaattcatcaaaaatatattcttaaattatgtttcttgtggcatatgtcacatttgtataatcgaacaaaatctacaaagctatgcgggggacaaaaccaactttcaagcttttccaaagttagtggtgacaaagatcctaaaggagacgcataaagatgatttgagcaaattatatataaacttaagactgaaattataattgagatcaaagaaaataaaaatgatttaattagttgaattcaaagagacaaacttaatttccacaaaatctaattgtataatctcagaaaatgccaatgcataactattcccaatgatcatgcagtaaacagcctttataaaagctaaaattacatgtcacaatccaagctctaaaatctgagatcctaattaatatgattgtatatgataaagatttggttgaattgttcatattgagatcattctactaagacccacattgcaatagtttaaaaagtatgaattaaaaacgttaaagtattatgtgtgaggtaatttctattctgagataaccttcttagcctttgatacaatgatggaatctcaatatttctttaggttataaaaatggaggaaaaggttcaatcaactgcttccttgatcaccaatggngaacaaaatctaca

SEQ ID NO: 46308 - DNA, 865 bp, Arabidopsis thaliana landsberg
  unsure (1)..(865): unsure at all n locations
taactatagaaaagtagtctgtgtggatgaaaagttacaccagttcacattatctttgtcaatgttcttgaccaaaatttatggcgaaacgtgactgttgaaaacttgaaaatatttctgatctcttctttccggattaactatatataccctntgtaggttctcccaaaccaaaaggtctaatgcctttttaaccagaagcatgtattctcaactacacatttatatgtcaacaacatgcattctcaaattaaaaccaagtagtgattatcaacgattattagtaccaactaattttagattgcatgtcttaatcctaagaactacacttttaaacaataaatttggcatatactatattatttcaagatgatacaaaaaaggattatttattgtgttgtactaaaagtatcaatgcatgatcatttattgcggtcataccggtcttagtttttccaagcatagtcattataccatacctactacactctcacaataagacatgatatagatgagaagctattttcacgtacagtgtgcgatgttgagactattatatattgatatttcattgtttcaaaaaataatagtatgaaaggccaaatatatatttgattagttaaaaacagaattataatgaatactaaactttgtttttgaactgatgaatactattttatttatgtgcagtttgtatttgttgagagtatgattctaatgaatttgataattagtatcctcttactgcaatagtaagaggtatcctattttgtacaaaaaaactattatgattttgaattaccaatcgaattaaatttaaatcatacaagcgatcaaattaatatttgaatcaaaatttactaat

SEQ ID NO: 46309 - DNA, 387 bp, Arabidopsis thaliana landsberg
tgtcgccacggaaagattcggaaagatgctcgaggtttgaaacgtgcgtcccatgcccatcgcgatgcgccgatggaccgacgcatgcgtgatatcgacgtccttgaacgtcaccttgccgctgtcgggccggtagaagcccgaaagcgcgttgaacagcgtcgactttcctgcgccgttgggcccgatgatcgcctgaatcgatccggcactcaccttcagcgagacgttctcgaccgcacggacgccgccgaaccgtttgaagacgttcgcggccgaaaaaatcacctcgctcacggtgtcgtctttccccccgggagcgtcttctgctgaaacttgggctcgcgcgctttgttcgcgaagccgcttttgtgccttgacagaagg

SEQ ID NO: 46310 - DNA, 585 bp, Arabidopsis thaliana landsberg
tgttgacaagtttgtcctacacgtccaaagttttatataaaagagatcaaagagacaacaagttctcaagtccaaaactaaacactattttgaatggatacttcgccaaggacccgaattgtacctactagacgatccaactcggtcaaattctcctcgacggttaacatttcaacccggcgatcactctcttcctcctcctccaattccctcctattctccggcaactctccggcaactcctctccatccacttggcgtcccattttcatgggaaaagcttcccggtaaacctaaagagttctcgtatcaccggaaaaacgaatcattaagcaacctcttgcctctccctcctcactggagtaaccatagccctaacaccagatgtaagaagaacacgtcccctgcggccatgagagatcctttcacggcggcgttggtagagtgttccaaaggcgctaccacagacggagaacataccggcggcgaatcaaggaaggtcttgaggaagagcaggagcatcgggttactgaatctttactctgcttgtagaagagcttgtgcagtttctgaatccattgtttat

SEQ ID NO: 46311 - DNA, 657 bp, Arabidopsis thaliana landsberg
  unsure (1)..(657): unsure at all n locations
ccccccggtggagtgtagaggatgcctgctatgatctctggttttgttgannnnnnnnnnnnnnnnnnnnnnnnnnnnnnnnnnnnnnctatgcttgaggaaggaattaggcctaactcgtctggactaagtagtgcattgctcggatgcagtgagttatcagcgttacagttagggaggcaaatccatcagatagtgtgtaaatctacattgtgtaatgacataactgcattgacgtctctgattagtatgtactgcaaatgtggagaacttgatgatgcttggaaactctttgaggcgatgaagaagaaagatgttgtggcgtggaatgcgatgatttccgggtatgctcagcacggtaatgcggagaaggctttatgtttgttccgtgagatgagagataataagatcaggccggattggataacgtttgttgcggttttactggcctgtaaccatgctggactagtggatattggaatggcgtatttcgattcgatggtgagagattacggtgtagatctgcggcctgatcactatacgtgtatggttgatccttgggtcgggctgggaactggaggagcattgaactgatacacaatccggttagactcatgctcggctttgggcaccttggggcgtgagatgcacagacgt

SEQ ID NO: 46312 - DNA, 689 bp, Arabidopsis thaliana landsberg
agccaccatcgtatatcattataatataacgtgggaaattaattaatggtttaggaaaatgtatatcttaatattgttaattcttagcgtccttatgtactagctagtatattctagaagatgtcttagaatatatgatctgtgagatcttgcacgttagcttaatccagttcgaatcctatatgcaaagcatacatctatataaataaaatattgtaaatgtcaattatgaagccgtcatattgaaagcgttcacatcatctgttgggaaatcttcaaggtgtgtttcacgtggatgatatatatggatagaccaattcgtggatgtgtccttgatgttagaaaaattggcctttcaacatttcataataagtacttcaaaaatgttaatgtagatttaaaaaaaagttaggagtatactctcccatttctcaactgttcgatgaagagaaggaaagtaagaatgattttttattttattttttgtgcaccggaaagtaagaatgatatttaagaaaatataacttgggaattgcatggattaagtctgggggagccggtttagtgtaatttaatataggtcaactcataaactggatgcatatatatacagtatccaaaaaaaaaaaagatattacgtaatatacacataattcacatctaaaagtaagacattgacgtgacttgac

SEQ ID NO: 46313 - DNA, 963 bp, Arabidopsis thaliana landsberg
ggttacttaattatacattgaagggcgaataagatggaaacttttacttacaaaaaaagagaatttatcagagaccagaaaataaaaacagattaaaaataacctcttttcttcaaggatcagttaaggcccaagggggaattctttcgtaacaagattacttcatcgtcaaccacttttaacattttccaacatacaagtatatttactaattcccaactttagactcttcttatcctaccgtcagatgaatatgtttctaatttaaaagtgtaatgtggtactcaattcaaaaaaaatatgatgatttaacacacaaattaaacacgatcaacttaacaaaatactaatataaatttcatgtacgcaaataaaatgatttcacctatgataacaacattttttttttaacctatgataataatatatacgtaagtaccaaaactgaatcagctgaaaaagacaataagcttaaataatcggttgttatgttaaaagtattattgcgactagcaaaattacttgatagtattatttttgaaataccgattttatagttgaaaaagaactttgaaaacctaaatttttcagttgataaaaaaacacagtcacagcctcaaacttttgtctcttgctcttctttttccatcgatcaaactcttttaactttaatttcgaaacttagtaataagaaaaacatcaaaagtagtttagctcttcaaataattaactaatgattcaagaagtcaaaaaaataaaaacttgaatcatattaccacatggtagaagaagcagaaaaagtgacaggtggcaagagaatagatactttgcttgagaggagcgagcgagtggagccattaacaggcccacctaagttatcaaaactcgtccttctttatcgtaagtctgaaaaaccacaagaaaaacaaaactttaaaaaaagatattattctctctcacttt

SEQ ID NO: 46314 - DNA, 569 bp, Arabidopsis thaliana landsberg
gaattaagaatttacttaatatgttttatattttcgtataaaattgtatttagccaaagcttctcatattattaatctgtcgttattttcgtctgaataaaatcgttttttctttttttcttttcttaaagtatgtgtccgtatttattaccagacagtcgatatgtagtaaaatattatataaggaaaaaaataaaaataaatggaggtgagcataaattcgctaaaaaagaaaagaaagaaaggtgtttgaatggaacttggtgcaatgggggcaacaacacaaattcaaagaataaattctcagcagcaatagcttctcaacgcaacaaagcaaagcttttgctctatcaatcttcagccttttcttcttcgatttcacaagtttcatcatctcggtaagcaagtctcctgcgaatccaggtccgattttgttttcttctttgaaattgtttacttgttagagtcatcttctgaagattcgacctctagattcttacttctgtgtatgacttactcaaatcacaaaattaaagattacttcttttttggtttcttaaacaatctgc

SEQ ID NO: 46315 - DNA, 769 bp, Arabidopsis thaliana landsberg
taatcaatctgatctatcaacattcacagagaccaaattgatttggaaagtgcaagtgccataaaacaaagttacctcaacaacgaatttgatccacaagcaacgttagcattgctactgacaacaatgacaatgtagacattgctgattcgcatataaacaaaggagcagccaccaatctgacgcacaggacaattccctaactctttcgtctgcattatatgcgtacgaaatgcatccaccatgtttcccctaagaatcagaatcaaatcaaaaccaaaatctcaaatctcacagctaaagtcctacaaagtacgactacttagaagcgataagaacaaaacatagagctgaagatgaagcggaattcgaaaaattaaagagatcgacggtgaagaaaaggagaagctctcttacccgacgtcatctcggtaggtgcgatttatgagtacatcgccacggagattcagaaaatagatggcggaagcagccaccggcatcttcgatctgagattcgaaacgcagatcggataattagacgatctggttacaggagatttgagatttgaggatcgacgagatctcgacgacggagcaaaggaagaagacgacgacgaagaagttgaacaactgaaatgcgatatttttttaattttttttttatcaaaaaatagaaacaaaattgaattcagtcgtcattttggaatgggccggtcttattcgattctgggcctgtacgtctcaattatgggcccgtagtacattatat

SEQ ID NO: 46316 - DNA, 704 bp, Arabidopsis thaliana landsberg
actctctagtcattgttaagcactgcttggaaatgcagatatatacctggatgggcactttaaacatttgttgtggaataagctctttgagtttctgagtcaaagctctcccaacggaatatgcctggaatcacagtacaaaacgattccacaatactgtgaggacaagatataaatcattgctaaatcgtgagagatgtactaatctctgccgtaagagctttaagctaatgggaacagttctacaaaactttacaatcagagatgtgtaaaagatagttggcagcgcctcgtgtttccatcaatctacttatccaaactttttgggcaagtgaaattgtatcaatgagattgctgaaccaaatttttgtattcaggtgtaagagtgcgtatgtatgctgtattcataaaagttcatattaaagagcttaagcaaaataaccttatccctgtgtacgatggttgacaaaggttccaccatttcagcattaatcagaatatcgagttttatcagatcactttccctgtacctgctcacatattacaagacaaaaaaaaaaagttgaataccttaagatggtaagaaagacatcaaaaagagcaaaagaaacatattatgtattaagcttaaatggaaactgacgaagctgagtagttaacttgtataaagaagggctaccaaatttaacgatagagagcaacac

SEQ ID NO: 46317 - DNA, 699 bp, Arabidopsis thaliana landsberg
tccgcttagtctgagatctagcagtgtataccaataagagaagaccatgtgtgatttattgacacgtcaacgattgtaatatcatgggtgaggttggtccgcttaccgtttagacgagtgagttgatctgctatgtgccagcgtgtcccaatgtctcgctgacaagctttagatcgtagtgcttttgaaaaaatctataagaaaatctatttgagattggcatccaaatgatcgaatgtgcatgaccttaaaatcaaattctactaatgacaaattttcatagtaacgattcaggctacgtacagccggaatccgttgagtcttacattcctcaggtttatactaacgacactataatacaaagaagtacttcatgatgagtaataataaaaatttagtgatcggtgtttgtttttgcatgtgtcaagcttcttatcttctattaacaggtaaacatgaaccatcatagatcatgcaagtgtgaattcatactcccaaacaattcagcacatgataaatctattcaaaaaataattcaaaagaccagagggatattagaaagcatgcatgtgagaataatttatatatagctggaagcggcgaatattaaaagttaatgtgggcatgttcttgagtcgtgggttcctagatgccgtttgatgcaattgccctttcctatccttagcaatatttcccaaa

SEQ ID NO: 46318 - DNA, 585 bp, Arabidopsis thaliana landsberg
ggtttgatcctatgtaaaagctacaaaactattatcgagcataataacaaaatataatggataaatggactggctttggcttatagaaaaaatctagataccgtacataggattacattaattaaaaaatattgaaataaaagtgaagcaatgagacacggcacgccatatctgacccagaaatatccatccttacccacacacttttgtattattttgttttattaccttatggaaccaatccaaattattgcctccgcaacttttaattttaatactttttataacgatacaatgaaccgaagaaatggacttagtgcaacataaattcagcatcaaatcaatgtaattttctacttcaatcagttaatgaagattttttttgctaaatgtagtgaaactataatatgtgaagcaaaccaaccggtccagtgaaccggcattgtgtattggtgttgctatttccggctttcatgttatgaccgttgacttatattactgttttggggtcagtgttgacttacaccattcacattctcacggtttgggacggatcacatctttttttgcacggcatgttttttt

SEQ ID NO: 46319 - DNA, 554 bp, Arabidopsis thaliana landsberg
tgtttttctataccggtgagggggttttgactttaccttgtagaggactcgagttcttcaacgtctgatctcttcctcttcctctgtgcctgataaatcttatgttctccgacgggtaacgacgacatcgcttgcaaatgagtctgaagcaccatctgagtcaagtcgacttccatttccaaccttctcttctcagcttccaacctcgctgcttcacgagccttgatcatctccatctccgcgagttccgttcgaagcagagaatcagacaagactcgtatcatcgccgacactcctgccgaagttgtagagtcagagctcatgttcgactcggtcccggagctcgagtttgattcagtctctgagtcggatctgtaaggatcatcggagctatctttacccaacaagacattctccggcgatgaggtctggctccggcgaagtcttgccgacttgcccatgaagtgtaaatttgggcagagagagatatagagagagacagtggaacatgggttttgttgttttggttttgattcttgcaactttaaaaactg

SEQ ID NO: 46320 - DNA, 703 bp, Arabidopsis thaliana landsberg
tttgctagatcttggttttgtatttatatagtgctgaacaaagattggtgaaccaaaaaggagagcgggatccgcgtatatttcaggataacaccaaagtcactaacataaaatggtttattcaaacttttgaattatttgtgtgagatatatcaaacttttgtatgataatgataactataaaacgttaaacaaatcgaaataaatagatggaaaatgatagaaatggaaatgaaggaccagcgcatgcttggaataaatgatgacagagacaaaatgtgaaattgtctatcaactttttagctttgcaaattgcggccattttatcgtattgaacaaaagataaataaattaaaatgaagtatcgtttatataatgttatttttttggattagcaagagattaaatactcataatccgttcggaccagatcatatactctagcgtagggcatttagtcttctccccatgttcgagattcgaactcgtgactttaaccatatcctctctagaaggtatactattacactagcagaactatagaccatggagcttctccacatacgctaaacaacacttaactgctatgtttaaacgatgtcgaaaacatattaataaacacttataggtataactagtaataagtgcgtgtatatatatatggatcgttctgcatagtattaaatttgatataatcagataa

SEQ ID NO: 46321 - DNA, 497 bp, Arabidopsis thaliana landsberg
aatctcgtaaactttttctgcgacataattcacttccacaagtaattggaacagaatctcacaagtggctacgtgtacttacctccacatggcacctatccgttcgctaaaaatatactccatgtatagatgtgtgtaatattacatgtgtataaaagcgacgacgaggataatcacctcgatgagtatttgagtagatgtggacttgtcatgagcattttagcagagagacaatgcatgcatacaaacagagaactaacaaatatctttagttttttaccattcgtaacttaaaaagtttattctttatttacttgtaatacacttttgttaaatgttacatagaataatctccgatttatacattatttgatcagtgatcatagttactagcatctattaagccatctccaagggaactgcaaaactttaaaatagcgtgggaatgttaactttttctttcaaccaaactgtataatttacactattatagcgtg

SEQ ID NO: 46322 - DNA, 664 bp, Arabidopsis thaliana landsberg
gacattccttaaattagtgctcttcactaattattagggattagatttgtgccaactagagaatctgaacctaaaagtatcaaagcaaaaaaaatgttccgaatagtaattgggctgttgatttgggcttttagcatggagagtagtagtaggagagtgggaataaaacagaaaaagaatattcggcgtgaaaacagcagcggtcacgtaccggacctcaacaccactctccattctactttattaagcgggaaacagatacttccttatccatcgatgaaacgtcgaccacactggatacgtgtcgttctcaaagaggtctgtcactaaactatcacgtcgacccagtgtaaatttatcatccacgctctcgtggattacgtggaggaagaaatatcatttcttgtttgaaataaaaaaagaataaaaaaaattaggacagaacagaagagacacgcaaacatatccattagggtcacaacggttcttacagcttctattaccagaaaggaaagaaagccgaaatttgtttcaagataaagtaatttaagttggagcttgtttcttggtcgtacagtgtcaggtgaatagagaagaagaagatggaaaacacagacgagcttgtctccattgagctaccagctccagcttcatggaagaaact

SEQ ID NO: 46323 - DNA, 1261 bp, Arabidopsis thaliana landsberg
gtactcacatataataatattttgaacttacatatatatgtcttataaaatgcgttttcaccattcgttagcttttagaaattatgtgcaactttgataccaaacgtatatttgatgttgttaaaaagagtttcatagaaatgacaacttatatactttatttagttattttaaagttgaatctaaaatcagttcttctatgggagtggaccacttatagagaaaaataatcattgtatctaatatttttttttcttttcttacgtggatctcacgaaaaagagacattaaagatgtctctctaacatattccatacgccttaatcaatttaaatttacattaatccaacaaatgtgacaaaatactgtatagactatctacagttttcaaattttatggactaatatatacaaaaacaaacctataaatcataaataatctttgtattaacgtacggaatggagcagtgatgggcacacgacaagggaaagttgaagactgggcccacgagtaatgggcttttctgatgaagtcaggccacgccccaaaagtcaagaataatacaaaacaaaataagttggtattgatcattgcactatgttgatacaaagctaaacatatacgtttggaaagaagaaaaataaacatatgcatacactgtagttggtaagttggtaggtaaactagaaaaaaattcgttagctttcttactaaaagttaatttaaagacatttcaaattacgtataaaagggttcgtaattggttggaaaaagtctttaggaacggagttacattttcgttgtatacatacactatacaaaaagataatggaatgaaaacttttccgaagaaaacaagagaaagcaaataataaagcaaaagcgtgataaatacgtaaaagaaaatgacagccataaaccctatgtatgagaccgactaaagaaaagtaaataaaaaaatatacaacattttgaaatttgaaatggactagtactcgaccaccataatgattcaaatttctcaaagttgtaacaaaatatgcttaatttagaagaataatgggcataatcttcaagaaaaacttattaaaccgtaaaatgatttttttcagttcagaaagatattaaaaagaaaaagttgtgaatatgacttcaccgtaaatcatacgactcgatgacgcaatgattatgatagtacttcacacatggaatacacaagatccacacttatttatttttttttaattttgaaaataaact

SEQ ID NO: 46324 - DNA, 656 bp, Arabidopsis thaliana landsberg
ctaaccaagtcggataattgtagtttttgtttggtccggagttagctacgacatgtggcatacaataattggttacgaaaagctaagctttaagagttagagatgatgggtcgtgaaagaagaagctgtcacagtggcacatacgtccgtggcttccccatatctcacgtgcatacggataacgtaatcaccattttttctaagtccccacccaaatatctacgtggctttgccacgtcatcctaaccaaaccgacggatttgttcagataatatgaaaaagctcctaaaaacagacagaagaagcttttgtcaccaatctctgatctttttagttctcttatcggtaaaaacttattcttctctttttgttcgatctgtgatctctaataaactaatttgatattttttttgatgtaacagggaggaatcttttatatgttatgtataataataattgagaatatggaaagagtatgtgagttttgtaaagcgtatagagcagtggtttattgtatagctgatacagcaaatctttgtttaacatgtgatgcaaaggttcattcagctaattcactctcgggacggcatttacgtacggttttatgtgattcttgtaagaatcagccttgtgttgttcgatgttttgaccataac

SEQ ID NO: 46325 - DNA, 428 bp, Arabidopsis thaliana landsberg
ctttcgaatcctaacacagagaagtctgctaacaagaaaggcaaaatatctcttatatatagttttgatgctacaccaagagcttgaagtcagtatgagcgaactgatgaaactaaggaagcagaataaacaagcattaaagatatgtcaaagaagtggaaattgtgtcatgtttctcataaattattggggttgaatccccactccttcaccttaattatcacttcttaagtttcttaaacgtagatgtacagtactccctccgttttatttcgaatgtcgttttaattttcaaattttattttaaaataagtcgttttgtatttttaatgtagatattgggctaggatttcagttttatccttactatttcaatgatattggccaatgaaagaaactagatgatgtatatattaatcaaaagtaaa

SEQ ID NO: 46326 - DNA, 621 bp, Arabidopsis thaliana landsberg
gctccattttattttaattatttttatatgtaatttttatttattttaagttaattattttgaataaattctttaaaaaatctgctcagcaatatttatataatatgtgtcataattaattttcaattaaaaatttcatcatattgaatttaggacttttattgaaatttcatactagaactagaaaattaatacgtaactatttagtgctagacctagaaaattgatagccaaacagttttttttaacaatattttcacctatttttcaatttaattaggtaattttatggtgataatatattaagaagaagtattgtgatataatctgattgaacatatacgttaatattgttttattgccttttcatcatccattcattttcttttctttccacatagataaatgtgccatgataattgttttcataaacattaaatacatatatcttatatttataagtaaatctttatgacatttgaactacctcaatgttaaacttacaatttttgctattataaattttttggaaacgtctatatttataagaccaaaaaaaaaaactaatatttcatctttaatatataacagtaacaggattgatggataagtatgcccaca

SEQ ID NO: 46327 - DNA, 692 bp, Arabidopsis thaliana landsberg
accaaagccacatttgatctagctgccaacacctgaagcaaacacgggggggatcaaaacaaaaactcatcattcctaaactcaaaagtccaactaacaaaaatcatgacaaatgttcagataaaacaaaacaaaaaacaaatatgagacatcttacagggacacatgtaatcaactgaaactctctctgacatagagggcagaggttcataatcgtagaccaattatcaatgcattcaaagcagaacctgaaatttaacagacatagacacaaattaccagactgctccttaacaaacacccatagcaactttgcaatatttaaagacaatgaaaagcgaaaacaagcttttaccagtgctgacagcaatcaagaacgcctctatcaataattatatccatgcaaattccacatctttccccttcaatttcagtcataccctgttcaaagaaattaaaatcaacactgagaagcaataatgcacaaacacagtttattaaaatctcatccttgagattaaaaaccacatatgttccaggaaacgtgacacaaactaaatgaaatggttgacatagcaacttatgttcatgattctaactataaagctacataaacaaccattttcaccggaaattacaagttttaaagctccaggctcgaaatgaaaaggtaaacccatgattagttcaac

SEQ ID NO: 46328 - DNA, 696 bp, Arabidopsis thaliana landsberg
atgcgggcggtacccaaacattccggttattatctactcttgtggcttttgtcatttttcgcttttcgtctaggtcttgattttactatctgttgtattacttttttttgaaaaaagagaatctgcttcattagttttatgcaagagattcttaaattattcataaaaacaaagtagaactcattactccacagccataggccaaaatctcttgtataaaaaccaaaacaatctaactggaatcaagtttaacatatcttgagaaacactttcaggttcaaagatcactgtagtacaagaacaaaaggtaaacagtataaaagtgaaaaacgtgggtagtagaaacagtcaaaaggtcattcattgcagagcgcttcaacggaagtaaccgtagagctccaagtagcaaatgcaaaagttccacggagttgatgtatctgccgttggaccggtcagaaccagcctgaaaaacctaaaggggagtaatgcatttgctgcagtgattggccatgatgcaaactgaccggccttgcacattgtttggtcatcctcatggactctcaagtctgtccatgttttcccatccatcgatcccttcaaacccatcaagacaacaacaacacataactttcctaagcacctcttgtcttaagaggacaggatataattgcagcataaataagatacctgaaactt

SEQ ID NO: 46329 - DNA, 385 bp, Arabidopsis thaliana landsberg
aacagcataattaacaaacaacaaatttctttatataaactactttataaacgacaaaaaccttaaaaaaacctatataaaaggtcaataagatgcaccacatgaagcacaaaaaaaagctctcacgaacaacacaaccacaaaacagaataaaaaaccattcaaaacaccaccaaaaagaaagttacaacagcaaaacaatacattaaaaaacattacaaacaacacattaagattctaaaaaagaagaaagaaaagtatacactttttacacaaccaaaaagccataataataataaaaaatggaacacaaaaatactgatattactaaacaaaccaaaatagttaaaaacaaaactttaacacgccgtacaccccgaaaaca

SEQ ID NO: 46330 - DNA, 980 bp, Arabidopsis thaliana landsberg
caagtttttaataccgttgatgtggtttcgatcattcttttcgctaagtttaatgagccgagtctttggagatgaaatttcaccatgtcttcttgtgtttctctcgcgccatatttggtatagagtcgcttggaagacgtatctgaacaagaaaaggttgagcttcaggatggttgtgttgttaagcagtgcaatcaattggccccagtatgtggaatagttgacgttaagtagtcgttgggctgaatccttccaaattacagcagcatattgacaacagtagagcaagtgatctcttgattcttcagtgtttgtcacatagaataaagtccactcgctgtcccgagttccattgtttgatacggtcttcggttgttatatgaattgagacattttatttattgtcaattagttttgaattgaaaactctaattttatattagtaccaaaatcttgtaagaccatattcttgcaaagatttaattatgagttaaagatcatcctagttattgtcaactaattttgtgattcctcaaagtttttccgttaatctttcaactattatgaatcgtcattggttacattttctttttctttttttttttttttgggcaaacattggttacattttctagatatttctttcttcaaatgaaccacaaagaaagaaaagttcaatttttcgtaacgataaaacaaacagcaaaaaagaagtaaaaagatttgaatcttaggttgtcaaagtgaaggtagggtcaaactttttaatataaaaccctgaaacacgaaaatggctttgcgaacccacattatcgacatatattaacaagtaacgactcccattatcatcaattctggctgtcaatatcgaaaccctttttctctaattcaaattttgaagacctttcgtaacttaattatagattaaggattagggcatactatttcattaacttttggtggagattttttagaaaact

SEQ ID NO: 46331 - DNA, 553 bp, Arabidopsis thaliana landsberg
aagaaaattctcaatggtttgttcttaagactgagtcatcctcgaatcttttgtctaatagttacaaatataggttcttacaaagtgtatttcatgggtttctctttggttgtttaaagattataacttcaaaatgaaaatcgataaaatctgaatttttttttcgatcttgtgttcttcatcatcgtaagtgttacatctttgagaattttttatttgtctgtacttaagtgttattgtcagattgttgtgatggtttattttttttggatcttgctttaactttgacataattgaaccttttgtgtgaaatcggatctcggcagctctcatagatctggcgtttcgatggtaatgctgggtccagagtacatggattcttcttcgtttgaaggtacgatattttctcgacgtgaacgtctctctcactgttcctagtctcatgcgttttaggtcgttaacacgacgacgtttttacacaatatcaacaaacgtattatttccgcattggattcgcgtcattgttgatatttcgctctgcgttgttgagatc

SEQ ID NO: 46332 - DNA, 506 bp, Arabidopsis thaliana landsberg
ctgctagacaaggaacatcacgacaaggagataaggtagtgtccttaagcggtgataggataagggaaaaaacagatttctctacgccaatattttagcgaaagaaagtgcaaagattctagaggttaagcggtggaggaaataaaactgaacttctccttatttgttcttctctttttaaacaaaagagcacaaaaatactaactccgaactacggtctagacggagtataatagaattggaccgccacaatacgggtcggtgatacatgagatagtgtgtagacgagatgccaatggatcaaaccaaatgacatcggagtcgatatattaagagtgtgcttactttgattcgatttaaaccccgataattttatccacgacctaaacagggaaacagattaatatgaatactcaatatcggcactaattatctcggtccaatttaatcttgcatcaacaatcttgtcgtcgagcttctaaataaaattacacgggtcaaaaaaa

SEQ ID NO: 46333 - DNA, 761 bp, Arabidopsis thaliana landsberg
  unsure (1)..(761): unsure at all n locations
agttgtactctctctaaattttattttattttaatccaagcataaatcttcttttgaaaattaatagacacaatttttgtgaaaataattgtatccaaaaaaaatttaaacgaaaatatcattgaatgaagaaacgtaaacataatttcaaaaaaaaaaaatatcaaatataataagtaacaaaatatttcaaaaaaaaaaatatctctttaaactgtgaatttttatttctgtaaatttctgaatatataattttcgctaaccatgttgataatttatttatgaaataatttatcatatattcatatatatcagcatggtttgtatttgtatttgtatttttctaatacaaaacaagacgtggttcggacttcgaagtctttagtgtaaaacggcacaatgtctttttgtttggtaggagaattggtttagcaataatagcacattaaaccctaattgttttcttctttggtaaccaaaaccctatttatcgaacacaatatattcaatccttttcttcgccgttacgatatcttcccatctcctccactctcattcttcacgcttttatctttgtccaatatttcacagatcagttttctgattattcttttgagtgtcagtttaagttttcgtagaccacgcaccggctacatgtttagtgtcaataaaagaacgcanngcctctctgnctttcttttctttttctccgctgctaaagttatcagatattttgaacaagcagagatcattaaaagagg

SEQ ID NO: 46334 - DNA, 682 bp, Arabidopsis thaliana landsberg
actttctccgccatggctacgcaacaacagcaattcgccatttaagtaagctctgaaggtgaacgtaagcttgtttttattggggtgttttcaaattgaagtcttttcaattctcctgtgtttggttttagggcgcgaaagtgcttatggttggagctggtgggattggttgcgagttacttaagactcttgctctttctggattcgaggacattcatattgtaagtttctcaatttctttccactttttctgttttcgtgacttttagtattcttaacttgagatttcttcttcttctctattgagattctgggtcacagacgaaagtttaagcatttcaaatctcctattgtgctactggatttgattggcatttagggttattgatgatttgagtaatttcaacatctttgagcttttaaatcaagttaagtttgacttggaagatggaatcatatgtctctaggaggactctctgtttagctgtcttcgccaataggtttagtgtaatttctaagactaggtaggctatttataattttgtttgcatgaattgcttctgtttaattttgggatttgtagattcatgatgatgtttgatcaaaacctcgattcactgggcctctgattctttgatgacagacttaatagtgcctatatctacttggtcatgctgccttg

SEQ ID NO: 46335 - DNA, 2076 bp, Arabidopsis thaliana landsberg
taatcatacgaatgtcaaaatgttaccatatttgtttttgggttttaaccatataatagagaataatgtggaaatggtgtccgttcataaaagtaaaaaataaaaactatgagaatagatggaactatattttcacagtttttcagcgtgaatggaacttgtttgtacaatacaaccattgtaacccaaaataaatttggctcggattaggttaataccgttaattggattgagttgggagttagtttgtacaatagaaccattgtaacccaacaatgtcttgttgaacccaacaatctacgacgtccgacgagtttatttgaggcatatgaccactatggtatactattattctattagttgatgatttgttatgtaatatcttaattgttttaaaattttaattttttgtatatcgtatgtatattttacaatatctttttgtttcatggatagatgaggaagtgacaaagtagaagaagtgagcaaagagaacacccgtggcaaagcgttaaaagactgaaaaatgaaattttgtagaagaagaaataatataacatcgagacacgatgagactaacttttgaatcaacttcattgtagtaaaacttttgtggctacgaccttggaaatgaatctattttatttatttattaatcattgaatatgtgtagtatttttatttttttacagcctaagcctttgtatttgtattatctaaaatagttctgttaattttggaagactgttaatttggtgttcatttaattttggaagactgacaatatcaaatgacaaaactaaatcatcaaatacatgaaacatgttaatattgttttcataaaggataataaaccacttatatgggcttatatgactctatattgggctaggcccatataatggtcgtcacatagtcaaataagtctcacgaacacgagtagtcatcgaacggaaagttaaaaaaaactgattttgcctgtttggttttggatccgagatgattccttcgagcgagacagcgaccgtacgagtcctttgccaaaagctgcttctctcaccgaaccaacctggaactctccaatggctcattggttccccatttttcccgcctttcaccgtcgtctccactttccgatgtatccatcactctcctgatttccagcaagaatctggtaaggagaaacccgtttctacacttagattatgtcaattaacagaatcagaatgttcaattgcatgaatcctgttctttatttacgaaagttgaattttttatttatggatcaaattgttttgtaactgttgttatagagtgaggaattaagaaaaaaacaaagtagccatctttaaacttgtcttttaatgattattattaggccattgattgttcacaaagatagctcttttgggatttgtatgcagatgatctccggaagttgttaccaaaaggttttgaagtcattggaggtctgataattggagattctgatgctgagaaaagcgcatttgaggcggttcgagctgctcgtagattgcgaaagcatttatctgaaggtggagagttagatgatgaaaagatagttggggctagttgcgatgtaggcactggtaccattcactttttcatctctaaaagtgaaaacacaacgaaacttgagcctgttggttctgttgtgtatgaggataagtctggtaagtatttatgggagaacggttgtttgcttcactgtgagcttccaatcaagttgccattttattatcctgcaagctcgccctctggtatgattttaaatttctgttatttgtcttcagtttttggttgcatgtgttctttttctcaagtttattggtatcctttttctagattcgaaggagaagttttcagatgcaattgatgcagttattactcagtttaaagaaccatatgttgtatacatagctgagaccttaaagaaagcttctgggaggcgttccaaagccagtcgtcctccgtggtaaagatttgggttttggtgctgatgcatcaaacattaatcgtcttccttctgctgaccaagtatctgacattaagatg

SEQ ID NO: 46336 - DNA, 283 bp, Arabidopsis thaliana landsberg
  unsure (1)..(283): unsure at all n locations
ttcttgacttgttgcgtgtgactctttagatattgagaatttgttttgctttggactgtattaatggacgattgacttgacgggtcagacgtgtccttcgaaaagagcttttttgtggaaaagcaaacgggttttctttgtcactccacaagtgttngagaaggatatacagtcaggtgatgctcgggttattctatcaacattctgagctgaaatctattaatgcttatttagttcgttctcaaattaccacttgttcacaaagactgtcccttttcaggaa

SEQ ID NO: 46337 - DNA, 1082 bp, Arabidopsis thaliana landsberg
agaacaagctattctctagaagaaagatttttgatttaattacaatatcatatcatcacaatcagctgggggctattcaagtaccttgtggacccaaggcgaggggttcccaatcaatcttgctcctttcttcaaacaaaagggtcaactcttccgttgtgttatcgagataggcaagagaacggataaaccaagttcatataaatccaatatcaatcaaacaaatctcttattcacttttccatgaggatccagctcaaccaaattaatgcctcctttacgtagctcaaccaatctttgcgaattggttgtggtcctgccattgactgtgaatattttttccttcgtgtattcatcaatatatacaccaccaaatcaaaaaagatctggcaccatgtcataaatgtaactctttagaaaatgtattagctagaataacacaactaatcatagtaagcagcttatgatacttttaaaaaagatcggtagacaaatcattgaataatcggaggagtatgattatttgctacatggctaagtccaagtgttctctctcaacatcctctaaaataagatcaacaaaaaaatcaatcgctctgaaattgaaaatttgaaaatttcagttgagaaaaagtaaaacaaacacaaattcaactcaattggatcagatttaactatatatgaccatgtctagctcttgcagatttctgagccgttagaagtaagtctcgatgaaggagttctcgagacaataggctttgattgaatcgataaagaatttttgatgttttggattaccagttccatctatatctctttaggcatgtcaaaattctttttacaaataactcggcgaatgcgatgatatataaatattttagacataattttttttgtacaaggagtgtatcttaagttctagtttaacaccgtatttttcttattagattcaaaaaataaattttatatattgtaaatttgaatacaaatacacacaaaatatgtatatactaggatatgctccaaggtacataatgggtctatatgttatttaaaaatgtaatgttaaaaatgtgatgatc

SEQ ID NO: 46338 - DNA, 692 bp, Arabidopsis thaliana landsberg
gttagttgctctaaagactctctctatatgtttataatagtaaagcgaagtagataggtctcgaaagaggccttttgcaactttataatattcatcttgtaaagattctaatcactattcaaaagattgatcccgccaacttatttagtatctgataaagatttagtcctctatatcttaaaatgaattgttttaccgtgcagtgcacattgagaaataagctagaagtttcttttgttgaactgtcattctggctaaaattatagttctttcaaaaaattatagtaacggaaaattttcacatttcaagtttgtttaacattactaatctgactttagctaaattctcattttattttagaattgcatgtgacatattggtttgctaactatatacatctacttcaaaattcaagtttcaacctgaagttatattcagtatgtttgaaaagtaaatcacatatagtaacattttgttcaaagctttaaagcaatcagaacaaagtttgaccattttaaatataaaacttacgtgaaggaaaaaaagttgttacatgacctttattttgaaataattgatgagcatatcaatagtatcaaagtttctttcaaaagtatcaaagtttcttttcgtccgttgagtttcaaaaacagaatcatcagagcatatcactttggatatagcttttaaa

SEQ ID NO: 46339 - DNA, 721 bp, Arabidopsis thaliana landsberg
  unsure (1)..(721): unsure at all n locations
ttgaatggtgtgtttttgtagtaggaccaaacaataacataatttatactttaaatatctcttttgtttcatttaagtttggctgtcacattattgtctgattataatcatatacgacaatatcattattagttgcagactctcgcaggcatatatattcataagaagaaaaagaaaattatatagctagtaactgtccaaaaagaagcaagaaattctataagaaactgcaataaataagagatatatctattttaataatacaaacaaaaaccatcataagtcataacaattaacaagctgaaaaaaaataacaatgtaacaagcttaattaatgggccagtgagcaattgtaatgtctgggtttatgtcaccacaaagcccaaatccaagttcagtttacatatatgacatttaggcccaatgacattaactacatggacttgttttggatatcatatgactgactacattgtagcttaaaatttttttcagaaaactgaaaatttagaaatgataatttaggatattattttatcatctacgaatgttnttgacatcttgcaatgtacagatatgaagtttgaagtaatacatttttatgcaattatgctcgacgaatttacctctacacattttctcaacactaacaaacatattagcatcccattttttcgtttttgtcaacagcttttacaccaaaacggttttttgattacaa

SEQ ID NO: 46340 - DNA, 588 bp, Arabidopsis thaliana landsberg
taccgttttggggattcagttatcgaattagactttggaaagcattgaactatacatgaacctacaccataagtacctttcatagcgagtacgactagaaatgatcctcactgtattattattatctgaagcttctctagtagtacgtgtaatagcccagtagtagtgatggtctgatagatttggttgcatttacatggaagtatggaaccaagtgatatgtccatccttctatggcactagcttgtcgatcatctcaaatgttcaatattatcaaacaagtgaatttgggtaccagaaccagaatgtaatagttagtttatttcagattggattcctctacctacaatatgttgcagaactgaagacattatggactcggtatgaaccctatatcaaggatgacgaggtattgtctctaatgcatcagcccttatgcttctgttgtgtcggtttcacattaaattaagcaacaagagaacaaccgctagtttaagtgttcaccatatgtttctgaatcaatagtaatttgcccaaagatagtttcttttttaaaaatatggctaggataaaaatgacttgattact

SEQ ID NO: 46341 - DNA, 596 bp, Arabidopsis thaliana landsberg
tctaagattaacaaaaacgaaagcaatgaagcaaatttaacggaagagtgagaaaaaaaagagccaacattttcgaagaagagaccccattgaagagctttcttgcaattttcagcatcccaatgagcaggaacaccagaagattgaaacccagatgcaagtataagcaaatccacataccctttcaatagctttatgaaatcttccttggaaatttctgggtaattccaaaccatttcttcttattttttgattcgattcgaacgatacaaaccctaattcataaaagcacaagggaattgactgattggtgtgaggcatgatcgtgaatcagtgataagcttctgtctttgggttctttcccgcgcgttcgttgccctagaagaatttggtattctgaataataaggttttggttttctaactaagaactatgtgacgtttttgtgtactgggaactacacgatgtttagccattctaaaaataagatgttcaggctcagagtctgtgaaccgaaccggaccggaaccgtgcataaagaatttgacatcaacaaaaaataaaagagagacgaatatacggttaattttttttaa

SEQ ID NO: 46342 - DNA, 335 bp, Arabidopsis thaliana landsberg
taagggcttccactactctagctttaagggcatttctaacaaccactggttcaacatatttgttataatttgtattcaagagataagaaagagaaacggacctcgagttccgacagtcaaagaagagttgttgttccagacaggagcacccgagtttgttgtgaagaaaggggaatcatgagcgcttgaaggacgaacctgcacaccaacaaataaattcagaagaactggatcacaaaaaaattaaccaaattttcatagattggagaaacgtctatgacaaataatgatacattgatacttgatacataacaattccacataagtttatttga

SEQ ID NO: 46343 - DNA, 591 bp, Arabidopsis thaliana landsberg
tgtgttagtctcactaatttggctcagtttactatttatagctttagacgatatcttttttcaagtattttgtatgccgagcaatttttgaaagtgatatatttacaaattgtttttaccgaattcaacaagtttgctctaccaatatagcaattcaatgtcacatttttacccttatcaaaagaattgacgagacagtttacctttgatatagaaaaacaaatatttctctgactacaaacttttttttattgtctttctcactcagaattttctaattattatgtgattgtttctctttctatttatagctcccacaatattttttaatatacatttggattatgttgaaatgattaaagtaatatatatgacacaaagtaatatatattcttaatacgtactgacgtacacatcacatacatgtggataatagataagataggtcgacccaaattcagaagtagagttatgaaaacgttaacgaaaaataagaggaaattattattcacttttaacatttattcacgcatatgccttatcaatatttcagtggcaccaactagcggaatccaatgagtgggcattaca

SEQ ID NO: 46344 - DNA, 503 bp, Arabidopsis thaliana landsberg
acatgccattaatctgaagatataatatcatttttacataactgtctgtaacagcaaatagaatctatactctacaacttacctgaaccagtaagctccttgcttcatcaaagttcaaaagaacaaagctttcaaggtctttgccaccatgttccagaacaaacatgacataacactggaagcaaacaccacacagaaaatgaatattgcttctacaaatcatttagcatcctatataaacagaccttaaaatctaatggagtgaaaagaatctgacttgtttctccggaaaatgtgggtgatcattctcagacccatgttatgcatcccattcttcccatgcttttatcagtatagggtcatagggaccttgacataattttatactgcaacaacattatgagaaaaggtttgtgaacgatgatgcacataagtttggaagaagatttataacacagaaccaatagacatttccagcatattctcgttcctgagaagacgta

SEQ ID NO: 46345 - DNA, 527 bp, Arabidopsis thaliana landsberg
gggaaaccagccaagacgtcagagaggtccgttttcgcgccagtgttcgtggctaactccctgtcttttcccacatgtctatctctctcgctatccgtttgctggttgttttggccttggtccctctgctgtggtgctgaagggcagggggcgagttacgagcctcccgctgggctgccgaagctgtccaaatacaggctacatttacaacctggcgtcgtgagcaaaaggggctttgcttcgtcatcttgtgcactcggcgacaaggtaggcaaccagtccgggtgcggggataggggagccgcatcatctggcgcggtacttggcgatgttttgactgggcctgccgtttggcatggtaatacccgcgagaagaagaatggcatctgagtgtgcgagcagagcgctgctaggtacgtcgtgcaattatttcaccaatcgacaactgccaacaagaaatgcctaaggatattttaagcgcgccaacggatttatatattaccctttcccgcgcatctttacataaa

SEQ ID NO: 46346 - DNA, 545 bp, Arabidopsis thaliana landsberg
ggaattcgaatttgacaaacctcttacttcgatcctgacttataattttaggtatagctgtattttgtctttgcagttttaattatacataccgccaaaaatcagttattccaaatttatatatttatttattattttcttaataggaacattagcatcttttttttttttttttttttaaacagatttcatttagacataaaagtgtaaggatagtgttacattaacttgtttagtggttatcatcatcccatatgtctaagctcggtttccgcatatgcttcactcatttatatattgcgacaagttgattatgtataagctagttatctttgtgctaatccaatcttctattctaggatgacacatgtttaggttcactaacaaaaaaaacacatgttgaggtagattatgacataagttgggcggccttattcaaaatggtgctttacgagttaattgtgttaatgcttgatcagattattcctctatgtacacagatattggttttaactccatccgtccatcttgaaaacagcggtttt

SEQ ID NO: 46347 - DNA, 753 bp, Arabidopsis thaliana landsberg
gagaacacgtgaagatcctccatgttattgtatttgaccgccttatatgtaacaatatgtgttttagagataatttatatgtatacattaatcggatattgttattttatcgaaattttaatgtttctttgcgtagattaattatatgttattttcctgagaatagaaagggaaattaaaagaagaaaagagatcttaaattatatttgggattttggagggaaaaaagatgaatttgataacttgagagcaaatattccccaagttcaaagtttacttgttccatggtcgcataatcattaagcaagacatgtcctctccacgtgcacggtacaaccccacgttctcatgtctccactccatgtatagaatacatagtcgttcgtatgtgttgcatttatatatttggagatttattgattacgaaggaaaaaaaagataagccaacatgtgagaatgtgattaaagatacaaaaaaacgcgttagcgacttctttagtacactagtaagtagtaatatattagggtattagaatttgagaaaattaaggtacaagtcttttctttgatcatgcaaacctaataataagtatatagtctatttggttcttctggattgacgtcgaataaggaactcaccaaaataattaaatgggccttttgctgttaggtcggcccataatacggccatataaaataattcactatagaaacgaactgtgacactcacaatacactttcaaaattcaaagt

SEQ ID NO: 46348 - DNA, 832 bp, Arabidopsis thaliana landsberg
ctcgtgaccaggttcgtttatatacgactttttgaatgaagacttttgccattttggtattgtttgcgaaagtatctgagagaataacaatataggtattgcgagaggttggaagattgttggagaagtataaggacgaagaagttagtataactatatgtggtcatagtcttggagctgcactcgcgacgcttagtgccactgatattgtggctaatggttataaccgaccaaagagccgttctgacaagtcttgtcctgttactgcctttgtctttgctagtcctcgtgttggggattcagactttaggaaactcttttccgggtacgtccaaataaatactatatataatacgatccatttcaaattgaaaatgacatataatgaaataaaaacagattggaagatatccgagtgttacggacaaggaatctaccggacgtaattccgatctatccaccgataggttactccgaggtaggagatgagtttccaatagacacaagaaagtcaccatacatgaaatctcctggaaacctcgcaacctttcactgcttagagggttacttgcatggcgttgccgggactcaaggaacgaacaaagctgacttattcagactcgatgtggaaagagccatcggattggtcaataaatcagtggatgggttaaaagacgagtgtatggtcccagggaaatggagggttcttaaaaacaaaggtatggcccaacaagacgatggatcttgggagttagtggaccatgagattgatgataatgaagatttggatttctgatttcttggtcattttttctttgtcaagtgttgatgt

SEQ ID NO: 46349 - DNA, 799 bp, Arabidopsis thaliana landsberg
cgtcgcgtattgacatgatgctgagctcacatcacacacttgtacggcgcacgactcacgcaaaatatacttacccttctcctatcgtaaatactgtccgactagtcacataacatttttcaaacttgcacgtcgaaaatttttcgaggaaaaatcttttgttgtcttcccaaggatcatccaaaccatataattgcctcattgatgcatctcccaaaccagaagctaagaaaaaggacccggatcgaaagttttagttaattttgttttataacggtcaaattgtctgatcgcgctcatctataagaccataaccataatccaacatacacgacattccccaaacgaaaaatcttcggcataattcaaccactcggtggatcccaaaaaatcagtttcgaacagtatgtatagatacacacttttaaacttatatcttgcaaaacaaacaaacacatcatccaatatatcatcaatacacgaaagtttcacttaactagctatagtagcaaatcaattttgctctttttaaaaatgtgatataatagtatttttattttatacctgttcgatcttgattaacgttgttttagtgagcttaaacaccaaatatcgttaaggttcaatagagaaattcaccaaaaaatagtaaaaatccgtatccattctcgttcgaaaaattattaagaattaagggttcgaaatataaacattttaaagatgaggattatatctgcaataaacttgaaaagtatcgacaaccagtaaaaccaaactcaataaactcctaaaacccttt

SEQ ID NO: 46350 - DNA, 225 bp, Arabidopsis thaliana landsberg
cacgatattttagtaaaagagaaaaagatatttgtaaacctggttgcccaaaagtgaatatctttgcgtaaggcttcggtaatgaagtccaccgtaagacccttgatgatgttgatgagcacttcaaagtctctattttttggtaaattgatctatagccgtcggaccacacttgatgcattgactttagttgagctttagcttcagcttccggtggtgtacgta

SEQ ID NO: 46351 - DNA, 764 bp, Arabidopsis thaliana landsberg
ttatgaaggtttctagagattgcgaggcaacacgatgttgcttctaagatttcaaagttctatataggaaggctaagttgttgaatgtgtaatgcgtgttactatgagaacttaatttatggttacaatactttaaattcaatttgtgtcgtactgtccaaaactttgggtatttcaaaggcaatgtgaagtattatcaaattccatttttatatttttcaccggttacatcactttatcattcgaatgcttagtggggaataaacttttcatgtatgcctcactctcaagtctcacccactaggtaaaagactcattttacccattttactctatatagagatattcaactttatctagcttttgccaacaaaaccaaaatttgtttttcgtgatcttgtttcattctttcttaattttgttcaagacgattttttgtttcttttttcgacgagatatcttgctttatactccattaataataatccattagacccaaaacttttacccgatcgagacataagacacaaagcactaaaacgaacaactcaacatttttattctaaatgagacaaatacaaatcagttcaatcatctttgttatcaccggagaagtaaatctcacaagacctaggaagaaacacaggcaacacgagaccaaacagattataaaaccacatcaccgtgttaaccgatgcaatcactcttcctccgtacaatctcaacggaccaccaggacgttgagtgtcggagaattctgcttt

SEQ ID NO: 46352 - DNA, 704 bp, Arabidopsis thaliana landsberg
  unsure (1)..(704): unsure at all n locations
ttatagcaaatagccgaagatacgacgaagcgtatatgtgtgaaatgagtatattctacagcctaaaccctcggagataccaaatcaacacgacgacagcgacgggacacctgtatggttctaattcaacttcttgtccacatcttcttcttcttctttttttaatagatatattaagaaaacaaaacagaaaatctcccacgtctttacaaagaaaataaagaagaagaaaataaggaaaaagaatctgatagtaattgacaaaaataccctcatctcctacctcaagacagtaatatatatgtaacaactcgatacagagcatggcttatctcttatccgaatcctcccaatttgtctgtctctctttcgttttctctgctaacagatctctctaaatatctgctacttttgttcatatctttttacttttcaaactactaattttcctttcgcttcttctattaataacaacactctctctctcagacttcttttctttttnnnnnnnnnnnnnnnnnnnttcgcaatgacctcagtttctgtgtaccataattgacctagcagattctgtttttaatggtagattctgacccggtggaatttccgacggagaaccgccgtggacagctattcggcaaatacgaggtcggaaaattggtgggatgcggcgccttcgcgaaagtgtaccacgggagggacac

SEQ ID NO: 46353 - DNA, 535 bp, Arabidopsis thaliana landsberg
acttggtacatggttcttgctaacaacactaactcctaaagattctcgccgtaatctcattataacagaagaaacctgataaaaccagacagttttagctttgattatatcaagtaactaataagtaaaggagcagatttcaaaaatggctaacctgaagcatagtttcctgaagtgcttctatagcattttcaagcgtccatgagagctcattgtcccaagcaacagttgcagccagcattgagcttcctccaaactcatcaaactcgacctatgtgtatatcaaccaaacaaagtcattattagtccatggttacaacaattatcttaaagaaatcaaattctagtacctggggcactgtaaagtaaaacgagccaaaatgttcccattccacagcgatcttccctgtaggatcaaatcgaagacctccataggcacgaatcagaggagactttgaagacaagaaccttcaaaacaggggaaatgaacataagaagcgaagagataaacagcagaaagaatcaaacttcataa

SEQ ID NO: 46354 - DNA, 618 bp, Arabidopsis thaliana landsberg
tcttagattacacaaacatagacaaatcagaaccatgaaaatataaaagaaaaattgagtgagaaaatgaactttggctgaaccttctcctcacctgtattccttcaaacggcggagtttctgatagaactcactaaaaacaagcctcaactgttcctctccttttttcaatcctttcttggagattggttcattagaatccccaaaaactccttttaatgtagtaataggagattcaagcacatcattcatctttacacgctcaagtatttctcgaagatcctgcttatcaccaatactgccttcctcttcatttccaccagtatgagaaaccgggacaatgtcagcaacgatatgggaggcctcttcttctggaatgttagttctttcaataccatgtaccatatctgtgttcacagtgcctgcaagtatatcaagaattcagtaaactgatcataaatagatgcttctcatcataaacattcttgtcgtctttgcttaccctgtgttctcattgtgttatcagatgtatctactaccaccttatcagatggatgcttctccaaattcaggttatcaatatcagggctttgcatcttaacccttaaacgcatcagt

SEQ ID NO: 46355 - DNA, 557 bp, Arabidopsis thaliana landsberg
caaatgcctggagaaggcataccggagatgcagaggtcgaatcttgtttctactgtaatacaggtactaaacttgctcaactcttgtcatttagtttttttttataagaactcaaaagttgggaggcgttacgcaaaaccacacaagttttttcttttcaccttttctattaagtaattaatatccagatgagaggaagctcttgcttctagatttctcaaactctgttgatctttttggtattttcagctaaaagctttgggcatagataatatcttgggtttcgattggcctgcacctccatcgtctgaagcaatgattcgagcacttgaagtactttattcacttcagatcctcgatgatgatgctaaactcacttcgccaacaggattccaagttgcagaacttccactggtactttttcttcctgaccatgagctattatatatctaaaatgtaatgttcatttgcagtttgttctgcatattaacatgtttcatgctcgtcattttttgctaggacccaatgatatcaaaaatgattttggctcaagtgag

SEQ ID NO: 46356 - DNA, 547 bp, Arabidopsis thaliana landsberg
  unsure (1)..(547): unsure at all n locations
ctaccgtaagcatacatgctatccgcactgctatgatcaacccggtaaaaagtctcaggtttgaataaatcaggtgtacggaaacggacagtgcttgttcgcaaatgaaacagaattttattataaaaaatacaacatactgattaacaatatatattcagggatggcatagggtttgacctctcccatccgttaaaaaagcagggatgatagcactccagaaaatatataaatggcataactcgggaaacaacagggtgtttatactgaaagacatcaaccttacagtagctgaaggagaatttatttccatcatgggtccnnnnnnnnnnnnnnnnnncaccctgctcaatatcattggtatgctggacgaaccttcagaaggcagttaccattttatggggaaggatgtatataccctgaaagacaaacaacgctcggaactgtacaaacagaatatcggttttgttttccaggcctatcacctgatcgatgagctgacggtgtatgaaaacattgaaacaccgctgctttaccagaacatcaa

SEQ ID NO: 46357 - DNA, 778 bp, Arabidopsis thaliana landsberg
gatctccaaaatattctctgataacaaaattatatatgctgataacttgttactttcttataaaatgtcacattactatcatttttacatagtataagaaaacatatgtgatttgttactgctgcgtctgtatcaaccttatttttagaaaacaaatagtatatgatttacgatatttatctcttctttttttggttaaaggatgtttcttatcaaaccgtgctgtttcccaattttcattgaaaatcaaaattcacacatttacattcttaaattaatttacatacacttcagtgaggtcaacaatgaacaattaagtggagtattcaaacagtttcgaagccaccaaactctatatatatcaacatcatcacgtaaagttcctatagaatcttaaaacacatacacttgaataagccaactcaaaaaaaaaaaaattgattggtcccatggattatttgcaagtaagtgaagatatgttacacaatgtcacttataactttattgtagtgattaatgagttttggttatttttatttttttgtttttttatgctaaggctatgcgtctccgcgaagccaatcgtctcatgattgcaaagttcaagaaagaatctccggctaatgactctcctgaacaggtgtgttggaaatctatcaaaacatgtttttgaggaatatgtttgataatttgtaccgtaatatgtttgaaaatgttgttgggtgtacaaaggctagttcgattgaccaatgagaatccgcaatacaatgtcgacttt

SEQ ID NO: 46358 - DNA, 568 bp, Arabidopsis thaliana landsberg
gaacccagtgtgaagacaatatttatgccaaaactatagtcattgacatagagagacaactttgtagttgaaaagattttgaaccgaagctgtttagagccataaaatattgttgttgcctcaagaatcttaaaatttcaagtttcaaattatcaacaatctcgaatgctggcgtggtatacacacaaaagttatagttcttaaaatacagtctatcattttgtagttgatattttttaattaaagtaatttagagtcccagatatgtattcgaagtttgtagaccttaacatttaaaatttagagtttctaaataacatataatattcaatagttaataccaaagtatatcatccattcacaaatatatgatgtcgttaaccattttcttcaaaacatttaattctcgacttattcaaaatatttatttgagaaaataaaatttaagacgcactcaaacaactgtaagtgataaaacaaatcacaacaaaataaacgataactgaagtttttttaataaaatgagtggtcaaagtttaaaaaaaatcaacagtgttatatatatata

SEQ ID NO: 46359 - DNA, 406 bp, Arabidopsis thaliana landsberg
acccgtgatagggggaacgtttgaccatgtctgactaaacaacgtatctactctcttcgtcgggaatagcgaataatctgagacggagctgccatagaacaacttaatgctccaaaactggcttaatagacagtgcacgtcgaacaggaaactccgcatgcaccaccgtagctggaaccgacggaggagaaacgctgctttcgccaccgatgatactctgtcctcaccacgagatgcggaggagaccaaaccttcctctctggcattatcgaatactgataaccaccgtactagtgcttgccagaaaacgacgacgcgaaacggaaggaggaggaaaagaatcaacgattggataatcgtaacgagacgcttaagcgtatcgcatcgagaagagtaccctaacgcg

SEQ ID NO: 46360 - DNA, 667 bp, Arabidopsis thaliana landsberg
cacacatatactccacataagaagaagggacaagaatgaaaacaagaagactacaacaaggacatctagctaaccacagaagttgatacaatgatttacatcaaaactcagcccagcttaaagagttctaaagtatcacacttcaacctccaccaagaactattgctctgaagagaggactagatctgcttatctaacacatcgccatgcaagacatgttaaattcatcaagacgtacgaaaacataacctattagcaatcacattgaccaagccaaaacaaaagtaaccacataactacgacaaggtacgatgaaaactcaactaaaaaccaatatctctagtaatcaatcatcatggaaccctaaattacattcttcaaaccaagcatcataccatcaaacctcgacgaatcagatattaacttcaatcgcaaatattgaattccatactattatataagataaactcaaaggagcagtgatcatagagaaactagacacagtcaaattacctctttgttatcagtaacctcaagaaccaacttgccggcacagcgtctatacttcattacataccgagtctgcaccacaacaactgaatccatttgattgagaccaacacgggttgattcaaatcaatcattaagggttatcatatttcccact

SEQ ID NO: 46361 - DNA, 488 bp, Arabidopsis thaliana landsberg
aagatcacataataacggtttgcttgttcatgctacttgcaaattttcagtatccaaagaatccactggtttactgtgtctgttcgtcgtgacctgtcaaaccagaaggaattatatgtttagaaactagaacaaaagaagggggaaaactttgtgaagagagtcgtaccgacttgttagggaaattttgagcattagtgaactttggaggagcagaataatgagacttcttttgtagaattgcagagagacgccgctcgtttttgtcttgcctaagtagatatctcagggaaactgattcttgctcaagcttggacaccgtgatttgcaatattgctgagctatcgaaaagctcttgtgcgtgaaaaaaatctctataaagttattaaatgaaactcagtagcaaaaacaacaaataagatgtttatatgtcggagaaagaggattgagtaccttatgaggaagttcacaaggcgaatccataaacg

SEQ ID NO: 46362 - DNA, 977 bp, Arabidopsis thaliana landsberg
gattcttgatgagattagaaccaacctgatatagtagccgaagcaagagatgaactgattagaagaagttaggctatcactaagatggagactattattttcatgttttctttggctttctttagtccccgaataatagaccttcttgtggtctctttattctccttttataggccaatctaccaacttctttagtatttaatagaactgcagtattattccttccattatgttttatcaacttgttcagtcattgttattttgtatttggcttagaattcgataccaaatttcagagtaatccttacaatttgtaaaaagtaacataagattagaagaactttacatttagaattcatgaaaatataacaataatgatgtgaatcaaaacatactttaatccgccacaatctacatatttacacatttttttttctttgacatctttagatcgatacggtctaatccataaccaattcttactacgcgaggaaacacaacttagtagagtcaaattccaatgaaaaaacggagtcaaatatatttaaccacttgagtaaaagcacatctccactcaaccattgttagttatatgtttaaaaataaatatgtaagtaatctatataacgaagtagaatttctcctttatatgttcttttttttttctttatatgtttttttttaaatgaagaaaaagagggaaccaggctggtgacagtcatagagaaagaaaaacagacgaatatggggaacgagatggtctccttgaggcctaattcaacgcggtttctacttctagcacatgactcttttgttctctcattctaggactcatttatttgtttgtttgttctatttccaaatggcccatttttcaacatccctccaggtaagatcagatgttttagagtattttccatagtttgcacaactacgactctacgaagttcatcaagatgtaatttgggaagatcatt

SEQ ID NO: 46363 - DNA, 719 bp, Arabidopsis thaliana landsberg
tgaacagaatggtgttctgcatgttaaggttacaagggttggtttgagagtgctcttgctcagattgttcgactggttttgtccgcacaactggtcattgctccagtacagaagttggctgatcggatttccaagttctttgttcctcttgggaagtaatctgaccagttgataaacaaattatttagtcttttagaggcacaactattttttaaactcactggattataatgttgaaggtaattttcctctcgttctcaacttggcttgcctggttcttagctgggaaactgcattggtaccctgaatcctggataccttcttcgatggatagctttgagctagctcttcagttcgggatctctgtcatggtcatagcttgtccatgtgctcttgggctggctactccaactgctgttatggttggtactggggttggtgcatcccaaggtgtgctgataaagggtggccaagccctagaaagagcacacaaggttagtttagtgtgcagtaacttggtctatggctttgtaaacttactatactgtatatactttactcaggttctctggatcatttcttttctgaaatggtgaaacctgacagtttcaatgacggtgtaagtaaattgcattgtctttgacaagacaggaactctcacgatggggaagcccgttgttgtgaaaacaaaactcctgaaaaacatggtacttcgagag

SEQ ID NO: 46364 - DNA, 738 bp, Arabidopsis thaliana landsberg
  unsure (1)..(738): unsure at all n locations
cgactacgatggcatgccaccaaaatgcttactctatgttttcgaatacagtagatgcaaataacttatttgaaataagtttcgattatagacgtttataggaataagaagtgagtggcaaaaaaaaagaaaaaaaatttgattagtgggatagatatcaatgaaattaaaaatgaaaagagtttagggatgaagaaggagtcccttaactattatgattgagaagaatgcaaaatttgttaatgtgaataaaaattaggtaatatgataacttagagcataatacgtaattgttgttctataatattgttgttagttgaattcgtaatgattcgagtattaggagcaaacgaatctgtgcaaatcaacaaacaatcaaaaccatcttgagccgccatgttatgttagtgttctctctaatacatatttttaaaaatgttcaaagtgctcaaaagttacttgtaaaaaaactccaaaaaatgtcccgacgttttttttcatttaacaaaaggttcaaaaaatgtttttgcccctaaggctcaaatatatgttgggccggagctgtaaacacaccttgtgtttgtggattaaggatgaacatgactcaaactaagttactatagaattactttgacataccattaagtggagctgattacgctttgcctgaacattgttgcttcatttaggtgggcaaaagttcccctagttggtaatnngcttgggcgtctttctcaa

SEQ ID NO: 46365 - DNA, 879 bp, Arabidopsis thaliana landsberg
tggccgctgtttacactatcctaatcccaaacggaccgcctgagacctcgttgattatcaggatatctagtggcagtaccgtgattttcttgatttggttgacggttctcgccggagacgtagcagggtcaccggtggtgacaccaatgcttatgtgaggaggaggaggaggagggttttcggtggagattcttggcttctgcgaggcggagtcaagattcggagagctaagctcagtcatcgagaattggaacttaaaataattgagaaagtgctagggaagttgcttcgacgtacacagaacagagctagaagaaacaagaaacatggaaaagtttgaaactttgagctccgcgaaatcgaaaattaaagctttacactttgtgaaaagaatgaatacccagaaacaatcgcagatgttgttgttccaggtttcagaaatttatcttatattgaaatacagaaagaaaaaggaaacaaggcttcttattgacaacttatgtaggataataaattcataagagatgttagataacgataaaaccttcttttttctttaatattttttaaaaaccctattagataaaatccatcaatgaataaattcctgtattgccgacccaaaagaaaatcttttatattttagcactcactcacctaataagcatgcatctcaaggttaaaacgaggttgtttttgttgctgcactattagaacaacctgttttctcgcagctacaaactttaaggtaggaggggtccacgatgttacattggtgtaacttcaatatgcataggattccaagaatatatgttactaatacaattcaagattcctgctatgcaacttttaggtgctcttaatcttagaaagtaccca

SEQ ID NO: 46366 - DNA, 774 bp, Arabidopsis thaliana landsberg
tttaaatttttgtcttgtgtacacaattattttgttttttttgagatctttaaagttgatatcgtgtgtgttgtgtgcacaatcacttgtaggaattgagatctttaaatttggttttttaatcttgtgtgcacagttagttgtagcaattgagatgtaaagtttaaatgttttctcttgtgtgctaaatgaattgtagcaattgagctgtaaagttgatttcattctcttttgagttccttacactgctgttttagcccatcttgtatctcgatgactataccaacttgttatcgtttgaaaaggaatgaatacgtttccgtatttgattgctatagctgattgtgctttgtgttggtttatactttggaatcggttcgagtggtttttaagtttgtggttgtttgtttggataggatcaactgggagatgtgttgcattggatcaggcaagtagttggtttactctgcggattgttgtggggtgcgatacctttggtaggaggcatatggcttcttctgtaagttctgtcatttatcttcttactgtgtccactatgactagaaagaactgaaactttgtgcttaaactcgagctatagttagtagaaatccattgtgtctgatgcatgaaatcgaaccatctactatatcgtttggtttacctggcgttgttctatattactgatcagaaaaatccatcactttgagatgataataagctacaccaattattaatgtcgttatcagtttttcgtaacagagaaacggtgtc

SEQ ID NO: 46367 - DNA, 596 bp, Arabidopsis thaliana landsberg
  unsure (1)..(596): unsure at all n locations
ctcccccccccctccccccccccccccccccccccccccccccattcttcacccccccccccccctccacaagcggcaccccccccccccccccccacacccccccccccccttctcccccccggtgttcccgccccccacacccccccccccncccccccccccccccccccccccccccnttttcctccccccccctccctcccccccccccctccccccccccccccctccccccccccccccccctccccccccctccccccccccccccccccccccccccccccccccttttttctccccccctgtttgtcccccccccccccccccccggccgcccaaaaccccaccccactccccccccccccccccccccccccccctcccccccccccctcccctcccccccccccccccccctcccccccccccctcccccccccccccccccccccccccccccccccccccctcccccccccccccctcccccccccccccccccncccccccccccccccccccccccccctccccccccgctccctccccccccgccctccccctcccccccccctcttcctccctccccc

SEQ ID NO: 46368 - DNA, 875 bp, Arabidopsis thaliana landsberg
  unsure (1)..(875): unsure at all n locations
tggaaactccaagaaactggatttatgcaataaaagagtagtgtgcttcatttgctgccagctaataactaaataacgcaaatcttgcagattctatgagactttttaagagcacaaagaagtttaagaacactcacctgctacaaatagctgctgctattgcaaggtcgccagcagtctcagaaagagccattccgttagcgacgttcagaaaaatcccctgaagcaaacttttattattattaacaggactgcaatcactaggacactaagtgaccattcacatagataatgaagattgaagtttaatacgcttcatatcagttattacagcgccactatgttactagaagaacaagattcacatgttgagtaacattgctgacttacattttcctgaattctaagaccagcttgcttcataagaacctgtcatatgataaggcagaacataacaaaacgataacagttatcaaaaaggggctgtacacaaacgtaatttgttattagaaaaaaaaaaagagataatattagtagagcactcactgcaattatcatgtcagctctacttgcttgaacaccattgacatgccttgaaactgttgagccaggggaacacaatgcctacataataacaaaaaacaatgtttaaacaagaactacaataaattgcttcaatgttcataagcacatatgaggcagctaatgatgagaggtcagcattgtcgcctattcagaacaaacatatactgccattgcaagtcatgattctcatcatattgagttattgacaatagcgaaatgtattaagactttcaaaacacagtttcacttatcgagccagagcccttctacaatnttttgaattctgaagc

SEQ ID NO: 46369 - DNA, 670 bp, Arabidopsis thaliana landsberg
aattcgctaaactgttttataaaagaaaaattaagagcaattgttaacgagaacgtgttgaatagttggggacgaggttacaagcaccaattcatcttcagcatcatatccaaatccttcttaaaattttcttcttcctcctttaccatctccagcaccggacctagtcaaaaagtctttcttctcaaatggatcaaaagcctcttggattgctcacgatccacgtcaagagagggattaatctcgccattcgcgaccatcgtagcagcgatccttacatcgttctcaacgtcgccgatcaggttccttttttattgtctcaattctttctccttgaaatcgatagagaacaaattgccttatatgaatcaagtctccgaataacgattcttctctgttcctgaattgttcatatgaattcaggatttgggttttcttcaaatcctctgttttatctcctctgctttgggtttttatcaaatcctctgtttttatttcctctgctttgggttttcttcaaatcctctgttttatttcctctgctttgggttttcttcaaatcctctgttttgttttgtctaatacaaaaccaaaaatgaaatctttcagacattgaagacacgtgtggtgaaaaagaattgtaacccagtatggaatgaagaaatgactg

SEQ ID NO: 46370 - DNA, 906 bp, Arabidopsis thaliana landsberg
taacgccacaaaaagaatagtgcagtccattggtgactgtgatgatactttttcgcttcagatcagactattggcgtggcgagtacgtattaatttcaacaacatatatagaagaattagaatttggattattatgcactttttacacactataaaactctaagctttagcttaattatcagctttttagtaatggtccctgtatacgtttcatgcttcccaaaaaatatgtcaaataatgtggggcatattcattatacgttaaattaatgaaactcgcatagtggtccagcaaaatcaataaattcgttttaataaagaacattattattaaatcgctgttaagagtcgagaggtttccatattgtcctccccaccatctgcccattccgatccaactaatttccttattatattctacaaatatataaatactttaataaccaatgggatagttgttaacttctatcaacgtgaaattattttgacacaaatattatttggttccactaaatttgtttaatttcaataatattgtgggagtagatgacctacagtaggagtttaagtgtgctgcttctaacaacgtactagagacacggcggaccaaacgagccacgggatgtctctcttctttgcccatcccttcttctaccttttttgaacgtgaaattcttataggttgaaattaacatttcaatgttcaaaacagaaaataatgaattaagaacataatccagcctaccagaaataatatcaaaacacatttgccgttcatattaaaatgtttttcgccatgattatccacttgataaaatgcagtacatgagatgagactatgaagtgggaccccgtctgttcctaactcacatcataagttataactattctactaagtaatcttgc

SEQ ID NO: 46371 - DNA, 1078 bp, Arabidopsis thaliana landsberg
  unsure (1)..(1078): unsure at all n locations
tgagtgcttatgacgactgccttgtgtaaactaaatagatacttttttaccgctagtgtaaattggggtctctttttattaagttggtaacgtttttcaaatatctactcatttctaaaagtaactattagtgactagctaggctggtagtggtaacagactaattgtttttatcttccatttgagtatatatatatattaacatatatcttgaatatttagtttaataagattgttttatatttttataaatataatcaccctaactgtagttttctacttttacctatctgagtaggtcttgatgcatctttcataaactactaaactttaatagttgtgggaatcaattcaacgtcaataagctaaagaggatgtctagggtctaatccaattagaggtatagttttccaagataaataatgccatttagtaattgaataaacacaacttttcatttcacaagattaatagctaaacaaaatagaaacaatagtacaatgttttgagtagcaatataattaaaaaacattatacgatattaaacacgttagagagctggtccctagtttaaacatgttagttatccctaatccactagtcgctaagaacggaatcacagactggggagtatttcggcgtatacttcagatctttttgttgcaaaaccagcagcaaggaagcatggttcttacttttgatacgccggagttaaatgcaggagtcactcatacccattttttctgtttttgttagttgattgtcttttctcccctattaatttgtccgatttcgccatccgaatttttttagctaggttgatatcaatataatataatttcataaaaaatctatttaaaatgcatgttgtcggtggaattattactgagttcgttttattataaaggactgtgattgattgactaatggttttttttttaacttaagttactgttttgccaaaaaaaatatttagtggaagtgtggaactaatgaactactatatttatgatagcanattaattctacaagcaagaaagagagagagttttgctagagagaaatggngagatctatg

SEQ ID NO: 46372 - DNA, 610 bp, Arabidopsis thaliana landsberg
agattcgaagcgaaattttaaaatgacatgattatacataacttttaagttctaaactataatcataataaaaaaaattaagatattaaatagagcgaacggacatttaggttttttcggattgattaccatattcatcagattcatccatgttggattgagaaaaagcctcaagcttggaataactacatataaatcataacttctagatattttaaggctttctatgtcccaaagaaagttatttggtgtcaaatccatgagtgaaaattgagcttttcacatagaacaaagagagatatgaaatagtacaattttatgttttaaataaaggagataaaatgaaaggtaaattttataggtttagccagcagagaacaaatgaaatgaatgttttaagtttagacaccgagaacaaacttagggttcaagtctaagcttagtcatatacttctgaacaatattggactttattgttcaagtattaaacaaaccttgaaatcttcttaaatcacttttcaaaatgcaacgaggatctattctttttttttttttttcattttattgagaagaagctacaagaaagaacacaagtttggatataaatcat

SEQ ID NO: 46373 - DNA, 462 bp, Arabidopsis thaliana landsberg
aacgcgtgtgtgccggggcaattgacaactgttcagtggcaaaagtgtagacgaagtagtgtcgagtttcagcaacacaaaacaagacacatacaagcacaccttgccacaaaagtcggttaaagtcgagtcgagagagagtcaatcgatggcgtcacaatgattgctgccgcagacagagacgacaatgaccgacagagagagagagagagagagagagagagagagagagagagagtgaaagaaaagaatagctgccttttctctgatgatattgtcgtcgctgctgctgcactagtcactagtgtactaatcaccagcaaataatgctgtacaagcagcagcagcaggcaaggtgattgcaaatgaacaaagcaatgcaattcagttcagattactgtgtcagactgaatgaatacaaacactaccagtatagagcagcagctacaaaccaacaaacgg

SEQ ID NO: 46374 - DNA, 582 bp, Arabidopsis thaliana landsberg
ctttaaactctgtaagttctgtcaatctcctgctttaatttccttttcttttttaaaaaattgcttacttggatgatagggagaaaaaaaaaaaaaaaaccttttttagcccttactcaaatgatgtgtatgttgctgactgttttctttaagtgcttgtacttttgcttaataatcgtttttctgatttctttttgcttgctttcctgcttgatttactgctggagatttcagttacttagctgtttgtctgagatgccaagtgtacgcctggtggtggtatgaagaaaactcatcttttgttattcttttgaggattatgactacagtttccaaattaattttgtcttctctctgttcgtgatacttctcatgaccaagtaggttgttggagggttaaatgaatctttaccctcgcttccctcatcatcaggagtgaaagttgtatcctattcggtgttactgaatcaggtacttgaatgattttgcaattcaatatccgttttctgaatataaacaggattaaggacattctatcatttaagatattgcaagttcttaccagtgctattatgagtctta

SEQ ID NO: 46375 - DNA, 322 bp, Arabidopsis thaliana landsberg
  unsure (1)..(322): unsure at all n locations
gaatcatagactaaaaactatataaaccttagttccaacttccagcttccatcgtagttatgtatatatacacacattctgcatcgttcataactcatcaacactcgcactgtctcaagcgaactgtttccactaaccgtcaacaacaatgctcacactacttgctaatccactcgctggctagtcacgtctccaacacgtaagtctcacctgtgccgaccatgtagatccgtttgtctcagttgtcgatagtcgagtcagctcacattttannnnnnnnnnnnnnnnngcaacagctgaccactttagcgatgaaagtgac

SEQ ID NO: 46376 - DNA, 306 bp, Arabidopsis thaliana landsberg
  unsure (1)..(306): unsure at all n locations
nnnnnnnnnnnnnnnnnnnnnnnnnnnnnnnnnnnnnnnnnnnnnnnnnnnnnnnnnnnnnnnnnnnnnnnnnnnnnnnnnnnnnnnnnnnnnnnnnnnnnnnnnnnnnnnnnnnnnnnnnnnnnnnnnnnnnnnnnnnnnnnnnnnnnnnnnnnnnnnnnnnnnnnnnnnnnnnnnnnctctctctcccgacagctacacaaggcttgatcctccctctacatccaatgatgatacttttttatcatacttcacatttgtgtatgttcccaactatatgtcaataccaatattaagtcctgattg

SEQ ID NO: 46377 - DNA, 492 bp, Arabidopsis thaliana landsberg
gaaaaatccactttgctaacgttatgtgacatgttatcaatggctaaaccattgactctaatctttcttcgtctatgcaacaacggaatttggtcccccataacttggcttttgatttcggtataggtaattaatgtcagagcaaaaaggtttttttgttgtttttttgcttcatgaatgattgttttagaactcgctctctttatatagaggaggcagaagctttctaattcctaaaccaaatcgaaatcgagtttgttaattcttttagatttcggtttaattttaaaataagataactttaagattacaaaaaaggaaatcatatatatatatatatatataactgcttttgttagattatgtttgaactagtaataattagcgaacctgaaaattcgcataatgttttccctttctgaaacgtctcaaatttatcaataattagtggattatttttaaaagttgcgattgcttgatgggctgtgacaa

SEQ ID NO: 46378 - DNA, 566 bp, Arabidopsis thaliana landsberg
  unsure (1)..(566): unsure at all n locations
tcgtaaatattactccaaattcacataaaagacggttttgtcaatattactattattatagaaacttttctaaaaaataacacatatttccaattccttttcttggagttaattcaatcaacaccttttannnnnnnnnnnnnnnnnnnnnacgtaaaacataaatacattataggaaatattaatatcagatataaccttgaatagcttataactaatacatcagaatctgattgtcacaatcagattgtgagacgcgaagtcaaaattttaaaagtagatagaaaaagcattccgtaacaatatcgcataactaaatctttcattttttttccaatataaataccgctctccataggcttcttttgacacacagccaaaacacattccataattaaacaaaataaaaaggagaaaaaaatggtgaaatcaaatgtgtatatcacttccatacttctcatacttctcatggccatagccatggccttactttcgacttcttcccacggtctttcaatcgctggcctcagcataggccaaggccaaatttacggagcctgcggtgt

SEQ ID NO: 46379 - DNA, 564 bp, Arabidopsis thaliana landsberg
ctctttcttcataaatgatgtgacatgtcatcaaaatagctgatgtagcaggctaattaatacatgaaacacccatgaaacctctactgtgaatagccttaaacaccgacgccgcgctcactcgcaggaggtgtggccgtggcggactggcggtggcctagccgtggtggccggccgccgcgctgttccagaggggacacccaccgcccgcacggcacgtggtggcacgcactttgccaagtgcagctgctgaggctggccgggggctccaccaccgcacccttccctccgccggttccggttccgggccggccgacgcctgcccccacccacgacggaagctaggcgctgatctgatgtgcacgtcccaacccagccggctggcagggaccctgtagcctgtacgcagcgaaaaaaggcgaaggagtagaccgatcaggccgtgcggtgcggtgcggtgcaggccggcatcagttactgcagcgacgacgcctgcctgccggtaccttgcgtgctgacatcagtccttcttttgacgcgtcggctgttcgtggctgcagttgc

SEQ ID NO: 46380 - DNA, 591 bp, Arabidopsis thaliana landsberg
ggatattattcgatgaggggaaaagcttaacaagcgaacaacaatatccactacttagttagctaaagcataaacatgaattgcaatttccgccaggttagttttcaatcctttccaaaaatcaactactatcaataataattgaagcactttttagtcgaaatactcatcactcgaaacactttctagtgtaaactttgtaattctactttaataacacactcataaacactatatcatttagtagtaaaacactcagtaactaaaaaatattttcttaaaaaaagatatgatgcggaacttttaattaaaactcacaactaaaaaattaaaatagttgaaacatacttagtaaacaccaaattattttcaacaaaaaatagtcaaagtcgtagcactgaaccattcaaccaaaaaaaaacacatttaacaagatacacacacgactaataaatgtgtattttcttacgtgtttaaaattacattaacacttaattaattcaacaaaatccctttagccaaaatttagtcgaagcacttactcaaaaaacttatatctaaatccgaacacacgtaaaacactagatcaat

SEQ ID NO: 46381 - DNA, 522 bp, Arabidopsis thaliana landsberg
agatcaatggtcatactcatactgttttttctttcattcaaccaaccaaaactaaattggtaaaatcttaaagttcaactttacaactaactgcaaaagaagaaactaaaaaataacaatagtaagaccaatgtgttgttagatcatgtcatttaatgttcattcaataaggaacatatcaccatcatactttaaaatcaacttaccactaagaaaattcaaaatatttccaacttcaaatacagaaaaacagatccagattcaaatcccctgagacttgagagaggagggaaatgaacctaaaacccccaaaaaaatttgaagttgtgaaaatgaaaaacagaatctgtcgtgtagggacaataaataagttgatttgtaagcaaaacgacagtgtgggctttggacttttgttgcctgctgcagctcccgtgagttggtaagtctcccacttcaaaacctttttaaagataaaaactataatcaattcactactatcttcaatttttactgcatattatc

SEQ ID NO: 46382 - DNA, 895 bp, Arabidopsis thaliana landsberg
attgttgagtgaaataatgggcgacttcactatctccctcccttttctttatgtactctgtaaaccctaatatcctaaatacatgttcctcaattcctcaatttgctgttcgccacttcgtatttttcaaatctatcttcgatttacttcttattaaagaaaaaaaagctcagcgacttctgctggagtttcattttttagagacttacgttgatagatggcttgttttaatttaccagtttccctcacacattttctaagcttcccggatttgatagtcgaacatattcccttcctttagcttcaatcctagttcaggtattttcctcaaaatcgtaaaataaccacaaaatatttcaaattcaagtacctcatattgatggataaaaaatatccaagaaaaacaaagtacaggtagaaggcaaaataaaaaaatatgggtaagaagggcccaaaaaaacatttctgagagaaaaagttcataaaatttattttcctatactcataacatataaaaaaatttataaaggtttctatataaaaaaataactgaacaatttacattgctagggacttattttaaaaattagccctaaggcctataaaatgtttaaaccgacacgaattataggtgttcaactcgtatcaccgtgtacttttagactctgcccaattcaccatgaactatatcataaacctcataattccacctaaactattaaattcatcacaattagacaacttcaattaattgagtcaattgcgatttaaaatccttaaacggttatgcgattatactaacatgagtttaatagattgaccgatttaaaagcctatttaaatactagggtataaatatctgtaaaaaatagctctcctggggaaaaaaaacttt

SEQ ID NO: 46383 - DNA, 554 bp, Arabidopsis thaliana landsberg
cagaagtctactttattatagaggagaagaagaagaaaaatgacgtcaatatgtttgggcaacgatttccacgcgccaaatttcgatttaatacatggacaaatgacacacaaaattttctaacttaaatatacatacgatatacataaatgataaatctaatattattccattatcatataatattttgtatgtgccaaacatcacgactttttttaattgcaattttgaaattcacatattacatttctatggaattttttattaatctcttactttttaaaatatttttttgcttaggatgtccaatctaatttaatcaacaaaaaaaaaatgataaatctatgggcctacacttttgggcccaaatttatataactcttctcgcgttaatcagaaactgatgctacttctcaaggttcttacaaaatgtgtaacaactaacaagtaagaactaaagaacacaaatctcaaatttgcttttccagtttctcaggtctagaaggaagagattcctgccagcagtctaaacttctcataggagacccaaaaca

SEQ ID NO: 46384 - DNA, 641 bp, Arabidopsis thaliana landsberg
cgtcagcactagcttctgcacgcgctggtgtggccgagaccacgttgccggaattcgctacgctggaaccgtatccatcgccaccaccggcaccatacccgccgccaccgtctgccgagccttgtccagcaccacggccgcgaccactgcccccagcactagtcgacccgccatagccgtaacgtgactgcgagctataactagacccgtaccctgtgccaaacccagccgcagccccagaacccgccggctgcgaccaagaactggccccgcctccgcccccaccgcttgcatggactccagccccatcactctcaccggatccagatccaactccggatccagagccaccaccgttcagatacccgctaccattaccatctccggctccttgcccttgagagctggagtatctagccaccctgatggcgctggctgatccaatgctcaagagaacaaagaggctaagtgctagtgcaagttctttgctagccattgtgagcctaactagcaatcgctaataacaagcactacgcgctggtaggagcaaaggatcgcatgggtatttatagctttgttgaacatgttaatgaagatctgacttctagaccaatgcaagctctagtggtcattatattttg

SEQ ID NO: 46385 - DNA, 278 bp, Arabidopsis thaliana landsberg
aacaagaaatgcaggtgggcattaagatgccaacaagcaagacaatggagcttacagtttagcgggaacgttgaagagaccaaacacactgcacagagaaataaagtagcaaatgaagaaatatgagatgcttcatgaatacaaagagttggcaaaaaatagcccacattcagaggacattaaacgcatatcttattaatatgtgtacagacatgtgtagcattaacatgtttggagagaatgtatctgaattctaacaagaagctcatatttacttg

SEQ ID NO: 46386 - DNA, 642 bp, Arabidopsis thaliana landsberg
  unsure (1)..(642): unsure at all n locations
catttaattttaaaccgaaccttggcatcgctagccgcgaatagattctcttcaagctcggtcacatttttgatcaaacctcaccaaaacaactctaaaactacaaaaatctcccagaaacaaaggaatcaatacatgaattcagagaaattattaaaacaaacaatgaatcatgctacaatcacagaaattacctttgctatgagaaaaagatcttaacccagaaaagagaaagaaaaaaaaaacagaattttttattnnnnnnnnnnnnnnnnnnnnnnnngcaataacggaactgaaacacatccacaaaaaccgggaaattctacgattaatagaaaaaattgcgaattacattaaaaataaaagagagcactaaaaataaagctgcggagaacacgtgtggaaccagtaacaaccaaaaatggacaaacaaagacaaaacaaagaacagaacagaagagataagatagaggtcaaacatttacataccggggatattgagagaccggccaaggaggaaggttcataaaagataaaccaatagagaagaatcagacaagtgatgatgaattagggttttgttcttggtaaggcgatccatgattttggggttaaatgtgagagagagagagagagagt

SEQ ID NO: 46387 - DNA, 614 bp, Arabidopsis thaliana landsberg
ttgttcccggagggagtgggagtttggaagatccaaagcggcgctgagagattagacaccggataaagtattggaagagacttccggcgaagagagtgagaggcaaggcggagatatccatttgtgtttttgttctttgatcagaaaaaaacccacttcgtgttatgacagtgggagtagctgaacaacgaagaacttgtgaactctaaaagaaaacaaaaatgaattttttggagttttaatgtaatggaagaaatgtttgtgatgcaaaacaagtgggagatgtgaaggggttttataggctattctcataagtaaatagagagagagagctttcctttcctatacagaagaaactcttattagagagacagctcatttgagagagacgaagatagcacgtgtcaaagagcatgcataaagagcgtgtgagattttgaccaaaccaactaattaaagacagagagagcggagggccattcaaatggattaatttggttaataatttcgttctgttgccaaaaaaataacaaatttatttttttggtgttaataaaaggtgggttataaggcctattataaagagaaaacaaaagaattgaggcatttgggtt

SEQ ID NO: 46388 - DNA, 407 bp, Arabidopsis thaliana landsberg
aagtttattactaggtatccactacttataacatgacacatggagttggattcacgtcatccattatattatttgaatgacaaattgtccgaaatacaaatttttaaaaatttatgcaaatgtccttccattgtcacagctagaaagttcataggtccctaaatcgaacacttcaagcataaatcccgaataaaaacgttgaagaattaattactccaattatgcttttaaagatgtagtttggttacgcgcggtcgattatttttgttgacgtatttgtccctttttgacaattctttcatgacatatatttagtccgcatgatgaatacaaatgttgtgattttcctttacatttcatcgaaatcagatggtgaaaccaattatataacatatggactttgagtc

SEQ ID NO: 46389 - DNA, 595 bp, Arabidopsis thaliana landsberg
  unsure (1)..(595): unsure at all n locations
gtagacgaagatgaaacagagaactctcagagcatgagacgaaactccaaatctcttcccaaatcaagccaagatttccagctgtaaaggcaaatctgtttggtggggcgataaggtataaacaagcatacacatctttgattgttcattatgtctcttaactttgaaaacatgtttatcttctgaaattatctgatcatacatgcttttttatttctgtggatagggtggagacgcggtgttttcaattggtgctgcaaggaatatgaacatgccatccttaattataggtccaggatcaggatacaacgtgaannnnnnnnnnnnnnnnnnnnnnnnnngtcgtgcactagctgatgcaattggaaaagcaaaggtaagaggaattatccatgatcagcttagagcagagcgtgagtctttcaaagctgtttttgacacgagacatgtacgaatcgttacaaaggataagtaagtgtatgattttcttccggtaattaaaatttattttgcctgatccacgagaattaatcagttccacttctttttcattcacattgaccaataaaaattgagaaactttagaaaataaaaa

SEQ ID NO: 46390 - DNA, 568 bp, Arabidopsis thaliana landsberg
tgctgggctcactggatcacgagaatggtgactgtgacagccaccatggacgacatttcagcgagtggaggatgttcgcccaactgcgctccttctacaatcgggctggagttggatttctggtggctggtggaaccgccacagcgagacgaagaccatcgtcaccagcaagcgggagaacgggtcgacgacgctggtgagctctctcatctgtattctacactaaattatgaattactcttgcattgtccgtctgtcatctgaaaatttatctctcgctgtatcggcgtctgaatggttggtggttttccacaaggtccaattcgaccaggggcatgatctggtgctgactggaccctacagggccatctctgcgtacgggagcgtctccgttgaaatcgacagctccaccacgacagactcctccaactcctacattgaacttggcatctccacggcagagatagactacgtcagaatcgacgtctccaagaaagatgcccgccgcagcagcgacgacgacggcaggacaacgacgacgctgctctgggattgctacaacgaggaa

SEQ ID NO: 46391 - DNA, 561 bp, Arabidopsis thaliana landsberg
agaaatttgttgtttagatagttaatgagaccccgtggtaagatgattctgactgtcataccaattaccaagtaacaaaaaaacttaccaaaatgttaaattctaaattacaaaaagaaacgaagaggacccacatcattctataaatgtacatgatatatatcacatccccaaagtagctaaacaacacacacacaaatggctcctcgtgtgatcttcttacttctctcgcttgtttttctctacctcgcaaacacatcacactctttgagaaagtttcaatcatttctacaccctatttataaagacacggccaaaaatatatacaccatccctttgtccatcggctcaacttccagcgaaaaattcgtccttgacctcaacggagccgcaccgttattgcaaaactgtccaaccgccgccaaatccaccacctaccacccaatcagatgtggctcccaagatgcaaatacgcaaacccaacttccctgtccaacaatgtcattgcaagaagaggacgtgtgtcttctccgcaatccgctattcgagacacgcccttgt

SEQ ID NO: 46392 - DNA, 604 bp, Arabidopsis thaliana landsberg
aaatttgataccatctgctcaatctcctccagcattgcttcagtatgttgtacaatcattggctcattaaagtcacctccttctttatcactttcatccacatcaatgataatcgtctctggttcttcacttgaaactgagtctggtttcttagtttcctaagagttaaagatcagaactttaaaatccggtctatatcatcattgctctaaatgaaacatacattgaacaatagggtacctcatcacggatatgtggcttatgatctgctaactgagcagcaaacttcctgaaccaacagagagtagtaaaagttaagtaatcagacaatgtgagatactcaaagtagacaagagtaaagatctatgcttacctagtaactggtcgatgcacaggtggtttattacaaatgccatctcttctgcaaagtcacagaaagaaatagggttcctataagagtctaatcaaagggagaagaaaaaaaaaacactaatcttgaatctgaggattaaagtgaacttactcagaaactgatctcttgttgacagcataagggtaagacggcgcttcagtgatgttcttgttgatagtgcttagtgctctt

SEQ ID NO: 46393 - DNA, 702 bp, Arabidopsis thaliana landsberg
aacatttctaaagtgagtacactgaaccaaacgaaattaacctacattgacaaattaatattgacagtgttttttatataatacttacaaaacatcgtcaactggataagaaaaatatgtcatctcgaaaatggaaatgtaatatatagcttcttctcattgccttttgatgttaacaccaaaaaagcttgatcatgaaagtgttaaacttataacaaagtactttgacttgagtcactgtttaggttttcttcttctggtgattaatgttaaacttaatatgtcactatattaacgtataaagtgaagtctaaggcagcttatattcatattattgcatcaacatatcagtggacaacaccaattaggataagagttgtgaccttcccagaaaccatacccattttcttggcttgtcctctaaggataatcctgatatcatatagttttcaatccgctgctgattcggtcgactctatgtgtgaatgctttgatactaggttgaacttggattggatagtcataatcataattacatatttatatgccttaattgatatgaaattgaaagagaagacataattgaatgaaaaagtacaccaagagttgtctttgcaaaaaatagagtgacacgaaagggaaatgcctgtaaacacatcgacagtggttttattttaagctacacactcttaacattttgta

SEQ ID NO: 46394 - DNA, 547 bp, Arabidopsis thaliana landsberg
tgaaaaaggctctcaggcccagctccccagtgagaatcctcttctgtagtcgatcagtgataacagatatattgataccagatatgcgtctataagagttgccacaaatttgctctcccagctcgtcccgcaaggcacgagcatctgcatcagacatggggggcgggtcactgccaacgtttggtaactgcaaaacacaccaaacactttgctcagtgattggaatctcttttccaccaccaatctctaatttcatcgtttccaggttaagcttccgcatcagccagctgagcaactttctagacaataagtgcggcttgaatctcagcaggccgccaaaccccttggcaactacttcacttcaattcatcggagagagcattcacaagctttaagaacttcccaggtgagcatcgtatagctcgcgtcttagttttacccttattctcatcgccaccaacaataccaacattgtcgtcgccagaacatcgccggcagagcaaactctaggtcttgttcatcacactttcttcatcttgaataggag

SEQ ID NO: 46395 - DNA, 553 bp, Arabidopsis thaliana landsberg
attaaagatgttgaacattgatgacttagttattacgataattaattgcggttgttgtatcattcgcaatagataaattaagagaaggatgaatgggtatataacttctggattagttgagaaatcttcgaaaaactttttgactttttttcattgtttgccttgccttttggttgaaaagccaaaaagcaaaagaataatcacggagtgggatttggtaaagtataattcagcaaaaacccaaaaagggggagaaaatttaaaaagcaatgatcatactacttttactgaatatatgcaatcgattacttaacctaatgaagatcttagtaattaaaaagccttctaattaagtatcattggtttctaagtttatatattttacataggattctctcctttaccatttactataaattttctttcgtcccaactttagttcgaaattaaaatcattatcccaataccacttgttaattaagtagaaaacacatttttcttacatcatatatggtttcctattgaaattgtgattacatatacgtggcaagag

SEQ ID NO: 46396 - DNA, 443 bp, Arabidopsis thaliana landsberg
  unsure (1)..(443): unsure at all n locations
ttttttccctctggttgacgatgagttgaattgcaccagcatttgtttaaactcgccctgcttttatttgcctgttcttcattggaagaggcggtagctttttggccgtagctctcattgctctcattgctcgatactgcgaatctcctagcacccgtgagagtatcagcaaaactacctgatccgctcactggcacaccattctatcaatgctaagagcgagnnnnnnnnnnnnnnnnnnnnnnnnnnnnnnnnnnnnnnnnnnnnnnnnnnnnnnnnnnnnnnnnnnnnnnnnnnnnnnnnnnnnnnnnntcccagcccctgtatgtgggctagacatcagaatagccctcgtggcagtgtatacacacactggcgggaggtctactacacaactgccactgcggcaaagcattcatcggctgtgtatgtacacactggca

SEQ ID NO: 46397 - DNA, 713 bp, Arabidopsis thaliana landsberg
caatattttcttgaggtgtcaaaactaaataaatagaggggtacccaatactatatcatacatatatacatagttttatatacagtacataatataacacgtaacactctaagattttatcgtggtaaaattgtgagtcaattaaaacaacgtaaatttttatttttacatttcaaaagtaaaaagtaaatatagataatgaacgttgacgataatgtttaggcaaattacttcacgggctatactactaaattatcatatcataaacgagggcaactgagaaccacttacaggctgccacgtagaaatcttacccttgcttagtaactttttggtgttaacccaaccaatgaaaattcgttttggtggttcaacacgacaaaaaacgggattacaccttatcctttctttctttctttttggatttcgaattttgtcaatggagttgaaaaatcaaagagaaggacaaagctttctggcagtcgaatcttttggtacctcgttttcttctcagatggggacctaactagctttaagttcattcaatcctttttggttattcataatgatgttagtatataatttaccaaattgtgaatctcatgatactaattatgatttaaattaacacatttcgtagttatattttcaagaaaataaaatttcacttgtaggattactcattttcattagattttaatgtacattatact

SEQ ID NO: 46398 - DNA, 554 bp, Arabidopsis thaliana landsberg
ttatgtttcatcgcttaagtaaagatttatgttttaactttaaatagaaaagagaatatgtatttttagtaaatcaatctcctagtcctaacctaacaaaaaaaatgttcttcgacaatttttatcaaaaagacaaaagaaaaaatcgatctacgtatcatgcagcatttgactttaagaatcttagctgctaaaacccggacaaaacacgtgacttttgattttgggtcaccagtttatagtatcatatttgttctcttacgaacatttaatacatgattataaatggttaaacaaaaggtagaaccaagatattgtccaaatatccaatatagttttaaaatttgcctacaagtgcaccaaacttacatagatcataaacatgcatagattaaaaataatatgttatcttaaggtttttgacgtgtattctatgaataagtaaggttttacaagaaaatatatctctttgtaatattatgatttttttttttaaaaccgatcttttttgaaatacgacattagaaatatgtatttaacttaaatatttaccg

SEQ ID NO: 46399 - DNA, 596 bp, Arabidopsis thaliana landsberg
caagccttgtcatcttgctcaaacaactatatataaactctacaaccaaagttattaagggttcatgttgagaaaatgtcgagaaaatgccccgattaccttaaaaatataatttgaagctttataatggtgctaccttgaccaaagtgaaactttgatttatattcaagatatgaggtttgacctttaataaaaattgtagaacctgtgttatacaacaaattttatatataaaccaagccttgattcaatctctaagtatctcaaacagtgccatcaatacagaataaaaaatctgatttcaggattcaaattcttttaagtctcaaatcagtgtcgttcgggtcgacgtctcgcgttccctaaaatttgttaaacaacttgagtttcaccaaatataaaagttgttagtaactaatggaggcacatcatatcaaaagatggcattcatccgacccattttgacaaggtttgacatccattcttaggtgaaattaaccctttgacagtagcaactttggacttaattatctcttaatctagtttgcaaatggctgagacccttaatcaacttgtagagtatgcgtgggaaatac

SEQ ID NO: 46400 - DNA, 456 bp, Arabidopsis thaliana landsberg
ttggctgtccctagagtactgaaaagagctgtggagtatattctatcttcctatttttaaaagttaagcacaacaaaaaataacacacaagatcaaagagggtccatcaaaagcagccaataatgaaaatgatttcatatgaagactagagactagagagttgtcacacccaacataaagaatcttagccaataaataatatatgcatgaatgtggaatatccaatacccttatagtctattataagaaaaaagaagaaaaaaaaaggcactttacttcatgtctagtctaaaagcaaaaattaacgaactacatatcatatatacatgaaacagaattgacaacacaaggcttagtttatgtgagagacagaatgatcactaccactatagcaaatgagcacaattatatttactttcagtcttctctttcgaatataaagatgttttaaatcaa

SEQ ID NO: 46401 - DNA, 544 bp, Arabidopsis thaliana landsberg
tgactgccgtccagcactttctgtttgcgcaaatgattttgactgcagaaagccctcatctcgagtaagtctccgtatcgaaattcttaagcgatgcaagctaaaagataccgaaacgaagtggagcgaatcgggccacacatcgaaaggcagaggcaaaagttcgatctttggttctgagaacatgcggaatagcactgtgtcatttgcgaattcatcctgccctggtcaatgcagtaatagccatcacactatatggagaatacttcacaaatccagaggagagagaggcgttgctgggaatcataaacaaaaccagcaacataagagcatggccaatgagaagacagtatgataaggtgcgacggcgatgggaaatgatggatagcgttgagatctgatgtataattaattccacagaagcgatgtgtgactcgagatcgccacaggaatattgtcgccttcgctttatactgcttcagaaatctgttctccgtagactcggtgtcatcagatctggtttatctgtttgtcccacaatatg

SEQ ID NO: 46402 - DNA, 672 bp, Arabidopsis thaliana landsberg
gaaaaaccattacagcattaccactacattaatatcgtatcgatagttgacaccaataatagtgtgttaatgctttctttgtaaagttcatacaactcctaaggactttcaacatatacttatgacgattgtaaccaataagcctatcaattaactgtttcaccacaagcaaacttaggtaaattaagaggaggagagagaggggtgtggtctacatctagaaataatatgaggaggacaacctcaaaatagtcagtctcaagtataagtgttagcatatgaagacaagtaaggaagagtggtccattcttgtttctgatccgtccggacgactttaattatggtttctatatgactgatccaccacatgctccttgttgctaatacaaccaacccctagagcttggacacattttttgttctttattaagataattaaagatacttatgttttcttagtcaaagctcaaaaatatcagaattgatatcaaatgttttacaatctctctcaaagaaagagtcaaaacagtattttcttaacttgcaaatccaaggaatataaaagatataacgatcctcacattatcttgcaatgccaccaagagcaacatatcttctaacgtgctgctttcaggtcagaagatatgtcctttaaacttcaaaatgctcatt

SEQ ID NO: 46403 - DNA, 659 bp, Arabidopsis thaliana landsberg
aaaaggtaacattatggtcgtggatttcataagtgaacaaaacaatcattgactctatggaagtctataataagtggtttacacgaaactatcccacctgtcttttggccatctatatccggtcgttttcctttttgctgctatatcattttttagaattctctcaaaatttacatttttttttgcaaaatacaaccttcacgtattcttttgtgtgttctaaattgtaactctgttttataaaacctcaatttgttttgtgtagttgaatttactagccaactaattaagccgagtgtttctaatcgtcaaatcatttttcagaaaaaaagtcagccaacttactttctcaccaacaataagccaatttggttcttatatactcactcaatattcaactataatttacaaaatacttttactattatgaaaaaaactcatgcatagtgtcttcaatgtaagtatgtcctacaaaatgttttagagttggctggtcaataaatgatagattcagaattcgtaaagatgatgatatatagaaagagcttgtacagtagcaagtacaaataattgattaccaaatgggtagaatttaactcgaagacgtggcagagaaggtgtactataaggaatttaagaacacacgtagaggattaaca

SEQ ID NO: 46404 - DNA, 779 bp, Arabidopsis thaliana landsberg
taatttgggttcatgggagtggttcttttaaatcccttatcccggtgggtttccttgtcataaagcccctgtcttgatatttcattgtctaggaagcttcctggcttaacaggtcatttaggttttttaataaacccgttatttttttgaagacctggttcaatgtctttatttagctagggaacatcacatagcttgaattggggactatcaatgcttccttcttatggattcttattatataactgtagttatagaataaaaacatagacataaggaaatttgttttatctcttttcacattcatattctgttagcatcaataattgtgtgtcgctaaaggtttaaggttggaaaacaatattgcaggcactgatttttggtggtgaagatggtttgcctgcaattttagcgcgccaccagatcccaggccttgatgttgttgttgatccatgtgctgctattcttgtgtttgttgtaactggccttttgtgcatgggaataaaggaggtacaaactttatatgattttgatcccgacatcaggataaatttcaactcattgtattctcatatatggaaatatcttctatgcagagcacatttgctcagggaattgtaactgcagtcaatgtgtgtgtcctgttatttgtcatagtagctggcagttatctcggcttaagacaggttggcctggttatgaacttccacagggtaagatgagcattcactatgacttgagctatttgtagttaaagatacctaaatactaatcatttg

SEQ ID NO: 46405 - DNA, 294 bp, Arabidopsis thaliana landsberg
cttagcagatgctcgatccaataatttcttcatcaatcacttataccttcttttttgggtggatcaacttcattttttcattgtgcagtggtaaagttatgaagtactacactcatgtaaaacaataatatacgcacatccgattgggaacaacatggtagaaaaaaatatcaaatttccatatatgttaatcgaaagacaaaatggggggaaaatcactattttataacattaagtcgcatcattattaatttcttaatcaacttaactataactattatgtactacatttgg

SEQ ID NO: 46406 - DNA, 730 bp, Arabidopsis thaliana landsberg
ctccttttcctgttatgcaaactaattccaatatttgaaacatttggcttctctttgttgtgtcaagactcctatgagatgttatgtgaactactggttggctttcttgggtttatttgtgaactaaaacgggccaagtttgggctaagatttatgagacaagtcaaaagcccatgatcatgggaaacgttcttctttggacgtgagagtccgagacaaccaaaaagttatgacagcccactttctttcagaacacacattttaacctttttcattccaatagtactttccaattttcatatcataggaatataccaaagatagagtgttttgagagacggtcattatgtttggtttagaagttcttttatgattattgtttaattctcaagtctctataacgtgtcatgttaattattttaaacatcctagtaatagaaatatgtctaattagagaccacaaaaagattcaaaaaaagtgccaattaaaagagtgaagagatttaaggattatccgggaagattcggggagaaagaaatgtcgcagtgtggtgcatgatgcggctacagcaacggaagtaagaagaaaaggtcagaaacatgttgcatgttcccaaagttgcacatgagaggttcacgtcattgtcatatccactttctcacgatgcaccgtttatattcacgtaccaaacgctccgattctttttcttttcgatttttctaaactgtt

SEQ ID NO: 46407 - DNA, 737 bp, Arabidopsis thaliana landsberg
cttgaacctgtgatcattgagttagaacgacaaagagctcctgtcgtcgtgatatctcaccaggttatactccaaacgatcttgtgcataatgtctaaaaccttaagttctggagggatcaaactatggaagcttagctgtgtaaaacttatgaaaaaaacacaacttgccactaagttctaatttttcctctaactgttggtgtttacgcaggctgttctgagagccttgtatgcatattttgcggatcgtcccctcaaagaaataccccaaatcgaggtaaaatctgaattagaaaatacgagactatcttagaacgattgagctataagctttcagagagtcttggctgcaagccacacacataataacatattttggatgtttcaacagatgccacttcacactataatagagatacagatgggagtttctggtgtgcaagagaaacgctacaaactcatggactgaattcaaacaactattaccacaaattctcaacaaactctcgtcctaaaggtttttatattttacgtatactctgcaaatcagattgcagatatcactgggttgcattttggtaaaccagtttttcctttctccaccaaatctttttccttactctgagatgtcctgttatataaaaatgttacttattcttgatagaaattgacttttatactactaaaatacgaatgaaattactctgccttgtctagtcttttagcatacatact

SEQ ID NO: 46408 - DNA, 361 bp, Arabidopsis thaliana landsberg
  unsure (1)..(361): unsure at all n locations
ccccgaacgggtgatccttgtcgtccttcgggttggcattcatctcgctttcggccacgaactggaatccggcctnngnnngnatctgcttgaccagaggttcctgcacataccccgttgtggcgccaggatcctgcacattgccgatatcggcacgatgctgctcgacccccaaaataccgcctgggcgcatagcgagcaaggcatccgctaaagccttttcggcgatgcccttggcaatccagtcgtggatgaccagcaggaacagcgcgcaatcgacgctatcagcttcggccagggggccgctggtctcgccgaaagcggcgtaagtcagttcgccgtagcgcttcttgtcggcagc

SEQ ID NO: 46409 - DNA, 475 bp, Arabidopsis thaliana landsberg
catcttttattcaggttgacagaagactgctcactgtgccaaagcatggcattgtaggtgtgccatggggaaaacttcagatctcaggtctaataatgtgatggcttaagaggtcacaacctagaacatggtcattctctgcagtagtggtgttgtgacggtcgtatgctgagtctgaaagcatcttctcagtgaccgcttggtgaagagttggactgtggtcctttgcttcatgaaggctgctcctactagagccctgcctctcttctcctctcctgttctctctacccagggcccacacctcagggagacatctcgaattgtgtctagataggagactgcatgctcagctggttcccctgctggcatttggtaggctagcatttgagaggcttagacatctgtattttcattgattaaaaatacttaacgggggactaggaagatgcctccatgaataatgcacttgccacac

SEQ ID NO: 46410 - DNA, 241 bp, Arabidopsis thaliana landsberg
tgattggagataactgctcgaataggcggcgactactcattgggttcatagtagtggataagattagtgataaattccaaatatattggggtatcctggagttcaaattcgatcacatgtcatgatagattagactcagacgccacttcagatttatacgtaaaaacttgggaccgatgattgagttcgcctagagctatcttagtacgtagccgttttatatcaaagtcaatgactaatc

SEQ ID NO: 46411 - DNA, 533 bp, Arabidopsis thaliana landsberg
gattttaactaataagaggcgtgaggaggatattatatgtacatccatttaaggataaagcttcggtaacagccctcatataattgtcctaaataaggataatgcaattgtatctatacactatattgtcctaatacatatatctttccgtaaagagttggctcttcacacacatcttgaacgaagcatctgatggtctttattccttgtcatcagaagcttcttattggggtgatatttaatggaagattctttgacgaaggaggagtcgtcacctatatgctgtttcaagtttcaaattccaaattataaagagattcgttttgttgaataattattaaattgatcgactggacttccattttcccagatttgcaatcatgcatgtggcaaaccaatttaattctttgacttaaattaaaatgaagaacgaatttgttgctatagttgtaggatggttttttaaaaaataaatgtattatcaatttatactaacgctagattaaactttatagtattggactttggatttg

SEQ ID NO: 46412 - DNA, 645 bp, Arabidopsis thaliana landsberg
aaatcaacacttctaaatattttactctatgggaactctttttaatactaaagtaaacaacccggatcattttattttcatctctttaacatttctgttgggatccgaatccatctataatcgatgtccaaattgtaaatcggaaaatgttacattctaggaagaaaagaaacactcacaaacactcaccctttaaacttattgttctcgagctgaattgcttgacatttagcaaaacataaacctaatcttaaaaaagttactatgattagttggttaattctaatacaaccatccacgatgattacagctgaacattcgtatattcgaaacaatcaaaatttctattgaaataatcaaccgtataaagtgtacacgtgcttagaaactttaaactctttatttcatccgaatcattgcattaccaaatcggactgtttcctttgattataagccgtccattcttatcagatcagacttgatcggttaacattgctctgtgcccaaaaccttaattgcattcgatcgcagaaagctaaagcttatcttttcttttgtgtatctctcacccaagttttttacgataatcagagaaaagtcgaaaccatttttcgcttaatagaaaaatcgaaactttgctggggg

SEQ ID NO: 46413 - DNA, 452 bp, Arabidopsis thaliana landsberg
aagatgacgcgggcgaagacgaacgcctggtcggcgcgcctctccgatcttctgttcccgaccgacgagaagaattggggcatccagccgacgccggttccaaccttggcgcgcaaggcgaaggaagcggtcgaccacgccaaggccggcacccagctcgccaatcaggagcaagaccccaagcgcgccgcccagatcgcggcgatggcgaacgacttcgcccaggcggccaaggacaccgaagccgagatcgaggaagccaagaagcgctgcgaccggatggaaaccgcgatcgacgatcagctcgtcgaggcggactatgccgtccagtgcaggctcatcatcgaggatgcctgcaagatcggcaccggcattctgaaaggtccgatcacctctcagcgcctgcgccgggaatggagccaaagtgcgaacggctaccagctcactgaaag

SEQ ID NO: 46414 - DNA, 414 bp, Arabidopsis thaliana landsberg
ttgaatcgctatagcagtctaagtttcagtttaaactctcaagctagactcacagcaagaacagaagctaattgtattcctcatttatttggcagaaacttgtcttcaattgggttggtcggccctatcactacctattttggagatctgaaagcactccagtactacttgcaagttccaaattaaactctatctagttcatctcctcccctctgcttgtttacttgtattttttacctattttctctcttgtatgtctagcgatttctgttacctgtacccgggatctgtcacacaataacttgtcttgctccattccagattaccttggaaagcttccgtttctagtgtttctgtaagtccactaaatatctgctcgagttttagaacttcataaagtgaactttcatagac

SEQ ID NO: 46415 - DNA, 710 bp, Arabidopsis thaliana landsberg
cgactccaagtaattatgttcccaccaatcaccaactacttcacttagatctgttctccataatctctcacacttcttcttttctcatctttttaattagcaattattgctattttcctgcctacatctttatttagtaacttcattttctgcttttagatgatagtattaacactcaccaagtccaactcttatctacatagtctaacccgtgatgcaaagatatttaagctgtagcacgtatgacttaactttgtgggcgttggatgactgtgtgcataagctgtaacctcaaacattacgattttcgtatatggctcgcaagtcgcaactaggttcatgtttctttgtttttggtttaaaaaaaaaaaaaacaagtaaaagtgaatatattatggataggtctggtgtcgttttcgttaaggttgtttgttttcatataaaacaataaattcattctaatcaagtaaggttggtgttatatatatgattaaaaaaattcggttcgattagaattgtattgatcaatatggtttaccagatttgaataacatccatacacttttcttctgataaagggaaacctgataaacagaacaattaaaattcttataagttataagggtatagtactttatgtttatcatatgtgagactgagattcctaacaatttgtaagactatacaattaaaagaagtggaatataatg

SEQ ID NO: 46416 - DNA, 629 bp, Arabidopsis thaliana landsberg
  unsure (1)..(629): unsure at all n locations
gaactttttgtgatggactaagataataaccgttgatagaagagttgtttgtattttgaaagtcgtcaacgtcatagaaatcatactttccactatatgagattgtctgatatatcttctgatccgattgttccaaatgttgagaaggatatgtatagtaatcaccataatatccattgtaannnnnnnnnnnnnnnnnnnnnnnnnnnnnnnttcgtttcaccatctttagaacctcttctcgatcaacgtatcccgtgactgtcactttttgtcgatccacgtctatctctaccgtgtccactcctacacatatttattattatactgttaatcaagatttgccttaagaccaaacatatatttatgaaaactaaatgatacgactaaaatcgatgtttgattttgtttttctgaatttttcttaccatcgagtttagaaatggctcttcgaaccttcttttcacatccttgacaatccatgtctaccaaaagctccacaatcttaaacaacagaagaaaatatacattagaaaatgaacaaaacgtttgatgataaccatcaataaaaagaacaacgaacaaagacatagatggcaacgtacagataaagcgattggtagtcgaga

SEQ ID NO: 46417 - DNA, 526 bp, Arabidopsis thaliana landsberg
ctttatggaaactgccggtgtttcaggttgttggagacagaaaaggttcggtttttggtggtcttgttgaggcacctttgataccaactgataaaaagtatcaggtttggttctaaagatccaatctttgtatatagattccatctatccagttttctttcttttcactgtaattaacattcttttgtgttgggttgttttggcagggaaccaacagtacctttgttttcacaaataaatcaggacaacccacaatataccgtcccacaggtatttattatgcattacttggatacatagaacttgttgggaagttgtttcattattcacctgtaattatggatcaggcgcaaatcggttctacactttatgctccaaggaattcctagctctgggcggtggtggacggtttgctctctatctagacagtgagctgtaagattttcttaccaaatctcttaaatcatattgcatttttattatattgcaagattgcgaccgacaacaaggcattttttctcaaatc

SEQ ID NO: 46418 - DNA, 682 bp, Arabidopsis thaliana landsberg
cagatgtagctctattttaacatggttaagatggttattggcagttcgatagcagacagaatagattcccttaaaatagtggacatacttgaccgagttacttctaattggtgtagtgatgtttatacttttctcactgtctcacaatactctttttttatataaataatcccaaacataattgaatggtgtttcaagtacaaaatttggaagacaaagagcatcggaaaataacattgttttcttatttcaatacttgacaaagttcttgagagatttcaaccacagtaagtgctctctactatccttgttgatcatgtactcgtgcaagaagttgatcatgctcggctttatccctctaatctcaatgtacctatggaaagccttcctaagcttttcatccaaaaccctgcagaaagaaaccatcaaagatcatcgctttgattctggtaacatcaaaagcttaaaactttttcttctattacctgaaggaaggtccttcataagcaagctcatctttggaaggatcatcaggaaatgtaacccacatgtccttgatcgcaatcctgtctggaaaagcagtacatctaaattccaaacttggtcctgtcttctaaaaaagagttactaagagaggcacattcgattgcttaggcttctctggcttatcctcatgttcatc

SEQ ID NO: 46419 - DNA, 566 bp, Arabidopsis thaliana landsberg
tgccagacaaggacctttgatcctacggcgactttcgtgcccaatgagccgctgcagacggccattcccgtcaagggcatgaagcccggcaacgacaccatcttcaagatgatgggctatttgtctccgtactttccttctccgggctttggcgtggacgagtacccgctgcctgcaggagctgagatcgttcaggtccagatgctgtcccgccacggagcccgctaccctacttctggcgtcggcgttgttgatttcgccaagcgcattgccaatgcctccaacaagttcaatccgaaagggccattgaacttcctcaagggatgggagtatcatctcgggtctgagattctggtaccaaaggggcgtgaagagctgtacaattcaagtaggcactgaggcttcgttctggtatgattcgatatcctacgtggaaactgaccatccatctgtataggagtccttcataactacatgtacggcagtctgtataatcccaaaagcaagattattgtccgcacaacggtaagtttctttctcatttggaatctaccaagtagcaaact

SEQ ID NO: 46420 - DNA, 649 bp, Arabidopsis thaliana landsberg
agctgtcttgtgccacgtcattccatttactgcttactagtagtcattgaactttcgtttgaggtggaaattttgttttctttattatgaatgtaaatatgatcttatatctagaattccgattgtgcaagcttgggtgatataggtgctagggttacacaaaagtgacaacattgaaatgcagtggagttcttacattttctcatttccatctgatgaaagggagtagtgatatagttcatcctaatctagatactctctttacctaaataaaggcatatgggaggacacctttcaatgtctgtttcttatgacgttcagatattttcagtcacaacagttgtgattattcttcgtggctaatatcatagattatgttatgttatgttgaactggaccgttattctttcttcatttgttcttctgtgatctgaagcaatgattaaccaaaaatgtatgggtatatagttaatgtatagatgtgtattctctgatacagagagcagatgcaagaactgactggaaagaacattcaagtcctgatggaagaaagtgagtatgcaactaaagtttatatttcaataacatacaactgatgaaaaaataaaaatctttagcttttggatgttgaatctttaatatggttgca

SEQ ID NO: 46421 - DNA, 589 bp, Arabidopsis thaliana landsberg
  unsure (1)..(589): unsure at all n locations
aaaccattaaaacaaatgtgtacacaaaggttacttttgcttttaatttctttatgtaattaataaatcaaggcgtttcggccattaataaattaagatatttgtatctaattcaacattgtaaattatcatatttaaaagttcttccactatcaaatttcatcatcgccatataattagagtttctacactcgatcatgtattaaaagaagatcttgaccacacacacaacaaaagaaacaaattgtaagaaaatacccatttgcaaatttcctattaataagttataaataaattatatgtcatttgctatttactaatgtcatttatccagttttcattggacaaactctgcctttttcgtccatttttttcttaaaaaaagatggccattcatagtaaaaagaatattatgtagtgcaacacaatattgatatatattcttatatttttgacagaatttgttcaatagtttttgcatcaaacaaaacgagaatggagaaaataaccattgatatattgacgtgaacactagtcgtttacattcagaatacacaatagtaatacgaatactagactcangagcatg

SEQ ID NO: 46422 - DNA, 597 bp, Arabidopsis thaliana landsberg
ttcttaaacagacgtcgttttgtgtctttacgaatttagaacagaggcccattgagtgaaactaaatgggtttaaaatatcagacgaaaacaaaaagacttgaaagcccaaataaataattaagagactctacttttcagttctttataaactttttttttgcctttgatgttttttttttctctgtcagctatatttctaagtaactgaagcatccgaacatgaataaatttcaaattataaatttatagttaaaaaaaaaattatgcatataggttaatgatcttaattttgtttctaatcagtatatcaaatttgttctcactaacaaaattacattatactaatagtttcacacggctctgattctgaatatacatgtgtataaataacttagtggtaatactaaagtaaagattactcttaaaaaaagggtgatgttaattatataatagataagagttacctcgagaggggaatatttgggaagaataggatgtgtggggatgatcaaacacgaacgcatgtttgcttttgtggggggacaaaagtcaaatacactgaaaatttcaagattcaatcttaaagtaattccct

SEQ ID NO: 46423 - DNA, 518 bp, Arabidopsis thaliana landsberg
  unsure (1)..(518): unsure at all n locations
cccccctccccccccccgccccccccccccccccacccggacccctccccccccccccccccctttccccccccccccccccccccccccccccccccccccccttcccccccccgtgtctccccccccccaacaacccccccccccccccccccccccccccccccccccccccccccccccccccccccccccccccctccccccccaccccccccccccccccccccccccccccccccccctccccccccccccctcccccctttttctccccccccccgctgtcggccccancccccccccccgggggctcccccccacacccatcacacccccccaccctcgcctccccccctccccccccccctcctccctcccccccccccgccccccccccccccctcctctcccctctccccccccccctcccccccccccccctccccccccccccccccccccccctcctccccctccccctcccctccccccccccccccccttcgccccccccc

SEQ ID NO: 46424 - DNA, 544 bp, Arabidopsis thaliana landsberg
gaactatgctctaatgtgacagaatcaatgttgtcttactattatttaattttacttgtttgcaatgccatggaggggtgctggtgtaccagttcccatgttctctgtaaggtcagaagatgatgttggtgcgggagagacatctcgatctgaagccgcttgttgatcgtgctgtagataccggcttgcatctagtacaacttttaccagtaaatgacacatcctgtcataagatgtggtgggactcgcatccctacaggtatgatgattacatttatgttagttctgcaggagttcaataaaggacttttgtcacttacttaacggatggaaacaaatatccctgacatttttgttattaataaccttctctgactactgaattcataaatagttcaattttcgctctcaaattggttttcgagaccttgggaaccatatactttggccgaagacaagtgactgaacctgaggctctgctgaatattagacactactctctaactagaaaaactcctatatcaactcattgaactgtgtgaaa

SEQ ID NO: 46425 - DNA, 618 bp, Arabidopsis thaliana landsberg
tttgaagttcctactatgtccaaacatataaaacacaatgattatatactgtctttcatgtgccaaccactgatacagcaatatatgtaaaaatgttaatttagattggagcttatagtaaacattgattacgttacggctatttacaagtaaaacccaaatacccaactataggcttcttttatttgtcaccacccaattataggctatatacatcagttatcaagatttcagttaggttatatataatttatacttatttcttcttattcttaaattgcatcgtaagattatgataattcgtctctaatttctcttacggttattaggagttcacatggaataccagactaattttcatcaacgataatatttttttatttttttttttgcctaccaattatttagtgttaatttaagtttgtcatcaccaagacactccaatcaccagtccttttcaaaattattacggcaactccaatcaaaaatctttcgaataggcataaatattgaaagccaaatcgtgagaaagttacatcattcgtaagaaaaaggaacaaaaaaatataaaaattgtcttatgaattagagcaaagaccatacgtgttgactttatcc

SEQ ID NO: 46426 - DNA, 428 bp, Arabidopsis thaliana landsberg
actgctcaatcttaatctcctcgaccccggaggcgcacgagctcgtgcttgagatagggaaccggctccatcggttcggactcaatctccatggccatgtgatcatcaggtgaggctgatgccgacggctgctgatgctacactcacactctctgacggtggaggaccagctccatctctgctacatctacattgcaagtccatgtcgtatacgtcaacagcactagcccgagcctgagctggcactacccgcaatctcgcacaagggaaccggatcccataatgagatagagagtccctgaccctgacccagcttaaccgtaattggaacaagaacaagtcatggctcggtctgggtctggatggcgatagcattctgcttgtgcatggacatagggaaaagccaaacacctacatcttagatatag

SEQ ID NO: 46427 - DNA, 637 bp, Arabidopsis thaliana landsberg
tgaagctttttcatcaacacaggagaaaagaggaagaagaaggtgacttcattttctttattgggatagagaccaattctatattaggaaataattagtttattacttaatacaaattagagaacaagattaataagttgatcagaaaaaaatattatatatatatatgatggcaagaataaataactcaggataataatatttattcattcctagattgacataagaagtggtatatacagtaaaacttttttttaacactacaccgtaaaaattctataaattattactgttggatcataatattttattaatttatacagatactatttgtttcaattgtttaaattttttgaaaatacgaatcgagactacatataaaaggaatgagttttaatttttgtagtagtggacttaaaaatttagtatttcaaaaagggttttcgttttcttgcttgagagggatgttaaatccggtctttaactgaaccagcatctatgtcctttcctttcctctcttttcttgcttccatatcgcgtacaacaaacttggagtcagcaaaatcagagcacaaaaacctcaaatttgcgagcaaaacagcttcacataaggaagcgaatcattcaaatcaaaaca

SEQ ID NO: 46428 - DNA, 1673 bp, Arabidopsis thaliana landsberg
ctctcttcttgtttcacaagttagccgggataaacgcagttgtgtattactccacatcggtattccgtagtgcgggaatccaatcagatgttgcagccagtgctctcgttggagcatcaaatgtctttggttcgtttccccgttatgttctcattaaattccaaaaataaccaaaaaaataacacgataaaaatctggtcgcaggcactgctgttgcttcatcgttgatggataaaatgggaaggaaaagtcttttactgacaagctttggtggaatggtacatgtttttattaaaattcttagccatattcgaaaatctcaaccctcattagtattaccacaacaggactaacttggattttatggttttgtattgaaaaggctttgtcaatgctgttactctccttgtccttcacatggaaggctcttgctgcctattctggaacccttgccgttgttggaactgttctgtaagtcaatctcctcttaacacttccttatagtctctctgtataggacttgactgactcttatgctcggttgtttaaatcagatatgtcctgtcattctcacttggtgctggcccggtaccggctcttcttcttccagagatatttgcatcccgaatcagagcaaaagccgtcgctctttctctcggcatgcactgggtatatacatatatctataggttttatgggttcagaacagagtttcttctctctgtttctaatgttttgtttctcttttgccctaacagatatcaaactttgtgatcggactatacttcttaagcgttgtgactaaattcggaatcagcagtgtctacttgggttttgctggagtctgcgtccttgcggtcctctacattgcaggaaacgtcgtcgagactaaaggtcgatcactggaggaaatagagcttgctcttacatctggagcttgaaattaaacaaaagaaatcagcagaacaaaaaccagtttgtttcatcatttagtttgtgagtctttctctaatctgctactcttaaattgtacaatggacgaagttatcaataacgagaaatcttttcatgaccactacatgttggctttcctttcccacctctccctggtatctagcctgtttcaaaacaaaaaaagcatggcattagcacggttttctcaatatgaaaaagaattctaaaattaccgaaataagctcacccccaaaacagtttttgtggcttcttcggtactgtgactacggtcttgttatgattctgttcttctaaggtagaagaagaagaagaagaagttggttctttcaactttttagagctttcgccatcttcgatcgctttactctgacaattcttgctcgctgcatttcagtgtagagcttttagtctagtgaatatgaactgagaattctcaaaaaaagagagctaaatatatatatacctttaggtttcttcttatgaatctttgcattagcttttatttgcatacgtctcttgtgtagctcctgtaatctcaacacaaccaaaatggcttcaaattcaaattgctatgtacatagtaattcggttgaaagaaaaaaaaaaaaactggattgaacagttgatagaaattcgaatcaagatgattattcgaagtcgtgcttacaatctcattgggatatctgaagatcagaaac

SEQ ID NO: 46429 - DNA, 423 bp, Arabidopsis thaliana landsberg
cttgtccgtctcacacacacacatcaaaaaaaaaaaaaaacatttagtacaatatttactagagatcattgtgtcaccatccggattttatgagtagtggcatccacatacaaaaaaattacaagcctatcatattaaacacgatttttacgagaaaaaaaacgtttaagaaaaaaaacagattttcattttcaaaatgtaaataagaacatttttcttatgtttgttgaggttggagtttacatttacatttaaagaaaaatgagtttctttttccgaatatatatttacggttctggtgggttatttataaaagaatatactatataataaatattaaaccaaacacaaatagttaaagtacaatcagaaagagatggtttatagatgttgacctttttgaggccaggaagatgagcagag

SEQ ID NO: 46430 - DNA, 321 bp, Arabidopsis thaliana landsberg
cgcagcacgtggccagcgcactgactgctgctgtcatacataagccagcccctcgataaccagacccgccaccgtcccttgcgaattccaagagaagaagttattggaaccggtgttctgtgcagtctccctgactgggaggtttgtgagcagtccaagcagatggcagactggcagctccgctgggctaggttctcctcaggaggcaagaccggtgtcaaccgcctgaccaggtgttttatgctgcctgcagattgtgacgtcgcggtccggcaggagctatactaggtagtatgcttgttggggttagggttagggttc

SEQ ID NO: 46431 - DNA, 631 bp, Arabidopsis thaliana landsberg
tcgctgatagccgacgctcgacacaccggcgccgtggggctcgctagcgcgctgctggcatcccgctggcctacctcggcgctccggtgcattgttctgcccccggctcaaccgacgctttctcttggctgctcaatctcgcgaactcgtttggtaaattacttcccaacttttttccctgacgaagatacctcccgacttctttcgctcttccgtagcaattttgacgcatcgttttcaaatcgatgatctatgattccgtttgttagcatcattagttgaaattgcttgtttttagctctacatcaatttgtgcgttatattagaacctggttgttagttcagtaactttcgataattttgcttctgtgtggccgagacccttaggtagcttttccctatagataatatagtagattcacctatctgaataggtcagctgatcttgcatcaatctggatagttttgcttgttggactcatggcggtcatcttttcttcttcagtgtcgtgttggtgttatgtatgtaattaggtgatgggaaatgatcacctaatcataacacaatggttggtggatctggagagagtccatctttgttagcaattcaaaagggagttgtaacttgtaa

SEQ ID NO: 46432 - DNA, 524 bp, Arabidopsis thaliana landsberg
tggctatgctggtgtatgtgctcttggtgctgttgcagcgaagtgtttaggtgatgaccagttgcatgatcgatacttagcccgtttccgaggggtaattactagttacagtttcttttgctctagtgaaaatagataacttgttctatactttgcttgagtgttgcaactttgatctgtttaacagattaggcatatgagttgctatatggtagagcaggatacttgtgggcgtgtttgttcttgaataagcatattggtcaggagtgtgtatcatctgaacgaatggtataataaagttataaaatttctttggttatttgactcactcacgaaagttcaagatttgataagatctctatatcttcagagatcagtggttgaggaaatcttcagggcaggaagacaactagggaataaaggaacttgtccattgatgtatgagtggcacgggaagaggtactggggggctgacacggtttagctgggatccatgaatgttatgatgcatatggaacttgaac

SEQ ID NO: 46433 - DNA, 565 bp, Arabidopsis thaliana landsberg
  unsure (1)..(565): unsure at all n locations
ctctttctggctatgctcatgcgcagtgcgcgctgtggctgccatttgcaggcttttcatcgaaagattgttacggccccgttgttttgcgtctaccgactaacaaaccactccaaactcccggtgtatgtgcatattgcacgagaggtcgtggtgccacgatagtatgcgctgagccgcactgcaaaacagcgtttcacgtcccatgtggccaaaaaagatgcgtgcccgtggtgaaggattnnnnnnnnnnnnnnnnnnnnnggtgtcaggagcatatccccgaagagcatcgaagagggtgtaaagaggctatgaagacactgatgcgagagagacagacgcgtagacgcaagaagaaattggcagagactgtgagaagttccaaacttttgacgaccagttctgcgcgacgcagcgatctggcatcgcccaatgctctacaattttggagtggactgttggcagtgcctagtgtgaatgaaatgttggagaccatgacaaaatacttcgccacagtgccgaacatgaccataggcttggcgctcttcgaccattggacttc

SEQ ID NO: 46434 - DNA, 612 bp, Arabidopsis thaliana landsberg
  unsure (1)..(612): unsure at all n locations
tactctagaagcatgccgccagtagtgctctaacaggannnnnnnnnnnnnnnnnnnnnnnnnnnnnnnnnnnnnnnnnnnnnnnnnnnnnnnnnnnnnnnnnnnnnnnnnnnnnnnnnnnnnnnnnnnnnnnnnnnnnnnnnnnnnnnnnnnnnnnnnnnnnnnnnnnnnnnnnnnnnnnnnnnnnnnnnnnnnnnnnnnnnnnnnnnnnnnnnnnnnnnnnnnnnnnnnnnnnnnnnnnnnnnnnnnnnnnnnnnnnnnnnnnnnnnnnnnnnnnnnnnnnnnnnnnnnnnnnnnnnnnnnnnnnnnnnnnnnnnnnnnnnnnnnnnnnnnnnnnnnnnnnnnnnnnnnnnnnnnnnnnnnnnnnnnnnnnnnnnnnnnnnnnnnnnnnnnnnnnnnnnnnnnnnnnnnnnnnnnnnnnnnnnnnnnnnnnnnnnnnnnnnnnnnnnnnnnnnnnnnnnnnnnnnnnnnnnnnnnnnnnnnnnnnnnnnnnnnnnnnnnnnnnnnnnnnnnnnnnnnnnnnnnnnnnnnnnnnnnnnnnnnnnnnnnnnnnnnnnnnnnngcagctagaaacctgacagagatgtgttgaatatgccacaaccagcttgt

SEQ ID NO: 46435 - DNA, 371 bp, Arabidopsis thaliana landsberg
acaacatgcatcatattagaaaaattatatactcgcaattacttttaacctaaatttttttgtcctaaatgaaacacttttattcctcaattttgtttatatgatgatgttggagcttgtggatctcctaatctctcagagatttgctctaattttgtgcgacgtttgttttttatatgatgatgatgttggttgtcggattaattcctccacaaaaacacttaacattcccaatttctcttttcttcatctttattttctccgattaatttttctataattttggggattttgtgaggctcattttgtgtttgaattgatttgatctattttaattttgaatatgtatggctaatctattttttttttaa

SEQ ID NO: 46436 - DNA, 791 bp, Arabidopsis thaliana landsberg
tataacgccagcgaagaataattcgaagaggcaaattttcagagattttttactttagctgttcgacaatggcggatccactgattccctccccaaccaacaaagctttcttcatcatagatctatctggacaaaaatccaatcctgtacttttccactgtctctatctcatcgtctctttccatgtctctgttacaatgcatcaatcggttctgtttttcttaattgttgtggttgcagatcattcctactgagttcatttggaatcacttcaatggtaagattcagtcaacgaatatgaaactaacttctgacgcttcggacagaaactgggacgtgaaattggacggcgcgagattcgccggcggatggaaagatttctccgtctcccactctgttagagacgacgaccttttgagtttccggcacgacggaggcatggtcttccacgtctcacccttcggacgtagtttctctcagatacagttaatctcttcttctacctctgacgatgatgatgatgaacgcactgtttttgatgatgatgaagacgacgatgtaggagatgatgatgacaattcgatatccgaagatgatttttgttcaaagaaaatttcgtcgaagaagagagcaagaaaagaaacagagtcttcatcagacaaatcttatcttgttgcacacgtcacaccttcaagcctactccgagaaaatatggtgattactacttcgctggaatctttatacaaatctattctattcttttgctacatatatatgaagttgtgattttg

SEQ ID NO: 46437 - DNA, 619 bp, Arabidopsis thaliana landsberg
attgcccatttagaacttcttcttttataactttatgtttttattgcattcattctcacgtgattgtattatcacacttagtaaaacactggggaaatatagagaattgcgttcagattactgacttttcaaaacttatcacatttattttgattagtggatatatttattattagaaaaacttagacctaaacttaagactaatttagatgttgtaaaacgtttggaattttaactttaactatttatatattgtggctaacaaaacaaatcacaaacccacttatccacaacaaccggaacaacgccacgccaccacttgtttagtgtagtgtttgttgataagatcaaaaggatcataatttaaatccaagtaaaattaacaattactacaaaccacattaaatgtttctaattatttccttcatcttttctcgtgtatgaacaaaactatttggtcttcttttcggaccagaaagtgtgtgctacgtacgtaataacgtaatcctatagatcaatagtaatgttatttcacgtcccaataaaactttaggttttctttcacttaccaaatcgagttttggcccttctacatgtcacaccttaaaaacactacttt

SEQ ID NO: 46438 - DNA, 444 bp, Arabidopsis thaliana landsberg
ctccacataatatctttgtttatttcaaatatcaaattggaataaatgcattattatttttgttactatgctttttgaggattggatcactcatcaggcgagtgagtgtattctatattggatgatgaggtcttgtaatttggaaatgttcagtaaaatactacatgttaaagtgggttcgcttgactcatagtaaagatttttgtctaaaaatttatactattaatttgacaaagaacaacaaattatttttctcttcaaaatcaatatctaattatagtttgggccatttaaacaaaaaaaataggtttgggccgaattcaataaaaaacgtttgggcctgttgacagataacatcaataaaatttgcttcggcttcactcggttcctcatcgtcttggagcaaacttcaaagtgacttgcctggcgtcgacgtgtcgtttt

SEQ ID NO: 46439 - DNA, 645 bp, Arabidopsis thaliana landsberg
tgaatcagttgttgtttctttaaattccaggccgagaaggatgaacttcgtgatgagaagcagaagctgaaattggagaaggagagtttagaacaccagatgaagctgatgacatcgactccaacctacatgcctcatccgaccctgatgccggcgcctttccctcaggcacccctagcgccgttccatgcccaggggcaagctgcagggcagaagctgatgatgccctttgtcagctatccggggtacccaatgtggcagttcatgccgccttcagaggtcgacacctcgaaggacagtgaagcgtgccctcctgttgcataatagcttcgattggcggctggtcgtgctcacaccatgcgaattagtcgcaactgaagcccccccccccccttagatgtcgattcattgattggctataactgctgttgttatatttgtagttagttggtgaccaagtaagctgctgatatctgtggcggggcgcctactatagaggctaatgatccccttcaatggctgtacatttttttactgttattctttttgcggagaaaagaagaatgtttgttcttgttctccacagcaacaatgtcacatcccgtattattctatatatatgtcgtgtattttatatttacaatg

SEQ ID NO: 46440 - DNA, 467 bp, Arabidopsis thaliana landsberg
catgtaattggtacttcatattattattatgatgtatgtaattggttctctatattttggaacagaacaaaaaaagaagaggctaaacgagctaaagaacaatggaaatttcagttataaggaattgtgggataagggacaaattaaactaacgtaagactagcgcgcaggtctatatatgtgtcaaaagcacggacttatataggtacatacatgagatacaccccccatacacacttatacaacacattcatgaagagagtcatatttcattttcttttaacgtattttttgggccaatccattttgttttcgctattattcggattctatatttctagctccctattaatatgaaattcattaatcaataaaaacgttatttgtaaagatagaaacgttttctaggaatttattccgctacattacatttacatattgcggtattatatcacatttttttaaaa

SEQ ID NO: 46441 - DNA, 738 bp, Arabidopsis thaliana landsberg
cacaaacctatacttgagtactctcttttttttttctcttagcccaatgcgtgggccttacaaaacatttaataaataggccttatgagatcccatgtcatatatctagcccatcaataccaatcaatggggatggagaaaatatattcactatccaaactgggctggaacttagaaaagtatcatctaattagttctttttctttcataaatgaaaaggttcaaaacattttgtgattatagataaatatatcttctttatcatgatatcttccagaaatatatagaatgattatagtgaagaagaagaatgattaaacaaaatagataagcaagtgatggaatgatgatcatctaatcttttccagatcaaaaacaaagaacccacatgaatacactcttctataatggtacttaactacttataactacgtagatccatacatctatattttaagcatactttagtgaacattttaattccttttggacctattgagtaatgccagattactactacttgatctacttgttgtgccctttccttttgttgcagatttctttttactataaaataaaacgccgacatagaaacaatgatcggtcatgactcgtatcttattgtttatctagaaagtaatacgtaaacaataatatacaaatatcaaaaaagattcatgacatcatctgtgttttagtgtctatatatacattttacttttgtcatcgtgaaatctt

SEQ ID NO: 46442 - DNA, 545 bp, Arabidopsis thaliana landsberg
  unsure (1)..(545): unsure at all n locations
tgcctgccaatctggatcatcttttgcctcttcatagcttgtaggctcaccggcatgagtgaggtttagttctgcaaacaacctctgtgccggcaaaggggttggctgattaccaataatatcatggaccttcctataacgaagctcttcaccatcatgataagcatccaccctttcactatcattctccagaggagtcacatgctctatctgcgggcttgctggagctggtgtaggtgttctaggtgacacaagcacctctgtctccactgcggattcctctgcttctgctgcagactctcctgcactcaccaaagggagactaggtgatgtaggatgtggctgaagaggtggtgagggtaacactgaactttctgcttcaggaaactcttctgcccatggaaactcaacaacaaaatcgctgcatgctgcctcnnnnnnnnnnnnnnnnnnnnntgcccagtcccagccacgtccttcatcaaataccacatcacggctgactcgcacgcgctgggacactggatcaaatacacgatatgcct

SEQ ID NO: 46443 - DNA, 653 bp, Arabidopsis thaliana landsberg
gaggagcgtaatggtcagaagtttgaagacgcacctgttgaaacaccgaacgaggataaaaaaggatttggtgatgtaagcttgcccaaagaggatgagagctcaagcaaacaagataaccaggaagagaagaaagaagagaaaactaaagaagagtttactccatccagtgagacgaaaagtgagaccgaaggtggggaagatcaaaaagatgactccaagtcagaaaatggtggtggaggtgatttagatgagaaaaaagatttgaaagacaactcagatgaagaaaatcctgacacaaatgaaaagcaaactaaaccagaaacagaggacaatgagtcgggtgaggatggtgaaaaccaaaagcaatttgagtctgataacggtgagaaaaaatccattgatgatgataaaaaatccagtgatgatgataaagaaaacaagacaggcaacgaagatactgaaaccaagactgagaaggaaaacactgagacaaatgtggatgttcaagtagagcaagagggtcaatccaaaaacgagacctcaggtgatctttcacctcctggggcacaattagagctactgaatgaaactaccgcacagaatggttcattttcaacccaggcaacagagtccaaaaatgagaaagaagc

SEQ ID NO: 46444 - DNA, 629 bp, Arabidopsis thaliana landsberg
atatctgatagggttttgttatttctaaattgaaaaaaaaaagtaaagtattaatcctgtgtgtttagagtcatgttttacatttaacgtagtcagaaatgattttctcatgtttcccccttttaacttagaggccatatatcttctttaccggaaaaagaaaaactcatgatgccatcaacatattttctcttacaacgttctacaattacaattgtataattgttctaaagtgaattttcccacacaaaaaagagtgagtattatcaaaagggacataacaaaaatcgcgagatttagaaaacatacgttagatctaacgtaatattttgaaaaatcacgagattcgatacgttgttcgaacatggagaacatgtcaatcatcgatggctgaagaaaaaagtttaataatgaaagtcggagagaccaacaaacatcacttctttctatatactaatatttatatatgtttggtgtacataattgcttgtactttttacatgacgtaagttaccattttacaacgagtgtgaaaatagtgaaactgaaaaagctatttaaagggtgtgaagggaagacactaaatcacaaaccaaaaagaaaacaaccaatgaggtctccaatggcct

SEQ ID NO: 46445 - DNA, 604 bp, Arabidopsis thaliana landsberg
  unsure (1)..(604): unsure at all n locations
acacaatttatcacgatattttggaacgataatttccgtcgatattttctaacggaatatttggattaggaaatcaatggattcttctcaatgaacaaatataatatagtgtaaaatttaaatttaagtaaaatgatttgacacttttgtatatacttacattttttaattttgactttttcatgaaatgttgtagcattatttttttgtgatattttatgttttgaacccttctgtgcttatggagtcgtctacaataatatattagcttcattatttaagaccaaaatatttatatgaagaaacaacaaaaataagaccaaaatcgggtatttaattttatcatttaggtcttcttataattgtcgcatcacacggttcgttcatcagtctaattagaaaagaaaggaaaagatataagataaattggtcaagaatatctaacaagtctttattatatattttagtttagatcgaaatggaatgtgacatgatcaagagaacgatgtataattattgacgcgtagactttataatggggtatctaatattacaattttatttcatttgcntttgaatggatatccacgggagtcatgataac

SEQ ID NO: 46446 - DNA, 1721 bp, Arabidopsis thaliana landsberg
tcgagagctttctgacttagcttcgaatttgatatttgcttacacacttttgccaaatatagcatatgtaaaccaagtctactaaatatagcaaataagtaactactgtaatttgtggtgattttgtcgagatctgtctgacttagtttctcttttaattcatgtctaaaacatttacttttaaaaaaaaaaaagaatttaaatttccgttgactcttctcatatcttatctatacattggttggatctccacaaaattggaatggagatacgtattctgtaacatgtaccatacttatgaaaatgaaaccaatatataataatatatataatggaatatgggcaaatttcggtccaaactaaaatgaatatgataggctaatcttgtgcttaagagcatgtatgttaaatacttaagttttttttgaatgaatgtaaaaactattgaaaaactgtttgtgtagtgcatcgttttgaatcttttgtattgttttataatttaattcgtagtggaaagccaaaaaatatgaataggtcttcatatttttgttattcatgagttccaaagcaaagtgatacgattcgaatgttcttgtcgatattttccccaagttttgatgttgtggtaactggtaaggttttctctatgcgtcgattgtttcgtttcctccatcattttgaaaagcatatctcaaaagtaaggtcgttaaatacttaaattacttaaacctttgtgctctaaaatatgtggaatggtcaaattcctactgcagatccaccaaaaacgctcatacgtttcaacaagaatatcaaatgggccttctgattttgtcccacttaaacttactactatcatcggatactttaatgggcttacaatataatgaccttacaagttgcaacagattttttgttaaagcgattatatccgttaaagattcccaacataatagcgacaaaatcatgaattattagcattttcataatttataagaaacacgaaacttgtgaataaaggaaaaggtcacacgaaaccttgatacctatatagtagaaacgtttgtactcatattcagaacaaaacaaaaagaatgattaatcaattaacaaagaacgagttaatcggattatttacatccattgccgtcctcatatacgttacatgtctcttctacaccaaacgatgtcgtacgagactacctccgggaccaaatccatggccggtgattggaaacattttccagctcgctggtttaccgccacacgactcattgactaaactttcacggcgtcacgggccaatcatgactttacggatcgggtcgatgctgacggttgtgatctcttcgagtgaagtggctcgggagatcttcaagaagcatgacgcagctttggctggccggaagatttacgaggcgatgaaaggagggaagagtagtgacggctcgctcatcacggctcagtatggtgcgtattggcggatgctgcggaggctttgcaccactcagttctttgtcacgcgccgtcttgatgctatgagtgatgtacgctctaggtgtgttgatcagatgcttcggtttgtcgaggaaggtggccaaaacggtatgtattatactatcaacaacattatgacatgcattatatgtaggcttagatccgaatgtgacaccataactatactaatctgatatgactttttatgctgattctaattgaaccta

SEQ ID NO: 46447 - DNA, 598 bp, Arabidopsis thaliana landsberg
tgcatatatatatatgttataccaatgcgattgagtgcaacaagacattttaaagagttttcgaaaactcttttctagtttctacataagaggagatctgacaactggaataaagtcaaaaccacgtttggtttaggagatattaattttctaaacccgaggaatcctacacttgccttatctggaagctgacgggtttgattacttgcaaactagactagagtatcgtaccttaagaacatatcaagcttcatttacagccattggatcaggtgtattcaatcttgcgcactcaaacaccaagactttccatatctcgaccccaaagccttcaatgcactccaacaaagagattcctttaaatcaatgaagaccccgtcttttaggagcttctacatggaccagagtcaatcatatttccttattcggccaagattcaagcaattaagcctaacggctataatatcttggggcttgggcatctttatttcatgcactttcgttcttcttttagtgttttagaccgttagaaaagagcctatataagctcatcttgttctattgtaaagatcaccttttcatcatctaacaaatatac

SEQ ID NO: 46448 - DNA, 331 bp, Arabidopsis thaliana landsberg
  unsure (1)..(331): unsure at all n locations
tcctagtgcgtctattctgattcacgtgcagctcgcctatgcgagacaagtgttcgcgtttcgttcagcagccgtgcccggctgtcgaacattcggactcccgtcagtcgattgttgccttgagcatctccgttacggtttgctgctccgcggcatcacatcaacaaagtccggaagggtcttgatccccacggtggtacgaggtccttcgcggtctctgtgccacccggttcgctagatttctctagcctgcaagtgtctgctgctcatggctgagactcacagctcactcacactcgtgtcatcatannnnnnnnnnnnnnnnnnnnnn

SEQ ID NO: 46449 - DNA, 818 bp, Arabidopsis thaliana landsberg
ttatttatctacaaatattatatttatatttatgttcttcaaatatgttattcttgaatcttgcagtcattcaggggaggtcttctgaccgcacgtgccacacgatagaaaaagaccttgtcagctctgcgacgccgttttatctacagtgtttttttatacgtggaagctgtgatctgctgctccttagaaattagaacacatgtactcgttttagattcttcatatcaatggataatttacattagtaatttgttgattttatgtagttttgtataaataatgagacatttcctacattatttatttgttatactattttaacttgagttaatttagttaaagaaaattatatatggttggtaattttcttatataaataatattgttgataatgtataatctctatgtaaattactatacacgagagagcaatgatccctactaatcgtgccacatgtcaaagtcattagcacaaacatcaaacttatgtaattgtatatagtatgccattatataatctgataatcaatgattaagcaatttgcagtgcgaaacaaacttaaagtatagtttactgtatcacgtaatgaaattggttatataggtagccactagtttttcatttttctactacatactttatatcaaatttaaacaattaaaaggtaataatacaataatctcattagctgttgaaaaattgtctgatataagttaataggcaatataaaaatgaatataattgccggaacctaaatttattaaaaaaaatgtaaaaggaaaacgaatctactttatttttttatattttactt

SEQ ID NO: 46450 - DNA, 606 bp, Arabidopsis thaliana landsberg
acccttttcgctctcgtgaatcgattctaccgcattttctgaacgaaatctctagttttttttttcttttcttcctgggtttgatttcttggagtggttgattgcgcaagtctggattttgattttggtacaagacatttgcttgtacaaggaggaagggatttgttggtatacagtattgttattgcaaaggtttttcgaatgtcaaaacaagtttttggattattgattttggaaatctgagtggatggagaacgatgacatgtatcctgatgagcctgtaggttctgacttggaacctcaagagagtgatgttgtttttgcaagagagtcacctcttgtaggtatcatcactcaaccgaccaaatgctctggatctactgcaaagatactgaaatgcaggggtcttgagcaacagaagaagcttaatagacaggatagaatcgaattgggacggcttttccaaggtgctgttagctcacaggattggcaactttcagagagatttattcagctggctgatccacaaactttgaatgatctgttgtgtattagtttagattctatttggttcttgagcacagagcatgagttacggggaatcac

SEQ ID NO: 46451 - DNA, 537 bp, Arabidopsis thaliana landsberg
atttggtttttatttttaattaaaaaaaagttaatgcatttattatttacaggatccataacataagtgttaattaattagtatatattaactgcaccaagttgaggaaaggcgattcctcaatttgtgtgccttcttctgtcgtggtcgtactttaaggaaaagcgttacaaatttaagtgaaacttatttaactcataatcaaatccatccaagcctttgatagtttgattaattttgaacccgtatcgagctaattccctcatgccatggtgaaaataattggtgtcaatggaaatttgaaggtttctatggacttcttgagataaactaaagtaatatcagatgttaaaaaaaaaaaaaaaaactttttatataatttctattttatttatatgctcggttacaaagccggacaaatatctagccgtcaagaaacgaaaaaagaaccaacatatgacatatatcaccatcatcgttattgttatgattcaacatttaattagggtatatgtcttgaaatcaacttcaacttca

SEQ ID NO: 46452 - DNA, 456 bp, Arabidopsis thaliana landsberg
  unsure (1)..(456): unsure at all n locations
gtgccggtggtgcgccgtcaggcgctggccttgcaggtgaagctgcctgccgggatcgatctggactacctgattcaggcgggtacgcttggcctgctggaggcgatgcaccgtttcgaccccaacgccggggccagtttcgctacctttgccagccagcgcatacgcggggcgatgatcgacgagctgtgcagccgcgactggttaccgcgcagtgtgcgccggcaggcgcgcgcggtggatgcctgtgtccaccgcctggaacagcgccatggccggccggctgaagaacatgaaatcgccggcgaaannnnnnnnnnnnnnnnnnnnnnnnnnnnnnnnnnnnnnnnnnnnnnnnnnnnnnnnnnnnnnnnnnnnnnnnnnnnnnnnnnnnnnnnnnnnnnnnnnnnnnnnnntggcgagggcattcctttgccgtttgccgccctgttcgac

SEQ ID NO: 46453 - DNA, 168 bp, Arabidopsis thaliana landsberg
  unsure (1)..(168): unsure at all n locations
actggatagaatctgaattttagacaaatccgtctgcgcggcgaagcgctanatcacggctaattaacgagcaatcaccgcgagcgcggcgaggagagatacttgtcgggcgagtggccgagactgggtgtcggacgggcgagctgatgccagtgtggctgaaccggc

SEQ ID NO: 46454 - DNA, 690 bp, Arabidopsis thaliana landsberg
ctggatgaatattacgaaggacggaggcctccatgtgctcgtcttcatatacatttcccgaccactctttctctcctgcgtcaacttcaccaacgtcacttggtttccgacgaaaaccttcgtatttgaatataagaaaagctgtgatcacagtcgctatagccatccatatgcagcagatcataaccctccaattaaaccagtagcttgattctgttgtgttcgctgttgttgatggatgccaagcatcttttaactctgtatatgaagatggagataacaatgatgaagacgatgagaccattttgataaagtttcagtctttgagagagaaaagataagtttatcttcaatgttgaagggaaaaaaaaaaaaacagagtagagaagaaacaaaaacagagtaagacagtgtggtgtgatttattaggcttcaattatatgtgacaataaaattagaaagaatttataaaaacaaagatatagggaatttgaaatcttcagtggggtgatttagatatatgacgaagcaaagggagagattcgaagctttaaaccatgtgttgttcttgcacataaagaagaaggacccatatatgtatcggatcagatttatttataatgaaataaaagaaaaaggggaaagaaagtgaataaagaagaagaagagggagctgaattcgaagccaag

SEQ ID NO: 46455 - DNA, 792 bp, Arabidopsis thaliana landsberg
gaatattctcttcttgccaactaagatattttttacttgtgccacatgttaggtccaattttagaagcattgtttatacatcaaaagagaatatgggaatatgttctgaggataactaaatcataattttttattcattatatataaaataaaaataaaaataaccgacagaaaaatataataagtagagaaaaagtaaagaagatggttcacgatgcatgtgtcatatgactcataatggggtcttaattttggtgattgaatagggagaactaacacatgacgatggacatttatgtttctttatttgtttgaatctcatttaatatatttgaaaagtagtgaagtttgttatttaccttatgaaaacattacatggagcatgcatcttattctcttttttgttgcaatctcaagccaacttataaaatatatctttcttatcaaaagaagtatcacatacatttattgtggacatgatctaattttattttttggtagtgcgtatgtattggattatcgacaatcacatttgaaagaattagattccattatggcatatatattatttaggagcatgtgcttcaatttaggctctaattaaaattagtctacaaaataattacctttagtgattaagcatgcaaaagtcattttttttttggaaataatatatactatattatacaaaaaatgcgaagaaatttagtaaagtttgagaggaaaatagtgctaaaaatagattcttgcttgacttttcttcaaaggtggagatttgctaataaatccaat

SEQ ID NO: 46456 - DNA, 621 bp, Arabidopsis thaliana landsberg
tgtcggctgtctctccgctcctctgtgtaagatcacaccaacattcactgcttaatttcttgtattattttgagactggagagtgggctgattgacaaaaaaaaaaaaaaaaaaaaaaattgagagtaaactagtttcttgaatattgattttttcagcttaatttgttggggaaagatattactactattgctgtaaaaaaaaaaaaaaaaagatattattactatatttgtagtgattttattttgaaaattctcttcacttttttgtagttaacattctaattttatgaaaagaacttttaatgtcaggtcatgtctcttaaaaagtttgcatgatgaaatgatttacaaattacaatagaaaatggaaaccattgcaaactaaatttttatcaaaaaaaatcgaaaataaaatgtattgacttaataatgctgtgtctgctacgattaactattacacataatgcaacactgaattatccaaatacattattagaataatagtattacagtatcactattacaacaacaatgtcaacaataatcttattataataatatataaatagaccttagtgacatcatattatatagaaaacatgtggttgcctaatttgta

SEQ ID NO: 46457 - DNA, 461 bp, Arabidopsis thaliana landsberg
gcaattcttaaagtttctagcgccgccttcatggtggatcagcttcgggatcatatggctcaggtggcggtgaaagttcagctacagtaaaagtaataagttgttaatccgaagccagaaaaaaaactacagctatgaaacagttagaatacctatgtgccttgcggctcgacagcctctttgaatcgcttggcttcttctcgggcttcacaagtagcgttctcattcgggtgtatagcgacgtcggtaagttctaggacgcgtgtcatcctcatgttggagtatcattttcgcgacatcagagtcgcatcagccattaggatcctcggtgatctcgcacagtgaagacagcctgcgtctgggtcgtagctttaacgtgtccgcagctagatgagaccagaattgctgcaatgcctctggcagcgtcaaaggcacagagatcccgtgatcagtaaggatgc

SEQ ID NO: 46458 - DNA, 453 bp, Arabidopsis thaliana landsberg
gacttgcagcttgaagagtgcgaggagatttaactcgctgatccaaggccatacagtgatgaaccaaacttcgactgcactcaatgtgattcattcttggtacgatatacagaatcagatcagagcacgacgtttgtatatggtgacacaaggtagactccaacacaaaagattggagaatcgtttgaagctggagatcaaacttcacgagctagaagttgaatggtgtggaggctctgaaacgatggaggagattctcgcaaagatacaacagaaagaagaagctcctgttaatcctgaaagagcaatggcttatgctttctctcatcaggtcaatcaaaactgagacctcttaaacttacattggttggtttgcgtttctagataacttgcggctcaagtaactctctgttcttcggtatttggcagcggagggctaaagctacacagaac

SEQ ID NO: 46459 - DNA, 574 bp, Arabidopsis thaliana landsberg
atgatctctcttcctctaccttcggaacctcctccttctggagatccatggccacttttactcgaatgttagttttctttccattttttgcttctttttcgctcttcagatcggaaagttggaaaattggttggtgattctgattgtgattctctgcttatgtaattgctcttgggcagtaaacctcatgtaaatgttggaactattgggcatgttgatcatggcaagaccactttaactgctgcaatcacaaaggtgcttctttttgtattttggttacatgaaacttattgtcaaagaaccagtttttttaaagttgatcttgtgatcttacttatgttttaggttcttgctgaggagggcaaagctaaagctattgcctttgatgaaattgataaagctcctgaagagaagaagagaggaattactattgccacggtctgtgttctcttcccgtatcattttctcatttctctaaaaaaaaatttcttctaatcgtttacttgtttctgtaggctcatgtggagtatgaaactgcgaagcgtcactatgctcatgtggattgccctggaca

SEQ ID NO: 46460 - DNA, 474 bp, Arabidopsis thaliana landsberg
gtttcaattatctatgaaattcaaagatacatttccaaagatgattttaattatgttatctcatcaattatattcataactataattatatattttaggtgtacagaaataaatcactaatcgatgcatgtaaatgttgatgtatatgaatgtaggcattatgaaattcttactaatatttatgtcgttaattaatgtttggatttatgtagacagcatacgtcctataaaccaagagatgattcatcctttttatcatccggaattcggggatctattaatattgtttagtgttaatatacaattaaaaaaaaagttagtggtgatatacagtgtatacattattttttgaatgaacattttacagtgtacgttattaaaaataattattagaaatagctgttgttaaaaataaaaatataacaatagaattcgttcacagaatgttatggacccattcggccattccctata

SEQ ID NO: 46461 - DNA, 532 bp, Arabidopsis thaliana landsberg
tgggtcttgaaaaccgcaccggcctcagtatttccggatctgttccgctcacaaagtcattgattgtgcgcactaatatcttcctggccaaccgtcatattgtgaaccatctcctggcaaatgctgtcaccaatggtttcgatgggcggatcaatatgaacctgacgtatgaattcagccggaatttcatggcagaaggttttgccaattataatacctccgtaaacaatgtacaaggcaaacaaccgcaattctttgcatacactttcgcaatgcgaaagttctttatgaacaaaaaactgagtgtaggattgacggcggtcaatcctttcagtcattatatccgtcaggaaaccactgtcattaatgccggatatacttcaggtaatatcaggatggtccctttccagtcattcggaatcaatttcagttataaattcgggaaactggaattcaaaaagaataaagaggaggacaatagctttctgaaaagtcctgatatggggaattagtatttacgccgggaagttta

SEQ ID NO: 46462 - DNA, 951 bp, Arabidopsis thaliana landsberg
aacttgtaaagaaattcaacttttccttttttcattagtatagaaaatcccaacttggtaaaagaagacttgagagtcaaatgttgttactataaaacaaatatgaccaccattgaccggaaaacgagaagattttttcgtaattcgttgttaatttctctcgttggtcagatatatttcgatatctattattattatttggtgattttttcatatctggaaattgagtaagtaacgatttatttttattttttttaaaagagagagagagagagattaggaaacaagaaagcagaaagcagaaagagaggagtgattagagagagagagagatcaataaccaaagaagaaggaagggaaggggattagattacaaaaacgccaaagctgttaactttttctttttggccatttcctatttctcccttcgtctccatcaagcaaccctctctctctctctctctctctctcatcatcataacagaggagacgatcttacgcgacgaatccttgagaggttgagagggacaagcgagttttgtaggtgtctcagaccggttatttttttctcttttcttctttttatctgaatgattttggatttcgtagacaattgtgtggtctctagattcatgctttctaggcctttttaacgcatctttgctttcttagatttcatgttttacaattcgatttcgtttctgattttcttttcatctgggttttgtttctgatttgtaaatgttcattcttttgtggattgtgatccttgagtattgttttcttctggccgtatttgctggcaatatgaggttgtcgtccctttttttgctttttggtttttgcatgtattattatccatcttctgcccataaacaatgttctcaatgtagttggatcttgtctttcttttctgagaatttgatttatgaaactgaattacattttttt

SEQ ID NO: 46463 - DNA, 679 bp, Arabidopsis thaliana landsberg
ttatacagttcaagctgacacgtgtttccctgaaaaaactcgaaactgtttcgaactgttgcttctcagaaatttcactgttcaattgggatttggatcattgagaaaatcaagcaaatatctacttaatttatttttggttgacttattctttcgtggattaatatttgatactcattgatttattcattcatttggattatttttgcttaattgaataatatttttaatactcatcgatttataatgttaaatttatttgttgattcattcattttgtaatattaattgagctttaaaagcgttagatttttttggtgaatgtggctttcgttgtgattgctaggaaacttcgtggatgctacaaaaatgaccgactaatgaactaaccataaaacaccaacgcagattgtattgacatcacaacatcaactcttgttttgcattcttacccatcgctttcacaaaacaacaaatttacaacttttggttttcgttctattttcggtttatcaattccggttcagcaaataccagacacaatgcggagaaacgtatctgatcatgcagagaaaaaggacaaggtgggcgtttgagttcttctggaactttccaaaaccctaagcatatcaaacaaaaaatggcaattatccttgatcaagctcttctgttcaagaac

SEQ ID NO: 46464 - DNA, 678 bp, Arabidopsis thaliana landsberg
ctgccgatactatgagcttcgagcaaggttttagagacttttctttttaactagttttcaggtcaataggttatgaattccaataaatcataagaccatgaggagccatatgaacactgttgatattccacacgtttatgaagtagtttctagggtgaatcaaacatagggtaccttattcgatccgctaatttgatcctatgtcaagattcatcttctgtgttttctttttgaacccgattcactttcgtatgcttttgttgctgtcagtttaacttaaggtacaacaaatacatcaaataagcaaatacattctaattgccaaattatcatagagctacgatttacatatccctaactagcatacggtccactttatattcttacttcattttattttattttttgatacagtgatttatattcttactttgcaccataatcactgtcaacttagtcgcgtttaatagaagtcaatctgtacttatattgaagtgtttaatgcataaaaacaacttgaggactatatatatatatatgcccggaaatttctacaaaaacaagaagaaaaattgaagcaacaaaaaaaatgataaaaacaaaatttaacgataacttaatgatctctcgctttaaatataaaccgtttaatttttaatatataaacaccaaatgggg

SEQ ID NO: 46465 - DNA, 577 bp, Arabidopsis thaliana landsberg
caattatcgcaagccactgatcttgtgtttgacgagtcactgaaaccaaagaatcctcctgatttgattgttcctgttcctttgcaacggccacaagctacattcttaagatctccacattttcgacacatgccaagagatctgcaaaacttgtgtttagaaacatatgatgatggcaagttatagattcaaaaacaagtctaatgtcattcagccatggacatacaacactctagaacatttcttatagccgtcagcaaccacaatgaacagtcttaagatcatgtctcattacaaaggtcagattttcagaatccataatcaagatcaagaatgattcaatacctgaatatttcaaaaatcaaaagatctttcagtgaggaatacagaatttcaggaaaaccattactttcacatggtgtgaactcagaaaaaaaatgtaatccattggagattgaaactaaaaacataactcaacaatggattttttttttcattcagaatctatccttccaaactacaaatcacaaagaaactcttaaggatgaaaaaatagtttaaatcaaaccctcttgga

SEQ ID NO: 46466 - DNA, 860 bp, Arabidopsis thaliana landsberg
tatcattctgttcttttttataaatttcttatttaaaatacatattattcgagttaatttcagaatatcaatctgacctaaaataaaacttaaagaaagacaaataaaaatattacatttaaagctattttttaactatcattaatttgtggtaaatatttttgtttgttatagtaaacaaaataaggtctaaaaaacaaacaaaatattaaactacgaataaaggttccagatttcgtctttttggctgaaaacagaagaagaataaaactcatattaaacctcccacactctttccattctcttcaaacctcgatctaagttttctttctacgtttataccagatggtttccaaaattaatcatttcgagcttcaaaatttgacacacagccgaagagaatgacatatacacacgatgaacaaagagaattcgagcaagatgtttttcaaccgaatcaaaatatctcatatttaaaggtttatttgctagtggaaggataaagctttgtatgactaaaagagtttctttctttggttaagaggttaattatataggtccttgagcatgataaaattaggtttcgagcaagcaaaagttttatgaaaatatgacaattacaaattaatgaagaggatttatttatttctcgtcactttgactaattcttatgttagcattatttacggatattagttagcataattaagaataatcttaaccaactttgtttaattttttgtaacgcattaaactcttatagttgttttggaagatctagtgagaagatattcgtgaatattcggtgtatccgaatataattaaaatcaataatcatttaaaaaagaatcaaagatttt

SEQ ID NO: 46467 - DNA, 665 bp, Arabidopsis thaliana landsberg
attaaaaaaaaaaaaaaagaaaaaccacaaaaaaaaaaaaaaaaaaaaataaaaaaaaaaagacataaaaaaaaaaaaaaaaaaaaaaaaaaaaataaaaaaaaaaaaaaaaaaaaaaaaaaaaaaaaaaaaaaaaaaaaaaaaaaaaaaaaaaaaaaaaaataaaaaactaaaaaaacaaaaaaaaaaaaacaaaaaaaaaaaaaacaattaacgaattaaaaaaaaaaaaaaaaaactaaataaacaacacaaaacacacaacaaaacaaaaaacaaaaaaaaaaaaaataaaaaacaaacacaactaaaaacccaaaaaaaaaagacacgaacaagaataaacatataaaaagaacaaaaaaaaaaaaaaaaaaaaaacaaaaaaacacaaacaaaaaaaaatcaaaaaaaacaaaatactaaaattaaaaataataataaaaataaataaaaacaaaataaataaaacaaacaaaacaaaaccacaaaatcaaaaaaaaaaaaaaacaaaaaaaaaaacagaaaaaaacaaaaataataaaaaaaaaaattactaaagataaaaaaacaaacaaaaaagtcaaaacaaaaaacaaaaaaaacaaaaaaaatacaaaaaaaaactacaaaaaataaaacaagaaaaaaacacaattaaaaaa

SEQ ID NO: 46468 - DNA, 502 bp, Arabidopsis thaliana landsberg
accacgtctaaaatcttttttggctatctatccaaagggtatgtactcatgaatctctacggggcttggcttaatcacattggagttattatcatcttcttcattaccctcatcttcctctctatccatattgtcggcgatgttgtgaatcaagatcacaagaccttcaaaagcttggatttgtatagaggttaaaggaccagaggtagggaaagtatgcctgcatagaacttttccggtctcttcgaatatatttctacacatcggatcacagtcgtagtttacataagcttcgactatgaaagcgggttgtcgacaaaagttgattagtccttcaagggaaacttcttgtaacggaaggaagcctgtgaaagctgtaactttcaacaacacgaaggagaagaaagcttcgagttgtagtctcatgaacctaataaatcaacacattcttgtcagataaagttaagaataaacagagctttagggtggatggtagaaaaaa

SEQ ID NO: 46469 - DNA, 470 bp, Arabidopsis thaliana landsberg
  unsure (1)..(470): unsure at all n locations
tatatatgannnnnnnnnnnnnnnnnnnnnnnnnnnnnnngcatgctcacttttcatatatgatttttaacacctgccagccaaatcaaaacggggggcttgtacctgcttttgcttggcgataggcccactcgagtgtgccttctgagactatgaacatccttgcnnnnnnnnnnnnnnnnnnnnnnnnnnnnnnnnnnnnnnnnntgnnnnnnnnnnnnnnnnnnnnnnnnnnnnnnnnnnnnnnnnnnnnnnnnnnnngaaccggtgtctgcgtgcacaagaaccaatatggtgtttcatgctgccatcttattagagagatgaaccatattggcaaccagtagcatatagaagcatgtcactgaagcacgagatgccttgcctgctacataaggaatcagagggtttatacaccgttaccaatccgaagacaaatccaagagcctcagttatttgatattcatacg

SEQ ID NO: 46470 - DNA, 511 bp, Arabidopsis thaliana landsberg
tttcttgtttagtttcagttgaatcatatgagttacgttgtgaccaagtaagatatatattcatgatagtatataactagtgttgttatttttagcaatacctaacccaaagaaatgatacaaaatccctttttggtatcaaaaaaaaattgttgggatcaaaccatttgattttagagatttgtgatctgttttgttttattctaatagaacatcaacatgattccaacaacaaacacattgttctgtagcctggaagacaagtaaacccgcaaatcacttcattgtagtaaaaaaatatggttctcttttaaagtgttaatacttaatactgtggcttgagctaagcccatcagaaataaataactaagatttgctgataaatatcataaatccaatgcaaagttttcgtagggaaagcaaaaacataaaagaagaccaaaataaaattctaccaatcatttcttctcccattcctaatcgacaaagatccaaaactcgaagacacatc

SEQ ID NO: 46471 - DNA, 654 bp, Arabidopsis thaliana landsberg
cctccgagatattcccaaccaaggcccgtgcgacatgtgcaagtttctgttcgctttccttctggtttgggggcctgctttcagcgtactgcttcccggtgatgttgagcaccatcgggcttggcggacgatgtggggtctatgcacttgtgtgctgcgctccgctttttctcgtctactatcgaataccagagacgaagatgcttaacctggagctcattgcggacgtgttcaagctttcaaggcaggagtatgtacagtagattgtccaggaaccgaggtagcccaggctgagtgccgatgggatggtgatgtgtgtacttatgacaaatgtacttttggatgctgaattggttttggcaagttaggaggattggtgatagtgtacgaagtggtttactcttttgctgtccacaggttgctggcagtgtttgtagtgttttgtcttagggggaattcctgtactccactgtaattgtaatgtaccctataacttatttgtcatcgcaaatatcctaatgcaatttcttatccttccataccattgctagtggtatagaagggaccaggacatgcagttttcttatatttttttatgccgtcgcggtgcatggaaaggtaagaaatgcactgagtgctatcgagagattagca

SEQ ID NO: 46472 - DNA, 577 bp, Arabidopsis thaliana landsberg
  unsure (1)..(577): unsure at all n locations
aagaggagaaagttttttaaagacaagaggttagtggtcttgttttggacttgntgggatatgtatgaaagcgggatgttgtcagttccagtgtttttaacttatgtcagtgccaataccaattcactcctctcattgggccttatatacaattttatactctggaatatactaatagtctaatactataaagtccaattaaataaccttttccttcaattttcttctcattatttatttcttatatttttcttccaaaaatggtacactcaactactacttgttgtcacaatcgtcaaaagtctaagattaaatcagtttttggaagctgttcatcacgagtatgttgaaagaatctcaaaagatgattgaatgttttgggctagctgagacttggcattgatcacaaccgatggttacatttcctagaacgagatgtaaagaccatattggatcctatcatcactgtctatcatacaaaatgaatatgctatatagatgctgttccaaatgagcttgaaaaggcttacggatctgctaacctacagggacagacctatttgagaaaaatcaggta

SEQ ID NO: 46473 - DNA, 577 bp, Arabidopsis thaliana landsberg
cacacacacacacagaagaagaagtttagataaagaacctttgatagactaaaaaaccaaacttagagattgaatcataccagtgggctgatggtcaggtgacaatgaaggcttttcaggtatatggataatttcccatgcatctgaatccataattttattttatctatacttgagcctgattaacaccattagctcaaactataagaattagggagaaaacagagacgaaaaactccacctttctcagtggagtttgaataagagaactcgcaaaaattcacactttcaatttctagattcaataagaagagtggtgagtaaaacccagttaaggcttttctaagcattcttattgaacagcattatcgaattcactagttaaatcatatttcaaaccaagtgctcacacacagatgcaattccagaaaccgtaaaagaaggtaattaatcattacagagattagattaactcacgctggagagcttgctccaagcaacaagacacagagacgcagcgagctatagagaagaaagagttcaccaaaaaggtcaagaagacgacagcttacacgtc

SEQ ID NO: 46474 - DNA, 1002 bp, Arabidopsis thaliana landsberg
tgatagacgtggggaagaagacaggatcgaggagtttgtggaaacagaaataagtgatcacaattaaaaagttaagaaaaaagatgaggattatatcttaagaagccaagatactggcaaagtggatttaggtgaacgtgagagacgtagtaagcagagaaagattcataaatcggtggaagacgagataggggatcaagaagatgaagatgcagaggaagctgcagctgtagtgtcaagaaatgagaatggaagttcaagaaaagttcaaaccattgaagaagaatcagaaaaacacatggaacaaaacaagatccctgaaacaagtaatcctgaagtgaatgaagaagatgaggaaagagttgtcgagaaagagacaaaagaggtagaagcacatgtccaagaacttgaaggaaaaacagagaattgcaaagatgacgatggagaaggaaggagagaagaaagaggcaaacaagggatgacagctgagaatatgttacgccaaagattcaagacaaaaagtgacgatggtattgtgagaaagattcaagagaccaaagaggaagaaccagatgaaaagaaaagtcaagaatcgagtagtcatgtggtaaagctggtggctgaagatggtagccttagaaatggtctagagttttcggaaaaggagtcaactgtgtcaaaaatgctgaaattggatgaatcaaaagagaaagaggaacataagaagatccggaaaccaacggaagagagatcgaatgctcctgtaatagaaaaacaaggaaataagaaaaatgcggaggaggagatgcaagataagattgacagaagaggtaagaatcaagagattaaaggacaagaaccatatggggttctaagaaatggagagcatgacaagatcacagaatatcatagaggggaggaaaagggaacagatgagaatgttagctccacaaagattcagcaaactaaagatgagttagagaaacctcggaaaccaagtag

SEQ ID NO: 46475 - DNA, 505 bp, Arabidopsis thaliana landsberg
ggcaaccagggttccaattctccagattctggggcagtcattttcatgtgtgtcggagtcttgataagaatagcagggaaacacgctttgtttcggatggattcatcccacgtaagtcaatccatacatatacccggagcaatttttcttgattacctccacgcaacaagggtgggattctcggttttggatggaaatctgttatctaaggatgatcagcaacaagatcttttaggatgctcaaaagaacttcaagtagacaggaaattctcagtgagcctgtatgctgcttgctgccgactactatatacagctgttaagcatcataagaggtaagtagaattttattttgcttacacacaaagtcctgttaaattttaccatcttagaactgcgtctaattttgttcttgctgtgacatatcaacatctagtcaaactgaggggtccattaatacactccaagaatctgtttccgcgcttcttcattgtctggagacagcagg

SEQ ID NO: 46476 - DNA, 1054 bp, Arabidopsis thaliana landsberg
ctccaaacaaaaaaagtctcctcacatgattttgcgggtactgtttagggttttcgttatgcaatattacttgaacaaataaatttttatcgacatatagattttttttttttttttaatgttgatttcgtaatccttgtgtacgtggcgatgattctgaactataattaagttaataaacttatgatcgtcaatagctatatgatgttttagattaatcacgagtggcaaagagttaactacttatataatgaaaacccataagacccggagacaataagcttacgtacatcgaggtcaacgaagtcaatagaatcgccaaaatatatctgtccagagagattcatctctcaaaacagatttagataaatgggcaaatcacgactggatatatattagtgcaatagtgctctagtatatactgtggatatagaactacacattttctagaaaaagaagaagaaatgaaagcactttatcaaagatcatttgctttcttgtaaattgaactccattcgctagaatcgcaacttgttattttcgctgtttttcttgctcattgcattattggggatgagaaacaaattatactcatcttaatactttgcattaacaaagtcaacaaacagctttctattgatttgagaaaacgttgctctgtaaataagttgatatatttgtcaactgataagtaccagtacctgattatctcagttacgtcaatttttcttctgaatttagttaagattagatttctatccatttgaaaatcaacacgagaataaattttagtataatgtcatttaacgtataaaaagttcaaatcacgtgaaagatttcaaaaccgaagaccatatcaagttggttgtaggtaattaatacatgcatactcatatcgggtcattaattatgacttatatatagagagacgaaatttcatatataagttttgagttattcaaatatatagcatggaagaattgaatacagaatatatttgagcttctttcgaaattcgaatgactacttggagctccgattgattatcataaat

SEQ ID NO: 46477 - DNA, 345 bp, Arabidopsis thaliana landsberg
atcacgtggataaaatcacagaaaattcatagagaattttgaatttgcacacacaaacaatatgtcacagccaaaaagataaatatagttttcacttcagataaatgtacaagtctgttgcttttaagctgaatctattcctcatttgaaaaacaaaatcacaaacaaactctctctggttgattcagcctcttgctttatgatctcatattctttcctcacttagttagaatccgaaaaactgaaaaatatgtaacactgttagtatatatgaatgaaaacaaaagtgttggaagttaaataaccgatgtgtgtgaatgttttgttcttaccagcttcttcttc

SEQ ID NO: 46478 - DNA, 801 bp, Arabidopsis thaliana landsberg
tgctttgtgtagttgtcttttggaagtgttcttgatcctctctctctcagaaagcaatttgttatacattcatgatcttaaaagtacaaaagatgggtcgatgttctgtttctggtaaattattatttcaggattttgcacaaaaaccctcggaaactatagacattatgagtaatcctttatgtgattaaagaccatttgaacaacacatatctatgagtaaactcttttgtttccattaaattcaaaaaataaatgaggaataggcaaaacattaaagatgttttgtcttcattccatcaaaactcaaatgtagcctcaacggtacgcacttttttgataataaacctcacatttgctaaattctctgaaaaatctaaagtggttctaaacacagtgcaatgtcagcatcgaatgtctctctcagagagtcgcatataaaattgcagtggaacaagaaaagaaagaagaaagcatgtgaacaagtagaaaaacatcaattactaacaaacatctaattaatatatattccttacattgacaaggaaccatcgaagctttcagtttcactttcagacatatgtatagatagttgcaactccaaacccaagccccaacatggtccaccttctcatttgggtaataactaacaataataatcttcaaacgctcctatataacatttactacacgtctccatcttcaaacgcttctcttctattataagagcacatcacttaccattcgtggacataacaacatataataccttcattaaagtcctatttattattcacacat

SEQ ID NO: 46479 - DNA, 721 bp, Arabidopsis thaliana landsberg
gaagagtgactaattcgaaatcttgtcagattattgaagtaagagttttattacgtcgttgttagtatacagattatataacaaacaataaaatgtggttcccgtgtaaagataattataagttataaccttatattagacgacaaaaaaaaaatgttataaccttatattatttgagaagttacaaaaaaagattaaataaatatggacgaacaagagaaactatatctgtatatagtacttaagttataaccctataactcacacattctttcagtagcaatgagtttaatcaaaatgattccttagacttgtatttatccactcacacggtttagtaatatattaaatgaaaaaaagctctaaaaggaagttgctcctatatatcttattcttcttttatatggttttacaaattcataaaattcaccaaaatgacagtaccatgcatataccaaccaccctacgatcaaacagcaaggctaaaacataactgtaagtgttttcactattttgtttcatgttttcaccctcttggttacgaaggcaactatgccaaaacttattagtaaactttgattaactgacttttgttgagaccaaagaacagttccaaatcttgcgtctacccgtctccaattatttaaagaatattttgtcagagttgcacgtttttacgaacaccatttcattaatataactatatgttcttttaaaataa

SEQ ID NO: 46480 - DNA, 512 bp, Arabidopsis thaliana landsberg
cgattattttccttttgcatgtcacatcttctctactgttctaattggttttgaggggattgattatcttttattctataaaagctgtttctttattgtcacaggttaaaaatattgagttatggttttttgtatagcagctgagaagaagtattgttgaagatgaagaaaacatcaaccagaagccaaagaggaagcaaaggtatcaaagggaagcatgtcctgcagatatgtgttctgcttggagtatgcatttggttaatctatcaagtgaagtattctcatgataagaagaaggaattttatgagaaagatgtcgagaaatcgacggtgttgttgtcagaggttgaagatggagtggtgaagcttgggaggaaagatcttcttcctaagaattataaccagaaggaaaacgagaagcacgtggaagaggatgaggatgaagaagagatcagtcatggaggtgaagagaaggagaagaagagtaaagtagagaatggtaatcatgagga

SEQ ID NO: 46481 - DNA, 469 bp, Arabidopsis thaliana landsberg
gaaatatcggctacaacaccttcggtcagtaccgtagccgcctggatctcgttggtatttagggcgctcatgatctggccggtgcctccgccaaaatcctgccactccacttccagccctttatccagcaagggctggcgatggcatacacgtttgaaaggcacattaaaggcctcgtccacgccacctatgatgatttttgttctcactgttcaggaacctgtgtagatccaggctttagggtaaacacttttaatggcttccagtttagattttgcctcttccatggtagaaaaacttcccgcttccaccatgtagaaacctccgcgcaatcccaggttattgccctggtgcccttcggtattgagcttttcaaccatgcggttggcgttttgttccatggaaaaacaattcacgatcacatgaaaatttcccgttgaagcatactgatgctgcaccggttctttta

SEQ ID NO: 46482 - DNA, 313 bp, Arabidopsis thaliana landsberg
atgatttctgctgaccctgcgagccaaattttttaaccgggaaaccattcagcacaaactccaggtcgtctttgtgtatcccggtactggtatactccagcacgcggtcctggtcaaaactttgttccagcaggtcttccatggtatgctcatgcaatttactctggtaacgcagttcaacactttcattgttttgcccagcaatatgctgaaaaaacggttgaacagggagtaaaatctttgatggattcgtttcttctctggtagatgcgttgtcccaggggagccagctgctggttgtatacctctacca

SEQ ID NO: 46483 - DNA, 1268 bp, Arabidopsis thaliana landsberg
aagccgtattcatatggccttctctacaaagcccatcgatcaaatcattatagctcacaatgtcaggtgacaggccattggccagcattctcttcaaaaggtgcacagccttgtacggtttcccgactctacacaacccttccataagctcgttaaaagttcttacatttggtttgcaagccctcttctccattacagtaagaagctcaaaagcgggaacaacccgtccatctttgcagtagccatttatcaacgcattgtaagttattacactaggaaatatcctgtctttaaccatctttcgacaaaccccattagcctcttcaatctttccgtctctacacaacccatcaatcaaaacagtgtaagtgtggacgtttggtttacaccctctaggaatcatctcatcaaacaagttaaaagctttatcaatcaaacctctatcgcacaaggctttaataagcacagtatatgtacgtgtgcttggttggcaacctttctcacccatttgatcttttaggccaaatgcttcttcaagtctccctacttcacacaacccgtgaatcaaaatggagtaactaacagagttcggtgcacaagttacctccttagacattacatcaaacaccttgagtgcatctctgagattcaatccacggcaaaaacccagtaacaaagaagtgcctatatgggaatctaacacaaacccaattttaagaatcttagacatgaacatctcagcggcttccgtgtatccattcttacacagagcattgacaatggttctgtaatcaatcataccaacaacaaatccgtcagcttccattcttctataagtcacgtaagccaaaaatcctaaatcaagtttagctaaggacatcaaaagagagctgtaacaagggtaatttaaccggaacccaaaaacttctctcagctcatcaaaacaatacattagtttcaacatctctttctcgcatctactacattccttgatcaacgcaacaataacagcatgcgcaactcgatacaatccggaagaaacaatcagtttcaaaagctgatttttctgagttgggtcgaaacaatacgacgaatgcttgcagacccacatgaaaaagcgaacgcaaatatcgttgtcactgcgttgaagcgaaatgacctgtgaagcgacatttggattcatgtgagagactagagatttaagagaactgttcttctcccaattgggggtttttagcaaagatgcgacatcatgagccgccacttcg

SEQ ID NO: 46484 - DNA, 462 bp, Arabidopsis thaliana landsberg
agctaaattgtagcatcaacgttttatagatgaagcatgacaaaaggcacaggcagagttagatgggctggaatggcttccgaccgaaaacaccgtcggcgaagatcaaattgacgctgctctactcccttccgacgaagaatccgaacaggacaatgcaacgactgcgggcgtgtcctgattttcgtgtgaacgatcggtgggtgaacggatgggcatcctgtcttctaactggatggcaaaacgagtcaacgcatctttgcaattgcggatcggtatgggccatcttttactgatgtcgctcacggccagataaaacaatagcgatcagcgcataagtcggcgcgaaacgagccacgattcttggggatcttacgcaagctcatgttcaccgactcgatcgcatgggtggagtagatcacttttcgactctcttgcggatagtcgaagaacggcatgatg

SEQ ID NO: 46485 - DNA, 596 bp, Arabidopsis thaliana landsberg
taattcggccgttactgcccttttgctcacgcaattgctcactagagttgagccacgccgccgttagcccgcctcgccgtgtgcagcgccctctggtgctttcgcgccagtagtatgcccacggttgagtccgccaaaccgccctgaacgcacccgagctatttccaaagctctggagccccactatggccagtcccctcgtctccagcgagccctcgccgcgggaccgagcggcgccaccgcatttaggtccggcccccagccgttagatcttgggcatccatccgagatcgggcggtttaggtttcatcagtgcggatctgatcgcagccctccgatctagatccggccgctctcccctctccctctcacccatgcccctgcccctgggcccagctagtcagcccgccctgatacgatgaggagttctaggaccagtgggaggctacttgcttggtacgttgatgtgactcaccttgcttacaaaccggaccagtgggagcaacttgcttggacattgatgtgtctcaccttgctttacaaacacctacccatgttgtccactgtactagtgcttagagagatcgggcacatga

SEQ ID NO: 46486 - DNA, 691 bp, Arabidopsis thaliana landsberg
atggtttattagaattacttttactatttttacggtaaatttcctttactacctctaaaatggtgcagccgattccaccccaaataaatgtatccccccacctccaaaagtagctttggtacaaaacccaaaaaccctttgaacaaaacttatgcctaaaaaacatacataaagattttgaaattttgtcttaccccaagaacccacaaaatttataatttgtccttttctttaacacaaatttgggtctttgtgtacccacattgaacgtattaaatgtcaagttttgcttaaaaaatgatggataaaattattaaattcacagtcaacgtcatgctggagtgtccacttctcattttcataagaactgatttcaaaagatataaatattacttataatgtcattttgaaaatggtccttcaataagaaaactttcatttgtggtggagaaagcttctatcgtcgtctgcatagccatgcaatatactattacgttacgttacaagataataatcttattgcaatacacatacatacacctacaataagattgttcacatatcaaaaaattcaatttttatactgagaaagaataaactgtcaggtcatacaagttcaaaggctcaaagctattcaaccgttagtggcagatttgtaaataaatacatatccaaagggtaaaaattgcac

SEQ ID NO: 46487 - DNA, 513 bp, Arabidopsis thaliana landsberg
aacatatgttacttactttaagcaatgatcaaatgtctactagtattattatttttgtttgttttccactggtttttttttctcttatggaactgaaactgaatcgcactacaagtctacaagaaagtatagtaaagaagaagaaacacgaatatgtgatcaaaagggaaaatgagacaaggcctaatggctaaaaaacagagcaatagaagctcaagactttagcaatccaagatcaaaacaagttaataggtttttatggaattcgtttaccttaggatgtgcacacttttgatattttctacgtccaatatctctttcgtttttcacctgaaggaagatacacagagagatttgagaagtatattacataatagtttcaatcaaaactaaagttaaatcacagtgatttcctttattttgatttcacctctaaaaattaaattgatgatttaaatccaagccgataatgaaatgatgaattattatttataaagctcaaaacacaacttt

SEQ ID NO: 46488 - DNA, 642 bp, Arabidopsis thaliana landsberg
tatacttataaaatcctttgaaaaagaaaaaaaaaaaacaatagcagaaagaaggaatggacaaaaagaaaaaaagaaaaaaagaaagcaaacgacattggtaagtgggagtcacgtaaattctgtctgttgatttaagattgcgtatacacgtgctctgctgttttttttcatgactcactgagtcacttcattgctagataacatttttagaggctttttattgaattttgcccatataagattcacacttttcttttgattacttataaattctactgataacaaactcttttatgatctcacgtgaaacgtataaacaaaataatcttaagtcatttagtaagagaattgttatacaaaagagaacaatccataactaaaccaatggaagctattttccctgcatacatgtaaagaatcaatattttctaactggacttaggaaatgagggatctccaatgaagctattggcccaattatttggaatatggcccatttactttacttcacgcatgctcgtttctttttaaatgttaatcctgtccactggtcctctctctatgtactgttttccgatgccgaaagagtattttattatttcaacgtaaattatgtttgtgtttacaatactttttttt

SEQ ID NO: 46489 - DNA, 325 bp, Arabidopsis thaliana landsberg
acacttgcgacaccacccacataatcacatggcaacttaaggcaagcctcaaatggtacaccttgcatatcagtagcatatataaggcttttactatgatattttcatgacctcttaaacaaattcttaatagatatatgtaatctatgtccatatatatgaaattaagagatggttcatatctttattaagcaatttttggaaaagaagagcgacctcaccactttgtaaaagtagcataggatgtgaagtttttgaaatatgttactaattgatctctcgattagtaaatcacactttgacctcttatataagttacgagacc

SEQ ID NO: 46490 - DNA, 574 bp, Arabidopsis thaliana landsberg
  unsure (1)..(574): unsure at all n locations
aaactttctgtgaagtcgcattattttttatctgcttgttattgagcatgagagtttgtttttacttcttcgtaattgtttaagaatttttttgtaaacttaattgtttaaaaacgcagtctctttctcccggagaggttttgggacgacattaaatgcattctttattcttgttatgttttctggtagataaatttatcgtatcgcttatcacaattaaggaagataacacgtgctcccacacaaaagacagaaaaaccatatgcatgccgaatgatatttatgttctgtccaatggtttgcgaatttcaactatttaattagggatggctctttttactataaagagagaatgagatatttaaccaaaaatgtagatctcggaaagcatgttagaggactgacgactagattttcatgcaatctttgacattaattaactcatattttttcatttttcttggtttgttaaaatgtaaaattttggagtctttttttattaacgttttnnnnnnnnnnnnnnnnnnnnnnnnnnnnnnnnnngtaaagctgtgactcttgaatctgccggata

SEQ ID NO: 46491 - DNA, 502 bp, Arabidopsis thaliana landsberg
gcttcccgctgatcaccggggggttttgaatttactgatggtacatcagcaaagaacctaaaaacatcaaatatccgaaatcaaacgcaagacgcacaaccaaaaaccagcagggatctctaattcttggagcaaggatcccatttctcatgaacctttatagcaacctctattattaggctttgaggataaatatttagtcaacgaaaaatcatattatacaccaactccaaagagcaaccaaactgggtttgacatattccactaagtcacacgttcccttgactaccaagatttgagaactataataagaagcacaatttttaagaacttcaaaatgttatcaccttttatctctgctccgagttggaggatcaagtggaggaatagaaaccggagttttcaccgacaccctactaggcggcattagattaggaatcggagtcggagtcgtagatctagcagacattgacggccttcccgctgaagcagaccgcactga

SEQ ID NO: 46492 - DNA, 561 bp, Arabidopsis thaliana landsberg
ataatttccgctttaatctcgtaatctgaaaacatttcagttaaagattcaagattttatgctattcaaatatattctgtagtgcacaactgtatcacacgagccattactttacgccgggaaatccatacttctaaaacttatcaactttatcgtcttacaaaaataatcactctaatatacttcgtattttattgaaatagttctctcgtaaggctataaaggttgtttaggacgcatgtgactgacttatgattgctctcttgtacaaaccattagctaatttcggcgcacgttcatacaattcgtaatcaaattgttgtatatatatttttttgtattaaaatcatttatttacatcaaaatgatatattctaacccatttccttgtaaaatatacttatacgctactgtttcagcggactaccattaattttgtataattgtttcttactaaaaactgttttaaaaggtcatatctctggattagagtattagtagaagagattgggtttaacaaaaacaaaaacaaaaaaagtgggttcaaccgcacaagcaaac

SEQ ID NO: 46493 - DNA, 611 bp, Arabidopsis thaliana landsberg
ttcgcctggggccctcaaaatcataggaccggggccgttggaattaagcacctaacaccttgttaagccgctagacgcacgatccatcagaatatataatcgtggaacacgaccagctacaaacggaacggaacgacgacctagccaggccagtgcagtgcagtatgaagaaagggcttgacgcgcagtacgtacgtactgtgacatgatcgatcagatcgtaataatctactgagcttcgccacgatgagacgatgatgcacttggtatgtatgtgcctgcagatcgaggttcttcttgaccaccagctaggcgccattgtcgcaccggcacgcagccgcgatccatccgctcgccgtgcgtgctcgctttgcctgcaaatggcgggctgagacctggaaatcctccacggttcttgagctatctatccaccaggtcgcgacgacctcgctcgcctctcctccttggaccttgaacggcgtactagctagctacgcgtacgtatagatggccaatagtgctgggctaatcgggctggccggaaaacggcatggccctagcacggcacggcacgggtggagccgggccgtgcggcacggcctatagctagt

SEQ ID NO: 46494 - DNA, 681 bp, Arabidopsis thaliana landsberg
tagttttgataacagttaaaaataaacaaatatgaatttaaaagtttgagcacaaaaagaaattaaaatagaggtaagggatatttatcgagaaaaaacaattgagtattggaattttttttttttggtgggaataagtattggatttttactaatttggtttgaaatttttcttagtttaaaaatacaaagatctaaatcgcatggttttaaattcatttaaaaactttattaaagatataaatccaaatcatttaaaatagaagattgaaataattgtcaattatattgaggagaatggtcccaaagaaaaaagtctgtccagctttcttgctgatcaagtttgtttttttacgcttaaaattaatgatttactcaggttttctaatgattattgacttacgtttgttgatatttctctcaaaatctctgcttaaagggttttcttaagtgcaaactgttctattggtaagagaaatcatgtatggtgttaaaaacatattcctggaactagaatccaaaaacgatctggagatcaaacacggtcttgaaactgctttgatgttctcaataagcattcaatccaaatagaaaatatattcgggtaagatcattagatcaccgatccaattaccaaagcaaagtaggtgaacaaaaggaagttttatttagttactctgc

SEQ ID NO: 46495 - DNA, 566 bp, Arabidopsis thaliana landsberg
cgcaattctggcaggtgaaactctttgtaatgttgagtaactgtggtgcaagcgatttcccacactttttatctcctgtttggagaatttgaatttaccggtcattagcttacgtgcactttccttatctgttgcaaatcaccaactgtggtctaattaagaagtcttgtgaaacagggaaccagatgtcgcaacttcttcagtaaatcatcgagaaaacgactctaggatggcgttagatgataaaagaagtacgtgaatgttgatattggcaataattagtttgacgcttttgaaagttttattttgttcaaaatttcttggctgtctattcattattttttgctttggcttaagtcaggcttcaagaccactggtgttcaggctgatgtggccaatcattctgacctttcaaagaaactgctagacatctggcgcacctcaaattatcaagatccgaggaaaaatctaatctcagagttgctactgggtcgttcaacagatctccagatactctttagttttatgaaaatcagtacgcctcctcaagatcttacaaacaggaa

SEQ ID NO: 46496 - DNA, 616 bp, Arabidopsis thaliana landsberg
gtatagcgaattatattaccaaaatatagatgtgtgatgcataaaatattgcagcacagacaagatattttcattcatgtttaaaaaatgttttggaaatacttgactaccatcaacttctactactattagttttttttttatagcaataacatactaatatcaacatagcattaaaaactaataataatacaacaatctgaaaagattcattctctcctgatacagttttaaaacaaatgggtggagataattaaccagatttaaaaatattattattatcacaaaagagaatgctaaagaagaatcaaaatgagaatcgtagccgtcctagccactattactaaaacttttaattgtacggatttattcatattttagtgttgctgacaaatttttaatttgataataacactaacttgatttagtaggtaaatcgtgaaatgaaaagtttatcatcatcatttatgtgacaatcgtggtaaacattctgcaactccatcattccacaagttgaacaactagaatctaaaaaacaaacatgagactctataagttatttgccatcattccacattttatggcaaatacacactattaccaatcagaattttga

SEQ ID NO: 46497 - DNA, 775 bp, Arabidopsis thaliana landsberg
ggagtgcatgcttcatttgtggcgttggtaccatacagagtgattgtaacattcacacttttccagttggtttattttctctggtgctatggtatgacatggattcctatggccgggatatttttccccgcactcttctttctacttataagtataagagaacacttgcttcccaagttattcgatatgcaacaccttcaagtgttagatgcttctgactatgaagaaatagtagcagcacctatccaacactcaagtttcgcatatagggtaaacctttggtctcttaatgagtttaaactgattcaggggctttttgtgtacacgtgtgtgatacctttaaaccattttgtgagcagaaactagggtcttctcatcatttatcagaaggtgaagatgaattctacgacgcggagatattggatgagatgactacaagcagaggtgaaataaggatccgaaccataagttttaaagaggtaataaaaacaaattatatctattctacacaatccaagcattgatatgaaaaaatgcatataaacaagaatcttgtttcaggtgcacccggagcctgaagagaagcatgtaacctttgaaccacattaaaaagaatcttttgcaattgtttttgtacacaactgtatttgtgcataggcatacattgactatgttataactttccttatagtggaactttgtttcagcaattaaatatgagattattcagcattcaaattatccagtacttgctgcattatggccatttattcgg

SEQ ID NO: 46498 - DNA, 766 bp, Arabidopsis thaliana landsberg
  unsure (1)..(766): unsure at all n locations
taccccttctgctctctcgtctcagattccaaactcatttaaatagcttttttatttgtacctaattcattcgtttattattaggatgtcttgtgcggtcacaatgaaaacactttgaaatttttcataagaaacattcnnnnnnnnnnnnnnnnnnnnnttgtcatagcttttttttcactgttctttttaccatgtcctctaaaaatgtccatcactctttcatattagacttgtctcctttttatataacaagcatatctacataacagtacactacttgtatacaaagcccattctagctatcaaataaaacttgtataactggttcagatggtctaactgggcttttaatttaagtagcttcttatttgggccttctaattctgatatgggccgaattttagaaagaaccaaactcgattttaaagatgtgttgctgacattcagatctttcattcacacactgacaaacgcatccgaacggtcaatatataccaatcttgtcatgagttatcatgacaaaaaaaaggtttcaatttttctagtaaatgtttgtttctaccattatagtaacaggaagaaaattaaacaactcagcggcatgggcatatgtaataacaaattacgatcttttgcccatctactaacaccgagagtagtgccttgcacgtgactttatattacaaaccttctagatgaatccgaaggttcctcaagtagtagttttttttttcngtaacagattcttcaattagtagttaaa

SEQ ID NO: 46499 - DNA, 315 bp, Arabidopsis thaliana landsberg
  unsure (1)..(315): unsure at all n locations
tannnnnnnnnnnnnnnnnnnnnnnnnnnnnnnnnnnnnnnnnnnnnnnnnnnnnnnnnnnnnnnnnnnnnnnnnnnnnnnnnnnnnnnnnnnnnnnnnnnnnnnnnnnnnnnnnnnnnnnnnccgctcacaagtctcgacaacatgtgagtcggaagcatccagtgtccagcctcgggcggctaatgactgacctaagtcacatcgattgcgtggcgctcacctgccgcggtctcatcggcaaacctgtcgtgcgacctgcagtattgactcggccaacgcgcgttgagatgcggtttgcgtactgcacgccaa

SEQ ID NO: 46500 - DNA, 446 bp, Arabidopsis thaliana landsberg
gtaatgccccaccttaaaagtattaattacagctcttgtcctccttttgccatggctcactgaactttgaacaatattatacaagtgggccctcttctctttttactccttttttttgttgatatagaaaaaaaagttcggattattatttatttttggttccataatggggttgtttgttattaatttcctgtatttttttctttgatttgggtggaagattgttggtatgaataagattaaaactgttgagttgggttggttttgttcgtgcatttcatccatagtgatcagaagctgaatctcacttagaattcttaggtaaatcttaaaaaatgtggaagaattggaagattggagaaatatatgtatgaaaaatatttacatttcattagttagtcaattttttcatataaatttaatttcttgattggggatgatctaga

SEQ ID NO: 46501 - DNA, 558 bp, Arabidopsis thaliana landsberg
catgcctgcagtggacatatcgcgccaaatggtttttgtgacagtgatccgctcagggccatcgcgtgcagtgcattcgccgttcgtctagggaattgatccgggggagtgatgaggttccggaggtatcgcgtgccgaccgtcgccgccgtcgtggtgtcgggcgtgtcggctcttgtcgcgggctgcatggcggccagcgccggttccactgggtccggcgccctggagaagacgaacatcgtggtggaggactaccccacggttgactcggcgggcctgtacattgccgagcaggaggggctgttccagcagcagggactgaacgtcaagatccagttcgcgccggccagcgagctgacggtcaacagcgcggtcaacgggaccgccgacatcgcgatctccgactacgtcacctacatcgacgacgaactggagaacgacgacaagctgcgcatcgttgccgaggcgtccaccctgcagccgaatgacatggtcctgctgaccccggccgggtcgcagatcaagaccctgtcgcagcttgaggggcagaccatc

SEQ ID NO: 46502 - DNA, 601 bp, Arabidopsis thaliana landsberg
gagatgggagacggagcttaatcgtagcggtggctatcaaagggaacaatagcaaaaccaaaggcgttgttcgatgggcacttcaagaatttgcttctcaagaacatgtcgtcttcaagctcttacatgtccaaccaagtaagttccttatattctctaaacttctacaaaagtaacagactttaagtcaaatttagatctgatattgttgagttaaaaacaggagattcgaattcggtttcaactacaagaaaagatttgaccacaagtgtttacaaaaaagatgttgatagaaaaaccagagagatgcttcttccaagcagagacatgtttgttcatagagaggtatattcgtaacttctctcacagatttgatctgttattttagtatgaatctaaaatcttgtgaaatgtgaataggttcaattggatataatggtgcttgaatcagacgatatagctgatgcaatctctaaagcagttcaagatcatggaattagtgagctagtcattggagcttcctcttcaatcatcttctcatggttacatttaaaacacaatctcttagctttagatttccatcagattgtttaatcttttt

SEQ ID NO: 46503 - DNA, 585 bp, Arabidopsis thaliana landsberg
ataaaagctacggaaactacttacaatagcacataattttatgagaatgactataacagcttaacctatatcaagcttaataaaatagcatatgaaattttgaaaatgacctttaaacctgattttgtatttatttacatatattgccattcagaattatattttgtggaaaaattactttaaatatattttgttgaaaactcctaatcttggccctttggacttacattttttttttattcttttccccttccaatttcttcttgcctaaatcattttacgttcacacttgaaaacaacttcattttataaaggaaaattgtcaagaatattcaagtctgatctatgcttgattttaaaatggttagcttttgcattttgccacatgaataaaaaatgaaaaaaaaaaacattttttcgaaattcttgttgctttacttgatcattgatgtggttataatcttgatagagtttgtacggtatatgatatgtttgacatttgtttgttaacttcttgcgtttccaaataagtcggccatttcaaactccaacaattccattaagttgagattaactaaagttaca

SEQ ID NO: 46504 - DNA, 579 bp, Arabidopsis thaliana landsberg
cttttaaacttatacctgaactcttttgtacaagtataaaaattttacatttcaacaaaaaattgttctatctaagaaaaacacatatacgccctaccatgttttcttttcatcactactgaaaagcggttacttttcttctctttagttagcacactgtaactaaatgaatgactcatttacaagataaaatgtaaatgttctgccctaccatttacaagagatacatatgcctctatatttcttgattccatttgtatagcaaaaatatagtaatattaagagaatatatttctcctattatatatatatatatatatatatatatatatatatatatattcttcttttttaccttttatatattaaattgctattttatcctaaacaagatatatgatcttcttttacaaaaattcaacaggattttctttgtttgattggaaaagaatgcattgcaataaagggaaaatatctaatggttctaattaagacaatgtcttaaattaggtacaagatcaaaatgcatctctaagttataacaatgtgtatcaatatcacttcttatatacatatgta

SEQ ID NO: 46505 - DNA, 1483 bp, Arabidopsis thaliana landsberg
atcaaaattaatgcatatgacgaaatttttgttgaaaattttcaaaatcacgaaattaaattaaattggtgatgagaagctcaaggttggaaataaagagagcgtatatttttgaaggagacatgttaaggtgtaagtggggacgaaattgtctagggacggtgtaggaacaaaacacaattcgtcaatgccacattatctgttttgatgttcaacaacttctataaataaaaaagagaagttaagcataacttcttctttttttccttgttttgagaacacctttaaaatttaaatgaaatcgaaaaagaatacaaaaacttaatgacgtatgtacgatacgatcgacgagtagtaactcaagttctcttccaatcgttacgattcgggatttcgggtgtgggtgataacaagcgcccacacataatcaatgcacatggccatagcatgatcgtattattttcgtctttatagagagcctagcctagtttcgatatattacacaaaacttggaaagtatattgaatgctttattaatttcaaaggttggcaaaagcaatattcattaaatgactaggacatgtagaatagtgattgatgttttgaaaatatattttagcacaaattttcatattaacaaagaaaaattatttgaaaattaaaatttgttaggattaaaattaatttaaaaaattgttcttaaaatttagaaaattcacttaatggaatatcaaacagtgaaaatgcgtaaaacaaaatctttgtgttataaattttgtgggtaataatacatgaggatttgtgtgtatagcaatcgtctaatatgactttgtgtatgtcagatggattaaataactaagtatgattatcacatttggataaatatctagtaccaaaaagatgtactatattttaaggatctctatcaaaattaatgtaatagttgaaaaacaaatcgatcgaatagagacaaatcatgtgataattgttttggtttggtagctagcatatagtactcgtaccagcatatacttttctctcgcatttaaaaatgcgtgaaactatattataaaatctgaaagctcatcaaaatctaataaaataacgtcggtggagatcgacgagccaacgttattcctcgagtaaacaaataactatgcaaattttctttatcattaaataattaacgatgaagaggtttcaactttcaataatgttgtcacaaaattctttctaacccgactcacttgtattttaaaccaggaaaaactacacgagagcgttgcataaacatgaagaactgttctgttttgggtttatgatagagataagcataagttagtagatttggtaggagtagatattggagataagggtaggattagggtaattaatgaagattaggtgcaaaacggctaaaaagattaacatggtggagcttggagcccacgtcttctccgtacaggcagccctctgtatctca

SEQ ID NO: 46506 - DNA, 1007 bp, Arabidopsis thaliana landsberg
gaactataaaaggttaaatttagatcaagttgtcacttttgtttgtacttttcatatctagtgttttttgattatttattagcagaatagtttttaaaataagcttttttgaaaaaaatgctttacaaatcatctatctaactacaatttttgctgtaaaaaaaaaaaagactacaattatttttcacaatacattacaatttttttttttttgtaacattactgtttcttcaaaatcttgaagaacagcgccacaaaactttagaaatattaatttgataggaaatgtttttataaatgttacaaatttgttgattctgaaagttgttgactttgactttattttggacttgtgtacgggcagtatcgagatccataagactggactagggcccaagtcgatatttcatatctaattagacttttgactacggtaaaaaacattctcttcttttctttttattaaggaaaataagcataaaactgaataaaactttttttagttagacgtttttatttaatcataaaacttatttggaagctccgtgaaaatttgataactgacaaatgcagcgaacttttaaaccgtctttgaattaaaatgaggagagaattaaataagtttcgtcggagaaaccatattttagaccgacaaaaaatgataactttaaattgacttgccaccgtcattgtgcagaaaatcttcttcgtcgttttcttttctcttattttgttcataaaaaagagtttaaaatatagaaatagcttcacgctaatgttacatcattttccttacggacgcactcgcataatgaatattcccttcgaataaataatatcacgcccggatttttgtgggggatggatgagaatgtgatgtttgggtgttgaacacgcccacaatttctatgaattaataatatatatttctcattttattcaaataatgatagattttaacgaaacaaaaacaaacgttattaatatacggatcgttgatttgattc

SEQ ID NO: 46507 - DNA, 690 bp, Arabidopsis thaliana landsberg
aagataaaaagctgttcaaatttatttcggtcagaatatatttaaagtcattctaattgaacttaacaaattgctataagcctataaagtataaacgattaggcagaatgtgcccactgtttatctactaattaggtattaaagctataatagtactacatacacgtgcttgcacgatatgacgacgttgtatcaaccaaaaatttgtataagccacctaacatgagattaggtaacactagaaattcgatatgagctaagaatgtcctcatgtgccaaatgaaatgacgacattaagacacgtctatttcgctgttgtcctattcaatattaacttttactttggtaaagcgtggatatctccctttgtatactatttttgcaaaatgtcgttaaaacagaattattcgtatttgtatagcttatggtgattttaggtacttctattattgataatattacttaaacgctttcatttttaatacaattgaattgacagagatgtttgaacaaaatgatacctaacggatattaatcaattttcagaatgttatcaaataaatgtcaaacaaaagaaactactatctactctaatggtatataaattaataatgtataactcgattagagttattaccaacccacccaaacagttttctcatcttaccattttttacccaaaccaacaca

SEQ ID NO: 46508 - DNA, 193 bp, Arabidopsis thaliana landsberg
ctccacaactcgctctctcgccacgcacactcacacatcgccacgccgcagccacacgcacacgcacacgccgctcacaccatcctctcctccccacacgcgccactcactctcctcgcacgcacactcacccacacgctctctctcgctcgctctccgtcacacacactcactgccacagcctcacacacac

SEQ ID NO: 46509 - DNA, 699 bp, Arabidopsis thaliana landsberg
actctcgccgtcggttacttccccattttccttccttcttccgattcaaagactcaatttttattctccggcgttgaggattcatctcctaaaaatctctgctttatcttttgatttgagctgatttggagaggagaagaagatagatagataggtaattcggattgatatctcgaaaaatggctcagattcagcatcagggtcaaaatgccaatggtggtgtagctgttcccggtgctgctgcggctgaagctgcggcggctgcggctggagctgcggcggcggctgccggagctgcgcagcaagggacgacgtctttatatgtcggtgatctggatgcgaccgtgacggattcacagctgtttgaggcgtttacccaagcgggtcaggtggtttctgtccgtgtctgcagagacatgacgactcggagatctctaggctatggctacgttaactatgcaactcctcaagatggtaactttcttaaggcttatctgatttggtaacttagtcgttgtagctcatctgaatttggggtatggactgatgtgttatatcaaatgctaatctaaatttgggagctttctataaaaaaggtgaaagctttcaggttaatttggaaagtggttacatttggtaacattgtgggctttcagggtatttggctgttagggaggatagttttcttttgaggtcata

SEQ ID NO: 46510 - DNA, 572 bp, Arabidopsis thaliana landsberg
tactgtgaacaaaatgaagacatgactacaaaaacgcattgcctaccttgagtggatggtgtggtgagggagtggaaaagctaaagacgttgccgttcatagtagtaacaataagatcaagatcgtctccgccatccacattgtcagccaaaaccatggtgtacctgtcagtcaaagtgcaaagaagtgagcgcactttattgatgtaagtacagtacccaaaaatgctaccaaaatctcgcagagcagagaataaattgcatacgaggtctctccaatgtcaacaacatctgcgctgccacttgagccctcgatcaaatccaaagaaagaaataggaatacgagtcctcatcccgggtcctagactagggagaatggaaagatttctacggaggcttgtttaaagtaaagtaaagaagggccattttcgaatgcttatctagatatttctagaatccacccgctgccaggccaggaaatagtgccagtccacttttccatctctatgaaagaaacggaagcggaagtttgcacttgagccttgtcttgccaggtcagttcggcgctggaat

SEQ ID NO: 46511 - DNA, 474 bp, Arabidopsis thaliana landsberg
agggagtccacgccttggtcatctttaagagcatactagtgtgcagaggtcttctttcctggcttgtgagatattggtgaaaggagatatcctgaactttccatttgccatgcacgttagtgttagctgagcatcactcaccattgcctgtcgcattcacatatagttttttacaatgttgtaatcactaatcagactcagaatttgcatatatatagactcagattctagtttcagggtcacaacaaaggttatggcttagatgaatatacctcgcaggaagtagtcatgtcgatgcagctccattttttggttggaacacagtcaacatagcgacaccaatggcaatgacggttgacattgactccccagcatgctggtaatagaaccccggcaagtctaaacagagatggaaagctttttcatgtcacaagagcgtatataaaacataaaaaacttgaccaaaaagagatt

SEQ ID NO: 46512 - DNA, 499 bp, Arabidopsis thaliana landsberg
taggtagctatataacattcgcaatagcaaaggtcatataaacgcatatagccttccctaggtgttccctttcgtgtctgttcactgtttttattcatattttaatactactccattgcaacaaatctttttattcctttttccttcgttattgtgaatcctgaagacagtgaagtgaagaagtggaaagatgccacacaaacactaattatgttttttctttaattaatcaattaaagcactattagtttagtgtttaaatttgatggactataattggagttaacccttgctggtttaaaaacatatcatagagacaaagcggcggtggtccagtgggttacattttgaattcttatttacataacaaaaagatgcaaattctttaataatcacacagttttggaacattgttgttgttaagtcaaattagtttaatgtttttcttctttataatggataattgtgagattcttgtcagcattttctatcatcgaat

SEQ ID NO: 46513 - DNA, 2195 bp, Arabidopsis thaliana landsberg
cctcctaataaaggatcagctgctccaatgttagtggcaaaaacaacctgtgcatttgatagtatttccttcaccgtctccttttccttcttcttcaacgtctttccaagctgtttcaagagctgccgaatgccagctgcaagaacatcatccctcaggcattgccgaagatcttttcttaaatctgacttcttcctttctaattctgctcggaagcttgcaagcttagagttcacaatttcccctaaagactttgaagcaacagcagatgatattcttgctggatttcctactcgaacaatgtttagtccaagatgcaagagcttctcgaccatattatcaacagctgcattagtaggggctgttacaagtactctttccccctgctgaacagcaagggtaatgacctccttaagcattccagtctttcccgtgccaggaggtccttggactatcataacaggtctttttttgtttactccaagagctatagctctcctttgagaagaatcaaataacttactcactggctcatcactcaactctgcttcactccagtctacataatcattttgctccagccatgttatatcttccccatccccgaataaagtcgccacaacagatattgatggatttttcttctgcagaccattcttctgcagaagcattagggcttcgcagttacgctgcaacaaaagactatataataagcaagtggcaagaaagaatagtaatgtaaactatcaatacttgagcaaacacttgcaataatgggatacaagcatatttaagatgaaaattactgggataaaactctgcaacttcaaccaatatggaacaaagatatacctcgtaagttaaggcatcggccaacccatgaatacgatcaattctcacactctttccaaagagcttggaaaaagtaggatctccatgacgagattctagagccacaccaatgctacgcccatcttctccaaggttgtgaacaaagccctgcgtacaggcagttgccccagcacccctactatcacaaactcttatgcaaaccatgtcaccaggggaaagtgtagtaggaggaagacggtggtttcccccaaccttaaacaacaccaaatgcatacctccgagccctgcatattacaacaaatttaatcgaaactggaaaagaacatattacaacaaaataaatttgaattattgaaaactagattagaaagggtgccactttggctataattctcacctgtggaggtactaactgcatacaaattgcaaattgtatcacaaagttcctgtggagcatccccatgcctaaccaagaactcaatcggttttgaggaatcagagctctcatcaggagtaggaacaacatctagttcttcctgtgtaacttccagttctgtatctcgttccacttgaagtaactgcgacatctggctggtgaactcatcaatcctttcctgtatagccttcaccttctcagagtccatcccaaaaactccttgaacaggcttagcttgagcagctttgcgagcaacctcccgatgctgagctatacaacatcatacaagccaaaaagttcaacttcagccaaactataaaccaataataacttagactcgaagaattcaaacctgaatttgctatctccttgagcagcttccaagactcagactctttccaactctccattatattcttccgctccaagtcttgaagaacatcacgcaactctctctggaaatgatcgaacaaggtaggataatgagtacaagccttcaaacaaatgacttcagaacctaacggcatggaaatagcattgagatacggatgagcatgaatcacaagcgtcaaaccagatcggacgttctgcctcaactccgaaaactccccctgaacctccgcagttgcaagatccgaagccatcgctttcatcgcctgactaatccacttcactacgttcctccctaaatctctccgccctaatggatcaccattttgattcaaagcacgaagactcaattctttatcgttcttcggttcctcaacaacacttaaactaacagattcagtattatcgttcctcttctcaattttcttagacctaggtaaatcggaaaaattacttttccttcgtggcttcttcttagtaacactggagccgccactaacgccactgcaaaagacct

SEQ ID NO: 46514 - DNA, 558 bp, Arabidopsis thaliana landsberg
gaccatttctcggaccagtttgaatacttttcttttttgtagataactaactattttgcagacccaatgcagcttaggatctagcaacaacgaaactgcctccatcaagatagctgttgaaatgctagcttcttcaggagtaactaagagctgatcccttaaacggttcctgatgattcaaatcagaaagaggcaaaactgaatattttaataacagaactgaaaaagccaagatagcaatagttggtcacattttgaaagaagaagggctattgcttggatatgctctacaaaatgagagatgacaaaaatatatatattacctattctggtgtatcgcctcgatacaggtaaatgcaagtttctttactctaaaatccaccaaattatgctcagaagaatagtccaagccagaaaaaaggctgacaatgtcacctgtcatatgatgagaactgtaatacatcagtaagcaagatcccagtcatcttcggaaagaaactagagaaaaaattgtctgtgaagcaaaaatactattaaggcagtctatatgtgtgagga

SEQ ID NO: 46515 - DNA, 714 bp, Arabidopsis thaliana landsberg
gatcatcgggccggttaatagaaatcttagattttgatttaagaactaatggtaagaagatttttttttcattaatagtatattaaaactctagatttaagctggcggaaatcaaattgtcttgtcgaaaatggtaactccagtaaaagatgtggtgtgatttagagaatgtaatacctaatatcaatgatgcgccttttatcaagtcattcctcgctagtgaagtagagttagcatatttcattctaggtaataagataaccgcaattggagcattcgagtcatgtcgtctaaattagactcagaagataaagactttggaatcgatttatttgatgaaaatctaagtaacacaagtaagttttcgattgtacttcaatttacttagtatttcattcttgataatttttcaacaatattttttttttatgaatgtttgcaatcagcagatctggagatccttggtcgaatggatgttttttgttcaggatcctcaaaatgatggcagtaccgtcttgttgcttggagatgatattggttacaaacctattttgactaaatgcacggctaataatatccaaactatactcatgtacacgaagtaaatgtatccttatatacacgaaatatatgtatttcatgaccacatgcataaactaaacgacattatgtagttaataccataaacaaacaattacggtacaatggtcgatg

SEQ ID NO: 46516 - DNA, 1021 bp, Arabidopsis thaliana landsberg
aaagttcttgttcgtccaaatttgtcagctaatgcacctccagtgaatgaacctaccgtagcaccagcaagcagagaactaacaatccatcctgctcaacaccaatcatagagaataccaattatgagtttggctactaatcaaaacacgaatcattttaccgttgacaggaggagtaaagaagtggatcatcatatacttgccttgcaaaacagtattttcggcgatcccaagatccttagcaagatattcaagagcaccattaaccaccctgattcaatccaatagaacatcatcatccatgatcacaccaagataaaaacagtgtagtatttagtcatacccgagatgataaccaaagagtatagcaccaagacaagcaacaccaacaaaaggcaaaactgttccagagcttttcccttcagatctcagaggtatagcttcttcttcatctccatctacatttcattcctcaaaccatcagatgattagtccaaatcccaaactatacattagattcttcaaattgtattaagaacttgtaagcaatcacagcatctaatgatagacaaaaatagaagagcattggaagagacgaaccagaggaggcttgagctctgaccgatcgagctttgacagaagagaaactcataacgctctggatcccgtcatcagcacgagcaagcgtcgctcccatggctttagaatcagaacagtagagtgatccggtggtggctaagctcttagtaccagcgaagcgaattccggtagaagtcgccgatctgtcagaagagaaggtccgtctctgaaacgcaaacgcagcgtttcctttaaccgcatacgttgacgactgcattttgtctgactttttataaccgtaattgcaaggaaacgagaaatattaggcaaggaaggaaaaaaaaggatcgcatttataccaaacagaactcaaaaagagagaagtaaggaacgatgaagacgcaacatcacgaaattgggaaatatgttgcattgatgcgaa

SEQ ID NO: 46517 - DNA, 776 bp, Arabidopsis thaliana landsberg
  unsure (1)..(776): unsure at all n locations
ttggttatcttcttcatcttcatctacgctttttcaattccatcctctattctcgccagagcacatgaacagtttcgtacttancattttcttccaagttaatttgaatctgacgatgatcgatctcgcttgttgactcgtatttgatttatcgatctctacaagtgacggagatgaagagatcagaagcgttgggcgtagattccttctaggtttcaaagaaactccaaaaggaagtaatatcaccttcgcttgttctccttcaggtccttgtgtctcttgcaattcctccgaaaaggtttttcaaatttcctctctaattgctctgttttggtatcggatctgtgatctagggtttcagaactagcttaatctgattaatcagcgaaattgattatacagtgaattggatttggttaggaatctgaagaacatttatatgatctagattgtttttttggtgatctagggtttcataatcaataatttatcggcctaattgattatacagtgaattagatatggatttaggaatctgaagaacatttatatgatctcttctctttgttttggttggtgtggtttcttttgtagagaaaagagaagnnnnnnnnnnnnnnnnnnnnnnnnnntattcctttcaaatgtaaagaggttagagaagaagtggatgcacataagaaaaatggagaagaagaaacacaaaatgatcaatcgaataacaatgacgaagaagcgaaaacaaggaatctgttggatgattcatcacccgcgac

SEQ ID NO: 46518 - DNA, 894 bp, Arabidopsis thaliana landsberg
aaccctgtctgcaaaattcttcactgtttccaggaccaattctttacaggaactgatggaactgatcaggggaaggtatgtggataatgtggcggtggacagcatcagtgaggctgcggcaggtgaactgctttcgaggctggacccgcattcggtattcatacccgcttcccgcctcagggatgtgaacgaggaactgcagggtaatttccagggcataggcatcgaattccagctgatagcagataccgtgaatgtaatgacgataatacctgacggcccctcggaaaaagcggggctgcaggtgggagataagctgctcagggtgaatgatacgctggtactttcaggaaaaaaacgggggatagatgatatacgccatatgcttcgcggcgatgcagacagtaaagtaaaggtagcatacctgcgtagcggcgccattcgcgaaacgatgattacccgcggcaccattccggtatatgctgtggatgcagcttatatcattgcgccgaaaacaggatatatacgcattaaccggtttgcggaaaggacctatgaagagtttatgcaggcgatggagaaactgcagaagcagggaatggagaaactgatcctggacctgcgcggcaacgggggcggactgctgaaggaagccaccgatatagcagatgaattcctggaaggcgataagctgatcgtgtatactgaaggagcgcatgtgcagagaatggactaccgctgccggcgcgatggcatctttgaaaaaggacagctggaagtgctggtggatgaaaattccgcttcggcaagtgaagtgctggcaggcgccctgcaggattgggacagggccacgatcataggccgcaggtctattggcaggggctggtgcagcag

SEQ ID NO: 46519 - DNA, 502 bp, Arabidopsis thaliana landsberg
  unsure (1)..(502): unsure at all n locations
tgtgacgggctgctggatgctcgacttacccacgtagggtaaaattggggggctggtttgtttcagcaaatttctgtaagttttgtagttggatccatagtccattatgctttccaatgatgcaaacagctcgatagactttgcaggtaagctctgaaaaaagccatcatcagtctgcgtaaccacacaagcgcaggcccgaatcacttactttccatgacttttttagcctgtgtgcaggtgccaaattcaaaccagtatctatttgcatcaggccattaaaggtgttgatctcgtgtagtttctgaagagctctatgaggagtagtttcgctattgcttgccacattacacacctcagcgagaccaatgaaccgatttatgactgcaactctctgttctatgttgggggacataacaatcgtacttgctacccagctacttatacgtgccagaaaatgacattcattgtactctgaacagtgngggcatcacgtaccttg

SEQ ID NO: 46520 - DNA, 452 bp, Arabidopsis thaliana landsberg
tggttgaggcaggattggcggttacgctggctcctgtggtggcgcttagtcctgtagcaggtgaccaggtataggtggtggcacccgaagccgttaatgtagcgctgtctccgttacaaatggtagcaggtggaacggtaatggccagcgagctgcttacggttacagtggccgttgtagtcgaggtacaacctgcagcggaagttccggtgatggtataggtcgttgtcgaggaaggattggcggttacgcttgcacctgttgtggcgctcaatcccgtagcaggcgaccaggtataagttgatgccccggtagcggtcaatgttaccccgggagccgatgcacattttgtggcataaggtaccgtgatcgttggggtagggttccccgtcagtgttgcggtagttgttcctgtacagcccgcagctgatgttccggtaatggtgtacgta

SEQ ID NO: 46521 - DNA, 643 bp, Arabidopsis thaliana landsberg
atccttacaaaataagcgggttttttttttttttttttaagaattcgatgtggttccaagtttaggaacgttgtcgcaacttaagaagagacactaattaagtgacttaaaccaagacatggtgacgaaaagatccacaagaggcaaggcatctcgcggaatctgtaaactttttttggctgctcataacagacttttacgcttgatagtttctttagaaatatagttctcgttgaagactttaaatagctgatgattcttgaaatagagatcgaaggattgaaagcttgctcaaaattctctcattgttaatagataatcgtttaaagtcttaattagtccaaatgttgaagaaagtacagaaaacgatatatttgagtggtgctgctggaacaagtaggataaaatacgtacaagcaatacaaatctagtaagtgtacatgcatgatcttcaattcttgaggattttgtgggaaagattctgaaaactgtactggcttgttgaatattctaaatctaaaatacaatttatcagtacgtaagcaaacatgtgcgtcaaagttaatctttccaagctgaaacaacaattgctgagataaaaaaaagttcaacatgcgactcattgactttcttaacatttacg

SEQ ID NO: 46522 - DNA, 810 bp, Arabidopsis thaliana landsberg
aacaaattgattaaaagggtttgaaataactaacatttggcatcctccaagagaagtgaaaaaccacaaagcattcttattttcgtttcaatgacttgaaaaatatgagttttcttaccaagttcaagttttaaaagtttactaattgcaaatttacaagtaacattgtttttgaagagtgaaactaaattctttgctttgcaacgacgtaaatttttgtaacactaaagctcgatcttttaaatattcccgggaaaagtaaaagtaacaaacacatataagaagaaaaaaacactgataatgatcttgaaatctttcatggtatgaatagtcaaggattattcgtattacagtttattataatgtttaattacttgaatccttgtctcttttctttgtccttgaaaccttgcttcaaagataagccaccacaactcttttaacactttactcatgtgcctctgttcgaataacggaaagatatgttttcttttacagaaaaattataaaagaacaattttacacttaaacaaacacataccaccacgtttcttgcgggagaagcaaccgacatatggataccgagaaaggttatcccagaggtttcagagcagagagtctacgaccagaaacgggccccagaagctttcggtttgatagtatgcagatcgatgaagcagccgatctacaaaaagacgagatacgacaagagaactcgacctatcttgtcctcttcaagaacatagacagtggagagttgaagccactaaagacctcttggaccgaaaccctgaagctttaaccgcaatc

SEQ ID NO: 46523 - DNA, 539 bp, Arabidopsis thaliana landsberg
cctaaaaatgttttgcctcataaatcgacgacaaattctcacctagttattgtaacaccatatgtatgtcccagctgttaacgaaattgcaacatcactaaaacatcaatatttaccataatctagggtaagtaggtactaaaaatagatgaaacgtaagggccctatgttaataaattaggattttttttgaggatcaatcaaatctatcgacctcaagaaaagatcgaaacatcaagaggtttttgaaagcgatagtgatagaagctgcttaaattcaaaaattagaaagaaaaaaaaacaatcccacttggaagagaaagggatatgtgtatcagagtccttctcatagtgaagtcattacacaaccacagtggaaatcgagttattgggaccacattttacctaaataattcattgtttcattatataacataaagttttggaggatcgtggggcaaagcatgatttgtcttgttgcttataaacaacagtgtcccaatagtagaatggttgttttataggcacgtcagtgttta

SEQ ID NO: 46524 - DNA, 507 bp, Arabidopsis thaliana landsberg
tatgatttatctgtgttagatatttaatttctatttatttaagtcaaactaaaatatcgttttatttatttgagattatttttctatatatatgataaattatttccttctctttatttgacgtaaaaaaaaaaaaaactagttacattttactataactgatttatcttatataaaaaaaagatttaatatatcatataatttttttctataagatcattgttaagcataagaccaacaaaaaacttttgttgtgttacttattttgataaatttatcatgcttatttagattctttagtttataaaatatttcaatgttatttatatgtgtaacctatatttttttctctcgactctaaattatgtagtattttcttgtctattaaaatgcataactcaattttttatttggtttaaattatacatgttataataaaaacataacttagctaaacgatgatggaacacaaattttaaaatatatatgtaatacaaattcgggcat

SEQ ID NO: 46525 - DNA, 587 bp, Arabidopsis thaliana landsberg
acttactttaccctccaacgtgttttctgaaatttgaagtattttttatatgttacgcatggaattttcaggattctgtgacctccaacggttatagtttcttgcgaattgatggtacaacaaaagcccctgacagattgaagactgttgaagtgggtttttctcttccccaacacattacatttcattttttctgagttcgttattttttctagtcttcatgctaaattgctaacagttctataaaacaataatattctgtaggaatttcaagaaggtcatgtggctcctatatttctcttgacttctcaagttggtggtctcggccttactctgactaaggcagaccgtgtgattgtggtggaccctgcctggaatccaaggtacttacttccgtttactatactttcaaaagcccaagtctagactttttgttaatatattgttattcactcgtctgtcaaaattctacatctctagcttgttgaagatcaagttaccaaattgaagcagcacaatcttacttcttggtttaatttatatgcttattggcggatctctaacatgatcttaattgaatatgatgc

SEQ ID NO: 46526 - DNA, 102 bp, Arabidopsis thaliana landsberg
ttctgtctctcataatagaccataattgaggtttcaactactggacttgcgtattccaatgtcactacagggctagtgactggaaatactatgagctacaaa

SEQ ID NO: 46527 - DNA, 512 bp, Arabidopsis thaliana landsberg
  unsure (1)..(512): unsure at all n locations
atgtgctacctttacaaggaacattgggtatttggtactttagctctttcttgcagaaacatgatttttttttcttgtacggtaaatttaggttttgatggttgatttcttnnnnnnnnnnnnnnnnnctagccaggtaaaactaagttatgcaacttcaatagatggtgacgacatctaatttagtcgataattaacccattaatcgtgttctattcagattccattgctgagacaccttgagacaaccgggtgttacttcttggctcaaagcttcaaaactcacgaatacaatacctgcaaaaacggaagatactacagagaatttgcttacttgatttctttcttaccctacttctggcgtgccatgcaagtaagctcacttagggtttctctggtttttttttttttttgtcaagtcccttaaaacctttcttctaagacactatgaacattaatttacagtgtgtaaggagatggtgggacgaatcaaaccctgatcacctaatcaa

SEQ ID NO: 46528 - DNA, 567 bp, Arabidopsis thaliana landsberg
  unsure (1)..(567): unsure at all n locations
tttaggtttaatagtgggacactgaatatgaaagtttagagccaaaatttcaaaatattaataatatttctttttcacagacagaaaagctggtggcgagggccataattttaggactatcaaattctatattttcaagcatttgttagattgtttttttcttctcataacatgttaacttgttagttgttaccataattttttatattttaaatttttgggtttgtcttaacgtcaagatattaagtaaataatttacaaaaaaaataaaatttacgtatattttagtataagttttgatctctttctggttatcaaaaacgtatgatcccagcttttattaagcatttaattgtttgtttccaaaaataataatagtatgaaaataaattgggaaatggtggtggccgagtgtacaacacattaacgataaggtggaacgttacacaacccaaaaatcagggtttatatattcattaattcgcttacaagtattattaggttgaaaagtgtttntaactaacacttttaatttgaaatattcataatgtactaaactaaaaaaat

SEQ ID NO: 46529 - DNA, 625 bp, Arabidopsis thaliana landsberg
ggcttttcaaaacatgctctgaagacagacataatgaacgtactcgagggctgcagtctgacatcagatgatctcaaattcaactatccgcgtggcggaaacttaactcctgcggcagtgtaagtcttaagctttattaattctctggattattactttggaagagaggaattcgaatccaaactaatgaatttctatcctttttcattctcgacaatgttggtatatatcagctttgtgcagttcccatccctttccgcatatgataaagccttgcggaatatcgcaaagaaaggaaagctatatagattagaaaaggtaatccttttacattctatagagtccatatttatttccgttttacaaacaaagaaagtattcgtatgctagatggctatttaatctggagttgattccttgtcgatgattaggctgctcgtgctcagtgggatcccattgttccttatgaggggaaagtggtaagctatgtattctgtcataacttatagtattatcgaggtttgttctcacttctcagacaactggtctgacataaattgtaatttgtaccaactaatatttgatgaaattatattgtttaggttgcactacaggggattccggt

SEQ ID NO: 46530 - DNA, 500 bp, Arabidopsis thaliana landsberg
aatatatttcttgatctatttagtgtatcaataatttcttaaatatcaaaaaaaaaaaaaaaatttcctttctatcgatttttatatgcttgcttctgttattggttcataactatgagtccaatcattttcatagtcgcatataattgtaaaagtattgaacgaacggatcagtttatcccacaattattgagatgctaagattaatttttgtattaacataaagaaaaaatatgaatcaaattcatatatcttgagattttgacaacgaggatgtcacacattgacattattagaaaaaaaaaaataaaaaaccaccttgtctacttgataaaactttttggaataaaaacagcgaggtacaagaaagaaaggcatcaaatgctttattattgggattggcactatttactaaattccacgatttgccaaccatctcttttatatataaacctattttcttatttttttctactaattgggagagtaaaaaaaaaaaa

SEQ ID NO: 46531 - DNA, 548 bp, Arabidopsis thaliana landsberg
gtacatggcctgtgatcatgctaatagggcatttgggcgggtatgatcttcggaggaaccatggttcaaacattgatattgatttttattactatgagatgcgattgggagaaagaggtaactcaattttttttgtttgttgcttttggtttgcgtatatatgtggtttattttaagtgttttttttttagtacaattgtttcatgttcttttttttaaaacatttgtaggcacaaaacgctaaggttcgtgttaacaaatggtctgtatcagacgcaagaaagtgaaggttgaagaataagaattaaaaaattgtatttaaactataaaatatgcatacataataaattttgatcgtttttaactaataaaacatatggtgtatcattttaatctcacatgaattcaatcttggtgtgtatagactatacagtatagtagtttgttttgtaaaccgaaatcagaacactggctgccggccggtttacttaatttatgaatgacatatataataaggaagtacgcacacttctagcatccgacttaga

SEQ ID NO: 46532 - DNA, 559 bp, Arabidopsis thaliana landsberg
tatgattggtaactttctgctgtatctcactgatttactctctctttgcatgtctttgtgcttccaatcgaacagtggctcatttacaaagattgctatttgtcttttggctactcagtaatttaaaatgctcatcttttggtttacctgcacttgggagtgttgaattttctgttgtttttgcattgggaaggatataaattatgtataggaagtgactctttttcatctcttggctcatttatgttttctctaggcttcttacgcctcctggaacacctcttggaaacgactctcattcatctttggcagctccaaagattgcatcttccgctagagccagttctgcttcaaaggcttcaagggtactaactgcttttcttctttaagttttccctctttttttccaacatctggttcttgatgacaatcaagaacttcataagttgctgtttttgtttccataacttcctaatgcatataacttcattaccttattcatatacgaatgctgtttttttgtttcctttgcagctttcagtttcgcagtcagagagcg

SEQ ID NO: 46533 - DNA, 422 bp, Arabidopsis thaliana landsberg
aaattacctggatcatgcagttaccatgacagaatttcttgcagtagacccttatgcgtccgatgcgccttattccaataaagaagatgatatccggctgattcataacattggcgcaaagtttattggcagggccatttaccggtggggaggagaatcggtgctcaacaaccgggactacctggataatgcgcgccgcctggtagaggaagtgcataaaacggacccggagatcatcttccaggcagccctgtttgagcagatcagcgaacaggtaaacaccattcccattcccgcctgggctttcaaggcgcttgggctcccggcggagaacaggcatttccgttatgacgacatgcttaacctcaaaggaaagctcgtggatcactggagcaaaggcaacagcgttccggatattaccc

SEQ ID NO: 46534 - DNA, 551 bp, Arabidopsis thaliana landsberg
tttcctctccagcagccaccggccccaggcagccgccgccccctagcccaccaatggtcgctcctcccctgccgccgcagccgctaccagccccttccctctcccctccctcacctccagccgccgccccaccagggccgcgcctccccatgtcgccggccccttccaccaccaccggtcgccccttccctctgccctccccctccagcgcctagccctccccctgccgtcgacagtcgccgctggcagtaggcctccagccggctggttcgtccatgcccgctgtcgtctccccatgtcgagctgatggatccgccgagcctcgacgccgctgcgggcgcgaccacgggcgtggttgccacctagggcgccgcaccatgatgtcggcatgtgtgctgggcacctgctcgctccccacgtcgaccctactgccacgcgtaaggctgcccttgctgccagcatgcgcgaccctcctccttcctcaacaacacggttggcctgctctccggcgctacgtacgggcacgcgacatcctcgtggatggggtccct

SEQ ID NO: 46535 - DNA, 407 bp, Arabidopsis thaliana landsberg
atgcatggaaacattggtgaaagacacttaacacttgggacgaccaatgttgtttgatatgaagtgaaattaacgcgtctgcctaattgttatggttcatattatgtcacatggaccaacttcttgttcttcttcattcaagaaccaactcacgtacacgttttttcattttcttccctcaaatatctagctgtatattatattgcaaaatccagatttgaatatgatcgatgcaaaagattgtttatagagttgagtggtagactaaagaaccagattactcttacctattcagattatttgtgttatattttgtaactaacttaagtcactcagtaacgaattttaagctaaaagcatctatttattctattacaaaatgcagcccgtattttttagaaatgtga

SEQ ID NO: 46536 - DNA, 459 bp, Arabidopsis thaliana landsberg
ctggatgccaaaacgacgacgaacagcattcaaatccaaagcgttttgatttgctagtccgtcaattccatcgtccaaaagtggcgagaggagtcttggtcggtcacgagggggttctgacagacgtcctgttggcagatccataatgtctgatgactggctagctgggcgcgatgaagctgctgtgtggtgacctagaaagtgagaagaattcgagaacgcagcagtaacaggatcaaggactgcaggatttgcaagatgaacctggtgattgagcatcgaagcactggttttgagatctgcccaatcagtctcttcttggctgcgggcttcagtggcggccgtagctgaagcttgcgacgggcttggtggttggatgttaaatcgtacttgcatttgagcgtgtccactgagtctatcgccttccaaaacggtttctccttgtctccgggactcctc

SEQ ID NO: 46537 - DNA, 675 bp, Arabidopsis thaliana landsberg
tgccacggctggcaccgggttcaacggcatttgaggcgcgggaaaatcgagggcttcgactcgctccggcacgagttcagcgagtcgcggctggcaataacggccctggcaacggcccataccggcacgggtcacgcgcttgaggctggcgagatcgcggacgccgggccgggcaagcgcagcgcgaatatccttgagcgcaacgcactcgcaacggcagacgagtgtgtcatcgtcggcgcgcgcgaggcccggatcttcggcccggaagagggtccaaagcgcgctctgaaagtgccaatgccgggcgagatcatcacgcatttcgggcaccacatgaccaagacgacgggcagctgatgcgcccgcatgccggccttgcacttcggcaatcggtgcgccgccaaagccgccggcctcgccaaccacgaaaacatccggccgatcggtcccgccatcctcgccccggatcgcttcgagccgcgtccagccgtcagccttcacgcgatgagcgacgccgagaagacgcgacaattcattggcgggcgagaagccttcgttgagtgcaatgatatcggcggcgatgacctcttctgcgcccgtagctgagcggagagtgacggtctcagcccgcgccgcaccgtcaacacggacaatgcgcgtgccccagcgaac

SEQ ID NO: 46538 - DNA, 954 bp, Arabidopsis thaliana landsberg
gggggtcttgggatctctggtctcttacacccatcctgagaggaacagagagaaagagagatagtttgccttttttctctggtttcttagagcgatcaagagagtactagactgagagggtgttgcagggggaatgttgtgggtgttcttatagcgtagaagaagaaggctttgcaagagaggacaagagggagcaatgtcgttcatgtcatgtcataattttttttaaaaacaattagtataaagatgataatagaaaatgattaattttgtttgactcgaaaacttggtaagatgccatatttgtcctttctctctccctagcagcactgagctatctttcctaaaacctctcccacttaagcagggactttgtctcttccttaaaataattcgttatttccatgttttaccattttttaaccgatcatgcatgacatttatacacaacatgcatgttatgacttattacatttattattttgtttatagtaatttataattatgaactttactttaaatttataactatgtgtataaagtttcttaaattgtattaaatgttttggttaatgtttccaaaaatatatcaaagtgtttaaattctattggaaaatccagcttctaatgaaccaatctaaaaataaattactcaaaaataatctagtgctgtggaatctagtgttatttcaacctaaatatataatttggaggctggattttttttttattaaccagaaaatagacaaataaataaaacaggtaaattactgataaaataaatacgtacacgtttctcatgtatatcagttggaactatagtaaaagggtgacttgctaaagtccgtaattgtgagtcagcacatcgtcgttatttttggtattattagagagtagagactattacctttttttgtttgtcacactactttgaaattaatacttgcttcgtat

SEQ ID NO: 46539 - DNA, 707 bp, Arabidopsis thaliana landsberg
aataacaatatgggtcatcatcggtcgataacacatagacaacattattattaggttggaaaatttaattaattcacacacatatacatatacatattatacagttctatgacaaaaaaaaagtgataaatgttgaatatatttgtcaaactaatttggtaattcaccgaattcaatctattgattattgctatcacttctcatattcaattttttgtgcgcgaggaattcgaatctttaattagtacgtttccccgtccatagtttcaatagattacaactctaaatgattatataaaacaaacaaaacattatcatatagaacaaagattatttgtgataacctaaaatatttatcttatctttaattatttgtttctagtattattaatgactgatactgctttatttatttcaaccaaacaactttgactatagtctacaataatacacgatcaacgttataaaagtttggattcgttttaattaaaaaccaccattgaatattccaaaagaaactgaaacctccatcttaaacagaggcttaccccaaataaattccatcccacgtcatcatcagagaaagtgtctaggggagaagaaccactgtgattgtggaaagagagagagaagtgtaaagtaatcaaatagagagatttcaattgtgttcagaccttccagaataagcagcaacttgcctcttacac

SEQ ID NO: 46540 - DNA, 899 bp, Arabidopsis thaliana landsberg
tgaatggttattatgcccagacaaattaagcaaatgggcagtacggcaatcaaaatttatctattatgatcttcaattaaactttgatctttgtgtaaatatattatgttacggaaaaaatcattcctctcaatctctcataaatcaaattaatattttgttaggtctattttcacatcaaaaatgtggtataatacctaaaataaataagaaacatgaatattcactagggaagttcatttggtctaatggttaacgatcaaattatgcggcgtttcctcttgaagttcgacaacaataaattttgttacccgcacagtaaagattatgctatgagttttaaaaaaaaatgattatgctatgagtttagtcttgtcacaaatgatataagaacaaaaatctattcataactaattattttaaaattagaaacttatgatttcacaaatatcaccccaaaaaaatggaagttgaaaaatcctctcctaaaaccaccaaaatggcagtccaatatatgaacgtgaatcgcatgatcttaggtaaatatatcaatgtatttcgtagttactttaaaataggtatatttgtttctttatggggaaccattggctaatattgaagaaggattggaaacaaattagtaaatttttattggtgtgagtggtcccttgttatcatgtcaatacaccaataatcacttttaagttacaaagacatttcacccaacccttttggcgggtcctatgcttatcaatgacttaaatatatggggctttaaattatttcatttttactcaaaattaaccaaaagtcttttttatctttaaagatccaaatcatgtggccgataaatgaatgcaataaaatttcctatttgatttgtttcgcatatgttggtt

SEQ ID NO: 46541 - DNA, 606 bp, Arabidopsis thaliana landsberg
cataacaaaacaaattataattcgtgatttttttaaataaaacgagtggtcaaagttttttttaaaagtcaacagtgtcatatatttaagaacgaaggtagtactaattaagcctcaagtcccaatatgcttccatgttggcgaagtacgtacgaacgctacaagtttattctgcctgcgacttatgaggcacgatcaacaaaatgcagcatgcatcgacgactataattacatgcgtgacgggtaatcaagcggtacgccggtacccccatccgatctagccacgtggtacgccggtaccccatctgatctagccacgcccgctaaattgagtagaggtggcggtaatggatcacgatccaaatatttctttatgattcgaacgtgaccttaattaattttattttaaaaataaatagaaatatagtctgattctagtatgatctcatcgagagtttatagtgaaatttagagcctattggacaatactccgtgggagttttataaaaaaattcatttgcatggcatgttatttaatgaagacaatatgagaaagttttcgtctgggagatgagagactctgttttctaaccaataatatttcat

SEQ ID NO: 46542 - DNA, 647 bp, Arabidopsis thaliana landsberg
caaatccaaactcgatcttacaaatgattcaagttaattactattatacggatctgaccaaatttgaattcaaccattcttttatgctgaagtacgatatggatttaaagctcttagacctaccatgcatttctgtgtatccataaattgtagacatttaaagtcattcttatcaacatttccaaaaaatatttgtaaaagatctcaagaaacaaatgtagatctctgaagaaaattcatttccaaaaaacatgatactaaattacaacaacagttgatgaggatgtttttggcgctggggggtcataatcaaaaatcaaatcataggactttatgtcaaataaacataataatcgctaaaaatgaaatatatagtaacaaaaagttatagttttggaaataatatatttagtcaagaggatatttttgggaataatgtgaacaagagagaaagaaatatttttttttaaaaacattaatttcaaccgcgaggcacagtatcgcatatggtaactagaaaccgacaaataaaatcctgtgcatatgggtcccacatatattatacgacgccgtttcaaaatcacaccatacgaaatacgacgtcgtttggaaaccacaccatatgaatacgactcgtgaaaagtgca

SEQ ID NO: 46543 - DNA, 598 bp, Arabidopsis thaliana landsberg
tgtttctctccttccacacaattatatagaaaccactggacatgtatgaatggatccatcataacacaacatatatatgtgtatctggtacacaaataaagatgtattcaaaacacgtacggaaattataaggtaaatttggatggtaaaacgcaaacgttttcacttattcgggaaattgaagaggtacttaaacaattggaatcgtagaacctaaatggtgattagatcaaggaataaagaggtgatctggccttctactatccctccataggttaatccatcgccatgcttgtagttggtatcgatagcccgtccaacgttaaaagctatacgcacaagtttcaaaggtactgtcgtcttaaaatactcttcattcactagcttagaagtatgtttaatccttctatgaaactctagaaacgcttcttcttcggtaactttatattgtttcatatagcagttgattcctgtcgcaatctctcctctagccatttcatcctaattatcatttcataccagatttgtaagttatataaaagaaaaaataggtatatgtgattcgtgtgtattccaaattgtaccttgtagggggcat

SEQ ID NO: 46544 - DNA, 630 bp, Arabidopsis thaliana landsberg
cctttattttaatcatgaaccttcatgttttgtacaccatgggatcagtatttgtgaggttcagacttagaacaacatcttcccctccactgtgcttctctctctcctcccggggggttttacagtcatatgatcgtcggagactctgcgattcttcacggaatcgtatttctctctcagcgatttttttcgattctcgaagctgcaaggaccacccatcaaacattgaaactcaagcgggagaaattttctggctcgggagggaaactatggagccctaatgcccattttctgctgtactatgaggttttttaaagaggtcctttatactctcccctgtttttgggtgcttcgctcgctcactgatttttgattcgtcggaaaatctattttcgagctcggatctatgttattccttattctccttctgattgcgattgatgtgttcattaagggttgttgggatatcgattaacggcccctatcgaaaaaaataagggtagttattattttcatttcgcttcatgtccaaagcaagtatctatctcttcttcttgcttgtgtagttttagattttaatcccatgggatcaacgggttgattacttttttcaggaacatcatttttctt

SEQ ID NO: 46545 - DNA, 882 bp, Arabidopsis thaliana landsberg
attctttctctttaatgaagacatcattcccaggaaaccaaattatgagctcttggattttgactccggtaagtctcctcataggcgggtcctcaacaaacccagttatctcggtgtcatataaaactctgcgacctatctcacggaatgtatgctcaatcttgcttctcatcctcatccacacaaacccttttgttttgttgtacccaacttccgtcatatccttcaatggcaacaatcccgtgggtagtttgatgagagcaagaagctccttaactttatcaagacaaagagattgatcactgtagctctctatgtcatcactctcatctattatcatctctcataacgccataataaatcactttgttttattgtcgaatgcgacttttggttactttgctatatagtaaagtttctatgggtctaatcatgtgtttgggtacgtaaaatggaacacgaaaggtgtgtgtgagcattttcaggcctcatatttggctgcatcataactctgtgactaatttacagaggcagaatcaagctattacataatttaagaacgaacttgttaaatgattcgaggtcttgactcttgcttgtcagattcacttaaatgggaaataaatcaataatggattgcagtttcagagaatctcatttcttctaagcacttgtacattttggcaaagatcatatagtccatgagctcatccatcatggcccaatttaacccagattattcagttaatgggctttattttttttaaggttttggagtcaatttatttctgatgggtttatcaataacgtctctttttttttttttttccattaatgtagtagtttatcaataacgttatgatgaagttgttgttttgattt

SEQ ID NO: 46546 - DNA, 691 bp, Arabidopsis thaliana landsberg
aattgggttaaaacattgtttattcaatcattggcaaatacgtgcaaacaatatttgcacagtctagaatatgcatgttgtagtggattggtgatttatattaaaactctattatctcacagactcaaagttagatagatattcattataatttcgatgatagatattcagagtagtctatatatataactaaattttctgtttcgttaaaaaaaaaaaaaaatccgatactaaaacgaaaaccccatcactaaatacagagttgtagttgagttttttcttatatgtgaaaccaggtattcaaaatcaattataaaaaaccgcaatttataattgtaataaataaatatattcgtattagtaaggaatagaatgataaaaaaccttaaataccgaattatatcgagttcagcttacatataaaagaagtgtagaggtgtgaataatatgaacaaaaccttaaagatcttttacttgtgaagtagttaattagttcttcttaaagagtcttttaccaacatacaagactctcctaatcatcatccttatcttggatacccatcaaatttctttaaataatgcaatatttatgattcatctaatgaaatgttgtttatattttgggaggtccaaatacttggtggtaaagtgtatcagttgcttttgaccttttgaccgaggaggccccgtg

SEQ ID NO: 46547 - DNA, 685 bp, Arabidopsis thaliana landsberg
aggatttcgcctatgataagggaggctacgcgaaggatgttgcctatgataaggcaggcaatgcaaaggatatggtatatgagaaggcgggaaatgcgaaggacatggcctacgagaaggcggaacacataaaggatttcacatatgataaagtgggatctgcttacggaagtgcacagagtatgatggactctggttatgataaggccggtgatgccaaggacatggcctatgagaaggcaggcatagtaaaagacatggcatatgataaagcgggggatgcaaaggacgtggcttatgagaaggctggcattgccaaggatatggcctatgataaggcgggcaatgccaaggacatggcctatgataaggtgggatctgcttatggcagtgcgcagaaggcaaaggattctggttatgagaaagctggtgaggccaaagactacgcctacaagaaggctggcaatgcaaaagacatagcttacgaaaaggcccaagatgcaaaagactttgcatatgacaaggcgggttacggatacgacaaggccggtgatgtgattaggatggcaacggataagagcggtgaagcctatgaaggagccaaagaaaagtcaaagagtgccaaagacacggcaggagaagcaatggatgattctattgactacatgaaagacaaatcacacaa

SEQ ID NO: 46548 - DNA, 976 bp, Arabidopsis thaliana landsberg
gacttctctaaaaatgttctctcatgtcaaaacaaaataagaaagaaagatggtcaaaccatgcatttcacacactaagtatttgggtaaacattcatgcaccatttgaatttcaactctagtggggatcttcatcatatctctcccataaccccttccatacgaattctccagacgcctatctatctatctattattatttaattcgatctctatgactaaaaataatcacacatcaatatgtgagtttctctaataatctctagtatcaaaatcgtaaatcacgtgtaattaatttccttgaaatgtaaaacaaacctaccaattctctaaaaagtaaaaaccattggccgacaaaaaaaaaattctctatataccatcggatatgcaaggagcccgtaagtgtttgggcctaaaagcccaattataaatgggccttatggaataatcatagatgtttttttaaaaatcgtatttggatttaatcatcatctccgacgaggatctccggtatcggtgatgatgggatcgatgttgttcaggaagagaactttggtcacgagagcgaattttttacttttccggtcgttttccgttaacgttgagaaactttccgacgcatcagctgaaatagcgggaattctcaagcaagagaactggcgtgacactctggtatcttcgaatctttcaatcgagataaatccagaagtagttctctccgttttacgatccaaacgcgtcgatgatccctctaagcttttgagtttcttcaactgggtcgattctcaaaaagtcacagagcagaaattggattcggtttcgtttctcgctttggatttgtgtaatttcggtagttttgagaaagctcttaatgttgtagaacggatgattgagagaaattggcctgtagctgacgtttggagttcgattgtgagatgttcacaagagtttgtgggaaagagtgatgatggagttc

SEQ ID NO: 46549 - DNA, 564 bp, Arabidopsis thaliana landsberg
tgtacccctccactataaatagaggaacaatgtcatgcaatggacggtggatgttgatcgatagagctcaggagcactggttcgttctacctccaaatataccttcaaattcccatttgagaagtcgaaggtatatttgtgaatacatgtttttattgtgaggatgaaacagatctcattagggggagtaagaaaatgaataaagatttccatctgatttgtcttgagtcgtgctaattgtaatgatgtttcttgcaatcattttctcctcttcgtgtcaattgttgagtgaaggttgaacaaagaggagaagcttcaaatcttctcacttgtgttgccttgtgttccggtatccaatcaggagctaaagtcaagtgaccaacaccagcagttggctgtaattagatatgtcaatggggacctgatactcgttaacccatggggaattcatgtattaggattagggtatagggagaattttaatccctatgggtacagatttgggaggaattcttccccattaggtatgacgggtatttgtatggtgagcggaatttgacctga

SEQ ID NO: 46550 - DNA, 494 bp, Arabidopsis thaliana landsberg
tgctcgcacccgccggattgatcctcgcccttcggcagcacgcgattttgtttggctacagcccgaccgtgcaggtcgaccggaacgcgcgccaacctcgtcaccagcctgctgcagggcgaacgtctggttccgccaccgccgctgccgccggcggtgttcatcaccagggaagtcgaacgcgaagccccgcacctgcacctaggcagtgccaatcgcaactgggcattgttgaacccgcgattccgccagcggctgctggccgtattcaagatcatgcgggatcgctacggctaccggatggcactgatcgagggctaccgcagccccgggcgccaggcgcaattggccgccgagggcaccgacgtcacgcgtgccggcgccgggcaaagctatcaccagtacgggctggccgcggactgcgcgttctatcgcaacggccagctggtggtatctgccaagcacgcatgggcgcaacgtggctatactctgta

SEQ ID NO: 46551 - DNA, 616 bp, Arabidopsis thaliana landsberg
gaaagtatttttttttcgtataagccgactatatacatttgtgtttttcatttacttatcgcaaataagaaacgcgcactggtcaactatttgtaaattcaaattcaccaaaattatttatgttatatgttcaacctacgaaactcatagacacagaataaaacataagtgaaaagactgaattaaacacttacttataagtgaaaagactgaattaaaataacaaagaattatcaatagtatttttaataaaattaaacattttaaaaaataaacttatttgaggacgtaacctaaaaatctctatatagttgtttttgacgaatatgagttttattataagactaatttttccaagagataaatttataaaaaatattaaatacgtaatattttttaactccaataaaatattgtaatttcaaaccaaatatttattaattaaaatgtgtaatgagatacttacatatcatctagacaagttgagattttctttatagggttttgtgaaaatttgatgatttttaacaagaagaaatccataggaactaataataaaaaatacaatgcaatgatatttaaaaaaacaacaactgcattgcagtgaatttcatca

SEQ ID NO: 46552 - DNA, 743 bp, Arabidopsis thaliana landsberg
catcgtgatcatcatcatctccactttcgttaccttgtttaatctcaggtctattctccatagcttccattcgcttaaaatgaacccaagacgatataaacctcgccaccggacagatctagctctctgtatctcggtacggtaccttttccggagcttctccatcttgtgacggcactgaaccgcggttttcttcagaatcacgtcggggcagttagcaccaaccgcttctgcaacttcctcccagtgattcgcctttagatttccacggttcagagcgtaccatttgtctctgtacgcgtcaattagcgcgatcgtctcttccagagaccagcacggcggaggtaaccgcctagagttcttggacgcggtggggatggaggcgctcttcagatctgtgttggaagctggttcggttgaggcatcgtcttgagcggaggaagatactggtggcgggaggagagctaacggtgatggatccggaattggatcgtggttcatcggagaatccggatcggacatggatcaaaaaattgaagaagaaagaaaaaaagacagatcttgtgaaggaagagaaaatgctgtaatgcgatggcttttcgcggcggcgattgcacgtaatatcgagaagataagggagagagagagtggaggagaggcgtatgataatggtgggtggcggaggataaggctcgatacaagcccctattatcacagatggctataagccccttctccggtgc

SEQ ID NO: 46553 - DNA, 736 bp, Arabidopsis thaliana landsberg
aggcatggtgaagttgggtgacttgcaatctgggagacctggtgagattaggtttaacttcagagctgtattagaaggcctattgatgtattgcttgtatcttgaattatcattagtaaagagaagaaatcttaattatgacttctaaatagatgcaaatctttttagcttggttctccaaaattgattttgatttatgaatactggtcactgctaaagctacaatctggtcacaccagtctataaaatagtaaacattatctaatcagtgaagttgttgtcccaataaacaaattctggactggacaagtagcaacattctaattctgaggtacacacaaagaaacttaaatgtaaatattccttgtttcaaggtttcagaatttgcacatatacaaaatctcgaaataattaaggcacattaaaaaccgccggttcacccggttatagagtaatctgaccgtccactttatccggtttacttttaaaccgattttgtggtcttagctcataaatgtcaagagtcctttcttttcttccccattgttgaaaatcaggtttacagattcagtgagagatcagatcgctaaaggtttgtgcaattagggttctcagattctctcttttgtttaactttggattcaaatcgctaatggtttttgatttcgttgtgtacaagaaaatggatcggcaaggacagaaactggtggagcagctgatgcaaatcttactggtg

SEQ ID NO: 46554 - DNA, 459 bp, Arabidopsis thaliana landsberg
ctagaaaactttttggcagcatcagggacatccaaagacagatcttcaagtgattcatcaactcttttaaaccctttagtcatctgatatatcgtcactagtcctgaatcaaaacacacttttagtagcttccataaccgttcctcgctctccttctcttctatgatcctcactactgacttcttcactacttcgtggtgaaaaaacggcattcctagttcctttacgcacctactagcttctctgaggtctccaccagagacatactcttctagaagaatctggatcttctctttcacttccttcactgtggatcccggcgagtttgtctcaattcctcctcctccccagcaacgtaagatcctttcaccggaaagacgtgctttcagcaatgttttcgccatttgaatcactttctcgcccacacttgagcctgcctcgggagtctgatttaacact

SEQ ID NO: 46555 - DNA, 558 bp, Arabidopsis thaliana landsberg
gcttgcacgcacctggaaattcggtcctcaataaaaagctgaaaaacatggacgcacgctcagcacgtgacgaccatcgcaggaagggtccatccctaaactgcatgcataccgaataaacccttaagcaatcctcatgtattactcaggggttcggtgaatacatctagcagatgcgtgtgcgcacccagaactaaaaatctcaaacaaaaacattcgtgcaactccaaggagttacgtgaaagcttgagactgttgtcgggtacccaagaactgggtgctcaatataggcccaagcctcttaacgacccatttgctgaccaagcctcttccgagcaaccccgcgaggtggagcgtacaaccaagtctctactgagcaaccctgcgaggcagagcgtacgaacaagccttgggtgagcaacctgcgaggaggagcagacgaccaactctctaccgagcaaccctacgaggcggcgtgtcgaccaagtcctaccgagcaactcagcgaggcagaggcttcgatctagtactattgatcccgtcagccatgaaaagacc

SEQ ID NO: 46556 - DNA, 441 bp, Arabidopsis thaliana landsberg
tagatgaatactttatccgaagctttttgtgaatttcgcatctgatttctatgaaatcgatcttctggaatgaggtaaaaaaacatctcaatcagatcatgtggtttgctaattctgtcgagagtttctcttttccattgctcgaaatcgataagattgaatggtagaatataacatatttgtgtgtttttcgattgaatagtctaacaaggattcttgatttggttttaggatgatggattcatgaaagttttctaggtaagagatttcaatctctttgcgaattttaaggagattcaggtaaaagagattgatttgaaatgttgttgcattattccatgttctattgactccaaatcgtaagtcaattgcctattgagttgttaagggatacattgtagaagaaactaggacacctatgactggcttgacatttgtggt

SEQ ID NO: 46557 - DNA, 864 bp, Arabidopsis thaliana landsberg
  unsure (1)..(864): unsure at all n locations
ataaatcgatatatatgcacatctagacatttctttagaaattcgacaaaagaaaccgaagaggacatattttgaaaattcagttgcgtgatgttgcttcctcgttaaacattggttcgtgagttatggagtattataaaggaatttgtcaaaaaaatggacacagtattgaattctttcatttgtttcacaaatcccatgagtaaaaaagaggagtctttgaaaagataaaaaagaaagaacatgagagaatcatgccaaaggagaaaaataagcactatttcttgtgatcatgtcaagtgtgtttaagtttgaactttgaacaataaaaagatgatttagttttgaaactaaattaatctataatgaagtttttggattgactatttctgtttggtttagatgggatcaatttgttttcggactaaattcactactaaaaataaaaaatataggagcctaatttattccaaattttagataaatccgaaaactgaatatactctcttagtcagagatggaatgccaaaatttgtgggggcaacaatatagaatctttttctttcactctatagcaaacttacaaaaataattatttgttttggatatttcggcaaatatctatttttgtttctttttctgcctcttgttttcttccaccatcttaactctgataagcaatcaaactcaaatagatgcgtcattaaataatntggttataaactattgatcaaaattatatcttttaacaacaacanaataacatattgatcaaaatcgatattatttcgttatatgttactattggttaacaaaaaaaaaatgttattatcaaattctatagcattacataatcaatttgac

SEQ ID NO: 46558 - DNA, 456 bp, Arabidopsis thaliana landsberg
ataaaaatcataagaattttactgaagttactgaactttatgattgtaatgatcaacagtatcgtcttttcacaaaaaaatatatgaagaagatgatacacaacacatttcattacaccatctgatccatctccatcttcaagtataaactcattcttatttagtttacaactattttttgtcttttgggaatcttataaattatttcggggtaattaacgtcaataaaataacttacacctaccgatataagactaaggtgaaaaagtatacgtttagaaaagtgaaaaactttaacaaaagaaaaaattaaatcagaatcactaacccggtaaaaatgtaaaaccgtttcccggacccaaataaggacctggataacaacccagacccgaaattaagttggatccggatctccttgatttattttttaacaattttgcctttccccctggaaat

SEQ ID NO: 46559 - DNA, 579 bp, Arabidopsis thaliana landsberg
tgatcgccgtgaaatggtaccattgcgtcttggccacgtcaagtgcattcaacacttgtaattgttcccttgccattcttcttctcctctgcaattttcatcacacaaaaaaaagttcgacatataagtacccttaaataactcattacaaacaataaagtagttagttataccgaacttgaaataagttaggcagtttcaaaagcaaatagaattagaccctgctttatatagtgtcaattaacattaaaatatcataaaagttctatttaatttttctcatttcattgatctcacaattacaacccaataaagtatgttcaccgaacttgaatttaggcaatattagaaaaataacatgtgtatgttttttagatgaaatagttgttaacgacaacttttcatgttcctgtacatatgtatgatgattacttattgcaagagaaaccatatatatgcatattcaaatattaggaactgaaatgaagtgataataaaagtcgactccaatattaattagtccacacttcgtaattttgaaatatttattatatacgttcttcttattaatttgtaaag

SEQ ID NO: 46560 - DNA, 528 bp, Arabidopsis thaliana landsberg
attagcacaagaaactaaacaaatttttttaaaaaaaccaaaaaattaattgaaataaggagtatataatattaaagtaaaattagcattggaaaaattaaatttagataataataaatataccattaatattagaatattaatgatacttataatataagatataaaatttacattaattatgaatgcgagtagtagatattcatatagagaaagttgaccaactttagtaaatatgtcatatatatgattattttttggctctttgattaatgaattaaatatttttaaaaacaaaaatataaaaacaattttgggactgcagataataagtttaaatacaataaattttgtaactaaaatgttatagtcatttactaattctatttaattatattatatactcatttacttaataatcatctcatgcacatggtgcagatagatgacatagtttcgttcgtagatgactagagtactaaagtgataagtatacatgaatgctatcaaacatgtatatttcatttc

SEQ ID NO: 46561 - DNA, 529 bp, Arabidopsis thaliana landsberg
gcattctattacttatcggaagccatcagaaagaaaaggtaggtttctaatgaattttcgcagcattgagtatgttgtaactaaacagaattaactgatcttagtttttaaacctcagggtctcaagcctgagcaattcaagattttgatacacaaaatccctgcttattttacggtatgtacttcatcattttcagaagtttaaatataataccaatcatatggtttccactattcttgcagggaacaggagatctcatgactgctcttctacttggttggagtaatgtaatacattttttatttccatatgaaagcaaaatatttatctatcagtttcgtaatatgctaagacgttgcttattcataactgttatatgcagaaataccctgacaaccttgacaaagcagccgagcttgcagtttcaacgttgcaggtaatagtctaaacttgtaaagctacaaacttctcttactatgttattgttactcacaaaagttaactctaattatggtgagcaagcacttt

SEQ ID NO: 46562 - DNA, 644 bp, Arabidopsis thaliana landsberg
  unsure (1)..(644): unsure at all n locations
tctctctcgatcacttcttttgcatcttctccttttgccccaaaagctctggccatgagctttttcctggatctgttcatttattaacacacatcacctttatattggaccaaaacttctggattagccaccacgttacaatctaattttcttttttgaatatctctataatagccgtaaggttacaatctacaagtcaaattttagcactgaaatatatatcaatactagatttggtttgcaattctatatatactttttggaaattatattaataaaaaatccaatgtaaactgaatgacaaaatgatggtaaataaaataataagtatgtctaccttcgcatatgcttgccatcttttattgaataaatgtactgatttgtagatttttgtgatttgagttttgtattgggttcttctccacaataacaaacatggtatttaaagacttcgtagattctgaagattannnnnnnnnnnnnnnnnnagttattttaatcagaatataaagtcataaaagccacccgaatatagtaataatataaacgtaaataagacttatcgtatcgtattcaagtcatccacaacttactatatataatatgtatatactaaaacgaattctaatttattaagcaaccct

SEQ ID NO: 46563 - DNA, 885 bp, Arabidopsis thaliana landsberg
  unsure (1)..(885): unsure at all n locations
gctgtgattttaactagttcaagaaatttttaaaaatactaagaaaaaatatgtaagctagcagaaatataaaaaagatctcataaatctatttttttttatataaaaggtcctcacatgggggaaaattttactccaaaaaatagcaaaaagatttgtgggttggtttgtgttggaaaccacacatagataatgtaaggccatgtgatggatagcattatctcacactcatttaatgtcgtagggtcgtgattgtgaaatgtcgtaaataacccaaccctttctctctgcacgcaacttcgacgttacatagatttggtattttaggttttcacatttccccatccgtacaccccatgttacgacttacaaatttttaattagctttcaatgacacaatttttaataacacaaatcattctaaactgattttaaaatagtaatattgaaacaatagttttatatatgttgttggttaacgaagttttaggctcgagttccttttagccaacgcattttctgatactcaaaagttgtttatatttggatagttgataaatgctacacgaactaaaatttggtaatggacgacgacagtccataattgttaacggagtttctttgtaggtccttagacagcatacatatggttctttgcgtatttttctcgtcaacgaattatatttttcaaactaatcacaaatctaaggatatagtttgaatgttattttggttctatgttcttgtccattttttatatgattatctccacaatactttattattagttacattcatatttcttacatcatactaattcagaaagaatcaactccacanaaactagaaatgtgaggtagggttttggagtgtgtttaaaacttt

SEQ ID NO: 46564 - DNA, 594 bp, Arabidopsis thaliana landsberg
acactcaagacgcttagaggagttatttgactgagacacttgctgatgaaaaacagagcgattagaaattcatttaattcttcagtatttaacaacgaatatgagatcaagagtttaccgtggggtacaagcacgggatacgttgcgtgtaacttctctttcagcatttgaacccagtgggaggcctcgaagaatgggatactctgttcatctacattcagaaaaataaagacagggaagggcgataaattaagttcatctctcaaaaatttaagatcaggctgctgacataagaagaaatctatttgtttcttgttttccctgcagcgatagcgactaaatacgtactcttaaattttgtttttcaacatttaccttctaattttttgaacttcaagagggcgtgaatttgtctacacaatcaagtgaagccatgacttagaacattattagtagattgacattattgataaaaaaaaggttaagcattttatgtttttttaaaaacaattttcggccttttttatatatatacatttgttaagattttcattcattattgttttttaagggggctttaacccttttttaaat

SEQ ID NO: 46565 - DNA, 1002 bp, Arabidopsis thaliana landsberg
ttactatgtccccttcaacaacataattccaaatatttgccatatgtttattatggttctacagatgaatcccaagagtcttcttagaaaatttggtataaggaaaagagttgtgaaaaatgtgaggagtaaggttgaagttaatttcgtgacgattttgataatggcaatcaaagaaaaatttaccaacgttcaatttagttcagcttctaaaatcctagtacgtagtttggttttgttgcagcatttcagaaaattatatccttcccttatctcggaatgataaaaccctggaaacgttttaatacctataatgtaataacacgagtttttggccgtagtattaaaaatagcggtcgagagttacattcggaacttatggttaattagcaaagatgtggtaaacaaataaagtataacgggccgagcaaatcatgcatcaaaaccttacacatgtgatcatggagcacccaataagccccactagtagtttccctttccttttagaccatgctactccaacattacattttgtaaagcataacagaggtcggagaatgttcttattaatatattttacgaatatcaactatttttgattcactattaaaacttaaataaatggatataattctaatgaaaaatatcttcgcatgttatatcatgaccatatagaaacatataataaaccctttaacaaaaagaaacatataatttccacttttaatgcaattgtttttgttgaatactatatttagtagtacaaaaaaatatgtataaatcgagagacggtactggacatatgaatatctgtacactatgatgtagtacacaaaagaaaatttcactatgatgaatatacagacggtttaacatgcatacattgaatcgaatataaatgagtttcttaattactttgaatgttatttttcttagtcaaccaaacagttagaaatttgttcgtcaacgacattgaaacttttcataaatcatttgaaataa

SEQ ID NO: 46566 - DNA, 501 bp, Arabidopsis thaliana landsberg
tgatacacttgggttaatatagtcgttatcaattgatttttgagttgaaagaatccatttatattgttgtgtcgtgttcgaatacaacgttgtatatatataactacatatatatattatatgtaggtgacgaagagaatgatggctggacctgattctataagatggaaatggggtacgtctagagatgttttcatgaacggagctttcttcggaccgccaggagtaatagtcaggccgttgtacaaaggaggagaggggtttcgggtggcaaatggctctctcgtcccttctcttacttcctctgccggtcctctccgttgctacgtcggcaggatttgctaatcaattatatatattttggacaaaactcgttgtagtcttaaacttgggaaaattagacgacaaaagaaaagtcaacttcttcattaaacgatatacattttaatgtttcgtctgaattttactctcacaccgtagtttttttaacacctaaaaatg

SEQ ID NO: 46567 - DNA, 964 bp, Arabidopsis thaliana landsberg
tctacattgaacaaaaactaatcacaggcgtgtgtttgcatattattatgatattatcacaacggtgcaaacaaaaacgagacggatatatttagtcgtgtaaaactaacgtgtgtggtgtcaaacaaaactaagggatatgagaagaaaaatacataaaaattgtgtacaattatgtaaaagtaaagaagaaaaatgttgacgtatggcatcgattccctgttgaaccaataacgtggcaaattgtggaagtcacaattttcatcttcttttgagccaaaacgatgagaatgttccaaaaatatgcaaagaaagctggatgccattattaggatgttcgtttttttaaaaaaaaaaaaaaatctttttgtataagttaattacctttctactaccacttggaattattttatactattgaacaaacaatcgctgtttgtagagttaggtataatagcacaactaaagccatatgcatagtttgtacattagagtgtatatgtgaaagcattataatgtaaaatatctttagtttaatattgctaaactaaggacatggtttttgtagcctgttacattggcgtctacgatttaggaaaactttataaagtattaactacttcagagagcttttttgtcaaaaaaacgaacagaaaatataaacagatattaatgtataatgttttaaaaggctatatatctataattttaaaagatattgtaaatttgatttatatgaacaaactgctattttgagatttgttttctacaaaaatcctaataaccctagccaaaatttacataacagactccaaatcaacgtacgtatattggcgcgtaattaagatgtgactgaaaagtggttcctatgcaattacaaaacacaaataattcacagaaattttaacctctcatatcgaagcatatataattaaagttttgacttttgagagtgactaaagtt

SEQ ID NO: 46568 - DNA, 603 bp, Arabidopsis thaliana landsberg
tatacttcaattataaatataattactccaacttaacatgctacgatagcaagtttataaggagctagccatactctacatggttcttgtggaagatcgactagtggataatctatccgtcctgcaaagtcttgactacatatacaaacttggttgaggtgaagtttataaatatcagcttgaacattcataatggagatagaatactggtgacataaactaaatacctaaatgtaaaagtaaatacatgccatactagttctgccattctttacttattatatttctgacattttgtttatgctttgtatatttcagtttaattatacgtctttttccatgggttttaatgttttgtatagagttttgcaggagacacgcctcttcttgtaaactgagaacaatctttctggtaatcgaactcgaatactaagagttaagaataagatagtacagttttgcttctcttgaatttattggacttatctctgctgttgtatatttttacatgagaaaaagatatttattcatcagaaaataaaatacaaaaggaatattaaaaagtttacatatccaaaatgagaatatttgggataagctata

SEQ ID NO: 46569 - DNA, 545 bp, Arabidopsis thaliana landsberg
acgatgcaaaaaaaaaaaaatgtatatagtaaatcagaagtccggttaattaagtccccttatcgatcgggtaagggggagaaaatgttcgggctttgaatttgtaaaacccagaaaataataaagccccacaattcttatggataaaagcttgattttacacaaagatctcttttaaatgtaagaaagcttcaacatgcggacatacattaactaacaagaacaatgtcagacaaaagctaatacatagactaatacagataaagtattagttctcagttaagaggagattaaccaggataattagcccctaaatcaacaagacaaaacactaactaagaagacaaaacaacgataacagacacaaatttaggcatagagaacttcaggcttgaaactaaaactagttagccagatgtttagacagtaacttgttgatttctcgagaaatattcggggttctgcaaatggtttcttcagttgttagatcttgaaccatttcacacggtaccaaacacacttgctctgttgataacttctcctgg

SEQ ID NO: 46570 - DNA, 509 bp, Arabidopsis thaliana landsberg
ttgagcttttttgatgcattcatcttctcatacgcagcaacaccccctacaaaagtttctagtgggaactcatcattcaaaacttctgacttcgataggatctctcctatagccgtgaaccaactgctgtccgttgcacttagagacaaagacctataatgaattcaaatacatcagaaacaggagaagaaaatgtatatatttcaggacataaagataaacactcgtacatctctctatcctttgatattaaatccaaaaactggatcatcatctgagtaatagagcagtattgttgtctccttgtgttacgcccacatataaacagctcacggacaatagtttcagcatgtccttccttcaaagcaagtgcctatcataaaagtaaaaaaagtatcagattaagagtaaatatctatagataacttgattatcaagctatagagagaaaatactatacctttgcaaaggctgagcaaaactcgaaaagctgacatacattttcagct

SEQ ID NO: 46571 - DNA, 668 bp, Arabidopsis thaliana landsberg
attttccaaaagtcatcctaatttttccatctatattgcaagtaatttgatacctactaatgatttttattttttttatttgatgggttcacatcaaactcaatttccataaaagaccgctacctaagcagacacgcaaattcacattacacgtgtgatgtgttgtatggaagcgaatgtacttgtttttcataatctataggttcatatagagaagtctctccattgaaaagttcttccttcttgactttaaaaactccataaggtccctacttatattaatttcccaaacccctaaataagatctacaaacaaagcttcttcttcttcttggtgtcatcaagattttccaaaaatgtctcaacaccaaaaaatctatccggtccaagatccagaagccgcaacagcgcgtccaacagctcctttggttcctcgtggttcctctagatcagaacatggagacccatccaaagtccctttgaaccaaaggccacaacggttcgtgccgttggctcctccaaagaagagaagaagttgttgttgcagatgcttttgctacacgttctgctttcttttgcttcttgtcgttgcagtaggcgcatccattggtatactataccttgtctttaaaccgaagctaccggattactctattgaccggttacagc

SEQ ID NO: 46572 - DNA, 683 bp, Arabidopsis thaliana landsberg
aacacgcgctaatctgaccatctagaaacattacacgtcatatctttttattttattttggacaaagacacgtcatatcataaggtttcaataataatgcatatatatatatatatatattatttttccgccaatgtatatttttttatcaatctctgcctcaaaaatttgcttcctctgtttcgaacccaattgggcatcttcgtcgtcttcttcttcaacattcatcatcgtcatcaatttctctgtagctctttcacaagtatttcttcaatttcatagcgagagagaaataaaagggagaacacagagatcagagagaaattcaaaaacgaatccgtgtgaggacgttttaaaactgccaaagagacgttttacttttacatgcacatagagacatacgtttattttgtgtagctatacgctcttaagagtttgaattttctcgagatctttgaccggagcgaaaacgacgaagatatagaaaatctagcgaaacgacgattcggacttgggagactctcttgcgttgtgcttggatctggttccggtgcaaattttgagggtctaaaatcttttcacattgtttccttgatggatctcaggacaggatttccgattcctcttcggaattggcttccctttttggggccgaattcccgaatttatttttagggaaagaa

SEQ ID NO: 46573 - DNA, 875 bp, Arabidopsis thaliana landsberg
tgggggaggagctggtggcggaggaaaacgccggtggaaagttctggtgattggagttttggttcttgttattctttctatgcttgttcctcttgctttcttactcggtcttcacaatggctttcactctcctggtatctcttatcattctctctctaacactctctttgctttttttctgccgatctctgtttcagatctaatctcatctttttcactttttcaggatttgtcactgttcaaccggcttcttcagtaagcaatttctcgtttctttgtgtgtttgttttggtgtgttttgattttgttctgaatcttctttcttttggaatcagtttgagagctttaccagaatcaatgctactaagcatacacaggtaatgtcactctcctttgattgattcgattctcattttttataccaaaatctttttgctgcttttgatattctttctttggttttgcagagagatgtatccgaacgggtcgatgaggttcttcaaaaaatcaatccagttcttcccaaggttggttccacttgtttcagtgtggattaaaggccttgacctgttccatttatgttatagattagtagtttttgacagaaattttagatcttttcatgtacccatagagttaaagcatttatggtggttggaagcacttcattatcttacacactgctctctaattgacacacacatttcagatctggtctatatatgtttaattttcaactattgaagtatgtttctgtcataattattggcattaatgtttcacatcttgtctttcaagtggtgtaaaatatataggctttgtagtttgattacagataatagggctatttgtaaatgataggctttgatcaggtt

SEQ ID NO: 46574 - DNA, 935 bp, Arabidopsis thaliana landsberg
aattgctaaaaataaaatagaaaagccaaattctataaatagaaggcttaatttagcacaagtttcagtcataaagtcaaaaatcatcgcgacaaaaagaattgggtcaaactcctttaccggtcaaccaagtcatcacttaggtgggactattttctccacgtcaactcaattattccaatcgttacacgccacgtcacgagaataagaaactccaggaccagcgcgtttaacgtcaattgccacgctggcatttttcttattacattttgcatacatacacatatagatacacatttaaaccataagtataaataaattggttacgataacttccataaccttcattagtttctccagaagaaacctgtaagaaatttcttctcttctctgtctttaaacagatttttattctgttctgtttgattaattattatctcttttgttccagtattttaattctttagattttcttgttcagacatcactagctccactaccacattcaagaagcctccttcaataatctttcccttttcctggggaattttctctctggattcattcccggaaaatcattcacaatttggagaccataaagaacacataaacatgtcgcaggacgtaatttcgtctcatgagcagctctccatggtacgtaataatccgtgcaatgtttattgtttgtcctcgaatctgtttttatgcccttgaatggtttctcttctttgggtttcctcttttctatcatacattgcttaaatgattaaaaagcatgaactttttttcctgaaaattttgcatgtatatatctatgatttattcgcaaggaataaaattattttctgaaatctttgtattttgtagggaacatcgttttcttaattttcttagttattcgattttatcttttgtcaaattgcttcattcctttt

SEQ ID NO: 46575 - DNA, 797 bp, Arabidopsis thaliana landsberg
atatgtcctcagttcaccaaataatagtccagcaaaactagatcgaggcttgagtactttaaactaaagttcatgtggttgaaagaaaataagattcatctatttcaatctatgcattggaattgtcgaatccttagttcataagccgagtgtgagtgtgctcactagacagctcgagcttgaggatattctacagttgttaccataatattttgttggtaattgctaactttttctgcattcttatgtatgcaggtttgctactaggcttgttggtatcaaggagaatgcaaaatttcagaagagtgatcagaaggatacgcaagtgtcaggactaaagagtgtagttgacaatgcgaagcagcgccataatgtgaagtatgtcctttcttcttaatttacaacactctggtcttcaagctgattgtttaatcacaacatcaagcatttgacaaaaaacattgcatacttatggcttgacttctttatccacaggcaagtttatgcatggcatgctttagctggatactggggtggagtaaaacccgctgcttctggaatggaacactatgatagtgcattagcatacccagctcagtctccaggtgtcttagggaaccaaccagatatagtaatggacagccttgctgttcatggtctcggacttgtcaatccgaagaaagttttcaacttctacaacgaactgcattcatacttggcttcatgtggtatagatggagtcaaagttgacgtccagaacatcattgaaaccctatgtgctggtcttggcgggagag

SEQ ID NO: 46576 - DNA, 1408 bp, Arabidopsis thaliana landsberg
gaagtaataataatgactagagcttgctatattgtagagaatcgtcactagagtagtggtttcgctagggaggaccaaactgccgacgagtacttacagatgaaaaacaagtgctctcgtgtcttgataagagtgttacataacacacatgttcgattcaggttcacattccaagccttcattcaatctacggtagatagttgattctgcattgctaaccatataaaaaagagaactatcaactatgatagggtctaaaaaatccaattagacttttctagaactattatatatattagaacaaaaataagattcgttatcaaaattagcacaaatttaataataaaaataatcaatataagcatttaattaacatttcacacggtcgtattataaccatgatttcaaatataattaaatttattattttaaatcctcaatataatttacttctatttaattttatatactcctgtgggccgagaaaatgtaattgttataatctaaaatatattgaaaggccctaagcccgtttgagttttttaagcgaagtgtttttttttttctcgtttaaaaacagctttgtggatttcaagttttcaacaatgttagtctttggcgtcgtggctaatggcggtgacgtgttcggtgccatcacgatagaggctgcagccgtttgggtacgtaaaagaaaacattactatatagttttcattttaatattttttatattaaaaagttatgcttttatatttatttagatcatcatatttacagttttgacattgtttcccgcatacttttcttcttcttcttctctccacccatctgctttaaggaaggaacctcaaaaagcttacaaaatagtagaagaagaacttttttttatctccgattcttacctctgcaatcttcagattctagctgattcaaggtttgatcacaaatttcccgatttgtatatatataatttagatttggttaactttatcgaatctgggatcgttgtatccaaatctgatctgggcttctctgattcaattacttgggtttgtaaaattgatgggtcaatttaaaggatgtatctttagggtttctcgatttcattctgtttgtagaacaatttgatcataaaagtaatgatgtgttttatttgattaggatcttgtttgtgatagaaattggaggagatgggagcattcatgtcgaggttttggttcatgatgtttcctgcaaaagagtataagattgttgctgttggtttggataatgctggtaaaacgacgacgctttataaacttcatttgggtgaagttgttactactcatcctactgttggtagcaatgttgaagagcttgtctacaagaatattcgctttgaggtactggactcttttttattcatttg

SEQ ID NO: 46577 - DNA, 932 bp, Arabidopsis thaliana landsberg
cataattccaccactaggtgtgtgattgtgtcaactcctaagaaatgagaacagataattccagaatttgtttgtatcttatgataattacttaacgtgaaaatgattgaacaccaaatttgaaataataaaaattgtaaaagagagaaaacgaacctattgcaatggaaagtggcatctttttggttttgacatattcccttccatcttgaaggaattggtcccaagccttcatctctaaagctctttgattcaggccacacacctttttacacatacacaatcaaattttaaaatattagtttatgaaattataatcaacaacatattcttattaatacaaagatagtaagtgggtttaagttactaaaatctaaaaataaaaatacataatggtgtctcataatcagacaaccaaatgaaccaatcattttagttgtggcaacttctattgcttttctgaatcaatattatattattcaaaggaagggtatgaaaagttctagttctcaagtatatcccaactttatcatcctaagtcccaatattttatgagaaagaaaaagaaattcgaactaaaaacaccaataactattaacccaatacaaactttttctttttattaatcacttgacatcatctagctgaaaccgaagaattacgaaaatacattacaaaatctcgaattagattatcatgtttaaaagttggttcatcatcatctacaagaatggttaagatctgttacagcttcaagtataaagagcattgcaagagtttctttgattattgaggaaattttggaacttttagacccgtagtcttctttttcggccaggaccagcctgtgataaatacattcaaaataaagagggttcaaactagagtacattctgtatatagcacaatcttcactaaaggatactagccac

SEQ ID NO: 46578 - DNA, 1294 bp, Arabidopsis thaliana landsberg
cccaagccccccaatcaaaagatgtttatttgaaaggtatttttaacgtgaagtcttctactccgacccatcaatgagtaatcagctggttttgaaatatttatcatagtatatgattgtttaattagtatgagtagttacacctgcttcaaccattttaaccacgattgtttttaggaaaattaacaacaatgtcatattttgatagatgcctttcatttctaccacatttacctctacttttctatttttacaacatttatgatgtcaaacaatatttttatcctcagatctatacatttcacattttctattatatataaagacaccttcccgggcaacttatgtaatatgttataccatactatatataaatgtttaattagtatgtgaattagagctttgatcatcgcactctaatgaaaaacagatgtggtatgtggatgatgagatgtcagcatctaagaggttgaaattaaatttatgtatataaatgatatgtcattttttggctgagatggcaacatgggatcagaagagtgcttagttttgtatatatataggatggagaagtatctatatagaaaacattgtcctgaatattataatacctattaggtgattgaaaacattgtcctaaatattagaatacctatatagtgattgaaactattttcacaaaccgaacaaaaagtagtcaacgtactactcatcacatctaagaagagcaatgtttcaagctaccagcacgggggctcagattatgcatgcggcgtttccccgttcttggaggcgagggcatgccctgcctctccggagtgcaaaaatcttcaagcccctcgcatgtctcgaactcagaggaagcacagggtacacatacatatacctccctcatttaaattcataagagctaatcttatttcatcgaggggtattcttgctagttgctactaaggcaactatcacgtgccttagttctaaaaacaatgccctttttctaagaaatttgagagtccaagaaattgagaggagatttcttaattgtaactttggttcagttgtagcatattaaggtgatgactgaatagtttttaaaattataaactaaggccaagggtaactaactagctaaattattcacacatttaccttctcacggccatatatatgtacttccttttatgacctacgattttgtttttttttttttagcgagtttgtaagaaaaagaaaaagaaaaaagagaaatatttgtttgcaactactatctcttggcacatatatattggaggtt

SEQ ID NO: 46579 - DNA, 1048 bp, Arabidopsis thaliana landsberg
aaatatctgaatcatcttaattctctctcaatctccaaacccgtatttgtgtatcttaaccccctttcagtctcccttaaaatttagaatggagactgagatgagagaattatatctaactcttagaaacttcggtctcaaagaaaaattcgtatcaataatgactttctggagaagataaaattcttggtcactctcctctgagccgaagagtttttcgaatttcttgtttatgattagaattcttttgagacgtttaaccggaatcttgaatttagataagaagataaatatatcttaataattttgtcgaatcaatcgatgtctttggcttgaaccttctatcgaaagacatcatgacttctctaaaactataagcttacaaatcccacatgtcagactttgtagtcatccaattggagctacgttgaattgatactacaaattttgttcaaatgaaaaattatcatataattgcaaagaatatattagatgtgtgttaaataaataattaaatatgatttgaaattaacttttaactgccaaaaataattatatttttagaaaattacaaaaaagtcaacaattttagacttcaactcttacggttgtgggcgaagtcaaccgatacccgtcatcaacgtcctcttacatgctcccaaaacagagtcaactcaactatctaatcggaatatatatatgagtttcattatctttaataaagttgaatataaaccacaaaaacaaaaacaaaaatctttggttttagatagtttacttgggtttgtatggctaagaatttagagtatcgatggtttctttggtactcgttttcttgtcaagtaagaacaatattttgtgttgaaaagtcattgtggaaaaaaaacagaatagattcaagatgatcgaagattcgatagacaaaacaatgaccttgtgatattgatatgacaccgtgatattttcacaaaattcctcaaggaaagatttattttgattcttgtttatgattaatgaccttaaaccccataaaatgattggacagaaa

SEQ ID NO: 46580 - DNA, 717 bp, Arabidopsis thaliana landsberg
  unsure (1)..(717): unsure at all n locations
ttggccgaacaacttgaaaatctttaggtcgatttatatacatgtgacgcgaatgcccatgtcatgaagtaatcggcttgattcttttttgttacgcaagataaaaaaactagggcttcatggaagaatggttttcttatgtgtgttccttattcttcaagtcacatattcattgttcttttgttggtgtagtaatttctgcaactctgcatatttggaaaaacagaaaatcaagttttttttggttcatatttttgtcatataattattttataatccactgaatcatataatcttcactaatttaattgtcgtctaaaaaatattcatccgaatgtaaatccaatctgaagctaataactactgtaattaggtttaaattagttcaaaatttaaacctaaagaaggagatatcgtaagacttggttgttctctgtttctgactgctctaagaacaaggaaaccttttttttgttctgttttgcttttccggattccttattgacgcttgtagttgactctcattctttctgaggtctgcttcttcttgaccctctgaattttttatttcttctccttaaatacacaagttaatctcgttcttttaaggtcaatgttacatgggttcttggatactaaatagctggnttcgtttaaattcttcgtttaccacttaaaccgtttagtttaccttttttttttttttttcctggttta

SEQ ID NO: 46581 - DNA, 574 bp, Arabidopsis thaliana landsberg
agcatacaactcgtacaaatcaaccggaaccggaacagcaaaagaagaatctgaaatttaaaaactttttttgtatcattatttaaataagaactgtatttctaaaaacaactgtagtttcctataattgcattcattctactcgtatcgtcgttggttgttcgatccgctaacttgattgattctttgagaaccaagagtcgaaaatagctggtagtattcataatagtatgatttgcagcgtttatttaacacacttgcttctactctttacactcttggtgctttctttcctccagtttgttccattttttgaggaatacccttcgttgtatcgcatgaactccgaataaacgagcacgagcggcaaagataaagtcaaggagatctctcaagttgaagacctctcatggaggttcatccaacgctgttgatgatatgagacaatgatagaaaactacatcgaaagaaaaggaatagcgtaaacgttttcataacgatttacataactacaataacgtttatctattctttgccttttcgaatgatttaaaaaaatctaagaattatcagg

SEQ ID NO: 46582 - DNA, 556 bp, Arabidopsis thaliana landsberg
gtcggttaagaacatgagtgtggaggcggtgagaaatggtggattctatgctggttttgtggattgacatttcttgacggttcatggtctggctcagtgttgggagactcttaatagaagtggttgtgttgagtgtttgagtaaagcttcagtgaggattggttcttgtttggttaatgaagaaggtcgagttcttagtgctggttgctatatgaggttttctactcacaagttttataacaattctggaaattctacatcagatggtaatggtggtaagtagaataagcttgaaatatgatttaaatttagtatatgtttgtaacatttatttagcaacattcttgttgatcaggtcataaccatttgggtgtgattttggcggtgacatcttcggttgtggcttttgttctgttggtctctgccgctggtttcttgcttacaaagagacacgccatgaagcaaataggtttgttccatattcaatgatccaagatctatgttccatacatactttagcttccccgatctggcatttgagtttcagtggatttta

SEQ ID NO: 46583 - DNA, 1032 bp, Arabidopsis thaliana landsberg
gcctgagatttggtatttcgatctgattcatcaacgtgatacacttttcgatagaagaataatttttgttctatcaaaactcactaatccagtaacaatttagaatgtgatattcatattttacttgcaaagagtctcgtttgttttggttttttagcatccttatggactatgataaaaaatgaaattgattgttatgatttttgtcttattatgtcagtagaaaaactagctaggatgcatctagtcaaatcttgtacgttccaagctttaatcaaagttaagtgtgacctgacagtagccctaaaccgtaaatccaaattttacagaaaatacaaaaagatatacgtcctgatatacttataaaaaataactaagatgtgatatatatcattgatcagttggtttagtcactttcagtaagatgaatcattcactaaatcactaataatatcgtatttgtagagttcgtacacttggttcatgtgtaaccaattcttataccagaaaaaacaacaatagtagtggctaccataaaaccatgcaataaaaggataaagaaacatggtggaccgttatatatgaatgagattagagaaaatataagaaaaaaacatttgattaattgattaagggaatgactcatactataatgaattgtagccagagaagctgtctcacaaaaatacatttgaaaattttgaataatgcaacccacgcatagtcccatactaataatagtaccaaaataaaataaatatccaacttcctatatatatacatacatatagatagagacaattatattgtatagtcttaataattcacactttgttgtactattaactttgaagttttaaaccagttacttggtctcgacgtaaaaaacaaaacaagtccatcatcgaagacatgttaaacaaaactaatctctgtcttctcttttcactgtcctttctcttttctataaaaaaaatgttaatatggcaaaagcaattcagcatatagacccgtggattatgtccacaaatc

SEQ ID NO: 46584 - DNA, 582 bp, Arabidopsis thaliana landsberg
gaaactagagaatcatgacggggaaagaaatctgacggttgatatgacgcaccaagttatgagtggtgcagatttcttctgacccaacacaaggacagagacttcaagtttctttacttggcttaacactgttgctagctttggcccttgaatcaccaatgcctccacatccacctttttagaaaaagaaattgacatattataattgtcttctcataagttatctttttgaagatgtcacatatcttgatgcaaaaaatatattataaaattcttcaaagtaatataaaaaatcacatggaattttgcaagtaattaattataactaaaaagtggtgagttgttacattaaaaaaaaatatctcggcagtttacttagaaaatagaaaacctacaaataactctacctgattacatgttactatgttagttgtttttgaacaactttcaattttaaaatgctaagtaaagtaaatcttaaatgggaaagaacagttttcaagtaacaaaacatgtatgttaccaaactaaatatactctagatctaactaatagcgaagtttaaaacattagatctaaact

SEQ ID NO: 46585 - DNA, 993 bp, Arabidopsis thaliana landsberg
tttcctctattcttggtcgattttctgtgggaagttatctaaaatattataaaaaaggaagagttcttgtgttttttattcagaaacaaaagatcgctcgctcacaaggtgttcgataaaatatctgaatgacatcttttcggtaaaaagactttaataaggtacgatgtttttttcttattcttcttttttatttggtttgcatatatatatgtaatcgactgttggagacattacacttcttcacctgcatataattaggaagtacccaaaatgtagaacacgacttaggatcataaagcttgtttctttacataaaccatatgcagttttctagtcttttcataatggttagtacatgtacaagtctttgtttcgcttcggttcattccggttaatagttcaccattttctgatatattcttgaatgagacctccacgtagttcaccgtaagcaaccctagtcttttcaaaatggttgtgagcataaggaaagtcttcgcttttccttcggttcatcgggttaatacatcaccatttttctgatatatacttgaatgagaccttgataaggttcttcaaatagtccccatgtggctgaaaaattaactcttcggtctcaaaaacttggagacaaactaactccattgtctctatcttttttttttctgtactaaaacagaagaactctacgttgaatcaaatacaaattagtttccatcctttgtttggagttgcaggctctttaccattctgatcatgtcgacgaaagaatgtgatatctataagattatcaacatcttatctcagttagactccgacctgaagaagatacctgtatccgataaagttattagccacaaggaacaacaaggcgaaccaagtgaggaaaaaagatcttggtgggttcgtgtcagaggaagtttgaaaagaattggtaaggcgaagaaggaggctttcaacaatgctagtgacacggaggtagtcaaggtg

SEQ ID NO: 46586 - DNA, 815 bp, Arabidopsis thaliana landsberg
tgtaagctcagtttcagaatctgatcgatatatcaaaaagtttacttccttctaaaggttttagtcttgacctttttcattattctaattctctgattgaatcttgatggtttattttatacagtctggttgctgcaagccctctaatgactgtgacttcacctacataacttcaacaacttggaataaaacatcaggaacacataaaaactcagattgccaactttgggacaacgaaaagcataagctttgctacaattgcaaagcctgcaaggccggttttctcgacaacctcaaggccgcatggaaaagagttgctattgtcaacatcattttccttgtactcctcgttgtcgtctacgctatgggatgttgcgctttccgaaacaacaaagaagatagatatggccgttccaatggtttcaacaattcttgatttgcgccggttcaagctagactttgatttttcattaatacatcatattacatttatgattagaacaaaacagctttcaaaatttaagaaacagtagaatggaagaatattgaattagtatagttgttgatgtgtttggatttcttctgctgatttgtgtttggacaacagaggattcttcagatctttattacagattggtgtgtttgaagaatcttctatatgaatcttcacttatgacttctgatcattgtctctctgatcttgattcatcataacatcttttgctttaccccacagcacaagagtagagtccaatgtcacgcccaatcctccgattaaactatttcaatagatcaaaacgattaagtttatggat

SEQ ID NO: 46587 - DNA, 576 bp, Arabidopsis thaliana landsberg
aaaatactagatctcgttgtatatgaatggaaatcttaggaactgtatggaaacacctccaaaacactattgcttttaaatcagagtcaggtgtttatgttcctacttttcttgtattgagggtgttggtactgtttcctagactttgttcaacgtacgtaaagtattgtgtgatgaaccctcaaattgatagaggtgattaacactcgattagaatttacttaccagggaatgttaatgatctcaggtgcagggatctcatgtgggtacttatcttcctaatgctggagtgtggcatcacacacaaagatatctcaagaaaaatggctctaacgctgacactttacaccatctggattttgatgctccaacacgtgaacatgctcgtcttcttcctgatgactatgtaagtctgttcagctatggttgaagttaggttcgtttagattgttagtgttgatgagcagattttacgtttcaatatatttgttcattcaatatgaaatacatggtatatgaaacaatgcttgtggactgtgcagaaagcaaagcaatgtagatgaacagggttaaaga

SEQ ID NO: 46588 - DNA, 781 bp, Arabidopsis thaliana landsberg
atagtttaatacatgtgtgtttatgtttgataaatttggttggtagagatgctttggtcactaagatgattctttcaactttttttcttttccttatagatttggtgtattatcagttaactttgatgctaattaaatgtctaaaaccagacaaagttaagaaagattctttctttcaatgaaaatgaatgtttagggtccagttgtgttttgagttcttgaaacatgtaatgaaaaataacgtgttcaaaacagacaaatcttgggaactgaagatttgtttcacatatctcgttttttcttcttgtcttggttttcgggttctggaagtttcattgatggcaaaaaccacaaagccatttatgtgaatattgtgggtggtcctgtttagatttgttatcattataagtagatctatgtgtattttccagtccaagtgtttcttttattgcttacatgaccagatatactttgtggtccgaaacaacatctggtccttatctcagtttttttttgtgtggacctcaaaatcttttcgaagaaaatctatcgttacacttttgtgatgtttcaacattattgtcttttgagataagtcggaatttaagttactggggtctccttttgagattttctatgtctttattacaacaaaaacaaaatagtatgcaaattttttgtttgtagcattagtaatgattaatgaaaatgtttgattgtagtacttggacgaaaacaaaatcgtgattctgaagattggtgagtcttaaaactctggaaa

SEQ ID NO: 46589 - DNA, 610 bp, Arabidopsis thaliana landsberg
tgtctgaaaattgtttagattaaggacaaggtcgagacaagagcggattatctggacaaagatacagagaaaagtttcatggatgaacatagtgatgatgaatcggttctttctgagagttggagaatagattcattgtccaaaggcagtttgagttctagttcaagctcgagctcgagttctcttcgaagggtatctgtaaggaagaagaaggggaagaagattttaccgtacggaataatctcttctccagacacgaaactaggagctggaaacgacgagaaagcacaagaggagaaagaagagaagagaaagattgctgatcaagaaaactcaaggttacttggaatacaaggtagtaggagtctcacaagtacaagcaataacgaagtttccacaataagagagaacgagagaatgtcgtcgtttcaaagacctaacctccttgattatgatgatgtggtggctcgtcttgcagctctgcgccggagataagaaagtagtaattataagggtttcttaatttctcgtcgtagttaagtttatattggtaaaattacttttttactaattagaattttcgtttgagaatatgtaattatctttatga

SEQ ID NO: 46590 - DNA, 101 bp, Arabidopsis thaliana landsberg
tgagagtgagaagagaattgtaacagttcagaagaggatgtgtggtcgagatctcggaattagattggacccgttgcctaagtcacatcgcgacaggtcaa

SEQ ID NO: 46591 - DNA, 768 bp, Arabidopsis thaliana landsberg
agtgccatatatatacctgcacataacagaattgtgtggaccaaagtcaccaaaagccgcagagggatcaactaaataacaaagcaacttttcttcgatattgaaaaacagagtggatatttggtttatgctctgtctaaactgattacattttgtctagactgtaaatcctaaaactgcatagattaaacgaagaaagaaacaaacaaattccttgttctgcaaagattctgagaacagagacccgaatttcatcatttattaattatcatgttctgtctaaattgataaaatgtagaatgaagcagccactacccaattcacagaataattcagagaacagactggattatcaccatttgatttagctatttcccttcatgtgctattgtgatgatactatgcgaataaaagagtggattttacctgagagtcctcgcttccgctagcgatgaaagcttgtttatacccaccaaagcatgatctgatgatgaatcgtgaacgcttgtggcctttgtatctcgacacaatcttggggtcaccttcaatattccagagacggatttcctggttgaggaggtttaccaggatatatttgttgtcattcgaaagcgagaacgacgtaatcatgtcttcctcttctattaatctctcaactgtagcttctctatcaaatagagatatcacggaatctttgcatacacttaccagccactttccatcatccgtcattgctatatctgataccttttgagttctctgaccttt

SEQ ID NO: 46592 - DNA, 770 bp, Arabidopsis thaliana landsberg
gagttatgcctgtgatttggcaccagtctcttcttaccttcgagcaacggtaatattcgacttagtccttacaaagatgtctgacaaatcaaacagaactttttaagttattttgtaagctcatgctttagccaatgtgcaggtacaagtatgaaatactaaaggaagacaaagaacatctccaaactctcctccagaggcaaaaacaccatcttgtaaggctgcttttacctctaaattttttgaaagtttttgttttgtagatcaccacttattggggttatcaatgtttgattgtaggttactcctgagattctgagagagcttaaggatagcagaaaccgtggagagaaagaagatcctatggtggataattatatcctttttttcttctaatttctatttgaaattaccttaagagcgtgattatataaatctgagtatgttatgccatgttatgttatttccttgacaacaagtcacttgccccagtaccggctaaagaagacaggtttgacattcctgaagtaccaatggaagaagactgatgattcatggtgcttggtattgaaagaggactgatgattcatagcagcagagataaaccctgaaactgggtgggtatgattctggttttccagttttgacatcgttgtattattatttcttatttgagtaagatttgaaatttttattactacatgatagtgtatctttaaacatggcttaatcttcttgtataatccaaatttggtcttgtctatatacat

SEQ ID NO: 46593 - DNA, 636 bp, Arabidopsis thaliana landsberg
  unsure (1)..(636): unsure at all n locations
atgatgataagagagcttctgttgactacaaatacaagtttaaaaacaatcaaactccagatcttttaccttgctggcttgagcttggactagaaagcttctgtaagtatgaggttgtcttctggaattatgaaagaaatgtaacacacatgtacccatatatatacactaatgattgttcttattacataatattttaaattttatagtagatatctttcaaaagaatcaccagacttttcttatataatatttaaacttctatagatattttatataagaaaagcgacaataacaggtctaattctttaaatagctattattcaagatacgtaaacaaatccttaccaaaaataagaaaaaaataaaaaatattaggaaaaacccttaccgccaaaaagagaaaaaaataaaacgatttgaatatctcctctctgctgtctattaacatgagactgtctagcaatctttatcggcaccgtgagagggctcttcgattaatggtgtgcttcatgcgttttgatctcattttcttctatgtttcgntttcgaatatgaatttgttcgaggctcaccaatgattttttctgcctttaaccgatagaaccactgctaccaataaatcgttttttactg

SEQ ID NO: 46594 - DNA, 1024 bp, Arabidopsis thaliana landsberg
atagaagtattaatgtagtgcaagtgatactatcagctaaataaacaaaaactctgctccatatcaaaactgtacaaatctttttcctgtgggaaacaaaaggatgaaatgtcctctgcaatcaacgtaaaccgaaacatagagccataagatcaatccagtacagcgagttgaaggagaaaaacggatacattagaggaaacttaccaagataaatgatccaaagatagtgacaaacacagtttcactgaaaaatgctttatcttgcccaagtgcctgaaggaacacatatcaattaccaaacaaaccagaggtatgatacataacagaattgatgagaaaagtcaaagcaagtatactcactggaagaataaagaaaccagcatcttgaagagtaggaccaggtcggtgtaagtagtgaactccatgagcagcaagtccatgaatgtactgatttaagaaggaaccagaaacaatgaaaatgcaaataggatttatataatgaactaactttaaagctcccacttttaagcaaactactgaaacaaaaaaaaccagcataactaattgatctgtcacaacttagcttgatcatatcaccattcaccaataaagcaagactataatctaaacacaaagaaggaagcttaagaacctgaaatacaagtccagcaagaacaagcttccatttttcagcaagaagagaagcttctaatgtcgcttctgagtaaattcgtctccatagcttcacatacacacacaaaaccatggacgcataactatcaaactaaacaatttcaacatttatcttttgaaaagagagagactctgattaacgcaggaaaaacagaagaacaaaaaccttaggagcttcgcgatcaacgaaaaccggcatgggtaagattgagaatgaacattaatctctgcagcaagatcaaatgcaactgcttttgtaagaaagacagaacaggttcaatccccgacacaaaaccagggcaatcttgaaatgcaccgaccagtttga

SEQ ID NO: 46595 - DNA, 1039 bp, Arabidopsis thaliana landsberg
  unsure (1)..(1039): unsure at all n locations
ctccctcacggtagcgagacttgagaatgccgaggaacatgaggagagttatacatgttgcgaaaagagatataccgactgagatgacgaatatcttaaatctgagctgggggatctagagtggcatgccgcctgaacggtaacctccggggacagtaaaggcggcggaaaacatcattgtggtgattagagcggcaacgactgtgcacgaagttgctgtttctttcatccatttctctccttgctccacgagatccttgtgttggtctgtaaacagagcctttggagttttcttctgcttcaagttaaccatttttcgatgcttcggttgcactaacttctccacttcctggaaataatacagagttataatcctaggttccttttcacagaaacagttattgcctaatttcttgtgtagcaagatcatatatacaactatgtatcaccttaaaccattgtagttccctttgcatctgaagagctgcaccaggaatgagattaagccttgaggctggggctctatacgcggcgtgatgaagcatattgttatggaatatgtcccaatttgtagcgaggatgttcttcttagcacctatattgtaaatgaggctaaagatcttttcttgtctctggcttaccgcgtagaagaagatgttaagaccactactatttttggaccatacgatatcaggataatgcctcatcatttcctcgatatactctacgattccattctctaccgccttaaagagagcttggtttagaccagcgttcttttgttgagccgcgtcaaatttaggtatctcttgacagatacagtctagtatttctttagcttgagcatgtcctagctntagtttgtatacacgtctaattatgcgtggaactgtcaatagaaagtttaatctaagattgataaaaacaaaaacaatgagggggtaacaatntgggatggtaattactgcttacaagatatttgaggtgtttcatcaacttctcttgaatccgaatatgatcctgcgaattctatattgat

SEQ ID NO: 46596 - DNA, 313 bp, Arabidopsis thaliana landsberg
tgtggtagtgtcattaacggtaatcgaagataagacgaggcacgtccaggttcagggtggtatgtgcgaagagtaaacctaattcacaatggaacagaccgagacagaaatagcctatgcgatcggactaagcttctgctagctttcacgaaagactactatgcaagggtcgcttgatcacaccagtattacgagtccaccccacagatcccggggtccagcgcaccggcagcgttgaagagcgtctttaagaggagaaggacacaaggtcaggcgcgaatattacctccagcctctgaattttaatcgcacg

SEQ ID NO: 46597 - DNA, 283 bp, Arabidopsis thaliana landsberg
  unsure (1)..(283): unsure at all n locations
tccccccagcatcatggagtctgatgatctatcagaccattatcgaagtgtcgatgatcgagatccatgctgtcatgtacgggtctacatgggtcgagtatcattcgtactcggtcgaagaatcgagcagacatgcctactatggcttcgtcatattatgctccaagcannnnnnnnnnnnnnnnnnnnnnnnnnnnnnnnnnnnnnnnnnnnnnnnnnnnnnnnnnnnnnnnnnnnnnnnnnnnnnnnnnnnnnnnnnacggattgcgcgtggatctccttg

SEQ ID NO: 46598 - DNA, 1607 bp, Arabidopsis thaliana landsberg
aacttttcttgtaagcgacatgcacgtactgtgtcaaattttgtgaatggtgaccagataatgtgaaagttatttgtcaaataaattaggtatatgacatttctttctgtttttttttttttttcaaaatcgtttttggaagcccaatgtccagccgtaatcgtatattttcgtcgtcgttattaattggtaggaagaattaaagctgtcgtatattttggttttaaaagtgtagcaataataatttacgttagaatgacgttcttcatatctaccctataatcctacttccatcctcagacaacccatgatcaattatacgacccaacagataccaaatgctaagtattaatatcaatcacggtattgacaaaaaaagggtatattaactacggtattgatttactaagttatataatccgttgaaattgaccacgacactatgctaattcattttccttgacacatatatgaaatgaaccaatcaaattctaagcgtggaccaaagtcttcgtgttttatgtctctcaacttttaaaatttcggtacctataaggctataacttttttataatatagggtttgaactgaagatctgagattgtagaaactatatacgcagtgtacactagaccgaagaaaattcaagtaatatattatataattgtacttcaaataatgtgcaaccatatgtgaacgtaaatatattaatcggaaagaataaattaggggtgaaccgagaggaatataataataatgagatttgtacgtattatgcatggggttgcatgcatagtcactgcagctaagtaatcaatcagtatggcccaatagtttaggtattgaaaccacaattgcatattatattattcgtagtcacttttatatcgttttttggtctgacattattatattaccatgaggacaaaaagtcgtgctcgcaatttttttataataaaaacgaataaagtttggaccagggcaacttcgtggaatgtaggttgcttctcgaattaaaaattaggaatttcgtttcatatgtgatgcttgaaaattagttattttttactttggggaattcagtgatgacacaaacaaaatgtattcaatcaaacaatgactgtggaataatgtttttgactgaaatttaaaacgttattattgttcttaatcaaaatctctacacacatcattttttttttttttggagcaaaactgcaaacatcacctaaaactctaaattttagtttttcttccttctgttttttttttttttcataagtaaaatgtccttctaaatcgatattttttttgttattaacgatcttctctacaacaaaatccatcacccaattaggccaattggactctactcttcccaaattatctatagaagatgttaattagtgttaaaatcattattgattgattgttgaggattaaaaagaatagaggtctttttacattaaaaataaagtaaaggggtttccgtgcaacaaaagtattacaaacccatcacttattaggtttccgttttctcttggaagtagaagacgactagactattcagcgaaatcacaggaatatgtatgatgtgatgtcggatg

SEQ ID NO: 46599 - DNA, 739 bp, Arabidopsis thaliana landsberg
  unsure (1)..(739): unsure at all n locations
tgattgaaacttcaccttgaagacccattgatttccaattgctttcttattcggtggtaaggtttcaatcgtccatgtctcattttctatcaaagcaccatattcagttccaacagtagatctccacttttcttcttccatagcctttttaaatgatttgggttctaagttagaaacaacgggtgcaacataagcaatatgttgttctgaaaaacgatgaacactttctgttgattgaatcggagtaaatgctttctcgcttatcatatgcatctcttccggttgcttagtcgctttaactgtctgaggtaccacaaaatcttttagacgtacggcagctgtccgttgtcttttgcctttgcccaattcttcagtcgctggaacaagcggaacaacggtggcagtgacgactgacctcgtggatgtcgtaacaggacatggcgctattggaacaatannnnnnnnnnnnnnnnnnnnngaagtaggtcgagaattgtcgtgatttgcaatttgggtggaagacgagagctcacgtggttgttgacttgaagaaccaaattcacgtgaagtaggcctttgggtgttgggccgtgaaagcccaatatcttctaataccaaattttcagcaatcggagcccacaacttatttgcatcgtcttcaattagcagagaagatgtttgaagcagaggagcaaatggaaggacggattctggaaaaacaacatcacgagaggcagaa

SEQ ID NO: 46600 - DNA, 961 bp, Arabidopsis thaliana landsberg
gatctcaagatctgatcttattaatgtgtttatggtgggaacatggaactaaggccattaaataaaaacatgcagattatttttcactatatagttaatcagaatttggtgtttagtaaagcgtgtgtatataattgtctatcatgattaattgtagctcatcacaatattcttaaccaagctggatctgatgttgtaaaggctaaatcgaagaatgatgatgaagaattatgtaagattttctatttatgaaatttttagattcttcaagagttatttatcatttgttgaggttgttgatatattgtgtcttgtttcagctgctcatagacatcaaatgttggaagaaatcgaacgaatttgaaggttgtctcatagattatatttatctagcaaacgctattattttcacgtacttcacttataaaaaaaggtttgttaatctgacttcttttgcttctcctacttgttgcagctgcttcaaatagtcttaaacactaaagagtgatgaaataaactccaaaactgatcaagaacattgtaaaagactctttctcttgaatccattttctccttgccatagtatgatacattgaaacaggatctgtgtcacttgttacaactacaaagaggcaatgtttgttggctgttattgaacgtgagtttgaaggtttatattcttacaccatttttcttaaatggttactctgttttgagattagctcttgaatgtaagagtctgctttgtctttagttcatatcctaccttagccgctacacaagagctcgaacaactaaaggttaatgacttcaccggggacaaagacgaagaagaaaactgtagtaaacatcttcaatttcagatttctctgttcactttgtctctatttgagaatttgggttgctgattatgtgtctatggtacagatgcaaagaggaaaaagtatctttgaagctattg

SEQ ID NO: 46601 - DNA, 747 bp, Arabidopsis thaliana landsberg
ctgttaaaagaaaaacaataattacataagattttaagcttgtttgattgactaaacaacaaaacacttcttaatagtaattgagattgtagatagcgagaattgcaactaaagctttaaagcactccatctgcaaatttggataagatttcacgcgccactcttctatgcgttcgttataccacattaaagctccacaatgttcacagttgtagattgcatccccattgtcatcatactcgtcagtgttatatagtgaattatgtgaacgtgacgatgatgcatggtctgaaaagaacaaataacattatagttaaactctgaaaaatttattagttaggatcagatgatgctgaaaagtatgtacctttagatggagcttctttgtaattatcttgtcttgattcttgcatatatggttccttatgcacgtttgttttccttctacttgttgcagtacatggaaatctgttgcccttgcccttgccgttctgtgtcgtctcgtccaacttttggtccaagttagtacttggagctgaagctgaaaataaggtatgatttccatgattcttgttgaaaactaagttttgacatgattctagttttgaacaacattcttacatgattctcctttcttttttttctctttagtcttctttataacacacattcgttttattcttggagatttacattttacccaaaacattttaaaataattgctgtgaaattacaattattgccaag

SEQ ID NO: 46602 - DNA, 577 bp, Arabidopsis thaliana landsberg
catgattaaagtaatttctttaaacgattaaaataattaatttcttatcttctagaagacgtacatcctccgaatatctcctatggttgcagcggttaatgcggtcaaatctctttgtagactaagctgaatttttatttactatttataaattgtgttttgtaggcagagttttttttttttaaaagtttattgtggattaagcacgaaccgctttaacatacaaatagagttggtttgcgacgcgacagtttattgtctgcagtaaaaatagaacacattaaaccgttgatgaatatgtccatctcgactattatcaccatttaaacccgaaatggtaacgtatacataacaaatttatgatatactgataaaattatcgttgataattagttggtaaacacttagttaattcatcgttaatttaatgacgtttaaatgatatatttaatgatgattcgaccaaatttactatcagaatgaccaaaaaaagtgaactaaaccgctaacaaaacagatcactttatttttgaagcagacaacaaacagccgcagaccaagttttttttaatgtaaa

SEQ ID NO: 46603 - DNA, 152 bp, Arabidopsis thaliana landsberg
ttttcgatttcagaaccaacaatctgagttctaagaaaaagaattagttctgccacgcaaaagacattagtgttttttcctcttagttaatgaaacggtcattctagcaaagaagactatatagctgcagctatacctcccaaaaccacacc

SEQ ID NO: 46604 - DNA, 664 bp, Arabidopsis thaliana landsberg
cgactgacagtccaaatgactttcaactctttaatctaaagtttaaaccacaatctaaatccggtttaaacgcagggacgattgcatcattgatgatgtcttatatcacacacatagattaggccttagggtatcaaatagtgttttaggtgagaaaagcagttgtcagattttgatttttaagaatgcaatcatttgacttttagtttgacttccttttggttcttcttagccactctttctcatattctacacgtgctcattaacgttccaaagtcaataaaaaatcacgaagccaacaataaaatgtgcaacaaataatattaaacatgttagacagacgaaagagaattattctttatacgtatttaacataatgtgccttgtcggttaccaaacaaaataaaatatggcttgttagtggtcggtaatatgtaacacgttgtgtgtttgttgtccttgtcaaaccagcaatgctgcttaatttatttagataggaacccaagtttaaagaagactttttttttggtcaagtaagaaaatgtcaaaacctctgaaactttctttattttgtttataaatacattactccatgaatacgaaacaaagatcttaatctcacaagtctcacattttctaggtggaccaaccaaagcccaaaatc

SEQ ID NO: 46605 - DNA, 1077 bp, Arabidopsis thaliana landsberg
gacatggagtggctagactattttttggaacaatatttatagtccctagctacttgcatgcagcacatggtttaagggttcttcatcgttaagattaaactaatcacatgcttgagcgttttatgttatacttaatttaactttcttagtaaccatgtgggcgtgcaaacaccttttgaattattaactgtctttttaactccttttagtattttgttgtctttcaccaaatccattttcgaatgcttaattaaattggatgtagaggaccaatccttagttaaagcatgttgaggaccatatcttaaaatgatttactttatttcgtgcacacgtcgaaagtaaaagcggtgtgcttgtcttttgctcccaactatcaattgcgtagaaatatataaatacggaaataccaatggaaccgaaagcctaaagtatatataaatataaaaagacatgaccgcaccttctttgaaatttcattcatgttacgagagattagatccgtggttatcatgttatgaattcaagagtcaacatgagagatgataaaatcaatagttcttgagtttggggcgagttatagtgaagtaagcacccgataacatctctaaatatgaacagaggttgccagaatgagactaactttctattattctcataggcctcgagagtcaaaaaataaccaaacataatttccaagcaaaaatatacttacggttagtgataaaagtttcacgaatttgcaagcagcttctacacaatcctaagcaacaaattaatataataaaataaacgatcccgtgaaaaacatatatatgaataaggcgtgacatatatgtgatatctaacatcatgcatggataatacgtcctattgtattaataaaaataattatattaatacgagaatcatcatttaacttcttcaaaatttccaaacattcgattgtataagatatcattgacatgattttacggattaattcttaattaaatttggagttaaattggtaaagtaagataaaatatatattcaaaaacgaaattcttaatattttctcaaattatgtttggttta

SEQ ID NO: 46606 - DNA, 204 bp, Arabidopsis thaliana landsberg
tcaaatatttaattaaaagatcctgtttctaaatatcaaaaacatttttttgttgccagtgccaccagctgtgagtaaatccgagcgccagcattgatctcacaaagcggctgcgcaaatgtatatatagattcataagctaagaaaaaaatcttcgaattatccattcattgccattcttatcactaaagaaaaacttacttc

SEQ ID NO: 46607 - DNA, 319 bp, Arabidopsis thaliana landsberg
tatagctagaggaaccaatcaaaatccctaactttagtagagtacatattttttttttctcattcccccaaaatgtaattttttttaactgatgattgaataattagttttgaacaaaaaaaaattcacaaagctgaggagtttcagattcatgtatataaactacaaataaaacaaaaatagtcatagagaagtttaaaacaaaaaaaatgttatgtttaatatttaattatttaaaagagctgcttatttagattacagggacaaatttagttgtgaaagtttcacaagactgagtggctcggtaacaggtgtggag

SEQ ID NO: 46608 - DNA, 582 bp, Arabidopsis thaliana landsberg
tggcttaatacatgatttgtatttttctacacacatgtttacattatttcgtataaaaatttatatgtaacgtataaatggagatatagatatcccgacaaaaaaacgtatgaattgaactgacaagggaaaaaaactagataccgatatgatgtatatctaaaagtgtgtagattgattgatatgcatacttatctttgaggtaataagttatcagaaactaggaaagtgacaatagaaccaacattaataactagaattaacttaaaattttacgtgaacgtgtcaagacatatccatgtgttcgaacgtacgctgcatgttttggtagaaaaaccccaaccacatgacaaatgcatataattttttgttgtataacggacgcatcattaatgaatttccagacttatctagtaaatttcccataaattcttgctattttttatttattaattatagggatcccaacaattatagtacttatgtagcaaaaagaatacatatgatgaaaaaatagttattatataataaacatatgtgtactttttcaatcattttcttcaaaaagcaaaatactaataa

SEQ ID NO: 46609 - DNA, 639 bp, Arabidopsis thaliana landsberg
agaagggcacccggggagatttcctttaatggggctccgtctgtaatacatcattgctccaatttctttcatccacagaacatgaagagccgtcgtcgcccatgttctcttcaacaatttgaaatccctgacatgaattttctatatctatatcatgtggtagtctggtagatgaaattacttcactcataactatgaaaattacgtgatcttaatttttcatggggaactcgcagtttaatttgtcgcgcagatgccaagattgtatagtggcatttagattttaatatatttaaaatcatgtactgtaacatatatctttcttatacatgtctaaaacggtgaagtgttgcacatggtgagtcccataacgttgaaacatcatgttaacaccaggttaattctgtatgtgtgcaattaacatgtgaatatatatttatatattcctcatcatatatatttgtgtttgggcatataaatatgagtcaccacctctatctctttatccattaagtcaaccagagaagcaaaaacacagtttggcaaaagaagacaaagatgtccgagatcaatgggagtagataggggaagtggtaagggtataaaccacatgttaaacaaatgttggaggttaggcaa

SEQ ID NO: 46610 - DNA, 1038 bp, Arabidopsis thaliana landsberg
  unsure (1)..(1038): unsure at all n locations
tgtctatgtagttctataggaagataatcttctaatctagttttgtaaagaaagctaagaaacacttatgtattatgggatatttgacattgttgtactctcttcaatatcacagaagctgcagcatatggtgaagatgataatgagaatgaggttattccttcaactttgttgttatttagtcatctgctagcttttctttttgaattaccgagttatctgacaaatactaaatccatcagtctcttgaagccaaagcacagagagctctcgattgtccttgtatagcagatttgcgtaatggctcttgcgggtctcagttctccgaggcattcctttgctttctcaaaagcactgctgaagaaaaggtaaaccgtaactaaacatattaggttgtttagaatgatgtaaactccactgaaatgctctaagattgacacattgatgacagttgtttctctttcgtttacgttttgtgtccctttagaagaaaaccttcacaaagatattggatgtgttgttgttgttgtaatgttgttacagggatcaaactgaacatattagattgtttaggatagtgtaacctcaactcaaaaaatcataaacattggcgatagttgttgttttcgttaaatggtttttgtgccatttagcgaagagaagtttcactcaaggatattggatgtgttgttgttgttgcagggatcagactgcgtgaatccatttgtagcattgcaaagctgtatcaatgccaatccggatgcattctctaaatcagttacaggggacgaaaaagaaaccgagaaagagggagcgcagcctcctgtgctgggccatagggtcgtccctcctctctgggccgagggcccgcctcgcagtggcaattccgagctttagcgtatcatcagctatggagtcagcatcagaagctagtctctcctcttttggttcttttctctagacgacccttttcgttatgtcnnnggagagtnggagnccaaaaaaagtggtcgtgtagatcnncnttgttctttcttt

SEQ ID NO: 46611 - DNA, 155 bp, Arabidopsis thaliana landsberg
aaagaagggctctcagcatcaagacaaaaagagacgggaatcaatacagaaatcgtagaatcgcactgcaatgatctttatacctaatagtaccttacactcccatagattgtaatcttgtaactgtgagttgggtctatagttttgataatgac

SEQ ID NO: 46612 - DNA, 1025 bp, Arabidopsis thaliana landsberg
ttaacaagttaaaatatccaagaaacctactcactaatcactatagctttttgccgaccataaatactcgacccacctcttaaatttcattcatctctctggacccaacttaaatcacttttcttcaaatttgattttttaataatgggcttaagttgtttatttggcccaataactatgttaactgggctgagtaaacaatatatacaagaagtctaattatatttcaaaaagactcctctctattcataaagattagattcatgaatttcaattcgcgatcgaaaaggaaacttatttttggctaagaatgtaaaaggaaagcttagatacaatctgagaaaatatgtctaaatacagggacttaaaatgaaaataagtaagagttgctggagcattaccattgccaaagtaaagtacctaaaaacgatgaacggagagtgacgtaaacccgaccgttgaaagcactctttcaagtcgccgccggtaactctaaacccgccgtaccaatatttcagtaccctccattaaccctcatcggaaagatcttcactttgccttcatctttctcaattcctcaatccttactctctttcaggttttgctttattctgttaaaaacttaagctttctcaatttcctgttgttggcttcttccggtgaatcaaaattacgattcttgtgctcaaattagttacataatctaccttaccattaatttgtttatgttttgggtcacggagcatgattgagatgtgaacagattagtgttgtgtttgtttagtgtaatgttcgatctgtttccatgttttgtctgatagtgtcgtcttcaatcacaaatctgtaatcttttgaattaaaagtcaaaacatgtctgaatttggcagtgcctttaatgtgtgtgttgtttcttaaattgtgcaagactagactcagtccttttctccgtgggatatcatttaatggggaattaagaatcattagttccagtttgttggtttggttgcgccctgccccccaccccg

SEQ ID NO: 46613 - DNA, 708 bp, Arabidopsis thaliana landsberg
aaaaatttatcaacattttccttatgatgaaatatcatttccctctctgataatcccacttttatgtatgtttcacaaacatggttgaaacacattttttttattttttcgaatatgtgtttccctaaaatgttgtcgtttttagtaaacactattttctcgttttccaaaaacaattttcattcacaccaaaaagaaaaaatattttgataaatatcaaacttatgaataatatactgttcaaacctatattttagttttctttatatataatgtcattaataatgttataatattttgcactaaatttatataaagcacacaatgaaaatattttctaattaactgtttgttttctctgtgattcagacgctcaaaactaaagccgacattgttgttgctaaagacgagacatgcaactacaaaatggtaacagaatcgattgttacagagagaactctcctattctatatttatatagattttacttatattttgttcattttttgcttaatttttgcctatttttgatcaattaccaccttgttctaaatcatttctggcacactacaaacgacgtggtaatgggctttattctcaagcacatgtttcttaattatcttaaacgacatcattagctacagaggaattagggttcgataacgacgtcgtttcaaaatctccttaaaattctaaaaagaacaaaaa

SEQ ID NO: 46614 - DNA, 927 bp, Arabidopsis thaliana landsberg
ctaaaatctttttagcaccaactaaggggaccttttattaaacaaccgggtttctacaatattttttgaagtatggggtgaaatgcgaataaagcattagccaataaaaccgaggattttaatgtattgccatcataaaatttcgaatcaaatcatatggaactaacgccatgatcatttgtatctgagaacttagtaagcatcttttccaaatcatttgttattagattatctaacatttacgttgctctaataaataagtatccaaaaccctaagaataaacatcaatcattggacaaatccgtacgtatacttacgtaattaaattcagcaatttcgtgtgactaacattgccatttgacttttacgtacgtattaaatcaaccataacttcgggcaagcattagtaatttactaaatctagttgtggttcgtcttgcagccagcacaacattgactctacaatatctatataataataacgcaggaatatatctgcctacgcaaatacttacgcacacgtatgtgatgatcatagaacaaatctaaactcatcatcttatctaatttgtgatttgatgaatcgtttaacaaaattacttattctttctaccgaaatattaaatcaacaaaaatataattgcatgcttatctgattatatatgaatttatctgacaggtgttcaaaccatattagtaacgtggctcaaaatagcaacaccaaattaacgaaaaagaatttacaaaaatcgagtcctaactcttgactcctgcgctcttttctgaagttttctttcttttcaaagaaatttatagatgacattgaagtcgttttcacaatctttaagacgtgtcaatgtatacactttaggatcatcgcattaataaaagataaaataattatttaatgactcaaactctattgt

SEQ ID NO: 46615 - DNA, 597 bp, Arabidopsis thaliana landsberg
  unsure (1)..(597): unsure at all n locations
tatatactttgtttcttgagcatgcatctcttattagccacaagaatatgagcttttacttagcttatggtggcttagctagatatgtcattgctgaattcgtttagtagtcgagacaatgtacatcatttttacttgttaaagcttgttggtccacaatcattgtggctttctttgcctaattttgcggccgcattaaaatgtgtcctataaggtgtaacgtatggtttaatttattctcctactgcataaagtgtttagcgcccgataggtcgncatttttctagtaaagattaaagccagaacgacagccttggggctgcgccatgtctagcctcgttgaccgccctctcccatgaagttcaatatcaaaggcaaaagctaagaatgcaataattcctatggtgtcatttgatagcttgctatggaacaagaagcaagaaaagtacaatgagcacaagaaagccaagaaagactcaggttacgttgtgattgtcccataagattatgatatgtgggcttactgtaatgtgtgacacttgtttgtatttgattcagatcctaaaatgaggactaactttagtccagcaaatttta

SEQ ID NO: 46616 - DNA, 643 bp, Arabidopsis thaliana landsberg
taccatattattagtaaatttgcgagaaaaatataaagagcatggtttttttctttacgtaaacgttcaaaattatcagggcggctctaaacatgagatagtagattctaattctcgtcatgagatcgtaaattctgattgacaacaagagataggagattcctgtttacagtatgagattgtagatttcattcacaacatgacatcatagatttcaattcacaacatgaagcaaatcattaattattttcaaatgtcataccaatctcgtcttctcgaatgtttggagcttcatgaccaacctttgagtaaagaacattacaaagtcgtaatcgttttaaaaacaagttaaagatttcgtttctttggatgattttatgaatagtataatacaaatttacacaactcaccacataatatcctttgaatgatccaaccaatttcagatggagaaaatctagttgcatgagtatctacaatctaagacacaaagacatagatggatgatcctaagggagactgaattcttgtataatggattcacaatcacaagaaacaaggagagaaacacaaatgcgcgactttatgttaatgttgaacgttatttccagcttaatggacttgaagaatgaccatcatgtgt

SEQ ID NO: 46617 - DNA, 1144 bp, Arabidopsis thaliana landsberg
attcgttatagcttgagttctaaattgtgctaggaaatggtactgtgtttctataatttactcgtttaattaatgccagttggaaatggtctacagatcggtggaattggtaaggttactgaacatattttaaaggatgctttgggaattaaaacatgtgaggagatggtgcagaagggatctcttctctacgctctcttctctcagtcatcagcaggtagcagcatctcctccttcttgttttactgttcctttcctgtaaaagattcgtttgtttgtaggcattacttgtgaagtcaagtttcacatgatatctttaatggatcatatcatgcttcggtgattgctcgacaaaattttgtagacttttttttgtcggttggactggggcttggaggaacaaacacccctcaggttaggtctcgtaaaagtattagcagtgagaggacatttgctgcgacaggagatgaaagattgctatattcgaagttgggtgagtagtttgcgcattcgtgtttttttctctcataagacgtacataactcaataatcaaaggcaaacaaaaggatctttagaatttaacacagtaaaggattgtttaatgagactacttgaaatcatagtttgttcctgggatactgagtaatcttacatcaacctgtttgccttttcgacttaacgaatctatatttgacataaaagttttgctttgacataattcacttgaattgttatctctgctgttctgggcagctgaacttgcagaaatgctatctcatgacatgaaaaaggagggcctaacagcaagaacgttgacacttaaactgaaaactgcctcctttgaggtgatcatctaaatttcattttatttctccctgtttggaaatccatctatgtgctgaaactgtgacaatctgctatgctcagatcaggagcagagctgttagcctgcagaggtacacgtgttcaagcgatgatatactaaagcatgctacaaagctgttgaaggcagaacttcctgtttccgtaaggttgataggtgcggctctatagtgttcgtcattcttctttcgttagaaacataatatgaaatatattagcccatctactaaaattccagaactcgatctatgtatatgcagg

SEQ ID NO: 46618 - DNA, 766 bp, Arabidopsis thaliana landsberg
agaaaaagcttgtatcacaattttccacctagtggtatttgcgaaggatctcaagtgaaatcaccaatgcgaaatagacaacacataaacagagaagtcatgaaactcacattgtggatgttgacgatatcacgagagttaacaccagcgtgaagtccatccagaagcccttggacaaagtcatagaagtaatcaggatcatcgcaaaccgagaaagcatgaacctgtacaatgaatggaaacttaactgagccatctgtcaacttcacagtgagtgaaccaactaaaatttaaagaatataccttggcttttagagctcccaaccaagaccccaatgaaataccagcaattgtaccaccactagcaatccaaaagaaaacttagatgagagtgaagcaaacaaaagtaaaaggcaagaaaaaattacaaggaaagcaaaagcagaacctgccacatgctaccacaatatcatcaaatttcaggtcatcgggtctactattcagctgctcctcaatttcccttgctgcttctatataacccctagacgatcattgcagggaattcagctttaaatggtctcaacaatctaaaacaagtaataataacaacaaaccggttactgcacttagctatatcaaaacagtatctatgagaacacagtctcaccaagttcccaaagagttcgatccaccgactggaataacataaggtttctttccttctttttccagtttctctttagagcattagtaagagcctcccatt

SEQ ID NO: 46619 - DNA, 824 bp, Arabidopsis thaliana landsberg
  unsure (1)..(824): unsure at all n locations
ctctaccgtaacttaatgctctgtttggtcaacaacttcaaattacctcaaatgccaatcccaaaaatattgtttttggacaatgaaactcaatttagtttgaataaatttgggtattttaactactatctctctaaaatagatgtttcctcatttttctacacttaatcactcttttaaatctatcttttctttatacaataaataccatagcacaaataacatatacattattttcacattaaacaaacaaaaaaaactagtgatggacaaccaaaccaggaaaatgacaaaacattacaagaaaattcacaaaagcaaagctaatcttagaaaatcctacctggcaaatccctcttcaccatcatgtggatattaataccgccacgtgttcaattccctctacacgtgtcatcttcccgaaggcattctcagatcgcgggcaaaatcctttctcttatcaacaaaaaaaatctcaataaaatacaaagataaaatctcaaactttcttctaaaattcgttttccatttttcttcactctctttccggtgacgccatgaacgccgccgtgtttagtccttctgctttatctctccctatctccttctctaaaacccgatcctcttttctctccagaaagaaggtaactttttactcttcttctccacttttggcttcaaactctgaaatcagtgtcaaagttacgtttttgcgatatgggtttagtaaaagtttagatttttaagtgattgagtgattgtttggttacacggcgtgaaaggagaatttanggtatttgctgtgtttggggatgagagtggat

SEQ ID NO: 46620 - DNA, 562 bp, Arabidopsis thaliana landsberg
tgaaccatttctgtattcggctaacaaagatacatcatcatcatgctcgagtatatctatgtgtgtgttatatcgaaacaattaacagactggatataaagaagaaagaaaacttacccgaaaccttcttctgaccagccagctgtgaaaattccctcagcagtggtgaaaccttgttcttccattccagagaggatcatagtagccgcagctgcataagtaacacctgtccatatctcacgagactgcatgcacgtgtcatccactttcccatccggatgcatcccatttacagcacccattttacctccttttgtcttcatcacattgaaatcaaagatcttttgcatagtgcttctgattttggattcctcaaataatggaggcagacctgaagacgcggcataccattgacccgccagctgatcggtctgtatagatttgctgttgctgcttgacccactgtcgtaattgaagtatgatccattccagagtttcgtttccagtgctgcctttgcattcaaaaacttatttttacaaagttctgcaaagaatttgtcac

SEQ ID NO: 46621 - DNA, 142 bp, Arabidopsis thaliana landsberg
ttggttttttgggggtgatagcggaaagagttgcctcaaccttcgtgcgacatgcgctcaacatgcattgtttttaatcatcgcaccaccgcttacatccacagccagtctcctacataacctaaataccgcgcctcctaag

SEQ ID NO: 46622 - DNA, 282 bp, Arabidopsis thaliana landsberg
tgtggacatccttctcactctcttttatcttttaccattgttgttaatcgtaaatttggtcattaacagattctttcaatatatataaccattcggatttaagcgataaaaatgggacaagtattattttaaaaatttgttgtctttaacacgaatctagttcgtttgcaatgaaaatcaaacatattcttgaacttagattaattgatctacgcctttctcaggttcaatttatgtaaatccccattacatgcgcgtcaaccccaccaaattatattatct

SEQ ID NO: 46623 - DNA, 1159 bp, Arabidopsis thaliana landsberg
gaatccataacaattacggtcttcatccagaaatcttttcccaaaacaatttacatttgaagtccgttaaaaaaaaaacagcatcgtgcaagaccaagagaggaaaaccttagacaaagttccaacatctcatagtaaatccaacgagggatcagactaaaaatcagaataagaaaaatcccatcagagtaactatgacaaaaaagcatcatatggataataatccatagccatttattaagtgttcatcatctgggttttgtaaaaccttgacaatcattcaagaggcagttatagtaccaaaagcctatagtttcaagtttaatgtaagagtaaaactgatgataccttttttccaggacgtacgagccttagagcaacatcagctgcagtatttgcggcagcgataacatcagccttacgcccactaagaggcccttcttgaagaacatgtgtgtgaccaacaagggcaatgaacccatcaatatgacatcccatatcgctgcaattgagaaacgcaaaacaacatcagaaataacacaggtgaatcatacagaaacatctaaaaacaggtattacttgaagacaacttacattttaaccatgtcaccatcttccaacacagactcatcactagcaagcggtgaaaaatgaccaacagtgttgttcacagaaatgcatgtagggaacgcaacacctctctcaatcttcttcttagaattcttgaacatgcttgctgttggcctttaatacaaaaacagaagaaagaccaaacacatagatttctaagagtaatccaaggtcgaaatctacattaagaacaaattgagatatactcactctttaataaaagagtctcctttctcacagatatcaccaatcttagcttttggtttgcattcagctaaaacaacctgtaacgcctctgcaattgaaaacccaacagaaatcaatactcgataaagctacaccttcaaaaccctaaatccaaatcggacttaaaacaagaaaggaagaaagagagggtgtattactgttaacgatctcagcggcgctcttgtacttggtgacgacttcaggagaggtaagactcagctccttctggtgaaagaaaggggcggtactcatctatgttccctctcgagaatcgaaacaggga

SEQ ID NO: 46624 - DNA, 497 bp, Arabidopsis thaliana landsberg
tggattcagctcaaacgctggacatggaggaaagtgtggcaaaagatgcgatccaaattctagaacgagtggagccaacaacctagcgctcgccttacaacgaccctacggggcgatattcgcaactaccgagaggctctagaggaagctagcaggagtgacggccagctggcgacgaagctgcgccagaacgaagcgtggtttgatgagatgcgaaacgctgtcgccaacgggcaggtcgaccagctcttctccaaagcggtctcacaagctaaggctagagggagcaacgctgtcagcccatctggaaacgaaccaaacctactcgatgcggactttgatgaaactgggccgacggtcgtggagcaaatagcaagggttgaggaaattcttaagaagctcaatttgattaagagagagaggaaccaagttctcaaggacttgaaggacaaggtgagagcttcatctatagttttatgggaatggtatagctatga

SEQ ID NO: 46625 - DNA, 586 bp, Arabidopsis thaliana landsberg
tgcccccttaacttcccgaactctgtctcagctttttccttaccttcaggtttactttccccagaacttccctcaccaaccgattgtttgttcgctttcacttcatccacgctcttgctgttattgttgttttccttcaccacagcctcattatcccttgccgcaacatcctgcatacaaacatcttctgcagctacatggttctcctttgtttcaccactagtacgagcatcagatccccctgtatcatcaccatcactttcagactcattctccacaacctcctcgttagcatcttgagcaaccatatcccgcctctcgagatactgtaatcttctcctcatgtcacctaactccctttccatcaaaaacaacctttccttcaaagttaaattctcttcctccagttgagcaatatggctatcctgatcatccactcgattttccaaaacattgttatactcagaaccaccataattcggataaatcatctcaaaccgactcaaatcatgatccaatctcctctcaacctcaacatgctcctccacatcactctcactcgacccgtccttcatattcatcatcc

SEQ ID NO: 46626 - DNA, 1245 bp, Arabidopsis thaliana landsberg
gagtggatcaatatagatatgtgtatgagagaataagttacgattattaaaaagttaaattggtctgagtcatagacacaactgtggaaggactcattgatgcagttaagtttcttttgtttcagtctgtcgattacaaaccctattcccttaaatcagcttttaccatttcatagctttactcctcaatttcaactctaccctactcctatatatgtatataataatatgagtgtattcacacatgtacccattccttttacttgcgaatatagcgtgaacaaactatagaggtaaaataagtaataactctctttgttccttctgagaaaaattaacatgcatgtaaatgtaacaatgtgacacgatgaatgtaataaacatatgtggtgatcatcactcattcacatcaaccttgatatatatatacatcagtgtgttgcatataaacaacaaaaaaacaaaaataaatgcatactagctccctatgtaagcacatacataaaaattaaaatcatttaagcagtgacataacatcacatgatataggtgtgcatctatctatattctagagcataccaattcaagtaaatatccctgaatctcatgaaaatagcaaaaatggaaaacatgatacttgtttaaataagagggaaacgggtaagtactaagtaggggctaagaaaattagatgtgtttcaaaaggaaagcaaaacttttactatttatgccaataaaaagaaagttagggttcaattaccgattgctatattattagaataggctgcatctgctgttcctaaacaatgacaccgcccatctctattacacacctctataagcatacatttacttaactttttatagatatgtatagggctgtttattttaggtatgttttaagtaatgcaatttcagagttccctaggctggatagtttgggtttagtataagatacgcgtagtttcggtatacaaaagtattggctaatctctgaaaaaaacacaaaactaaaaattggatatgatttggacagatttaaaattttatggaaaattgagtaaacacacatatcaatcatcaatccattgaaatcaacaagtgataataaaaaaattaactctcttttttctcgttagttagaatcgaatggtaaaaaaatactactacacaatttctaattttcctacagaaggagcaaataattacctaaccttctaagtcattgagaaggtattgactttg

SEQ ID NO: 46627 - DNA, 745 bp, Arabidopsis thaliana landsberg
ccacaacaattaagaacattcaaaaagttaccatttgaaactgaagtttctcccaagagaagcttcacattgtcggatttcaaggaagcaacagtataatcgacgaactcagaccacgaaccaccaatcccaacagtatccctctgtttcaaatcaagtttttttaaaaaatccaacgtgagtaaaacctcaagtgccattgagattcagcaaatcaatggttaatcaacttcagaaacggagagaaaagattgattgagcaaaaagaggataagaaagagtaaacgaaccatatcgtctagctgcgagacggagaggatcgtcgtccagacaccggagatgaagtcagtgacatgaactgttaagttatacgaatcggaagcgtagacgtggaagagacatcgccggagtagacccgaacccggatccgaacgttcgggtacgacttctccaaatatgggttcgaatttcacgaaactcgccatgtcaagaaaaaagctcaagcattcgcgagtttttgacacaaaagtcttcttctcccgtaaaccggtctttaaaagccaattccatttatcaatttttaaccgtcccgatatcgtaccggatttcggttaagaaaaagattgtttcaatttcaatgttctcgtgtataattaaaaaccagattgtgattgttacagatgaatcatttactgacaaaccatctaaaacctatttttaagaactgaaactttgttatgtctcc

SEQ ID NO: 46628 - DNA, 2013 bp, Arabidopsis thaliana landsberg
gaacctgtagagtgcaaacagtatcagttgatgagaaaatcgttcctatggctgaatcaaaacaagaaagcattcactctcgcaaactgataagtaataaccatctcaacaagaaatgaaaagaaacatagatcagtgaaaaatcttaccaagatagtctctagcactcaaccccttaaatcccaacttgggaaacagccaccaagtccctggttcacattataaaaacaacaaaaatagagatggtaacaactccgagataatcaactttaaatcatatagtcaagtcattcaaagattaatgaaatattttttaccaaacgagataatgacagtggagatgaaaactccaatcacaccaaaggacatgatggttaaaaagttgtgaaaaaacttctttttcttaacttggaacctgccacaacaaaccaaaaaatcttcagtcaatcaccatcatagtgtaatctaacccattaaccacaacatagtaaccaaaaccatagtaagcttacccagcattgaagattattggaggaagaaggtaaatgaagaagagttcttcatcaaacaccaaaatatgtgaactttttcctttactaataagtaagatcactgttcctgatgctgctccctacttgcaacaaaaccaatcaaaaatagtgataaaattgttctttaagagcagaaaagctcaaaactttagctaaaacaaaaaaaagaagaaattttgaagaaacttactactaaaatggcggtaatagattcattaacccatcgattctcttcaagcaagtggccgataactaaacatagacagagaatggcgatgaacactgagattggtatcacctgaggatgctcagctgctagtttattcgtcacaaactctgttaatccgatactcatttttcactcgataatgttttcgatttcgtcgattttgaaaacaccaatcgcaaacgaagaaggcacacagagaacgatagagagagagacgaggaaagagtcagagagtgaggagagatttgaactgcgatgaacaaggcggtggttacaggtggcgaggagacgaaagacacgtggcatgtttccaacgtcatcagactgagtaaacgtgaggctttttggaattgtactgcatcttgggcctttttagggcccaaaactaactcatcatgtatttttttcttaccggatttggggatttttttcttttttcttttttgggtctaactaactcgcgtaaattgttgttctttttccttaatttatttttacctcttgttctttattctgtttatataaaattatgaaacttgaaaactcaatatttattacaacgaattatttggtgaagactcgaaccaatcgaaataaaacactatactgtgtaacggtcccggttgcaacagccaagacgctagaacgtgatcgtttcgtttggtcgtgttttgatgacgtaaaaagtgactcagcgacctatttcaccacgtgtaatctttaacgaccatgttctaggacctacctgacttttaatcgatcatccaccaccgccttctcaacattttttaagatactagtatcattatagctataatataaattaagaaacttgtaaatattataattaacgtgaaaacatagaattcggatatataatgtgtatattagataaataataaatctgctcatatgtgatatgtatatgcatatatcatatatgtaaatgtagccattattggaatgcgtattgggtaatgggtagtatcactagaatgatacaatttttcttatatacagagaagagaagaggaaacaagaaaatcaaatacgttccccgcagtagactttttatttgttggtaccgtagaggaaaacagatatacaccaattactataggagtgattaagggagaaattgcagggatataattgatatctaaaaacaaattctacactaatcctaattataacaagaccaatgattgacacatgtatatgcaaatgcaagcg

SEQ ID NO: 46629 - DNA, 712 bp, Arabidopsis thaliana landsberg
gtctctatgctgaaataccataaatcaagttaaactttcttggttacttacacaagagaattggaactcggccagattctgcaatatttctccctttgtttccccaccttcaatctcatatgagtcaagctcgccaagttttcctccaatttcagactccttctcaataatctttcaatgcaaaacacacacatatacaatcaagtttatacttaaagcagaatgtgaaatattaagcacaaattgagacgttcaacagttatgacttacctcaggtgacaaaacagtggacacagttggcagaaatgcgacaactgaatggaacttgttgtagacaatgcgcaaagcatcaaattcaacgttcttcaggatgtcatcagctagaactgacacctgaagcagcaagtaaacataagaaacactatagacaacaataaatagctcgagaacaaatggatcggggagagaaactattgctcctaactattagcaactaagaactacctgagcataattgagtgggttcttattcagctctgttacagagaggacaatgtcgttctttgagtcacgaaacattatagcctttgctttctctccgacaataacaaactgaactttcttttcaggacctggccatgatataagaattaatatccggatatgcaattcagggaaaacctaaacccacgggaccccattgtacgtggtt

SEQ ID NO: 46630 - DNA, 671 bp, Arabidopsis thaliana landsberg
ttgggaacaacgagtttacagaaagtataaattcgaattgctgcctattaatatattgcatgtaggtatgtagcaacatagttggattaagaacatctaaaaagcatgtgttaagtatatagaatatttaacattgtttttggttcgtatatatatctttaaaatgttttaaaatgattaagacaatattgaagatactttctttgtactttttttcccctatttgttgctgaaagttctcatttgtattattagaggactatgagttaaatcataagtgggtatattaatatacacaccgaaattttcgggattggaaatttgttacatatgtagagattctcttctacatgctgaagtgaatagtataatccatgttctttgaattcaaaatcactgatgatttttttttcttataatgatttttgcaaccaaatcaagaatgaatattgaaagtacgtacttacacatacacccatgttttataatactttttagtccatgattgattataatttttgtagatgcttatttctatttagtagaaactcataccaattctttcacaaaaaaagaaactcataccaattatatccatatgatactataaaaaatgatttccatcttttaacggtgctcaagaccgacaggtgttccctgtgctttgtcca

SEQ ID NO: 46631 - DNA, 583 bp, Arabidopsis thaliana landsberg
acctagaccttccatttgatgacttccatgaactgaatgaaaaaaaaaaaaaagcgttcttcaacttatcttacggagataaaagaaaaacattaagtttatcgaagaaaattaaactaacctcttcatgctcaatagtatgagcaagtggaagtataacctgccctccaaatcctccaactcgggcactacaaggccctactttaactgctgctgctagatacgcatcaatgttgttgtcagcccattctgacctatgctccctcagaaaccgaagcaggatcgccggaggaacattctgtaggtgcaaaatcccattaaaagaaggtgaaaaagtgttgaaacaatcatcagttgatctataaaaaaaatggtgcactgacctgtaaaagcattgatgcttttgcgcataaaacaacattgcttacaggagcaaagccattggcaaatgtaagatttagacccattagcttgtctggacaagagtttacagtgattgtgacatcatccatgctatctcctatcactgaccatccttcatcagtgaaaccatttacagcttcattaagcctctgtatcggga

SEQ ID NO: 46632 - DNA, 614 bp, Arabidopsis thaliana landsberg
catcgacgacgaagggagagaaggtgaatccgaggtggttccttaccgacagtttgtccagccacgacgcttccgatgagcacatgcaacccatgatgcggttgtccaggaagcggtcgacgcgcgacaggggcggaaggccggacgatgaccaccgacggcgcagtcaagctccgttttccaacaatggcggctccagttcttcatccgatgcgcacagccctgcacctagccggcaatgctcccaggcgcgcgagatatggatgaggatggtgcgctcggcttgaataaataccccaagatggagcccagccacggaggagatcggtcagacagatgctttattcacgggattagttcataacgaactccgtgcatggcactgggagagttttcgcgagggagatacgccaggcggataaatccctggccccaggcgtggttggtggcgaggccgtgcggtgcggacccatatcccctggaatcaggagttcaacggccgtccgaggttcatggcgccgcccgggcacccgcagtgtgtccggctttcatggagagggaggtgacagcggcaaggcacgtgcggctggggtacggtagtcggcgggtggttc

SEQ ID NO: 46633 - DNA, 918 bp, Arabidopsis thaliana landsberg
atttgtttcaactcttctcttataagactacacgacctacccatgcttttgtctagaacttcttctacatcttctttcgtcttcaactttgatctaacccaatccacgatactgttaccttctccaaattccggttccaccgatctttttccggtgattatctctaataaaatcactccatagctatagatatcactctttttatccacttgtaaagtgtaagcatattctgtaaccaaaacaaacaaaattaaaaatttagtcatatttgtcagatgttgtcatcccaacaaaaagaatgtttaacaaacggacaaaattcgaataataaaaacaaagggacaaaaaagtacaaaatttaaaatttggggaaagtaaagaataatcaaaaaaagttaagggtacctggtgcaatgtaaccgtacgaaccggcgacgacggacatggattcgtcggtttgaataagcttcgcgacgccgaagtccgccacacgcgcctcgaaatcggcgtcgaggaggatattgctaggtttcaggtcacggtgtacaatcaccggatcacaatcatggtggagataacagatcccttgagccactccaatcgcgatctgatacaaagccgtccattccgccgccgcggtcatcgtcttatccccaccgtgaagaagatcgtctaagcttccattaggcatgtattcgtataaaagcatcgtgcaatctcgattcgtgcaacatccaaggagacgaacgatgttccggtgacgtacgttccctagaacatcaaccttcgccaatacgccgctcttccgccgccggattttgccgttctctttgttttttccccaaagttttttcacggccattatttctccattaggcatctctgctttgtacactgtgcctggagatcccattccga

SEQ ID NO: 46634 - DNA, 761 bp, Arabidopsis thaliana landsberg
  unsure (1)..(761): unsure at all n locations
gaatggggtagagacaaaacaatgaaattatatgacaggagtcgcattcattccaatttatagaaaatgggcagatttattagtattactttacatacacatgtagtcatgtagatgtatatgagtttgtatcgtgtatataagcgcatgtagatcatgtggatattagtaggaataaaaacagaatatataatacgcatatttttaaccaaatcgcctatttatacattcgtatttcatagctattttgataatttcttcataattataccctacgtacatgttaccattacatgcaatatatatcaaactcacgttactcacctctccgactactaatcaagtacgtaatgggatttaattataagcacatacaaaagcatattttaacatttgttcttaaagcgaaacagaagaaaaaagaaatgcgagggaatatatgctagaacatgtagaaacaaagtttgcacatggattctttatttgcctttaatctttagagaagaagatacactatatattcattaaaataatcaaactttggatgcttgaaaagtagaaagaattataaagtgatatatgagatgatatttagtgaaggaatcattaaaataaaaaataaaagaaaagagagaacagagaagattcaatggtggcatggcccgactcgtanggcgtgagagagtgagtgaacttagtttctcgagggaagcgctctcatttgtattttactctaagaaaaaaatcgtgggtttgctttt

SEQ ID NO: 46635 - DNA, 412 bp, Arabidopsis thaliana landsberg
atattaggtggttgatatagaagaaagggctttcagatcttacaaaagcaaatacttacggcagatttagcttaccaataattaagtttagttagcttagcaggaaccttttgctccttttattcagtttatgcaggcatgttttagttgcatccatacattattagattggcttgaattaacacaaacatcatgtttttagccttacatatagccgcagttctataccaaaccaatcaaatcttgtgttatttcaatctaaattgcatctgcacaaatcgataatttgcatgttcaatcgagtaaagtgcatttggtcaggacattttaggactggtttttccttaatctcgttaattgactattacggggagcgatacaccgcatctacgtgccggaactgctggatatt

SEQ ID NO: 46636 - DNA, 715 bp, Arabidopsis thaliana landsberg
gttattggaggtgttgttgttgttggcggttattttgaaacagagtgggatgagatttacgcgcccattttccttttagtgatcgtgtgcttggaagttgaagattattaaaataataataattgtgaagttttttaaattttgtgaatatctacactttttacaatagctccactatgaaaacaaatttcaatgtttaattatcattttcgttgtcattgaacacataataatgtgtttatgtcagttggtaaaaaaagatctagaatggttttgcttgtatttgtaagattgtgcctcgaattcctttcatatatttcttgtctctttggtctatttatcttgttctaaactttttctctttcttgcgcaacaaacatctacgtgggtgaatttgagtcgataattatttggtaaatgtgctcaatgttaaatataatttttgtttgagaattgaattgaattatataaactactatcaataaaatcttctatagtttcactttatatccaatgaactttatatttctgcaattttaccaaattaatatgcctaatttaaaatttagatttatagaatcatatatataatttttaattttctacatttctatttttattcatctaatctatatgcatttaatttctttaattggtatagtttcctatgttgtattgttgattattttggtattaacatattttataatttttt

SEQ ID NO: 46637 - DNA, 994 bp, Arabidopsis thaliana landsberg
tatcttctttagtttattaccccactagatgtaaagaatcattatcttacctaattaatagccctcaagggtataagaaacttcacatgacatatcttgaatttccttcgaaaatttgataatacaaacacttttcttaacatcatatggttacaactattcttagctagctaccaagctcttgaatctttttgttaatgaccttctaatgtcttgactatctatgatcatacatagataatattccttaataatcggcttgaacaatgacaaatacaaagagatctcccaattgcttcttttaagaaagtggttccacaagttgtaatcaacaatatttggaagcagagaaagatttgccttcacaatcttcttttggttcatgtagcaacgatcttcaaagaaacggatatattggttcgcaatatatacaatcacagccgagagtgtatcatattttatttacgtcgatatttaaatatgatacccatgtataatatatagcaaatgtcatgtcgttattatcgacgaccgtcgttatttaattcgtgccatataatatggctactacactaagcatattaagtacctagtgtgctatatagaacggctactacactaagcactaagcaggcaagaagcaacgttattatgaatatcttaacgtttcgttaagaaatgtatatgccgtcagctttgtgacgattatgtaaagtgagggacttgttaagtatttcaacaaaagcatacaaatacagtgaaatgggccaatttcgtcaacttgttgggaaagtagccaataccaaactaaactgtagtttattggtaagactcaactaattgtaacttcgtgaggtctattatgttattattttccaaatcatgatattatcgaatcaaattaaacattgtattaataaagtacgtaaaatagttacaacttttatttttggcaattaagaatgaaatgttaagcccgtaaatcaacgtgtaa

SEQ ID NO: 46638 - DNA, 651 bp, Arabidopsis thaliana landsberg
tcagacttggccaattgcttacttacaaattggtggccaagagaacggaggagacgatgacgacgatgactgtgacgttgcaccggcggcttgatcatgtgcatattatcgtatgctactataaacttaaaataacagtcatttaattaagtagtaattgtgcttcttgacatagaaccacacacacacatgtagctgaagttgtagatcgtgcctgtatttatccatgtcgcaaacaggcttttattactagataaacaacatttttgactttcgagtgttgagagactagctagctttaagtaacaatataatgtatcgtgtgactatattaatgaaataatattacattatgtacccaagatttgtggttatagtatgatcaacactatataattctcatatccaataatctttcttttggcttttttgtttcctttttcgaattatattagctagaaattttaaattttgtgcagacacattgtttgtctcatcttcctttgctcagccttttgtggtctctaccgcttaggaccacttactgcaaatctagaaaattaaaatatatgactagctaaaatgtgaggtatattgagaagtgagttcttaaaactacttggacttgtttacttagaatttgagacatta

SEQ ID NO: 46639 - DNA, 578 bp, Arabidopsis thaliana landsberg
  unsure (1)..(578): unsure at all n locations
cccccccccccccccccccccattcccccccccccccccccctttccnccacccaccccccccccccccccccccccccctccccccntggtccgccccccaacccccccccccccccccccccccccccccccccccccccccccccccccccccctcccccccccccccccccccccccccccccctcccccccccccccctcctcccccccccccctcctcctccccgccccccccccctttttcttccccccgcgtttgttcgcccccccccccccccccccgccccccccccccaaatcaccaccacnccccgccccttcctcccccctctcctccttcccccctccctccttctctgctccctcctcccctccctcccccccctctctcccccccccccccttcgctctctcccccccccccctcccccccccccctccctccccccccccccccccccccccccccccccccccccccccccccccccccccccctccccccccccccccccccccccccccccccccccccccctcccccccctctcccccccccccccccccctccccc

SEQ ID NO: 46640 - DNA, 1237 bp, Arabidopsis thaliana landsberg
aaatcgagggatccacactttctcactggtattcctatctttttctcccaaatgcaaactgaaaactaaagaaacagagaaaaggagttttcccgagaaaatcttactcggaaagtaaaattgctgatcttttctcgatcacagagaaataagctcggttagatgagagaaattgtgcagaaaaggtcgaatcgtaacaatggaacacagattaatgagccctagaaaacagagagcgggaaaagacgaaagcagagagtggaaacgttaacgaagaagatggatagttaactaaattaattatcattattcaaaaattaatatttattttagtcccaaatcattagcccagcggcccaagcccattatcaatcaaacaccaagtattgctgtctgaactctttttttgcctttccttgttttctactctttccatgttaattaattacacttctggtctcctaattaggtgatccttcatatcaatggatttgaatgtatttatatgagatgatattgatcataaatgtctgaaaatgtgcttcaagttttggaaaaagatgtataacaatatcgttaaaaaatttacaaatctgagtattttagtgtaattaaactaactaactaaggaaatccttttataaaatagtgtttgaaggaattgaaacaaacattatatcaccagtctggttaattgtgtgatataaacagattaatagattaatacgtctctattcattattttactgtatggttctcttttagaaatggtcgaatgatttagtaacatataataaagaaaagtccccagagctttggtcggtcgaataaacataacacacaaataccaaaaaggcaaaaacaactcactgaactggttgcatatcttcatcttcttcttgagatgaagttgaagatgtcatcaatctccatgaatcataagaatgtgcttctcatcaagctcatctccgctattctgatatcttttttagcgttccgccttttcattctccactccagcgagtattcttcaatctatgaatgggataccggaaaagaaaaagcatcttttctgccgccggagattatcgtaccggagaatgaagatctgcttcctcgaggtcagagcaggtatatagaaagctaaggtatatgacttctatgtgtattgtccacagtgctggactgtcagtgactgaaccttgtagcgtgagaacatatatgcttgactatatct

SEQ ID NO: 46641 - DNA, 924 bp, Arabidopsis thaliana landsberg
ccaaaattatgccgataatgggccaacgtacaaatattagaaagagtccaaggacgaaacagatagtcccctgcaagaacatattgatatgtccatatgaaaggttcatcaagagaaacaattaacagagataagaattagtccaatgcgtaccctcaagttattaacatttgtaaatactctccaagtcgactgccaccaagaaaaggccaacacctatcaaccagaataactgaacacaaaagccaaatgagactcaaatgttggacccttgtgtagatttaatgtttagaaataacaaggatatcctcacgtttcctagagcgagcaaacctctgtcaaagtacaagatgactccgagaaacgtaaaggataaaccaaaaccaatgaggcccaacccaacttctgcaaacattcaggaaatggaagccataagacaaagaaaaatgaagtttgtgatttctattactgatttaattcctaaagaagagatataacacgtatataaagaaatctgacccagtatctaccttgatctgttcagtaatgtttataagacaagagaaagacaagtgaacgacaggaccgacaaaatgcttagaactaacgaaaatccgttgccaaaagagttgtacatcagaaacagcacaagaaaaagctatacagcgataattgtgaagaaataattacttttttgctcagttatttcgtacaccatcttggtaactgtagtctgagatctgtttgccagaggaaaaaggcaccattaagcaaaagctgagacaaattacttttgagttaaacaaaagctttaaacaaatgattcaaaagatgtagataaaaaagaacaaaagtgtcaacaaaatgttaaagtctcagagaaggcataaggaagcatctagtaacatctcttctaaaccattt

SEQ ID NO: 46642 - DNA, 675 bp, Arabidopsis thaliana landsberg
aagtgcactcttgtcggatcaatccttacattcaatatcctcccgcatgtggccctaatacagtcaatcatcctccttttaagtgcagatgaagtacttcctgtgtacaggtgtgttcccatatgtcaaagcacagctcttttgttttattttgacatgattgtgaatattaattacgtttactgggtcttctctggataccttcctcacattaagtgtgggaaaaaaatgtgctaaggtacttttttttttccactcgttcagtgaatcttctcatatgaaggtataagaatatagaatttaccttcactttgaacttaaattctgggtttgtatgacaggaatacgatttatgattctaccattggacgtttccttacggcggtatattccagctgttctgatgccgctgtcaaactaactgcagaaagtttagtgttggttttctctcatgctttacagagaacaaaaagtgaggagcttaaggtatatttggatctgtttcttctcataccttcacttcaatgaatgtctgatcagttctttttattatctttccgctgctgctttttcaacaactttatgggaaatcatatcgggaatttatttatgtaggctaacaaatgcagtgcgtacgtgcggattgtgaaatcttgtcctccttgtaatggaagt

SEQ ID NO: 46643 - DNA, 779 bp, Arabidopsis thaliana landsberg
  unsure (1)..(779): unsure at all n locations
aaggggctttgaggttggacctgtctgcgagcttcttcgtggcctgctctttctgagaccaccaaagcttcttccaacaagtcttcttctgattcgttaaaaagtctcggtgatgtaccatcatcatcgtcagcatcatcatctgtccccgttactcaggtacgaaacgattattatgaccttattgattatgtggttactgaaatgcttcatggaagtatagaaaagtttgagcttttgcatattgactatttgtgtcgtattgactataactgtttatcatagagaataatgtaaattcttggtttgtgaatgaatcttagcttaagctttttttgttggattttgtatactgcaacttcgttatctgaatgtttgttgactaactaggataaaggcagatgcgtcttaataccttcctgtcggattgtgatgcatattgagcatcaatgtataaaagtctttgagtagtttctgttcaaagttctctctttttatttactgaatttgtaatgtcgatacttaaatgcttattttgatgtacgccttcatttatcagtgtgttatccaactctcagtaattctatttatcctgattcaatagtaaagatgcttctttgtctttaatttagggaattgcaaatgcttctgttcctgcaccaaagcaagctgtccgtgcaaaccctaatccaactccaaatcactcgcgccagagatcatttaaacaacgaatggngatctggtccagctaatggcctgttctcaccctcagcgcgggt

SEQ ID NO: 46644 - DNA, 289 bp, Arabidopsis thaliana landsberg
ttgttcttctgtgccaggccgctctcatttgacgggctgttgcaccttctatgcccagggccctggtgcactgatccatttcactgctgccgtcgtacactgcttgaaatcgcgcgtctggtaccttggtcaacttttccgctctgttgtgatgctgtagtagtacttcagttcccacttcgaccagaccgagacctctgtacttcctcgcggcgtacagcataccattgggggcagacgtcgtcagtcctgtgatctgcttcactgtcgaccttatattgaggtcaag

SEQ ID NO: 46645 - DNA, 1110 bp, Arabidopsis thaliana landsberg
  unsure (1)..(1110): unsure at all n locations
atactttcgctgtacagccgttttgtggtatgttgtggagttttatgctaatgtcaaagcatgtgtttggttcagaaactttgtcaagtgaatcttgacagctagtaatacctagattttgtagtcttaaacaatcaaatgcatagaatcgactaggcaaggaaaagataaaccatatacaggtttccccaagctttaagcttcaggctttggtgaaaagaggtaacaaacatgatagtctctaattcatagcgtttggtccaaagcatctgttcctattaagatcccaaacccattgaattagatactttcttcctttaacgcccttcacattatacacattcctccacctatccttatacacacttcccatatagcctcctcctcctcctgacccatacactcccaaacataaatccgctatctctgtcggtgctgtcgcgtcctctcctccataccatccgtttaacatcgggttactcgacacttttgccagctcatgagctatcacactgatcatcccatcgattcctacctctccatttggcggtttcatcttctctctggctacaaacccgctccccggaaatggcttaggctgtgcaaatgggtacgcacacatttctggacactgtctctcactgttgcccacccaagcatacggtacggttgcacccacaacgcttgggaaagtgaagtaatgaaacccgcaaatcgctctgcagaactcttgcatctctacatcatccgaggtcaagactaagtacaagccgtttacagcgtttagtggtaacttggaagtcaaggcagttctgatcacagactgaacagagaagcgagtgagatgagatccatgagagtacgttgagtcgtggaactctccggataagacaagagtgtcggtgatgttggaacctgtctggtctctgtatagcctcactgtcttccaccagttggatactgacgggtactgagccggtgccggtgcagagacagagtagagaaagtctcggattatagattggtgagttgggttcatcggccgtaccacatgatgtagaagaatctcaataatttttctccactaaactctngcgggcatgacgaaga

SEQ ID NO: 46646 - DNA, 135 bp, Arabidopsis thaliana landsberg
ggaacggtaaaaaaaaaaggccaggcagaaaaagcaggagcagcaaaaaaagaacgaacaacgggtttacaagggcaagcccagccaagacaaccacgaggtgaaaacgaagaagaaccccacaaacgaccagca

SEQ ID NO: 46647 - DNA, 439 bp, Arabidopsis thaliana landsberg
gtcaggcgaaatataatgtaaacaaattgatcagtgaatatttatcaagtgttctacgactggtgaaaactttcttgatcataaccatctgcttacacaatttcaccgattaaccatctttttacaaactgcgtgtgatatactgcaagagaaagcgactaaaccagagttgattactgattgcgatttatcatatgaagaacaaaaaaaatcggaaccccgatgtagtcactttcaatgcattgatcgacgcaataaactggactaaaaccgtgatcaagcgaaagagaagtactgaacaaggctgcgtatgaaacaacggaattttcatagatgagaaagatgacttagagattagtgaaagaaggtggtatatatatatgaacgactaagagatagagaatagcgtgagagataggtcgaagactactaagagacc

SEQ ID NO: 46648 - DNA, 279 bp, Arabidopsis thaliana landsberg
ctggaacgccaacaacgaatctgcaaactacaccaacaattttccaaggtttcaatataggatatattacgacaaggcgatatacacgcatatcttgaagaaagaagattatctttattaaaacatgaactctcatttaattattattaaaaagaagccagagatatggccaaactcataaggccagggtctcttaggatcaaatctcgaaagcttgtaaaaggggggatataagcgaacgatcatgttaaccttatccgattcaagaatggatatgga

SEQ ID NO: 46649 - DNA, 488 bp, Arabidopsis thaliana landsberg
taacggggtgggttgtcagccctttgtagtcagtaaaatagtgtgagaatgatccttaagtgaagaatgaaaactgcataatcttgagtttctaatgcgctattcaaaaatcatgtcttctccgtattgctctgcttgatgatcaggttagtattataatctgcgctttcaagtttgtgcgagaagaagccgagaactagtacccgaaactgaaaattttgaaacaggagaataacacattggtgtttgaaggtttttactctgaaggctattgtaatgttttatctttagattgatgagttttcagaagaaattagaactgcttgatgtttgcttgttcttaaattagtgacattagaacttcagagaacaaggttacatttgccaacaaaaggaaaggaagattacaaatggtaaaatttatccatggaagttaagttaaagcggatcacaggaacaagaatggcgtggtggatgctgatgcgaca

SEQ ID NO: 46650 - DNA, 954 bp, Arabidopsis thaliana landsberg
tgacttcctcttataaacagccgcgagtttttgtacactccgcatccattcaagaatcccctgcgtaaattcttttgtttctgaagaagactgcaaagcaccggaatcactttcccatatcttaatcttcttagacatacaaccagactcataaacctcacccatagtcgcaaaatactttccatcacccctccaggaaatggaaatacccccacaatttacagacaaatcattcgcttcacctaaaacagtatttaattcagatggttagcaaataaacaaaagctgttcacgataagtttcaacttcaaacccataaatttaacccttatgcagtcaatatgacaagaaggtaaggggtccttacgtacgtatccaccttcaggaacctctccagcgccttctcgtacatcaaagcccaatcataagtcattacaagcaactgcccaagaccagtaatcaatcctagtagatctccagtcggattaggcgagatacacttgacacctccttctatatttccaactagctcagtcacatcactctccacattatgcactagcaaaagcccatgagaagtcccaattaatagagactccttctccgcgagataatcgaaagccgtgatgaaatccccaggctcaatatcaatactgcagacctccacaggcatagcactctttgccccagcgctttcattctgccacaagaaatacataaacataaagagaaagactttcgatttaaacagaccctactcgctaagttcacttgcaagttcatccacaagaaacttgaatcaaaagcaaaataaaaagaaaaatccatctttagaccaaagtccccaacttttttctcactcgtttccttattaagcagaaacaggattaaccaaggaggaaacgaattctctcacagaaagcaattcactacttggaaggaagagagctgaag

SEQ ID NO: 46651 - DNA, 705 bp, Arabidopsis thaliana landsberg
tgctcgtgcaatgtgctctaaggacggatgctgctcaaaatagaaatataggattttcttttcttaacagttttcccgttttctccatctgacaaattgacgtccatatcgtttaggtttagaatattagtctgatttctatgaattaaagatctagctagagccgattattcaaactacttcatgaattaatcttctgttgatatgttgtaccgtgtacgtacaagttgataccaccgttatataggttcaagttttccacaaatttccacattttttaaaagtgatttcgattccttacaaactgagctctgtggtgttcagcttcataatccactaattccgcaaggagctcacgacttctcttccttcaacatctactgtttgtagacatgatttgccaacgttttgttgaggaaacatagttttgtttttgtttgcctcacatatttattccatttttttgtttgttatttttttcttttcaatctgcatatttttcgcggcacaacctaaatgaaaaaaaatttacatgcaattagatatgattgtaaatcgttatatatataacaacggcaaaatatttagacactcctaaaagacttctgcgttgatatattttttttctcctacgcgataaacataataacatacgtgataattgcatgcaacccttatatttagacgattgataatttttcttct

SEQ ID NO: 46652 - DNA, 938 bp, Arabidopsis thaliana landsberg
aaggcaatgcgtgtacttgggcttcaggaagagatctagcagtcggccacaccatggaactacttccctggttggttttctgattgctaacttgtggccttttggctccaaacttgatgaacaaccaccattcttgatcttcagagtcagtgagcttgctctcaacccgatcaggagcccagttctcgataagattcaagagttgcccagccatggaaggagggcatttcctgcataatagcttggaaggtccaggggtttcttgatgactagaggtcggtttctcttgttccagagggttacatgaagataatgatggcatcttcttctctttactaacttttctgttatctttcgaaggaactgacttcttctctttgttgagttttgttgtgatctctctcgacgaaccaaaagttggatctattcttttctcttgacagacccttgaatgaccaacagactcattaggagcagtagcagcttgagaagcatctaacatttcccgggaaaagcgctgtttttgatccttgctggtcatcatcaccccatcctcaggatcttcctgccctttgtcaggtaaccgagtccgtatgctggtttctttaaaccaagaaagaatgacaccataagcaaacagacccaacaacaagtaaaagcaaacaagctcaccagagtcgttatgcctaccatcaaggggctgactctgaatttgctttggtctctcattgctatgaagagtgctatcacaagaattctgagacgatgtttgaagctcaagttccacagtctggcagctcttctctaacaactcgacctcactgcttactaatttgccactagcaatggcgccttcatcttttcgccgtctcttatgccgatgctttctgctcctccccgcctcattatccctattctttctatctttttcattcctc

SEQ ID NO: 46653 - DNA, 561 bp, Arabidopsis thaliana landsberg
aattaaaacgttgctcactgttggctgtttatttttaaatacttaccgaacattccaaaaattccaagcctatttaaaaggattttattattgggcttaaattgccctaaatatcactccactgaatggcaaaagaagaaaaattcactcttaccacaacaaaaattgcctgtcatgaagaaacaattggtaactgctgagtgcgttttttcagatacttagattattttaataacttcagccctttttttttaagaaatattaacaaaaattgctaatgttgatggtttcaagccctttctaaaaaactgtctatttatcaactgaaattgatatatagaccaaaacttttgaaaataaaattagtaaatgattattattgggtctactaaattctggaataaaaaacgcgactcagaacttaattaactaatatttcgtcagtttgtcgtctttgtcacataaatggcttggtaaagtgcctgtttttttttttccttttgaataacacgtttgcaccatgtctttaacctgaaaccaagacattttttgatcatcaat

SEQ ID NO: 46654 - DNA, 1100 bp, Arabidopsis thaliana landsberg
ttataatttcttcttttcaatttcaacattaacttacgttttcaatgcatttatattaattgttattttctgcttttgatgtgtttgatttttggagtaaaccaaacttgtaaatgtaattaggataattaggaggacaactaatcatatcaaatttctttataaaaagacaaataatcaaatctaaattttattttgtaatttactaccaaatctaattgcatgtcgctatttttgatataaatttaaaattttaataagaaaatttagtctaaaaatgttaatttataaccactagctttgaaatatgatttttgcatagaattagtttcttcaagctaagtagttctaattagttatattaatacagtaagaacatatactacaaggggctcgtccaaaaatagcttgagtataaatatagtttgaatcatataattttcttttggtcgtcagtttcaaattgtcattatattatttaagacatatttaatttattttcctttgaaaatggagtagttaaaaaaaatatatatatatactccttttgggtcttaagtttactatcgagaaggtagtcttagtattacacaaatatatttcatatagaagaaattatatatttttacctgattcgtgttaatatacactgagggctcacttttcccataacacacaaatctatgctatcatataactagataattaaacctgaatgatcagtgacaaaaatagatgtaacaaacctgattaagatttaacaaggaaaaataaactaaaaagattttccagtggaagcaaacatccttcgtaatggatcatgcttcctgctttgggtacaccttgtttatgatcgatggatgaattaatattttataccttttattatgtgtgtgccattgtgatgtatacaaggttaaaattgcacatcaatcaaggagaatatcgttaccataaattttcagaattagttagatacatatattcttctactttcatgtgtgatatactgatagtggtattaaactatttctgaaacggagctgaccgcaataataattcattaacattactaaaatatagaaatgaataatgatctc

SEQ ID NO: 46655 - DNA, 1260 bp, Arabidopsis thaliana landsberg
  unsure (1)..(1260): unsure at all n locations
gtttggtataacttagtaaatatgtgaatttactaacgttttgaaaggtagtattttcggataattttataaattccaagacaatgtaagatggtggtttaagccttagctaagctagcgctgatttgggatatgtggctggttttaaaatctatcaacttattttggccaagtttcacaatntttggcaggttaattggtgtgtgtttagcgttaaatcgaaaactgaatgaagccaagtacatgcatggaagcggtttaaaccaaaacacataaacctttctccatcattacaaaaaatttccatctctctttctagactttccttcctcctcgatcgttctctagctctagcttcttgccgaaaccaccttctgacattcaccaccttacaccgcttctgccgcctcctcttcttatttcctttcatcttcatttatatgagtttcctaacatttttggtttttcttacctcttagtccatatatatgaattcatgactctctgatgatcatgtatgagaaaacagatgaggccttgaaatttcgccatagaagaccatatttgatttctttccggcaatacttgttgatcaagtcgcattctatacccttatagattaatataatgttattaacatgtcttcaagtctgatttaagatggaaaagaaaatgaaagctctcagtatcataaaatagtgttagtgaaatctatttgttggtttaatttgggaatttacaagagaagctctcggattgccaaactgtaccggtcaaccttgttgactcccttaaccagtaaggtagtcatcatatcctagactacagtatttttaatcagtgtgcaaggataaatgagtgaattgattagtataagttggtattagagcaagaaattggtcacgggttttagtatattttatcaaataatttttgacaagataacaaaaaaaatatatgaaactaaatattttattacgacaaatgaatgaattctaaaaatattaattgaattttatcataactgcatcattctatttcactgaaattggagagttcatctatacacttatattaaatcattttgtttttgaagatttagcaaaagatcttggtctacatcatgcatggaagaagatcaactagttgcatgtgggagtgattttattgaattgactcgttttcactatttgtatattctttttacgataaagctttttgactctaaaatattgtaccttaactacgattaaataaatg

SEQ ID NO: 46656 - DNA, 1278 bp, Arabidopsis thaliana landsberg
  unsure (1)..(1278): unsure at all n locations
atatttaacatatttccgcgttttatagattgtatttctttaagcctaacggtggaaaccacaaaatctctaaacgtcactgagcagttctcggtaaaattttttttttttttttttggaaaacagttctaggtatttctttaagcataaatgttactttatttctgtctatttaaattatattgttttgtaaagttttaggttatgaggaagttgctaaaatcgaccctgaagaaaccaagttgcttataatgctcatagannnnnnnnnnnnnnnnnnnnnnnnnnnnntatgcacatgtagtccataacatattaacatgtaatttaaatgtcataatcttcttataatataccttacaaggaccatatattatatatgtatatatatatatagatcccacggacctacgttaaaaaaagtcatactgttattctgttaactacttttagaaatttcctttcttatagctgatgtcatggtaaatttgcattctccatgaaacattttacaatttatcaatatttttagttttgttctactgagatttttttttctaatttattttatcgtatatatattattgatacatgaaataatgtatatgaacaaaaaaaaagtattgactgattggatacttgttaacgtctctcctctatttatagatcgattatatatagttcaagtaggtgcgttaagttttgtgtttactacgttgatgatattcttttaaaaaagtcttcaagatatttccctctatgtgttcacttgattaaaagcacaacttttttcgattgggaaactcttgcacacagttcttactcctaaatttgtatgtaattatttttcacatccattgtatcaaccaccgactcaaatttacataccactttattcaaaattgcactaggatgtgaatgtgactcatatacatatgtgtcttttaaattttataaacacatagatatccacgtttatacatttgaacatacacaattcgtaatcttttagttgaaattcattttagaagaagaattatttccatacaaaggaaatatttcaacatatttcactgtgttatagataatatttattttagcctaatgaacacaacacaatctccacacatcactgggcaatattccgtaatatagtttaatagtttatcagttatatatacaactaaaatatctattagtttgcttaaaagaaaataatttatatattaagaaacttaatcgaaaacgatatctgaattcccttttttttttactata

SEQ ID NO: 46657 - DNA, 1189 bp, Arabidopsis thaliana landsberg
tgcatcggaatctagctgttccacaatctgcaattgtttgtttaggtatattgcagttcgttttttccgatgtcaaaagagagctggtgaaatcggattctagtagtgattacgttgcaaggataacggacttggtgaagcaggatcgtcatgagttcgatagctttggtcttgaagtctctgtgccatcaactatcatggagaatgaacgtgcactcttgtaagcttcttcgcttgcatcaactaaagattttttcctttttatcagttttgttttggttctgctctagtgttaatgtatctaccttaataggtcataccttaaaggaaagtacagcaccgaagtttggctgcagcgcgataaaatttctgtaaaggatgccttgaaagttctactcttggatcgaacttaaagcatcgttggtgagtcggtgatttgcttgaaagtgtttctgttttggaaaattgttgagttgttgcttaggttttcacctttgcttctattgcttagtatcttatacaaatggatgttataacctgcaaaatctgtttccagatactaaaagtctttgcgtttcttctctgttttggcagggcgctgaatcagattcaagctcttttcacatccgtttgacatacactaaagcatcagacgaggctcagggtgcttctgaaacaacgcatgaaagtaagaggaggaaaacaggtatgtcgagactctacaatcacttaggactcggttgaatctttttcttgaactcctgattcataaatcatttatgacatggtgcatctataattgcttgaaatatcaccgatacttgtgatgtttaaggagttcgttgatgaaagaaaatttgaccttcatttatgaaattcttccttggttacatctgaaggctctttgagttttcactcttctttgacacttcaaggcgataatatgcaattaagccgacctctttatctacgctacttccgtatctcgcatagatgtcatacttcttttaaagtgcatatattctaagttcatggtccctgtctatccctgcctggtctatgttgctccttatgacagtttatacacttcccggatcttgtgcccatctacatcattttcttacacattttattgagataatacattagatcccgcagatcaaatttcagagtttcgaaatgctaaatg

SEQ ID NO: 46658 - DNA, 752 bp, Arabidopsis thaliana landsberg
  unsure (1)..(752): unsure at all n locations
aagactcttccttttcaattactataagtctataagatgataacaaaaagtaattttatgcttgaaaaagacagagtcggtttgggctagagactaaggaatctaaattaatatggaaaggtacctccgaaatcacatgcccatgagatgatagattctacaaagaaaagattcgtttttcgacaagaatattcatatccttcccaagaatttgacttcacagtccaaagaagagatccatctcgtataggccttggttttgggtaaaattaagaccattctctttcattctaccaaaaatttgtaagatgattctgatatatcgttcgagacatgtgtcttgcggtacatttgcatgtaaaaaataaaagagagtgtctttcacaagatttaatcacccaaagtgtgtgatatagctagaaactcctcacatgcatgacttcaatttaccacacaagcagtatggctacattttctctcatccttgatttcttggaccacacacacaattatatagccgtatatattaaatacgttagacctattgtccataattatgtagtttcaattacaatagaaacaaacaaaatttgagaaaaggatttggaggaattgataaccgggagtagcaggtcgtcatgtcaaaccctaccaaactaaaacttactaaaagactaanaccgaccaaaaagaagagaccttcaaagagaagaaataaacgttttagacatgagaaaaatagaaaaccgaaa

SEQ ID NO: 46659 - DNA, 1212 bp, Arabidopsis thaliana landsberg
  unsure (1)..(1212): unsure at all n locations
ttataccatgaacatgatattgtattgtggattttacgacaacagtctgaaaatcaataataacaacctcattttgtgttctattgcttttgcagaaagatgatatcaaatatcatgtgggaagacatttcaaggatatatctaattcaaggtttatcggaagtgtacaggtaaaccaattaagtcactttacatgagccttctagcttgttgatcgtggagaaacatctantttaattagtactctgtttgtttacataatttgcgttatacgtttgtcattgttcattaaatttcacattttaagagtttatggtggtttataatgtataaatacttacacatttctaagcatggtggattaggtggctagacaaggagccaaagattggcaaaatcactatgatcagaatccacagatgcaccagcacttactttcgtctttttgaatatcatataaaccgagaacatttctcaggtatttcgtctctacatgttttaggcaagaacttgattcatgttgatgcatggtgtcagtcaaaaggtgtgtgtgagatgtgctctccaattgaagtgtctcccattttgttccatttgggttgttaatccatattatatgctaaaacctgttaccaagcttattgatcaggacttaatttaatcatcttatatggtgagttacagttctagcatctacttgtttcatgttttgtttagtcaagaacttgattcaacttgattcatctgactgtaagatcgagatatcaaaaggggtaaaataagtaacaacgcagcccatatccaacattaccatatattgttcatcgatattactatttttgccctaggtctattaagctaaaccagttcatgcgttttctctaatctattcctttgaaacaacatattttaatggggtaatagattgttatctttacatatgttattgtatgaactaatttttgcatgtcaatcatgttggtagcatcttttcctaagcttaaatttaagggtcaggaaatgagaatctactgttgatcggtagatacagatttgttttgaatcaatgctttaaatctagttggttctgatagtttgtgttagtacattgtatggtttctccaattaatgtactacgtttggttcacctagaatttgttntgctcttttccatttttttaatagaattattgatggatcttacaaataaat

SEQ ID NO: 46660 - DNA, 879 bp, Arabidopsis thaliana landsberg
tggccttcaaaccctctaataatattaagttggtagtacactattaatttattatatataacggtgggcacgaaacaaatatgtgattgggtctgcctaaatcatcactttttggattcgtatccgctcaataatcaaacatatatctgttaaaatcagaaattttaactgaatattcgatcacgcagtaagaattttaatatcattataatttaaaaacattgaaattcaaaactaacccaaaaaagaaatgttacatcaaaactatttcttcttaatttaaattcataaaacttcacatagatataatacttttacaattcataaatataattatatgtatatatatgtcatgcagagtgttatatatgtctcttaaaattttttgtatttgtgatttattaagttttcaatggatatttacttttataagtttattaatagaaagatctaattatatagaaagatctaattattcagataaaatagaaatggttaacgaattcaacatgtattatgtcgaactctagaatattataatggaatctcgaaattatatcttgagaactttaaaacaaagtaccaacatgttacaaaaacaatattatcacaagtaaacaaaaattccaacagaaaaatagactttttttaatcaaaccaatacatttgaacaagatattgaatcaagtttgaaagattttttatatattaaattctgtgttattcaaatggtcatgattttaaaatatcatccaaaattcaatgttatttaatatgaatcttgcttaaaataattcaaaataatacaatcccttattatatataaaacccatatcaattctagtgttaattcaaattttcacttttatggtaggaagt

SEQ ID NO: 46661 - DNA, 1099 bp, Arabidopsis thaliana landsberg
agttaattaatcaaagtcttcccttactgtattaaaaccagaatgtcaacgtaaatgttaatcgaactctttgtttacaggctttcaatgagttcaatgctcgtaaaccagatgagaagaacatcttcaaaggtgtgatcaagaatcgtctctttatgggaataatagtcataactcttgtgctccaggtaaataatgatttggtgtatcagaaaaacttagtaagttacatttcacaaactcttatttctaaatcaaaaccgtcttattttcgtttgccaggttatcattgttgagttccttggtaaattcgcttccacgacgaaactaaactggaagcaatggcttatctgtgttggcatcggtgttatcaggtcactttcattataatattgtttacaattgaaaatgttgatacatatttataaataatatgtgcaatgcttgttgaaacataactaacgttatagttgaacctttgtaatttgaacagttggcctcttgctttggtcgggaaattcattccggtgcctgcagctcctataagcaacaaattgaaagtactaaaattctggggcaagaagaaaaattcttctggagaaggtaatagtaacttacagcttgtgattatcaattgaactagattcataagaaaagtttgggttggtcagcttgtgtagtagaacttatcctgaatttaaactgtagtaaggatttggtttaagctttatgcaggactgaaatgaatttgaaaatttgaaaataacaagtttgcttttatttttttctcaggttcactctgatttggaggccagtttattatctctcagacactgatgagattgtttgatactcttttaggactaacagaaaaaaaaacgtttggtttggtatgatggatttattgatatttttcggaaacccaaccccccaagtacagtttttcggggtttgttggtcgagcaactttggattactggttttctttttggtctttttttttgtaatatgatcgactacctttcgaatcattactggtaaagattttaaccaagaaatcaaaattcgaaaaaatggaaaatttttactctcagtgtga

SEQ ID NO: 46662 - DNA, 175 bp, Arabidopsis thaliana landsberg
cacttattaagttatatatttgtgctttgacttttctaggaaacaaaaatgcagaaagtaaattattttcccacaaagctactacatatatattgagaagaataaagaaattaaacttatatttctgacaaaattaaaaatagaaatgttgttgccacaacaaattccagtctgg

SEQ ID NO: 46663 - DNA, 1111 bp, Arabidopsis thaliana landsberg
ctttgtgattgtgggtttaagagattgataagaaattgcactatgtatcgaaggctatgtcgaattacagtgacgttttctttaatgcaaaagtgcagaaagagagagctgtttaatcagcaagcggccagacaaccgtcgggatagatccacaggtgaagcggatttattcctctgctttcagctactaaatctatcctacagatttgttctcattaagaatctcatttttgaatcatccaatacttgaagttgtcgttgttgttgttattgcaccttgtatcgaaggacatgcctcgttctgatggcatggccattttcgaggatgcatagaggaatagctgttaattcagtaagcggccagacaaccgttgggatagatccacagttgttgcggtttttctcttcgctctcgactactaaatctttcccacattcatgttcttatcgatccaaatattttcacgattgtttgattcttttgcaaaattgtttttagttcattgagtttgcgacttggtttggtaaataaattcactgttaccgagatactgatggttgacattgaacagtactttgtgtaaatgattggagtttgaacttgttgaagtaaaggaatcaaagtacaagaaaagctggttgtttcactgcaccaataccaagtaacctttaggacttgaacaactctgtttaatatgtagactggttgattgaaatgatacagtatttaagatatgagaaatgtgaacaacggttaattacattggaaaccggttgagattttttcaccactccagaagcataattatttctgagtagtgacctaattccaaatcttaactgataaatttcagtttaaaaactgtataatcaatgttaaatggttaattcttatatagaaaagccaacccaaaccggttgagtctttgttcgagagagtatagagacgactagtgttttattatggaggtttggtattgatttgtagctttaaattggtgaaaagctaacgaaatttggttggaacaaaagccacaattactttgtgtacagattaaaagtttatttttttccagttgtgaaaattcaaaactttttaccaaagaagcct

SEQ ID NO: 46664 - DNA, 701 bp, Arabidopsis thaliana landsberg
agcctaactctttatatgtttacttatgcttcatgtttttgcaatagaattctagagaacaaacttgtgaacattcttatagatggcttggattgagttttttcgtgttttcgattgatatcaggacggagatgatgtagtgagaatgtggattcggattcagatttgtgtttggctttggaaaattgttggtttgtcatctttagcacaagtattatgaacagctaaaggataatctttacctaatgttattagttgccctgaggtaacctttgtttaatacatttaattaaagagacacttttaaggtttctatgtcatttattttggctttctttaatcagtgttgtatgtttataaatgaatgtctctgtgcttagtcaaggcttggagaaattataagctggatccttaaagaatcaatcgattttaaaaataggacgtgaagagttggttgatgagacaagggagggatgtttttcaagacaatagggacataatactacttcttaagcaacatttgcaatgttttattgttctttaacgttaatctggaaacatgttttaccatgtgacagacttggtctatgaaacggttcactgaataatcaatagatcagtcacctagtttaattctattggacttgtttcggaccaattccgacttcaacaaaataatgacaaggctgcataaacaaatg

SEQ ID NO: 46665 - DNA, 368 bp, Arabidopsis thaliana landsberg
agagactccccagtgtttgcgtgaagcccaacccagaaatcattcatgttcacctccgtgtttgttttggttattagctcaacggcagacgggtgaaacaattcctccagtaagtccctcttccagcaccgatcttcaaaattaacgcggtcgttgtcttttaaatccaggttgacagaacaatgcctctgaaggggaaggcttggtgcaatgtcagaaacccaagggtccatccaaacatttaaggatggttcattgaccacttctttcctgaaccctacagctaacagttctctggcgaacaacatgctgcagcaagcatatgatggccggactcccaaagctgcttgtagaaactcttcatcatc

SEQ ID NO: 46666 - DNA, 1067 bp, Arabidopsis thaliana landsberg
  unsure (1)..(1067): unsure at all n locations
catcatataccgaaatggtccaatactacgtgtcgaacctggtcagaaatttctttcacgagtctttctatttcaaattgtctctttgaattttctttttttcttctgataaatgtctttatgaaactttctagtattattaagaaatattaaatatttttacaagtccaacttccaatagatacttattgacaatgaccattgcattcaatccactcatgttttccaatccaatagagactttcatagattatatttttaaagtaagaactctatgtatttctttgtttcatcaaaataggtttttacttttttggaaatttaagtctatatcataaattcgagcatagacataaatcgattctctacattgatctcgatattgagtggcacacgttgaagtaacaatcgtaagagcaaaactataaacgaacttttggaaaaacaaaaaggacaatgagtattataaatatgagtatcatcatgaatatatatacttatgcctcccaattacatatattgcaattaatttttgagattgaaagtgaaaaaaaccgcacaaaatttacagtcactccataactatgatcaaacttatagatatcttagttatagctaaacaaaatccggagatagatataatttaatatcatgtataaaatcactcatggatatcgtcgggattaagagttcctcgccggagaagcaaccggaaaaagaggaagaagcagtggctgagagtctctaggagttgagactggagatggatgaagataaaagcccttatcagcaatggctttgtcttcttccgatgagttccctaatgacaaaggtgatgacttgttgaaggggtcatcgttgcttctcagtggcgtcacgggactgtttagccctagcttcggaaaatccagcatgcttggagacagaagaatattttctgatgatgaactgtttcttggagagaaatctcggctttgatgatgactgctgtttcctnctgtgaacatcaatctctgagagttttgaagccttaacgtattgatcattacgtcattcttagcgaacat

SEQ ID NO: 46667 - DNA, 989 bp, Arabidopsis thaliana landsberg
ttttgacctcgagaagcaaacttgggagtctttttcaggtttgtgttttgaagagttgtccaagataacgctcagagagtggtgtgatgaacaagaagatttacataatggatcgtggaaatggcattgttttcgatcctaagaaaggtgtatgggagagagacttcttattggatagagattgggtagttggttcgtgcgttattgacaacatgttgtatacttttggttttgacagtgtaaaacgtatttatcgagtacgtgtctatgatccaagtgttagggtgtggagtttcgtgaaaggtattgaagatataccaaaaatggatggaactcttgggtctagaatggcaaatcatggcggaaagctcgtaattttgctcaaccttgataaaagtggaagaacagagctttggtgtataaaagttgcactggaaaggcgaggacaacaggagagatttggggaaagattttgtggtctaatcttgtgctaactttggaaaattcatcaacaattgttgaatgtttcgatataacgatttgatgaagtataagatggtgttatgtaatcatacctgaaggtttacttttttttttgtggtcgaatgttggtaattttgtaatgttttattctattataatgtcatatattttcattttctatatgttgagtttctagcttgaaaagcgcttttagtattggactaataatatacatggtctaacatatggttttatcaaatctaagaatacaaaattataagaaattcaatcaaaacacaacacaatctaccgcaaattgaaaaacacaatcaaatcagaaatgcaaataagaattaagaaaaaaaaaaacaagcgatttacaagttcaaattaatctatgcgatcaaatgctacttctcagctgctagttactagaaatcatcaatatactatataaggaaaatcaatgagctcgtgaaaaagaagaatcatattgtggcttaatg

SEQ ID NO: 46668 - DNA, 335 bp, Arabidopsis thaliana landsberg
cacgtagtcgtgtatgcagtgattagaacagtagtccgagtggtcttctgtgggattcacagggagttggtggctactgacagggaagttggctgaggtagagctcgggcgaggcggagtttcctcccgagacggagggcaacttcgggtgaggcggagttctctccgaggctggggctgtgcttagatgtcgcatgtcccatctagagttgttgagaacagtgaccggagtggaggagcagtacccggtattcgcggacgtgcgtcatcgcagacgatgaaagtagatgggaccgtggtccatcatcctttgttgactgtgtttcacatcatca

SEQ ID NO: 46669 - DNA, 225 bp, Arabidopsis thaliana landsberg
tttggatacctaaatggattcagattggcagagagagacgtacagggagcataataaggtcgaaaaccgagtcggtgatatcagagagaagagtatcagcgaccattttgattccatggcaagcatgaacgccgacctgattctcaacggaagccaccgtaacatccgctccgcctcgccgtagcacatcgatcataccacgttcacggctcgtacatgacacgg

SEQ ID NO: 46670 - DNA, 485 bp, Arabidopsis thaliana landsberg
cagcgccgtagattctcatactggagtgacaagcaatgccgtgaacgaacacttggtgaaaaaattcaagaaaaaaaaatgaccctgcaggaaaacaaatacataaatcattcacaccacattgattaaatcaggtgagattgtagcatttttaacaacatggatgatgaatccatggacataacagaaaacaaataccacattcttcaaagttcaaatctaaaattcttaagaacttcaaagtgagataacattaagaagtaaaaacaacatcccttcgttcccaattcgaactattctattcatcagacggataacgttgagaaattcccagacgaaatccgaaaacaacaataaagctccaagagagcaaaaaccttaaaatatttagtccgttcagacattgtgcaggaaaagaaacaaagtgctcgatcgatcgacaaaaagttacaaggattcacgaaaacccagataccaaagacgtg

SEQ ID NO: 46671 - DNA, 521 bp, Arabidopsis thaliana landsberg
tttgtcaaccctccagctaacagttagtcaatttattagtcagtctgtttgcagagtaaggtgctaaaattagccggtaaactgtttaccacacggatgcaatggcctttgtgtttccgtatttagcgaatgatttggacggtgtttgttgataaatggaactgtggttccatctaaaaatgaagagagaatagttatgtccatctaaaaaataaaatctatgttggtcggatggcaataaaataaagatgcaaaaccagatatactaattgcgatttgtttttctatcttgccttccttagttgctagtatatccgtctattaattcttcacggatgtttatatgttcgagcacctggtaactggcatgctgggcacctgcatgtgcgctatcgtccgagacccggcgtcgttttgaccatcggacgtgcaggcaaacgctccggctgaatggtcttgcatcgcgctgactggtggttgcggctcaggtcagctcagtcaggtggactgtcagtcacaca

SEQ ID NO: 46672 - DNA, 555 bp, Arabidopsis thaliana landsberg
atcttgtgacagggacctcaataccattctcaatcaccaatccaggccatctcatacgacagatattgcccaacactttatttacttgccttacacgatctttgccggtgaaactactatccagccaagccctaacaacacaagcacaattgtcaaattcaaaaataattatttatcatcaatgtgtaagacataagaacaaagcagatatgctcttacccatctccactcgggattatctcaaccttgttaactggttctttaggaggggggacccaactagtcttccgcggcttccggacccgtgaagaccctccaactcccccgcttccagaacctgcacctgaaacaccagcttctccttcccttgacccactagctcccccaactcccgaccctccatcattgggccattcacccaccctgtctcttctcatcttcacttgtctcactcctctgtctgttctcatcttcaggctcatcgtatagatcaaaattgataatttagttattcgaactcatacaaatattacattacaaaacaaatatattggt

SEQ ID NO: 46673 - DNA, 101 bp, Arabidopsis thaliana landsberg
acacgttccttgagatgataacacgagcatttattcttcatcacttttgtttgcttcacatgatataccctaacttatgcgtgtgtgtcatatatgctctt

SEQ ID NO: 46674 - DNA, 580 bp, Arabidopsis thaliana landsberg
acagggaagttaaaatgcctttgttataaacttaaacatataaaccaaattgtaattataaacccctagtttgatgatgtatgataaaaatgagtttcacaaattacagggattcatcactatacaaaattaacaaatgcaactctatttcaatacacaactttattattactcaacagaacagttccttaagaatcaaacactatatgaatctcatatgtaagaaaccttcttacaaaagccaaaaccttaatataagaaagcaatgataaagatttagctatacgttgaatgtatgtgtgtgcttaaatattcaaaatcaaagaagaagaagacattactctgatcttacattagttcttacgaactctgtccctggctaggtttctgatgccgttcgctttggctttgacgcttactcgcatacgttatagctctatacatatccgaacatgaatacgcaacctcggacattgcctgaaaaagctcggggaggcgagttcgaagactagccagtgacttctctctaacttgatggctttgtctatggtaagcttcttcttcttcttccaacctcttc

SEQ ID NO: 46675 - DNA, 752 bp, Arabidopsis thaliana landsberg
caagacacacgcacacacaaattgtgtgactgtgaaaaacaattaagcgaaaatgaatattgcggtggcgtttgcgataggcgtcggtgcctgggtgattataatgttggtggctcttggtatatggttcctcgtcaaaaagctaacctcgtaataattgggatgagtgaaactttaacgtaatcagcttattttctttaaaaattagttttcatggacaataactcacgagccataagtatttcttgaataagagtttttttacaaattgttgatgataaaattatgtataaaggaaaaaatctatgtacgattattgctattatatggtttgaaatgtgtttggataacggatgaaatcaccaattatttatttgcttaatatacatatcttttgttttctcgtataatacagtaaccgaaaacaaaccggtaaaaaacaggcggttaagttaccggcgttttcgctcagccgtaggaggtaatttctcagatggtccagcagtaagtttacggccagtcttcttttccagtcgattctttagctctcttagtattcgaatctgtcgtagcttctcccgcgaccagtttgtcccaataaattcctgcaaaacaaaaaaacgatcagcatgttgtgattcaggcatagaattcagaaaacaatatagtgaatcactgaataaggctgatgataattcaaacaccaatctactgacagatcacatgaaaaacttgagttaataaggaaatca

SEQ ID NO: 46676 - DNA, 712 bp, Arabidopsis thaliana landsberg
gtacctacagagtgcgagtttggcagttttgaaactttttggtaggctccattgagcttgttttgtccaagattactgcatttcacatatataaattaacaagtgatcataaaccataattcacagcaaagatatgcttaatcaatttctttgttttcactcacatgctttggagatttttcatttgagataacgagtagggcacgtttccatcgagttcgttttcagaaaagtctctatatcaaatagcagattacaatttgtttcttgcataataagtaattaaaaaaacaaacaaatgtatgaacttacagattggcaatgttgggtgggagttgataaggtatgtttcctttgagattgtttttgctgagatcactgtactatcaccatattcaaaaaccaaaactgttattttctgattacttgtttaactaatttaaacgagactattaaatgaggattctcacaaagttgtgagagatttgaggttgcttagtagataaccgagagatccacttagctcaaagcctgataactgtctgccagagaaaaaaagaaagaatataagatgacttgtggtacaagtaagtttttgagactatggctcgtaattaaattaggggaatgattatatacaattcagtgaccgaagagccattgcattagacgccttccctagaatctacgcagggatcgaatccgttagctt

SEQ ID NO: 46677 - DNA, 1036 bp, Arabidopsis thaliana landsberg
tattatgtatatgtctataatctattacattacttttctttaatgcaatacttctcttgtttaactagaatccaaagatatatgtatataatttattttgcactttagaataatccatagaaaaatatatatgtaattgtgtcttctgattcctaaacttttttttttgttgataaaaatgcaaatatttcataaacaaaaatgaaaacataataggttcacaatcgatgattctcaacctaagctaatggtcccttaaaaaaaaaaaaataaccattgattttggtctatccactcgactataacaaaagatgtgtgtttttcagagactctgcttctaatgagcacaaagcttcgagtgaagaaacaagtagcgaagttctcgccgttgcttcttctacacgatctgattccatcggaagaaccccataagaccggttttctttgttgttgttgctgtggatctgtgcatttaaggtagatcttcacgatttttgcgcattcagtgactagaagagactcgagatctagttctttggagacgtttggattgcaagtaaccatgtattggaggaacatcatgtaggttttgtaagcctcgttctcgaagttaagtagttgaggctctgttaggttttggagagactagagagcatgctctcttgaacttccttctaaggactgtgtcggtgtttagttgctgtgcgtgagacgcaacgcaagagaaaatgtctgcgaggatatccacgtgtgatgcggacaatgagaactgttttttttctgtaaaagtcactcacaacatgtaaaagaaacagagaagtcaaaaaacagagtcattggcttaaaaaacaagaaacagagaagtcaaaacgtattgggcttttcagtgttaagacggctggaagatatggttatcggcccagtcgtaagcccaaagcatgctttatgtcgcgtgtcttatttatatattttcttctcaaaagcaatgtaaaccaaaccgaaatcaattgtagtttaaaaacccataagacccatc

SEQ ID NO: 46678 - DNA, 1727 bp, Arabidopsis thaliana landsberg
atgcattcatcagttagcaagaagcagtcaccattatcattttgcacctgaggttcatttaaaccatccaacggatcaacagactcttcttcttcttccaatacaacaattgattcttctggctcgctgtgactatgactataaccacttgtagatttgggttttctccaccttattacaaaggactgatgcccatatctagtttttatgcacttgattgaatgaaattcgtattgatcacacaacaaagcgtatcctgtgttgtttcttgccttttctctcagataaatggtcgacagcatcggaagcaacatttttctaacataagatgggtcccagtgcagtttgaaaaccatgagatccactagcattccagtatcaggagttccccaagacattgacgatccatctcctgcttcagaggtgcataaacattaggattcagaacaatgatcatgcaatacggacacgaagtcataaagtcagtgcaaacctgtcatcaaaccatcggatagataaagttcaataatctttctgttgggaaactctggcgctagagcaatcttatcgcagactttgatccaccaatcattggttttcttttgttcccttaaatctcgatccttggaacaaaaggagcattcacatctaaaccctaatggttttttaatgcaaccactatcacaaccgcagtgctcacaagaggacttaaaatgagttctcttgctgcccaggtgtccacaacgggaacagtgaggagatctttttttcatctctgagcggaattcttcaccatcatccccggatttgattccaccaggaactgcaggttgcaacccatttccaatgtcctgtagtctgcacgaaaatatatatcccaacacattcaagaaaatgacaagtcaccaaaaagcagagacaaaaagcttatggattataacctttcaagtacttggtcttcagaaaactcacgaacaatgcgcagtgctttatccacaccaatcccaagaacaccgcctgaatcataatcgtttcccaccaatagagaaatagcaatcaagtgtttccgcttcaaaccgaggccagactcgatatgtgacatatggtagcattcaaaaggttcctgcacacaaggaaattaagatggtaaagagacgataagtgagtcagggtaatactcagttacaaatgaatacttactcttgaattaggcttgatgtctttgatcacgcacatagcaccaaaaaggaaagcatcactatcaggagtaatgcaagcatccacaaaaccttggctgtttaactgtgcacagagagcttcagcctcaccattagctttcagcaccggaataccgagcaattcgagtagctcctagagaaccaaaaaaagtcataagaaaacaatgtgaaacaaaacaagcataaaggtttgaagggaaagccatcttaccacacattccctaacccattcagaaaacagcttgtttctctcaaccgagacaccatctttaatcacaggtagattacaagtatcaattccagaagaacggaaaaacctggagattctcgcctgagatttcaaaggtgatggtgttccatcaaccacaaaaaccgggtacgctccaaactgcaaaaccctaaaccgcattacaatcatctccatagaaaaaaatcaagatttttcaatcaaggcgaaacctaacaaattcaaaaaaacccgtaattcac

SEQ ID NO: 46679 - DNA, 729 bp, Arabidopsis thaliana landsberg
gcttcaggccatttacacagtgatcatccactccacagatgaaccatagctttccaacttctgataggattattgagtcgttacctttggtgaagagagttgtgtagttgtctaatccacaatctgtgtatgctgtagagttaacttgcataacattatgctggtcacttttgtagttgaatactgttgaagaagagagacagacttagcaaggtaaatgctgttatgctggaaataacttatcatgttttcttactattgatatggaacagaagactgctgaagaacagaggcagaattgacataaatcatcgtcttttttggtgagatagtatgtatgggattgcaacattggttctgctgtatttaggcatcgtagtacaggagttagaaaaattacctaagacatcgccgacatgaaactctcttccctgtgtccagttggtatagtttgtaaagagttcccagccattgctgtcaccaactatatgctctgttccttcagattttagcatgagagaagataaagagaaaatggcatagagtataatcaagctagagaatcggcttccctgatgaagcattgctatctcttaactccttggtttctcaatttcttttcagaaatacagtatatttataaagcagtttgcatttgtgggtaggaaggtcatgacattgttgggtttaccagataagtgagtcatgagaaccatacatatgtggatc

SEQ ID NO: 46680 - DNA, 703 bp, Arabidopsis thaliana landsberg
gcaaacgaagctgaagctgaaggttgtgttcatgctcttcatttatccttcttcgagagcggtgggctctcagggttattgatacaacccagacttggcaacgggtcacctgtcaggacactgcaagtagaaaattgactcgacaagcttattgcttgatctgtgtttttctttgtattccttctgagtgtagtatgtacgttcatcaagcactgcttgttgtcctacgtttaggaacgggaactgctggctacctttcgactgttgtaagaccaattttttgtaccatttgcgtgatcaaagttaaaccagttactagcaagaataaagaaaaaagaatatattgatgcaactgcagatgtctggattggttttacagaggttttgatacatgtaagtacgttgggctaaaagctgtgcagttgtgtaagcatgtggacaagctcatcacttgaaggccggtctgccggaaagtcagaaaggcagatgatggtgattcttaaagccattaacatttcgtcttcctccacttcctctccaagaatagtcttatctaatgcttctcgtgcttccccagactgttgtaaatgtttcagccactgtcctaagctacctccgcttgcagactcttcgcagaacgggtgggtcgggtctctttcggttaaaagaacacccaatttcatcccaaagctgaatatgtcgc

SEQ ID NO: 46681 - DNA, 984 bp, Arabidopsis thaliana landsberg
gatgattagaccatcttttacatggttttagagaacattctaaatttgttaggcgggtgccacttccacagggactgcgacaacaaagacaaactcttgttcttgaaaattcatttgagagtatacctgataatttgatatcatcggttgtaaaaacgaatatgtaatgttacattactaatgtataaagtataaacaaatattattatcttttgaaaaaagtttttcatagaaacaattcaaatttaataaaccaacctcctttttggtatggggttgttggtctaatttaatgcttgtctcttgcttgcctctcttcttcaaccatcttcgtatttatatcttcttcttcactatgcatactcataaactttgctactggccgcatttctattttctccttcgattcttctaattcgtactttggtttctgacgtccctaaaatttttagacagtaagagtttctccaggatccgatggttctctccggtaaattaacattttagtgtcaatagtcatttatacatatttttatttcactttttgttttgtttattggttttctggagctaagtggagattatagtcgaacaagagtggttttatgcaaggtaacgcgagatattagtgcggttcaatcaaatagtcgtcctcttaactcatggagaacggagttgttcgattgagccgagccaatatcacgcggtaaaccaaaaatggcaaagatagttattataaccttaaaggtatgtatcattatcgttttattgtttcaattttgattaatggctttgatatttcattttttttttataatgtttttactctacaggcactcgatcggtagccttagaggggactagcaacacaaaacccaaaatccaagtacaactgcgatttgcagttctatttttagcaagtatttaagggagtaaaagtactaacaagaacgtaaaacatttgtaattactatctgaaacttt

SEQ ID NO: 46682 - DNA, 363 bp, Arabidopsis thaliana landsberg
ttgcccggccactggcgtttcatcgcccagccgatcgcgtgcatcaggtgggttttgcccaggccgacgccgccatagataaagagcgggttgaacggcacgttctggcactcgacgatgcgcatcgctgccgcatgggcgagggcgttcggcttgccgacgataaaggtgtcgaaggtgaagcgcgggtcgaacggcgaaatcagctggaacgggtcttcgatgacggcgttctggttggctttcagccgcgattcttccttcttcgcgctttcatcggagataatggcgttctggacgacgacgatctcgaggcggcgcacgtccggattgatcgcgctgcacatttcaaggatacgggcc

SEQ ID NO: 46683 - DNA, 698 bp, Arabidopsis thaliana landsberg
aacatgctagcacaaaaaatactcattaaattcctacccaaataaaatttttatatgaaactaaaacttatatacacaatggtagtgatacaaagtaggtcttgatattcaactattcgggattttctggtttcgagtaattcgtataaaaggtttaagatctattatgttcactgaaatcttaactttgttttgtttccagttttaactagtagaaattgaaatttttaaaaattgttacttacaataaaatttgaatcaatatccttaatcaaaggatcttaagactagcacaattaaaacatataacgtagaatatctgaaataactcgaaaatatctgaactaagttagtagttttaaaatataatcccggtttggaccgggcagtatgtacttcaatacttgtgggttttgacgattttggatcggattgggcgggccagccagattgatctattacaaatttcacctgtcaacgctaactccgaacttaatcaaagattttgagctaaggaaaactaatcagtgatcacccaaagaaaacattcgtgaataattgtttgctttccatggcagcaaaacaaataggacccaaataggaatgtcaaaaaaaagaaagacacgaaacgaagtagtataacgtaacacacaaaaataaactagagatattaaaaacacatgtccacacatggatac

SEQ ID NO: 46684 - DNA, 497 bp, Arabidopsis thaliana landsberg
tgcaagtctagaggatcaggatccctgctacctgcgaacctcttctagtcttctccttcaaccggcccacgacaacggatggaggcatggaccagagcggcaccggctgggcggactcaccggtggccaaggctggcggtggcggttcaccgggattggggcacgcggcaagcgctctgggggctgggcagggagcgagggcgctcggccaccatgctagcttgtcggggaattagggactggggctctgcatggggtggtcggccgggggcggggctagtgccgcgccatgggaggtgctgagcagcacacaaggactgggaagaagtaggggcaggcgcttgaccgtggccacagggcaatgcggtgcagatgctcgcagcagggtgcacgaccggacggagcgacgaggcagggctgagcgacgccagtggctcagagcgtggcgaattgtggcaaggagcaggctggggtggcgtggctattgccgagcgacg

SEQ ID NO: 46685 - DNA, 314 bp, Arabidopsis thaliana landsberg
  unsure (1)..(314): unsure at all n locations
ccgaaagcgacaacacggcggcccaacacccccaccggacccaaaaagacaagcccccacccagaggaaaanacaaagcagccaacagaacacaagacgcaaagacacgaacgaagcgaccagaccaggaacaagggcaacaaagncacaanacagagacacagccaaggacaccgcacgaaaacacgccgacccccgcaggggaaggacagacacgacccacaaaccangaacaaacccgaaagggaaccgcaacagaccccccagacccgacgnnccccnaagaancagcagcaacggaacccnaacacgac

SEQ ID NO: 46686 - DNA, 626 bp, Arabidopsis thaliana landsberg
gttaaattctataaatcagtgataagattccactaatgttggaatggagacaagaaaattggggtcgttacgtgtgcattgaaaattatgctaccattcactaaaatgtaaatttatacatatagtaagcacaaaagcattcactagcgaaaaaaaaaaagtaaattgtgccatgcaacacatttcttgcgttatttttgttttgtttgtttcaaaatacaagttaataacacatcggtcaatacaattttatttttacaaattcaacaaatcaatatttggtctttgagaatcaatcatatcgatcgaagaatttgtaagcgattccctccggaaaggggaaatacataaaggttgccaaatgtacgtataccaagccacgggcaagggattattgattacaaccatctgctcaaatttaatctgatgatgtaacctaagcgtaccgaataaatgatatatttgactcattgactttgatttcaacgagtcatgcatatatatgtctgaaattacccagttcttaaattcagaatttatccgacgatgtagaaaaaaagaacaaaaaaaaatccacatttctgatttctggatactttcaaagttatctaagtaactatgtattt

SEQ ID NO: 46687 - DNA, 829 bp, Arabidopsis thaliana landsberg
cctttaccctatctcgcgactctaatctattgcctttgcattttcatcattattacatcttatagtatgtaacttttgtatcaattgtcatcattatggtttgttcatttgttcataaaataggctgagcctattaatgctcacggatgaacatgacccctacttttacttacctttcttgtctagaaattagagaatgctttgtgatgttaagttgcaactggttacgacaatcagttggttcaacagggctggtctcaagttcagtggctcgtccaagggtgatagtagattttttccgcaaccgatagatcatggtcaaataattgataaagaaaaatatctcacaatagtaaatattatatgttatatagtatgtgtctatttacaataccacgaattataaaagaattttaaaaatcaccaattatcaagtctttctaaaatctcaagaaacctttttgaagtttattctaaagtctttatacagttgatttcgaaaaagatgttgtcgtaactttttttttttttttgcttttaagtattgcaagtaattagtattgactctgttttgtttcctatccaaagcattagtaagtaattaacggcgttaatgggaatatgggatcgatgcttgtacaacattgtggaatatgtttaggaatacttttgtcaatatattataaaatgttaatattttagttttgcttaataataaatatacatggtcgggggattattatgagaaagtactagtctctaaaaagttcgaaacttatggtacatccataaagtctttgctttggccataccatttttatgattgata

SEQ ID NO: 46688 - DNA, 1234 bp, Arabidopsis thaliana landsberg
  unsure (1)..(1234): unsure at all n locations
agcaatgcattgctttctatagatttacttctaatcatgaacagaaggacagattatttataaaaactaaaaagaagatctaagcaggggtctttttcctgtaaaatttacacaacttttttttaccccacaaataaacgaattgtatagaaaagccaaaaaaaactagacctaaaatgccagttcatccactagaacaagaaacagaatttgagccatagctaatagcttgcaagctcgaatgagtcatatttgtcatccatctccttggaactccgtttgattcaccagccagattatatgcataagatctccacttgtttccaccatctttacaagaactcataaaccctaaccttctcgctttctgtgtcctctcaagaacaatgagactagagaaagtcgaaaagctattaccaacaaaaacatccgctcttaaacacacctcgtaatctatagccgattgtatcaaatatgaatacttcccatatatctcctctttaaccccaagcttcttcttctcaaatggtattaaaccgtctctccaaccacttaaaaccgatgaatcttcttctttttcttctaagagagtatctgctactgcaaggtaaagaactgttggagtctttaaacctgaaatgttccctactctgtccaaaatctctcttttactactacaaatctctgagatctttttccgttgctctagtttcttacaatgtatcatccaatctatctctattctcatgtgaaccgcaacaaaaggtaccggaccgaggatttcggttttcgatgcgagttttgccctttctgcctcacctgcttctcggattttcatcacaaccttatctgcttctcttgagatttcatcaaccaccaccatacactcaaagaccttagcatagtcttcaacaggccaatgatcgtgccacaagaacgggtttttccctatgagacggatcacttcaaactcatcgatggactctttacgagcggattgtttcaagtgttccaagtctcttataaccgtccatcttcttccactacctttctctagatcaaacacttgtgctctgtttttaacatccgagaaccgagaaagccgcacaaaccctgaacagagagagttgaatctttcaaactgaaacactttatcaaacggaatgggacgaagcttatcaacttccttgtagaacaaggaagcacttagactangcatgagaagcgttctttt

SEQ ID NO: 46689 - DNA, 645 bp, Arabidopsis thaliana landsberg
ctgcatcccggccaccatccgcagaagctgcccgggcctccgcggcgccatcacgcgcaggctggcgtgcgcgtccaccaccacgcccacctccacgtccgccaccgcggaggcgcggcgtcgtctcctccgcgccggcgtcctcccgcgccgccgcgtgccgccgcgcgtactgcgggtaccggaagaaccgcgcgaacggaggcgggtctggctccggcgccgacacctcgctgcgcgccgcggcgtccccgcccgcgcccgcgccgatgtcatcacggcctcgagccggctgcgccgcgtcgtcgcgtatcgcggccgtgacgctgcgctgctgctgctgctgcagctgccgcttcagcgccacgttctgggcctccagggattgcagctgctgctcgagctccttcacgaaatcgattgcgccgctgaccacggacgcctgatcgctctagacacatgattaaaaacaatttcattttttacacttaaatagtattgaagcaacagctgggtggtagacgtagacgtggtttgacaagagaagtcacgggatgccattatctgatctgattcgcaacaaacattccttttcgccgacctgtttatagttacacttaggaagagaaacactacaaaatttga

SEQ ID NO: 46690 - DNA, 374 bp, Arabidopsis thaliana landsberg
catggggtaagtcaatcttgaattgcagtgctcactgcaataagattcacggattcacatcgcgctgtgtacctgagagagtattataggagacatatggatgttatgagatagctacaaatcatgtacacaagtttcaagcagagtaacaccttgcgaggctgctagttcgcgcttcccaaggtgttaggaagtcatcagcctctgctaccaagcgagcaactgagatcaccaccgctgctcgctgttatacccacaagtaggttttcgatagtacttgctgagcaatgcccatggccgtgatttcaatcgggagcaactgtcagttataacttgctccttggatatgagttactcccatagctttggcgtca

SEQ ID NO: 46691 - DNA, 461 bp, Arabidopsis thaliana landsberg
tttcggatctgctccacataaaacacaacaacaacaacaacttttcccatttagactaaccaatctcactactatatactactatatatagtgtttgattcctatttaatactcttgctatgtatagcataagcttggagaagggaaatatgagtgtaccattaggatccgtgccatggggaaatttgtgaggaccgttgccacgcagatctatgaccataattagaaaagacaagattttccaaacgttaatgaaggcaaaatcaagactttttttttacccaaagaaaaatgaagactctgtaataaatgttgagagacgatatatcaaaatagaaagtttggtgaaaacgacagatcgaataaagtaccttctctgaaatctgggccagcaagaaacgctgtagaaaaacacatattcatcaaaagtttttattaccaaaaaaaggttccataaattg

SEQ ID NO: 46692 - DNA, 488 bp, Arabidopsis thaliana landsberg
gttttaaatccctctttttaaaccttttttgttctatcagaaacaaatctaatctgtttgatgagtttgtattctatttgtgatttagctttcaagtacctcagagtccaattgggtgagaagaaggaagatttcaagagcaaacgaaaggtcccatctttactcatctgttttcatctcttcaaagaacttgaagtcttcatctctgaacagagcttgaaattgcttctatttatattgttttcttagcatatcgtaaagctgctggagggagaatccattccttggactgaagaagatggcggcctcgtgataatgattcgggttgatgagattgaccccaagaaattgagttttgccaagaaataagaaccattggtttattcttttgcttcattctattagaaattggttgcaacgtttaaagcattatgatttgttatgtaaccaaacaaagatgcattttgcggaaatatgatttttggttt

SEQ ID NO: 46693 - DNA, 788 bp, Arabidopsis thaliana landsberg
ggtaaagttgtaggatcactcacttttagaaatgttatgttggtctaaagtgtaatgggtgtgattataggtggcgcggccttcttagagccgaagacacggaacaaagtgaagtttgtttactcggatgatccaaacactaaggtgataatggaggagaactttgatatggagaaaatggagttagcgtttggtggtaacgatgactcgggttttaacatagagaaacattcagagagaatgaaagaggacgacaagaaaagattggcttcgttggagggcattgtttccgcttctctagactcgctcagcattttatcggtctctgatggtaccgcctctaacagtgctcaccctagctctcatgatgtctctgaggatgagcattaaccacagagaaaggactcatcaaatgtttgtaacttcaagcacacttggaataaatctaattccacttcatgaggttgtagctgcaaccattgtatgttttcgaaacctattctccaccgcgatgagattcaatatgtatttttttcgcgatgagattcaatatgtatttttttcgattagtaataaaaccgtcacagataaaatgcacataacacaagctgcaatacattttaataccacatacttaacaaaacagagaaactagtcctcggtttcttggtatagcttcatgatatccgcacaacccggcatagctgcatcccttagaaatcccatgttgttagcaaaacggtcgtcagaagcaataccgttgaagcgagtgagagtcacacgggcac

SEQ ID NO: 46694 - DNA, 602 bp, Arabidopsis thaliana landsberg
cggggactcgaaagcaaaatttatttgaaattttattttttgttagctaattaataatacggggtgggaccattatagtcattgttgtctacagattttttgttttcatgattacagatttgtttagttgtattatcaaatatactaacagtctaacatatatgaacaaaactgctatgtaggtcgattcctaaacaacaataatataatttataccaagaaatataaatatgtttcttttgcttgatttggtcggttgaaaacatgggaattatttcatctcactcggtggaagccattatcactagatcgttgtatccattcgaccaattttcttttttaaaacatttaactcatacacagtaaataatggtgtatttaggtacgacttactatcaactgacgctatattttctttttgggtaaattgttaactcaaaaattaacctagaaacatagaaatattcaataacaaaaaaaaacccacatcgaaaataattcaacattatcttaattcactgaacttgttttctatgaactatagtttacgttattcataaatttttctttccatttttttaaatttagttggtctgcatgtt

SEQ ID NO: 46695 - DNA, 1110 bp, Arabidopsis thaliana landsberg
ctcgtcaccttgcagagagattagccccaaattatgaaacctttaatcaatagtaactaacctgaagcaattggagtacaaaaattagactaaagcttcgattttcagtatcatccaatatattagcattaaccttcactaatctccgatatagcagatatgttcagccgtgcgcgacggcgaaacgaaaccagaagctgggtgggtctgagactcttgactctcgagtgtttgaaatctgtgttttttttttccattaaaataataaaaatggttcaaaaaaatatacacaaaacgtctacattatccccaaaaatctaaaagttcctcaattttaatatgagattttctacttgaaagcacaacatttaagaattacatagttatatatatttcattaagaaaatcatttatatcaactagaaataattcaaccaataagaaaaaataatgcagaatattaggaatcataaaacatcaaattgaattaaataaagcatagaaacttggaaacaaaaaaatctaatgaatgagaaaaaattacttcttaatcatgttacataatggagaacagatggactaataatttattttaattagaaaaaaccttttctgtataaacattaaacagtgataaaaaaacactcgtttaactttctaagataattgaattgagtgggtcaaaaatatcctgaaatattaatctctaaaaatgtcaaaaaaacatatgcaaatataaatatttatatatgttttaaataatttgtaagaaaattgaaccattggttgtaaaaatttgaaaaaacaaatactttgaagatataccaatttttagaaaaacactgaaaaagacttaattattaaaaatatattgtcttccattaaatttaatagtcattcacttcattttatcatatatttgatcaaatgatggttatctcacctaattatcatttatcaattatcatcacctaattggaccggcagtctggcacgcaagcgttggctcacatcttccacgtaattgccacaatttatgagtctttggagttatctaatagttatactctaaccaaaaacatcaccagaaagttcaacagagcatggcac

SEQ ID NO: 46696 - DNA, 612 bp, Arabidopsis thaliana landsberg
  unsure (1)..(612): unsure at all n locations
tatctaagcatggattggttcccagtttggccatggagtcattcacatttttccctgtgccgagccaaatggccagtgccaatggtagaacgagcagcaagttatttcttgcagaaatgtcatctagctcctactcttacctgcacaccatnnnnnnnnnnnnnnnnnnnnnnnnnnnnnnnnnnnnnnnnnnntgtgcatttcctcttcctacccgtgcttgtcgtagtggaggcagtagcagtagcaacaccactgccatctaggagagcctcaccctcgacaacgacattgtcatcgccaaggttgatggtaggggtaggggtagtggaaccaaagagatcctctagaccatcatgcacgtcatccacgtcatctaggatttgacccatcaacactagttcatgattaatggaggtcggatcataccgacgctctatcgccggcacctgatccctcatggccacgatctgcaagtagatcaggacagaggagattaggcggtgacagtggtatggtaaagacaagggattatggtttagggtttgtaatcatacttggccgcaggagtcactagttcatcggtgatacaagacaacgtggacaggcaga

SEQ ID NO: 46697 - DNA, 891 bp, Arabidopsis thaliana landsberg
  unsure (1)..(891): unsure at all n locations
tttcgctatatgtatgaagaattaaacaccgacaaagataaactaaacaccgtttgtagacaaatgcatttgataagtacgttttacttaatatcaatcaaagtttatctgaatacattacggaaagtctagattgtacaacatataatgtattggattatactctaccaaagaggcaaggatagtcgtagtctcacaaaatcgattcatgcatggagaataaaaggcactatttaagagataacaaggaaaataatatttaaataaacaatacagtcaggtaaatagagtaaaacgtatatatacttggaatttgatatccggttggtgttttcttggaataaaaggcacacatttgtagtaccatatagtgaaggaatatataatagatattttagtcaatttaaaatgttaaaaaacaaaaaaattgtgaaaccatgatagatttctcatacctcgtccgcaatatttggatgacatagaaaatcaaaatttctaaaatataagacccaaccaaaacgcattccagcaaaaatcatgaactgaactctaactgaattaaatagagttggtttttttgtgtgtgtgtgtgagtgcacctaatagagttggttataagctcatttatagctttacgagaaccaaactatataaccggacccaacccaagccaaacaaagccgaagtacccatcctaataacacttataacacatactgtatattgtatacatatatatgccaagcaaatgacttgatatgtggtttgaaataatattgtagcgcgttatataccaaaaaatgaaagaatatggtagcgtaggtcgtagggtgtgtgttatatagattgtttgaccgtataatataaaagttcaactcgaatggcnaagtt

SEQ ID NO: 46698 - DNA, 407 bp, Arabidopsis thaliana landsberg
tgcatctagccatcgacatggatctacacctttcaataattgacgactcctccgttttctttttataatatcaaaaattgggacattggttatattggaagagtggtgaaggatttatcctatacatcaaacctagatatgaatcccaaccaactatggaccgctattgttctctctttgtttttttttttgctatggaccgctattgttagctttttatttagttattgtaaacatcttaaatgaaaaaaaaaaaaaatactcggttcactatatgcatcatgtaataataatctaggttttggcccaagatctatctaagttataattaaaacgaaaaaaaaaacaaaaaaaaaaaattgaaaaagaaaattgttaggtagctaaaaccctcaggtactacaaga

SEQ ID NO: 46699 - DNA, 959 bp, Arabidopsis thaliana landsberg
tctttaatttctcttttcttgttcttacattttcttcaacaaaaaaattccaattagctttgacaagtcatcactctgcttattctttgatttcatagttttcttatgtttttgtttgtactactagttttcgtgatcaggaccatactaatatagagacgtttgctacgtttaaccagagaatttggtgatttttgatggattattatattgttttcagtcactttcgcagtatttttttggtctggtaaataatatgtagttcttggaaattgatcttatactggattgaatgcttcttttgactgtttttatagcattttaaccgaatataatgcatcccttttaaaaacatagcatgaataatgcttcatctatctttcacgtacttgagaaatacaatgttgaaaattcatttatatataagttttttctgtatatatatatatgtgtatatatgttcatatttatgcctaaagcgttactacttactactagtatgataaatcctcactttcatggactgaaagagatgctttttgtgttgtacttactttatatttcttgacagttgggttgtacttacttaggaaagtgttctatataggtttcttctcactctattctttttatcagtttctttacttagtacaaatataatctagttactttccgatttattttcttgaaatccttatccgattgtttatgaaatgtcaatagtagttcatgatacttttacaagtatctatgcgtaaaatattttttatatgttttaaaaatgtggatattcttaatgaagatatcatgaaatgaaaggtaatatctaagctgattttgttttttcaaaaagaaaacaaaaaaggtgagcttttaaaaacccctgatcatttttatttaaaaagatcctagaaagttaaaacagttagccattcgcttttctggcacttgtgaatttg

SEQ ID NO: 46700 - DNA, 1970 bp, Arabidopsis thaliana landsberg
tatatagcatttctggagttgggtccattctttaatcaatagacaaatttctttcaaaagtttgggtacatttttgtaatatcgtctttaagttgattattgggaacaatgttacatctagagattgcaattttacgtatgtagattgtagatccatcatatttatttattatcgtagaattatcctaaacacgtgtatgaaatatttttggtttaaatcgaacgagtcacaaaaatcaaaatttgtggacatgcagattttgaaatgtactcatatttcttttggatataagtcttcgtccaaaacaaagtcttgtttgtgtatgatgttgaacttcacaaatgactgataacgtaacgtaatttcacacgagtgacctcaatataaaaaagggattgtgttccatattcaacaaaacgacactaatgacccatgattaaactaagaaatgtagattaaaattttctataagattcgtttcaaagcagtcaaagactcaaagtcgcataaaagcacaaattaaagaagattagtctatagggaatcttaaagaataagttgttgggtttacccatatatgcacttattaatctatatagtagggaaccacaaagaaatttaaaaaccaaagtagattaagaagttaatctccaaaataagtagagaagaattaaaaatacattaatcaacctacataaagtgatatcataaagagcctaaaatcgattcgtccgttgaggacaaagacaaataaaagaaatgttttctttaaaaccattaataagtgatgcataaaaattaaataaaaataaaaaacggaaaaaaaacaagtgcagacaaaacgaaaccagaacacggtgaagagaagaggcaagagagagagagagagggaaaaggaagacgatgatgatttctcggagacccgtttcaagtccgggtcgggtagagaaatatccaccgccttttatggggtttttgagaagtaagagcaacggcggaagtacaagcaggagtagaagtcgaagcagaggaaggtcacgcgctagtcctcttttcgttcgccggaataaatccgcggcggcggtgactcaagaaccgtcgtctccgaaggttacttgcatgggtcaagtccgggtcaaccgatcgaagcccaaaattaaacccgaatctcgagataacccgacccgacgacgatgtgagtggctccgaaacgcgtcgttttataacaaattcgccgggaaaatcaaaacgatgacgttttggcctaaatggagactgtgttcgttttcgtgtgcttgtcggaatttgaaggagaaagattctccgagaagtcaattagatcatccgacaacggaatcagtcagagaaatcaaagaagaaatcgaaggagaagaaaatttcgaaatccctaaattatttgtgtctccggctactacgccgcctataaacgctctgttgttgacgagaagcagatctgcaccgtatagatcgtcgtcgttggctttcagattctgggaagaaaataaccaacgagaagttgaatcacagcaaaatgtgagatcggagaaaactgaatcggaagttcccatcgagaaaatcaatggttttcacgagccggagtatgttgacagagatgaagaagaattcacgaagttaagatttgtacggcagccggtgttgacaaggagcaaatcggagccggcgaggatcggcgagaagatgatggtgttgcttcccgatgaagaagaaggttaggtagggtttaggtctctcacgtgattagtcaataattgcactaatcttaattaattaatcgctggtatgactaatttaatttgcattgtttaggataatttgactgtgttttagatatagtagaggaaacaaatttgtataaagatttgtaaccatacatataacgtaaggtgtagatatgtttggcattcaagaacgagatgtctaactatac

SEQ ID NO: 46701 - DNA, 1202 bp, Arabidopsis thaliana landsberg
cttctctcttcttgcttactgtacacaaccaattttattttcttaatattgaaaactacacgatcattgctcgagtccaagcatatcaatattgatcaaatgataaagtcacactaatcatagttactgatttctgttaaacttccgattttgtaatacagtaaatatgatgtgggtaaataaattatcttgctctccaaaataaaatacaaaatagtgcctttgtgggttgaattgtcatgataattctatcactataatggacctacgtagcgattgaaacatcaaaatccaaaatctttggtcgattctccaatcaaatcacactggtcaagtctcaaattatctggccaaattgagactatttttagttctgcaagtttttagacaaatatcaccaccttccaaaaaatttatcacttttgggagaagtcaattcaatctcatctacgaattgttcccattaatgcaaaaattcgattcagcgttttaagacagcaagcaacacccaataatagaaacttcaaaccccattgattgttttcacatggtagagacttccatcagaactagaccaagatttgtaaccatctgtaataatttagctgtcatgtcacaacccgagttcaaattatctctcaaagtacaacatcatgtgagttataataaaccacacaccaaaaaaaaaacaatatattttgttgttgttgctaggagatttatgtacttgagagaaaacccacttgttaataaaactaaagctttcactaaaacaagatagcagaacatctaaaacctgaaacaaacttgatgaactatatactacactggtctactacgttcatgccttttgtctctcttacgaacttcttccaatgtctttgcctgaaaactcccctgatccaaacagatcgattccacctccaccacctatagaagttaacagagcagacaatccacctccggtattaccaccattaccaacagctcttcctaatccaagaaagtctagtgtcgtctgtttcggaccaaacaccgatgaattccccatcatgagctcttttagacccgatccgctaccaccgctgctacaaggtagtccaagtccaagaccaggagctaatgacaatgcatcatgattgctgagttccatagatgaagaagtagttgaaactatgcctaacccgcgaagcaacgaacct

SEQ ID NO: 46702 - DNA, 967 bp, Arabidopsis thaliana landsberg
accctctctcttggcaagtttttgctgcaaaaacaagtaaaccccttcgatttttaacatgtaaacataccatttcacataaaggaaaagcaaaccaaataagaatgatgttgcgtcttatatctcaacatcaaatgtgcaacaattagactccaaacgtagaataaggatattcccacagctatatgcatgtgaattaaaccaatacacagatataacattgtgagacatcgtaaaccaaccaagatgatgaaaaataccttaatcacggacatcaaaccagttttgaattgaagaacacctctaccatcactgttagggtccaagttctgtgccatagagtacgcttgctcacatactacatcagacaaatacagtgttaatagtagagccaatgaatcccactcaaataatgacacaaatacttacgaattctagctacagaaggatcctcagactgaatctcatcagcagcttgtaagatagcatcgatatttgtagctcgaccaagtgatggcggaactgctccagcaagtccgctactaacacgctcatgaccttgacctgtatttctcagctgctctcttcttaaagtggctcgaaccagcctatcccaattactataaaccctagccataattttcaaatcctagaggaggatttcaaattctctcaaaccaaagattgtgatgtccctaaagagggtgaaacaccatggcacaaagagagaagatgaagaaacgcgaatagctcgagctggaggattcgaacccggatgtgacggtggtgtgtcggatgggatctatggcggatttaagaaaacgagtcgatttgattccttcgtaaagtgggttttctcaaagaaaataaaatgaaaagtggatttggaaaaaaaaaagaaaaagttgaaaattacaaaataacctttccgtttcgagccgttcccttccaactatgtaatataact

SEQ ID NO: 46703 - DNA, 594 bp, Arabidopsis thaliana landsberg
tgacatttaaacccacccacctttcttattttcttttctgtctttctatttctgatcactattattatattacttggattggttcacatttttttttaattttataaacccataagaaatttttttcccttttatttacatatgaaaacatatgtattcccgtgtcaaaaaaatgaaaattctgaccaatccagagagatacgatttatggggtttgtatattccaatgtggcatgttgcatataaactactactatttaactagtttcttaataattcaaatccaaataaacatgcataaaagattgtgataacgtacatagctgtgatataatatgcattacttttaaaaagcaacggagatagttcgtattttcatatagtctttagctgggctatctaacactttaactaattagaataagatataaagtttgctataaaatgtaaatagatgatttatccaatatctacatatgagtgtgtctgaaaaaggcaaaccaaattcaatgtaacgtgaagaacaccgactccttccttaaagtttattggggatagataatttcgtccatgattttaacttctacgatttag

SEQ ID NO: 46704 - DNA, 423 bp, Arabidopsis thaliana landsberg
aatttctctcattccttactaatttcggcaaagttttgatttttccggttcgaatcactctttgtggggatctcacagcgtactgtgtgtgcgggttccgaagaagaagaggaattcaaaatagtacgagtcttgataggttctccgtgaattagtgtatggttcccgcttgagccagactgaatgacgtgtgggggttctgagtggattgaaattagggtttagattttagggaagtgaatggattgtgatgtgaattataaagaggaaggattcattgagattggttttgtgcatcgagatcaagttcgaaatggcaatcgaatggtctgggtgctgaacaggcttatgcctttttttataacattaactacgctgatggtgtaccccgaggagaaagaaaactctggcctagtttgattt

SEQ ID NO: 46705 - DNA, 625 bp, Arabidopsis thaliana landsberg
  unsure (1)..(625): unsure at all n locations
ggatggtctacgacctaagaacatgtaatgtcagtgacctgaggacggacagtctacaatacaaccacaaggaaacttaagtccctacgtagatcagctcaagtcagctgcgaacggtccgctcctctcgatcgaacgatctacacagtgcactaggacttagccaaactgaggctcttctgcctaatattgtcggacgatccgcagtacaaactacccaaaccacacagaaacataacaattctgcaaacctctctgttagttcccagacagtcgggccacctggccggatgatccgcagatcagaaaatccaggcccttttcaaatttgcttttgagaagattttctttcgaagtcggaagcgctattggccctcatgcatcgactatatgctccatgaggaactaagtatcatgtcaagtaatcatcattggatcctcttgatagtacgaatatctagcctactaaccggtcagtttacttctctaatcacctcttgattggcaaaaggaaaacttatcgattacctttgacttgagttgtccacattccataactaagtctccaagacttctatgtactcattcatgagtggtctacttgcatcnttatttgttcaataaa

SEQ ID NO: 46706 - DNA, 852 bp, Arabidopsis thaliana landsberg
tgaactcactctgatcaaaaatattattatttccattaatatcacttaattactcttttcttcgtttatttctttctcctctcggaattatgaaattaaatactaatgacgaaacgcgatttctgtttataccattttttacttcaacaaatctgtttgagacgtaatgcattatcttcttttttttttttagtttagtcgtatagcaagttagggacaaacaaacaaatgcgatttgtctttccttttcttttttttaatgcgatttggcttgatagtgcgcctctacgcttattatagccgacaaactaaaataaaagaatcgtctatttattctaacctttaatgacattttaccttttttgttttgttttgttttgtctatcttttatgaagaagactctaaaggaacgaaacttcttgacgttcaccgctagcaaattcttgaatgcatgcgattgtctttttcttatggaagtcttagctttttctcttgaatatggattttaatattcttccgtctagtcatcaaatgagattaagcatttatctacaatatatggaacactaatcatataagttgagaatctacaatcaaacatttttaaaattggatatggatgtggtattgtatggtaaaccatcttccaagtaattggacatttggaatactaagatttacttggcatatgaaacaatttaacgtcccttgacatttgtaacaatttcacgtacgaacgattgcaacgactttgttatgtgtcaaacgcttttctaatatggaagttgacacgactttgagaattaatttgtaagaacattaaacaaataatcttccagttttgtagtctt

SEQ ID NO: 46707 - DNA, 1025 bp, Arabidopsis thaliana landsberg
  unsure (1)..(1025): unsure at all n locations
taaaaagcatcaaaaccattaacacaacaaacccatgaatagttgataaataaaagtcacaaaggctcaagtttatttttagtacttggatgacacgagattgttcccgccccttattaccgaaaatggaaagccttcctaaagaggacttaacggttttgatgagagaagtttctgtgtgcttcttctcaactccattggtgaacaaatggattttcttgaggtctttcttgagctgagagtaatcaacgaaggcgtctttccattcgggcacaagctgtccctcgaattgctttgtgaacttgaccatagcgttttgtcttttaagtccttaaactcaaaaactcacaagagaaaatgatcaagaatagagtgtgtttgttttgtgagtgtcaggtaagagaggatgatgagatttgctttatagtggacaaaatcacacgcagagaaaaaaagaagaatatatttgactggattgcttactcctactgacgatgcctcacaaagcacattctcaaatatccttcttgaaacctaatttcatgtactaatttttatcctatgctccttccacttgtgcttttgggagaggtaaatcttgtctcgtgtgggaccgtcctgattctcgccagtgtatatccaccgtgcttcctccggctaccgagcttcatatacctttctcaacactcaaaatgtttcatcttagagtgaaagttgttatacgaactatatgaggggcaagggtaagggtaatttgggtattgtaaatcggagaactagaaatagtaagtattttgtaatgttttgtgtggaaaaggaagaagatagctgaaatggaccaaaaagaaattaggtgccaagagacacaaaaggtgagtgaacttagattggaccagctcgatttccactacattttttcggaggacaatgaanaatttgaaacacatactaaatcttanagaatcaagaaaaagaagcagaagaagattaccaatcaattctgattcatagttcacatacaaatg

SEQ ID NO: 46708 - DNA, 344 bp, Arabidopsis thaliana landsberg
ccaactacgactgagcgtattacctccggctgttgcgcaacaccttcgcgtcacgcctcgcgcttctgtttagcccggagcatttcgaggctttggtggcggatcctgggcagttgagcctgttcgcgccgaagctggaggaagcgagaccgattctcacacgcttgagcagccccatcaccgtcagcgacgaatcgcaatgatggtggcatacaacgcccgcgtgctcaacttctagcttggaagcgagcacgcgggcgttctacttactgcctggcctccgtgctcagaggtcgtcgatccagccggtgccggccagcgtcttctccgtggtgctgcatacg

SEQ ID NO: 46709 - DNA, 759 bp, Arabidopsis thaliana landsberg
ttcctgaatacaagttcatgtcttcatctggctgatgactcagtaacttatttatggccttccattcatctttagtcaatctttcctccatcaattttgatccgccagccacactatctacctcagggtcatcttcagcttctgtccgccttcatggatatggtagccacaaaagttaaaaaaaaaaaaatggtttctatttgtgatcatgactgcgacaggaaaaagaactgaacagccaaaaaagcaagaaaatgtatttagaaggaagcagcaaaccctactgaccagttgaatgagaaccaaccaccctttttcagctttctctgctcagctgcttcttttgactttacagattctacctttgcatgtgcaagcaacctatcacggaaatacaacataataaatgataagataagtccgaagaagaaaaaatcacagagacagaacagtgactgtgagaatctcaataaaaatagaaaggaagaatggctgagtatgaacttcttatgagcaaaaagtggtattgatatgactagaagtagtaattagatatcagctagtatgtcattcacaaagtttgagcattacttgaagaatgaatcatattatgtttaattatgttactatcgtagaatagcatctgaacgaaaaattgttcttaattatacacctgaaaaagatcacaaacgtaccctatcaaacagggcactaccaaacaaacttcatcacgacatagatgcgagcgtaactacccct

SEQ ID NO: 46710 - DNA, 1051 bp, Arabidopsis thaliana landsberg
caagggcgaaaattaagaaagattgggaagagaaagactgggtggattttgttatccaatacaataaacaaatgttatactttcacaatttcactgcagaatcttactaaagtggttgattaataagtaataaagtggtcgtattatgataatatcaaatctaagcagcaattctgcgaggaccatgtgattgattacacggacaaaactcgtattacgcaatctctttactatactaaaaaggtaaaaagtctttaaacacaagttatctcatcgtttacaacattaaccccaaaacacaagttaatacatagtttagtaatatgaagtttgtttaccattagcttaaatttttagtagacctatttaacacatggtaaattgtatgtctctaacaaacatttcaaggaaaatgataaaatatactccataataaaggtaaaggaaacatatttcaatatgcagaaaaataaaaaaggaaaaagtaagaataacataaggaaattatatatatattatctgattggttaacattacactcaaacatattaaaacatgatataatctaaattaaaaagctaaaaagaaaattattccctgaaatatcatttttttaataataatttttagaaaactatgtttccatgtactgtgggacactatgtttatatggggacactgtgagcaaaaatgacagtttttgcttcgtaaatatgtgtaggactcgttacaaggcaaatacttgctaattagtatttgtgacctgttttgacccgtacaagtaattgaaatttaggtttgatattttatttgcctgctctgtgtgttaaggtgtatgaaattgttagtcgggatcgttgtacaaatatgatttataaatgatgtttatttactgttgtggttttgaactctattttgatgagctttctccactgtttaagattatgttgattcactttcacaaacgcatacaataatcatttacatctttttgtttggtttttaaagttaggtatgagagtaaacacgacattgccggatgatttgcagc

SEQ ID NO: 46711 - DNA, 629 bp, Arabidopsis thaliana landsberg
  unsure (1)..(629): unsure at all n locations
aaaaaaataagtaccccacccccatataaaatgactatggttactgtttgaataagtattcttgtttgttaaagcgatcagcatttgaagtattatttttccttacttaggattattatttaaagcagttttacttattttttcatatattaatttgtatttttggattttaagttaagtgttcatatttttcttcttttacttaattttatctcttagaagaaaatattttaacaaaaacttaaaatcattaatttttactctcttggatacgtaactgctatgtaaaataacgtagtacataaccgaataagtatcagtatgacagaaaatcgatcaatatatcatctaaattaaatgagtaaattggtaagaaaacaattaactggtagatttagaaacattaaatttggttcatcccctcggactataggttcaatcacgtttcaagatcataaaagcgacgaaataacaaatataacgaaattcaaatataatattcttagcttgttttcctaagaacatagtttcacaacttcgaaaagtttatatgtaaagaaagacgttcttcaaacttaaactgtagaacactntaattatgtaaagatcttccatataaataatttaac

SEQ ID NO: 46712 - DNA, 645 bp, Arabidopsis thaliana landsberg
tggcgtttttcgtttcgtactagtttcaaaatattaatcatatactatatagtaatcactcatagtgcatatatacatttctttaacattgcagtagccagctgatggctgaaagtgattctgtgattggtaagagacaaatctattatttgaatggtgaggcactagaattgagcagtgaagaagatgaggaagatgaagaagaagatgaggaagaaatcaagaaagaaaaatgcgaattttctgaagatgtagaccgatttatatggttagtttttgcattacatatgttcttgattattaatttgtagtccatatttaataaactgctcaagaaattttcaggacggttgggcaggactatggtttggatgatctggtcgtgcggcgtgctctcgccaagtacctcgaagtggatgtttcggacatattggtaacaatattcgaataaaaacttcatacgtcgatcaataactttcctgcttatttaatttttgttgtttttcgtcgtgagaaatgttttaaattttcaaatctaatgtaggaaagatacaatgaactcaagcttaagaatgatggaactgctggtgaggcttctgatttgacatccaagacaataactactggctttcaggattttgctga

SEQ ID NO: 46713 - DNA, 670 bp, Arabidopsis thaliana landsberg
gctataacgatctgatgattaagactttgatgaacaaaaggatatcgagtatggcgaagcttattataagtaaaccaaattttcaaaagtgattctggtgagagtttcttctggtgtgttcgtgaaaccatactgtcttaagctttgtgattaaatgtgttctatttctggcagaaaaccagtgtcaaggaacttgacttagaggctgcattgaccgagcgccaggtttaaattctcttccctacttgtcgtcaccaatttcctttaacccactgctacggaaatattctcgtttgtatttgtttatttttaatagatttccacttcacactgtcttggtaactccgattgtcgtcacagttccattttaaggctttgcactttgtaattgacacattgttgtatgaatcttttatactgatagtggttaataactcaatactctcctgttgtcttgtgcagcaccacaataaactaatgatggaagctaaagcaagaggagaaggatacaaaattgacaagctcagacgaaatatagagatggacgagtatgatttcttacactggcgccgatctttggaggaaagagaagcattgctcagagatatcagctcgtaagtaaaaaaaagttcacttatcaaagttcactttgatgtttttcaaagaaagt

SEQ ID NO: 46714 - DNA, 112 bp, Arabidopsis thaliana landsberg
gttatatgccaatatacatgacgatgtgtgttgaagtgaagacgatatcagcaaaagcaaacaacagcgaatacagactatttgtcacccaatccggatacaactcccctaa

SEQ ID NO: 46715 - DNA, 787 bp, Arabidopsis thaliana landsberg
gggattcttaggaaaaaatctaaacccattattaatcattaattccactttctaacacactttcctatataaagcaatggccactctcatcttctttcaccttcaaatacaaatcatcattacataaaaaaaaaaacaatctcttctctcttctggctaattaacaaagcatctaaaccgaacatacccggttcggtcattgttctctgtccatctactagctctgtctctatctccggtatgattccttcttcttcttctcttatgtcttcttcacacatatttcatgacggcttcgaaacgtctttctctcttgcattattttcgtgactattcattttctctcactcgcattagccaatcttgcatttgattttttttttcctcctaacttctgatgctcttgctagctagagaagctcctcaaagaagtttttaaaaaaaaaatattttgcaatgatctatctattaggagatatgatattctctatattctcgtttacgttgtttacgatgctaaagatattcccccatgtaactgtaaaacctttatattgcgatgaatgtagaacgatctcctcaaggagactttcactatctctactctagctcttttttctctctagcctgaaataattgtagagtgaacttcacgacaacgttatcattcatacccatcttcttttacacattttctttaaaacacgttacatgcaccccttaatatcatgttgggaaaataaacatgaaccaagaaatcagattcccacaataaaatctctgcatc

SEQ ID NO: 46716 - DNA, 489 bp, Arabidopsis thaliana landsberg
aaaagtttttcttgaaaatctgacaattgttttgtgaagttcaagaactcttttacgagtgtcttgttttgaagtggtgaagagagagagagagaatgagagtgtggttggagaagggtgtgattggtttatataggagggagagagagtgaagaagactagtggtcaaagactcattgagacatgagagattgagagattcgtgttcctagttgatataattaatgttaaaaaaatttgtaaaatgaaaaaaaaaaaaaaatataagggaaattaagggtttactttgattttattggattttttgaattgacgaatttgtgttaattaatgtcattttagaaagtttttttatatatatatttttaaagttttgttaaagttatgttgtgttcaattaatatttttaaagtaccacaaataaaaatctggtgtgattcaatggaatttgcataagtagagattttaacaaatctgcgagcatttttc

SEQ ID NO: 46717 - DNA, 1060 bp, Arabidopsis thaliana landsberg
taaaacccattcgaaacggatgggaaataataaattcgtttttttagccctatggttccatccagagttacacaatgataacaaactagaatatttgatgacacagtatataacaaagattaaaatattcgagtaaccaattttaattgatttctttgcaacgatttaatagaggagacatgcgaacgagacacgagtcctatagggtagtaaatgaaaagtgattagtaggggcatagtcacgtaaataaataaaaaagtatgggtaaaaatccacggacgtgagagcaattgttatatccatttgaaatcctcgtcaggttacacgaaacgattccgcttctccgcttccttcataaatatctcactcatcgtctctagattgttctttcacacgcaattttcatttctctcttaaccggaaacgaatctctcttctcaaagttttattttctctctgcgatggctcaagaagatgttactgctgttgctactaacggtgctggtccggtggagacgcatcttgtcttcactgagttcaagcagatgttgctcgttgaagctcaaaagttcggtgacgctgttactttctacaaatctgcttttggtgcgatcgagtctggtcattctctttaccctaagcgtaagcttgaccaagagcttcctcatgttctctcttctgagcttaatctcgctggctcttccttcgttgtttgcgacgtttcctctctccctggtttttctacgtaagtctctctctctcgttttggtgtttagcttctagatctccatgttttctgtttttttttaggtttttgttcgtttagtgtttgatttcgttttagatctggttttaggttgttttattagaagaaatctggagaataaatcatgtttagaagttattcctctcccttaaacacgatttttttgttcgttttagatctggatttaggtttttgaaatgaatagtttctggaaatttttatattttaagtggatgattctgctttttcttaaatacgattactgtttacttatgtggatttggttcctttcc

SEQ ID NO: 46718 - DNA, 930 bp, Arabidopsis thaliana landsberg
  unsure (1)..(930): unsure at all n locations
aaaaaaccaaagctggtaagaaaaaaaaagattaaaagagatggtaaaatgaagaaaaaacaacaaaactaacaagcccattgacatcgcagcgactcctttcagttttataagaagacaagatcctagtacgaaggcagctcttactcttcatcctctgctcagctctcccgcaaacttctctcccacgactccttttgttatttctcgtcgccaaaagtgatcgccggtgactctactatggtctatgggtcgctcgccggtatttcttcagatcatcatttttttatccctcgtcatagggtctccttcgttcaccgttaaggtaagtatacttgagaagtatttacctaattcttcaaaaataccaatttcggaatctgttgttataagtttagtaacaaaacaattgttgaaataggtagctagtatatatatagtcttttaattacataaatttatgttgtttaaaaatgtacatcaaattctgaaatttgtggaaaaaatagaaggatgataccatttaagatcaaatcatcaaaattcacatcacattttagatggaatgtcagcttaaaagatcagaagcctttgcagtttaataagaaactaaaattaatctagccatcaagaaccaaaaaacaattgaacttacggtttatgtttcctttactataaaaattcaattttaggttaaaatgaaaggacatatataaacatagagagtccaatgtgtattttatcgtttgagcttaaatcgttatactaatatatnttattttttgtcacagacctcagatgaagaaagtatcgaatgtgtcgatatatataaacagccagcatttcatcatgatcttttaaaagaccacaaaatccaggtttttttttcaaaaaaatttgtttatcattttggttatgtatttatcttat

SEQ ID NO: 46719 - DNA, 872 bp, Arabidopsis thaliana landsberg
tgtacattgtaatgatctcttttgttctgttgctcttttgttcttttttcattaacgttaatattcttaatcatgactcaaaacaatgtcttttccatttcaagaaattgacttaataaaacattttattcttgaacatttttcacgttcttgcttcatcataacatgttagtctctattgatgtcgacgacgaaagatgtagacctttttgtcacccaagaactgagccgggttttcgctttcacttcaactatgattacgattatctatctatctaacttatcaatctatcgagtagtttctttaaaatcttttctcaaaaaatgtggatcccccactaggaaagcaaatttagtgggaggttcttgcatctaaatcatagctttttgatgttatattaagaagctttgaaagtgaaactgtcaaagtggaagaacaatcttaaaactttaacacaaaatccaaaacccggtcttgtagttttacaaaaatttgatatgattttcatggataaatccccaagattcgattcttgtagattttgttaggtgtctttttgtgtgtttaccccatgacatgtactgtgaatggtaaaaaaaaaggttaaatctttcgtcctttttgcccaaactcatgatttgtactatgtgttttttttttggtgacaaaaatcaaatctttttggtgcaaacccatgattttacattcttgtaaataatatggtagtaaaagaaacaaaaaaaaaaggtcaagaactactattcaaaaaaggttttagttgttgtatatcttttgatatgcaaatctaacctccataatttcatcatagctttatcaaatagtactgaactttgaaattttggtggtaaat

SEQ ID NO: 46720 - DNA, 1852 bp, Arabidopsis thaliana landsberg
tagatcctttggacgcattgctaccttctttccgggagggtatttaaaaagaatctgtgcatggaagaaaagttgataaagagaagaaagaaagcaactcaatctgccatgaagcagaacaggcaagcaagaatgtattcaaaagaaataaaagagtggcaaataaagtatgcacaagaaagaaaaaaaacgatgaataggaaacagaatacgtgtctcacgttacatctctaagcatgctcaaaactatgtatactcaaagaaaaaaacaaggtagcacaaacctgtggctccaatataggaaattgaggcccacggtgacggagtattctgtagtctgccacttcataccttgacatctccatctcccatttctttcttctacggaaagcttcttccactggcctcaaattcgtttccggatgaagccccacgatgataaaatgttcgaacagtgacgctggctccttcaattttgtttgatcctagagtatttatcaaatggaaaacattagtcagctaatatgccatgcaagaccagaactttcagacagttaacggggaagaagaactacgtagccaaaaacgtagacattctagagagattgaataccagagcttttgaagagtggagctggtaccactgtcttttttggtttgctaagacctcaggattgaaagtgggccggttatcctcacgcagattgctgacaccacgccaagccttttgcatctgtgttttcaatctctggaaactgtttgtgcgtctgtgtccaggagtccctatctcactttgggtgcgcctatgtccttgtgtaggtgactgcggtaagactggtccattaaagtatacgttttgatatgtctctccagctgctttaactgcatccgcagtacatggcgaagagtcttgctctcctataacttctctcatttccatctttctaatacttgtattattaacttgtgtctcgcatcttggactctgcagttcattatcttcactgttcttttccaacaatctgttctcatccctattttcacatctatcacatgctgctgtatcttcttcggttccacctaccttcagatgaccatttaccacttgtgtatccagttctttaatctctttactaagagtaatgtcatccctctctggtgaacctgaagcagattcttcattatcccttgacacaaaatcgagtaccttttcatctctctccaacacagcttgttcatactgcttaaaagactcatgtccatttttatttttccaagatgtaatttgttcatcaccccccccccacttactagttacaggactcctcacaccatctctttccaccataatctgtgcttcactcctcaaggtacccaattcgtctctacttatcgataccttctcctcgcaagatgtagtcaactcctctgcattcaacaacataccttccttaaccatgtccaacgtattcctcctactcgaagttgtccatccattttcatctccatccctaaaatcttcaacatcggtcttcttcgggtatcctaatatatcatctcgatgaacagccaaaacgtctccctgcatatccgtattaaagctcggcttcatacaccacttcctcctcctccctcacacaacatcagccaaaatcaaacaactaacacaccaacaaaatctctcctaaaacacacacacaaaaaaaaacacatcaacaatctaatcaaaaacaaagcaatattatcaacacaatcctacgatcatcgaatcaccaatcctttatttataacgaaaccctaatttttttagaagagtttgaaatcataagaaaattcaatttttttttggtaa

SEQ ID NO: 46721 - DNA, 623 bp, Arabidopsis thaliana landsberg
acttcctcacgctctctagcattacgtatgaagacataataaaaaaaaaactttattgtatttctccattactttttttcatggcaacttagatagtttttcaattgaatttatctgattatattggtttatcaacctttttaatcctacgattggtggggattataatatagtaataaacagaaaagataaatccttaacgaagataaacccacagaaggcaatgacagacgaagccacaatgtcgcactaaacgaattttagtaacaaatcatattcataatacaataacgtaattagaagatttagtagtataatctagtctgttatagactgaaagcaaaaactaaagacgcataaaatttaacccatttgagacattaccatttaacaaaaacgaagtacccgtatcaaataaaaaaaatgagatgagtgcttctcaacaaagaacacagaaggatctgataatccaaagtcaggtatatctatatattgtatattgacctctgtgtatctatattctcatgcgaaagaaaaatgatacaatttcatccgcgactcaagggattatgcttaatgagcctctcctacaaaatggattcaacagagatggcgaaaacatg

SEQ ID NO: 46722 - DNA, 836 bp, Arabidopsis thaliana landsberg
aacatatcattggaggggtaaattagtctcttacccacagatgggccatttaacttatgggtatattggtactttgccttggagaggcaaatatttaacgttaagagtaacaacgattcgctgttttagagtaaaatctctatgtgcaaaatgtatattatgttaaataaaaactgtactaaatagatgctgacaaaaagaagtatttaaattagagcttattctactctactgaaaattaataatattaacaccaaccatttttattccaacttttggagacactttaaatcaaatgatggaccccctgaaaaaatatctaattataggatatcactctttattcttctttaattttaatggacaattgaccctaactatatatttataatggagacatggctttaaatcctacccaattctttctttctttttggtatcttttcttgcccactttaaaaaaaaataagaatattcatttgttacattaataatttactatttctttagtaatcactacttttattgctagatttagttccaaaaaaaaactttattttgaaaaaaaaaactttattttgaactttactaaggaaaaatcttgattagtaatcctagtgataccaatatatcattagataatatctaatctatatgtctaaacacacgtggacctttggaatcaaactcttttctacataaaacaaaaacaaaattcagaagatttcaagatgctttatttcttacgttttcattattgtattcgtttcaaaaaaaaataagaatagtgctagttagaaatgatgttacggtggggacctcggaaagaatgggta

SEQ ID NO: 46723 - DNA, 569 bp, Arabidopsis thaliana landsberg
  unsure (1)..(569): unsure at all n locations
gcggtcttggtggcggggaaatgacgtttggcggtgtggtggcggtgcagttgtcggctacgatctgtccccttcctgatgtttttgtgccagcagggcaaaacctgcccatgaacgggacacgcacgtgaataccacgccgacgaatctgccgcgcgcaagccactctggttacgacgtcgtcatcattggcgccggcgtgttcggcatgtggaccgcgcacaagctgcatgccatgggcaagcgcgtcgcggtgatcgacgcggccgagnnnnnnnnnnnnnnnnnnnnnnnnnnnnnnnnnagccgcgtggcacgatgtggctatggcgaccgggaaatctatgccgaatgggcatggcagtcgctgggtgagtggcgcgcactggccgaacgcgccaaggcgcccttgtttcaggccacgggcgtgttgtgggtacacaagcggcatgacgaggacgtggcagccaccgcgcgggtgttggcacgatacgagatctcgtttcagacgctgaatgccgatgagctgcggcgccgctatccgttcatgcgagtcgacgatgacgagt

SEQ ID NO: 46724 - DNA, 520 bp, Arabidopsis thaliana landsberg
tacgtgcgacctataaagtttggatataatttttttttttttaagaatttggggaaagaattaacattgtacagtatgttttatataaggaaaccatactttgcaaattgtactgggataaaaatatcgtttttccagtcaaccgcttacgtttggtccaagttggttttaattttaaaccggattaaagtttattagtccccaccttaagtggtttttccaaaccccaatccaaattcggtttttttcggcacaactttgaatcagccccctcacctttgcagccacatctaaccgaatggccacccagacaacatcctaaaatgcggccttttaataataatatcccaaaattattaaattagtgggggttcctacgtgattaatccctggtaattaaacatccgaaattccggaagcgggttctggaacacggaattaaataatgtagggaatatattaccacccaaccggggtcctccccttccttggtaggaaaacctattaattcggtaaacca

SEQ ID NO: 46725 - DNA, 617 bp, Arabidopsis thaliana landsberg
cgtacgttggttcgtttttagtgtatggtaagaaattgtaattaaaacatccttttaaatcattttcagggtaggtttcaaaatggacaagaaatagcagtcaagattttgtctacaagttcaattagaactgagagacagtttcataacgaacttaatattttgtcaaagcttaaacacaagaatctgatcaatcttcttggtttctgcactaaacgagaccaacatggtcttgtttacgagttcatgcctaactcaagcctcgattgttttatactcggttagacagtctaaaacagagtatcctttccaaaaattacaatctactctagtatcaagttctcatcattagtcattgtggtaatgtgttacagatccacacagagctgctcagctaaattgggagatgtgtcgaaatattattgatggcctagctcgagggctacgttaccttcatgaagaatccgggctatgggtcgttcaccgcgacattaaacctggaagcattctattggattcagatttgaaaccgaagatagtgggatttgaattggcgaggacgttgcaacaaggtgaaaacgcagctgaaacaactgaaattgtcggtaccgtgtaag

SEQ ID NO: 46726 - DNA, 604 bp, Arabidopsis thaliana landsberg
atgaatttgtttttgtattgtttttttgcgataatatgtcaacgatttaaaaaaaaatgtttcaaaactcttttgttaaaagttttacattacaaaaaataaacacaaacggtcagtaaaagttttgttcatgtttttgttttggactttttcaatttataatgcttttaaacaataattatcaatttataatacggtcaacaaaaaaaaatctcataaattatactattctaatacagataataattctattacataaacatgaacagatcaagaccaataattaaaaagatcgcaggttttaattttactatcaatatttgcagcaaaaataatttagtactgataaccgttcacgtgaatagtaaattatttgcagcaaaaacaatttagtagtgtatactgaccaaattaaagagggatggatacaaatttaagtattggcgatatagggatatgttaaaaaattttgaccattatgtttaattttgtggtgcagaaacgccacgtttttgtcatgagatctcgtgaccacaaatttgcttttatgttttattgatctagagtgtaactggagttggaaacaaaaaccaaagtcattttc

SEQ ID NO: 46727 - DNA, 692 bp, Arabidopsis thaliana landsberg
tacagatactactactactatactgcatggggcgacgagcataaatagacaccaaacaacaaaacccacttgtcatgttcttgttcttacaaaagattattagatattgtcacttgttcgttacctcattccaaagaactcttcacacctcccaaatcccaacttttccttccattaaattaagaaaagttgttcggtcaggttctgtttcactccaatatgagtttcagttggtgtattttatcccctcttcacttttgatgttggaaaaaaaaactcgaaaccttccaagtaaggaaaaacttatgatcattagtctaaatcaatgatgattgtcttataatacaacacaaatgttagccttcttgtttgcttgagctgatgagctctatgatgttccaattaattgattttgtttcgaaaacagcaattgcaatggaagacgatttatgtttgagactaacaaaattggaaaaactccgtcatcggttaaaataccatttgaagtaagttttggtgcatgcttagtcgacaatgactttactatatagtacttgttgttctctcactctcccacgaaattgcttgtttcataatatcgtggacctggactggagagtatacctcattcatatcttaagttcaaccaccaattaggaccgagtctttaatggacttgttctccatttcag

SEQ ID NO: 46728 - DNA, 243 bp, Arabidopsis thaliana landsberg
gaggcgcaatctgccagtcacacggccagcggcagggtaaggcgagtcaatttcatcaggctgtcaccatcttcttgtgagtgtggatgctcatcaaaataccaatacctagcaggatcgtcaccagctaagtgccgtcttttcatttcagttccttctttctttctatcacctctttgcatttttttaccctgtactcattttttttttcttatattttctccttttcttttttttctcctt

SEQ ID NO: 46729 - DNA, 791 bp, Arabidopsis thaliana landsberg
ttacctgaacattatcacgaaagatagtacagttacaattttttatattcatatatgataaacatttgtatgactaacagttgcaccactcacaattctgctttcttggagaatttcacgagaaacattaagaggaagatcatcagagtccacaactcccttcacaaagctcagatatctcgggaactgcaaacagattaggtaacatagtcagataaaaattgaaccacaaatctaaagagatttctacataagaaagaacccataaaagactcacaagctctccatcaaaatcgtcagagataaacacacgcttcacgtagagacgaatgttctttgttttcgggtttgtaacatcttcattgttaagaggacccatcccagggatgtacaaaatgctcctgaactcaacctcaccctttaataatcaagacaatacagagactagtaagcaccaattgaagaattcataaattgacataaatatagtgtatagtgtataagtataaagacctcagttgtgaagtgtgtgtgagcaagtggatccaagaactcattgaaagcctttttgtagaactcattgtactctcctttttccacttccttcgaattgcgcatctattcagagacacaaaataatcaggtaacatgttgaaagaaaagtacaaaacgcatgctaaagctccaggcttacccatagcggtttggtctcgttgctagttcccatcccatactttcagtttagtggcctcttttctttgctcaccctgaacaacaagtacaaaatcact

SEQ ID NO: 46730 - DNA, 784 bp, Arabidopsis thaliana landsberg
  unsure (1)..(784): unsure at all n locations
agcttctggattcagagctctgtcattcaagagagacctatgttgtcgttctccaaaggctggacaagtgacagctggttcagaaaaatgagctttcttcataatcctcttggaactcggcaactcagacggtaatgttttgcgtctaagattattgagcctaagctcgacatccagaacataaggctgaagatgtggatgtctaagtaaatctgaggcctgtgatagtttcatacttgttagcagttaacaaacatttccaatgaagtaaatcaactagctaggtaaagttatacatacagatggccgaacttctgggtttttccgcagcatgcttttgacgagacctcggctaaaaacaagattcagaaaatattactgtaaacaaacaaagatatatacgaaggtacaagcaaaacaaaacttacaatggaccagaatatttggcagggagcggagacacaatcgtcttgtttatcttattaatcagtgcttgcatatcctaaccaagataattaaataagtattaaaaatgaaaatgcatctaagatggatatgtttctattacacagcaacttacaaatgctttaaatgccggcttaagataagccatttcatatatacagcaccctgcagtacgatggtcatgtgtccgtgagtaaatcatcctaggatacatacattgtgacacatgcaatattctttgttaagattttagaatgatnttctttatttctcacatcagaaactggatcaaagaaccaacaagagttagatcgagaga

SEQ ID NO: 46731 - DNA, 301 bp, Arabidopsis thaliana landsberg
  unsure (1)..(301): unsure at all n locations
tttttttttttttttaaatattcaaagtgtaacaccaaatcattggcgcacagtcattcacctttttctacccacttttgataaacatgtgtatactagaattgtgtcttcgtagctaaagagctgatctgacttactttcaaataaatcagtagtgaaagatagtaaaaatacgataccaaatgcgctggatcaatatagtgtttatacttaccatgagaacacngtgacactagcagaatctcaatcatcacaagttcctgttacagacanncaaacaagtatttagtatgttgttgaa

SEQ ID NO: 46732 - DNA, 786 bp, Arabidopsis thaliana landsberg
ccatctgatgtcaatacatgattaaataaaaaaaacaattttgccaaaaaatgaaactaaacactctacaagtaaggcagcgtaacattatcttttaaagaataataagaaagcgattttatccactaccttgaatatttttatgtcttgatttctatagtagacttttttgataattcccaaaaacagtgatatttattattttaaattaatttatatatttttgattgaatagtttgataaaacttctcacagctagtttatatatagaagaaagatctaataagataaattaagactttcatcgatcattggccttcaaaaccaatttgatctggtcaaccttattgtaagtagagcacatgtgtacatcatgttggaaaacataaataaatagtaatattttataccgaacatgcaataatacgaaaagacgcgccaaatgagctgttattagtagattaatatatgtaattaccattttataataattactgatgagcctatattaataaactcaagtcacacctcactctctcacttagctctcacgaagcagaattgaagaaaaacatggagagaggagtttcttattatctatggattccttttaagttcatccaccaaactttcggatctcttttactcaagcttctcggtttgcgatctccatctgatcatagttttccggtaagtgatttctgtgataaacgaccataattaacattcctctgtgagcgttcatgtgattagatctcgtcgtctcaagatgatgaatttcatata

SEQ ID NO: 46733 - DNA, 732 bp, Arabidopsis thaliana landsberg
tcaaaccaaccataacccaaagattcagtttattctttatttttggctaaaagcaaatatgtaggaggaactagtttcgccaaattggttgtatatatgataaattttatcgaacaaaacaagttttacaaaaataatcaacaaactttatacatggatcatgcaactgagaagaagaaacttccaagtgaaaaaaaaaaaaatccaacttacaaagctctttgcaagtaaatgaaaactttggcttccttcaaagccaagacctgaaagcaaagcagcgagctttacgttttctctgcaaggtcgagttcttacctttgtttaacatgccctgcttttgtcctgtatgctcttctctcttctcttcttcactgaaatcgcttgatgactcttgtgtttgaggaacactttcaatgttctctaatacactcacttgttttgcctgatcatctgctctatttggcgacaattcctcagtttctgggactggcgttatatttctaaccatgaatattactctatctagagtacctaaagcttgttctacctctggactgacgcaaaaccgtcttctcatatccacatgagtcttggcaatttcatttccatcctctgaataaacactttcctcagattcttcttcttcctcaatctcgggaacagttcttctgcaatggacaggtttatttacactagcatctccattattctcgtgttcgtgctttggcagag

SEQ ID NO: 46734 - DNA, 149 bp, Arabidopsis thaliana landsberg
taactaccatgagtgctgcctgcatgcatatgacgtgatccattttcaatggggtaaaaagctgaaataaccaacattctgaaggagactgcgcagtagctccatgagcactttacatccagaagatagggaggaagctctgaattcct

SEQ ID NO: 46735 - DNA, 469 bp, Arabidopsis thaliana landsberg
  unsure (1)..(469): unsure at all n locations
cttttcttttctttttttagactagtgcactggcgggtgggccctgctgctcagctgcgtgcatcctccttgcctatcaccgccaggtgggccagtgctcgctggtcgtcctcttcgttcgtcgttgacgaagctcaacaaacctggannnnnnnnnnnnnnnnnnnnnnnnnnnnnnnnnnnnnnnacctcgggcctattaatgcttggacctccatcgcttctcctcgtcatcggccgccagatttgctcccaaccgcataccgcgcctctgctccttcactgacccatggcgggatctatcaccggagccatggttggcttcgcatcgtgctttcggttcacgccgacgtaacctggagagtgtctgatgcagctgcaactagccctctggccttgatgcggtggccaagagaatcactggcgctcagggatgttggccatgccgtcggcatgggggctagattgc

SEQ ID NO: 46736 - DNA, 973 bp, Arabidopsis thaliana landsberg
attcgtgccagtgctctaaagcgcttgatttattttaatgtaaacttagaaatagggaaagaaaaagtaagaaaatttgtatgaaatgatggtgaatttgagtggaatttttttttatgtcatttgggaagaaagtcaaaactcaaaacatagcaagaaaatattattaaaaaaataaaaagaacattcatcttgattattctcgaactagttgtgaagccaaacaataatatctccaaagcgacaaaagactgaaacgtcatctcgagtaacactttgaggctttgagcaatacacttggcaatggagtcagatttgcatgatctcacaaattttgttataatagctaaatttccaaaagaaaaatagtgaaaaacagtgaaagataacaaaatatctagaaattaagtccatctacggcacattacttcagcatatcttaaagagaaaattagtaggattacgaaagttttgtacttttatttaataagtcttattatacatgtcttaaactctattatatttcaaaaggtttgttaattgaactatagtttactagttatatctcttataaatatagcatatactccaaatttcactttgaaaattaatgagaagaaaagtgcatggaatctatcaacaatctacattaaacaaaatacaagttcaaatgaaaacaaattcaaaaattcaacttggaaaatgtggggccaaataaatcaaaacataatctgaaatgttcctaaataaaattaaatgactcggtcccatgcatgtgtatatatcactcactatatggcttttcattttttttacccccattttaatttgtagtctctaccctttatacattgactttgaagtttatagtttatattgttccactcatttgttaatcccaaactccataggagaactatagacttgaagacataaaataccttttcatattaaaaaacaacagtcataaaat

SEQ ID NO: 46737 - DNA, 711 bp, Arabidopsis thaliana landsberg
ttgttggctactagtacatgctattatcttttttattttattaaatatttctgtccttcattctcaaccgttgccacaggttctttgttaatgatcattatattattattatgaagtcgtttttggaatcctacaacattaacatacacaaatgtctttttgtgataccatacaaataatttgtttttctaaaacaaacaaaaaaatatcttttgtgataagcaaattgtgaatctgtgataacctcgcccacaaatcatatcacttattcgacaatttgtgataatttagcccacaatatttatgcactagctgatagaaagaaacatatccttatcactcacttactgtataaaatcccggattggccccatcaaatatacatcgctcttatcattaaccacatctggcaagtggtttaagctgtcaaatacaacacgactttgttgaacatatttttgtttctcaatctgtaatccaccgacgttcattttttggttaatcttttgtctgctgatctgatcatgtaaacctgacggaatcgaataacatatataactcaatctaattatgcaatgcaaaacaattatttgtgaataactcatttttaacccgttgaaagaaatgatagttttttaaagatacatgcaacctttaatctcctttattcatgcgtgtctgaatttgtatcacaggatagagtagcttcga

SEQ ID NO: 46738 - DNA, 868 bp, Arabidopsis thaliana landsberg
  unsure (1)..(868): unsure at all n locations
acactctttattgcaaatttagaaattgtttctgaagaagtcaatgtttgaaaggcagatggtaaaccaaagaggaggggtgtagataagaaaagaagagagagagagagaggtcacttattagtgtgcgttatcaaagtcaaaataactagtgtgatgactcttgagagttactggaagccaaagcccctcaaatgccaagcttctcatcgattctccgcatcctcagaaataatggttcagcagcatcattatcaaccttactcatcatacgtgttattctaattaatgttagaagattagtagcaannnnnnnnnnnnnnnnnnnnnnnnnnnacacttctttattttcgattccaaaaacttcacataatttacttgattagttctttcttctctttttttaaatatacttgattcctttgggtcgaaaacagtttgtaactaaacattcttttttttttttcgataaatttataatttaccataaattagtacgcagatgattaccgtacgtgttagcttttttagttcaatatataaaaggcagatatataataataaactaaagattcttatataagaggtggctactgcctacctagctagctacttgcagtatactatatgtttccataattaagaagagggattcgttaatgcttttgctttataaagtgaatctaaatgtgatatttaccatttatagagacttgatctaaatgggatgttaatctgaggagagtgtataagacttaagagcatgcgagtatagaaaaggatcaatagttgattttagaggttactaattgtatatccaatcttcctttttattgacaatctcgtttacgtgccttgcacaaaagca

SEQ ID NO: 46739 - DNA, 694 bp, Arabidopsis thaliana landsberg
ccggaatactagtctcatattgctaataaccaacaccaaaatattatatagcaaacgaatatttcagaaggaaatcaaacaaaacagagcatttctaaattcaagatttatgacaaaacaagaacttgaacaactacacttttaaacgttccatgcatcttcatcatatttttggttactcacgtgtaaagctgggaatttgaacatatatatgtctactttaatagaaaattttcaaaaatacaacaaagcaataattatttgggtccaaaaagttgtatacttttgtgggtcgctccaaaagttaataatagattttaacatatgagaacaaaactgcaaaggccagaaatatttctggcaaataagaatcgaagcttagacaatcattgttcaaggaatcatacctttttttttagttttttacatgctcaaaattgtttcatttatggcttctatacaacaatcaatcaatcaggtcaaataaactaataaaatattttttttacattttttttttttgatggagtaagctagaggcaaaactaaatcagatctatactccaatactcgtagtcaactaagttaattaataaaatagtaacacaaagtttcttcatttggaaaaaaaaagataataattatcttttcaataattgagtctccctagtcatatgggtcatgaacacatgga

SEQ ID NO: 46740 - DNA, 400 bp, Arabidopsis thaliana landsberg
atgtgcataagacttatggcgatctctaaatgtaccgtatagtctcagtaagtgtcagtatttcagttcatttacggatgattggtcaagaaaagtgtggataaacttccttaacaccaaagatgaagcgttcacatcattcactgaatggaaaaagatggtggaaacacaaagtaaaagaaaattgaaaaagctgagaaccgataatggattggagttctgtaatcagaagtttgatggtttctgcatgaaagaagaaatagtaaggcacataacgtgtacttatacttcatagaagaatggagctgtataaagatttaactgtatcattatgaacaatgttagaagcattgttcagtgatagttgttttttcaagttttttatgggttgatgcaaact

SEQ ID NO: 46741 - DNA, 1216 bp, Arabidopsis thaliana landsberg
ataaattttacttatctaactaaaatctcaaattgttgaattgtgaagagtaatctcacaaatcatatacatcctgacatatacatcaagaaatgaaaatcatacaaaaaaatctctattctaggttcgttaataaaagaggttattaatatgtatgtaactgaataacgataatatacataaggctcttgcatataatttatttaggtgtattcaaataaatcctgcaatttaggattgaataactcaaggaatcgttaattaccacctcatgaaaatgttagacaaccaacaaatcatatttacaaatacaacagtatcaaatatctctttcaagaattttggtatatatatattagacatactctaaactaaaataaaacttataacatatgtattgtgaaaggacagatacagaggaatgggagttatcaatgtgtgacaagtgagagcagaaaagcatgaccaaactattcaacaggtacattaaagtgttctcaggaagggaaatctaatcttttcttctgacataattttgtagccaactaaattgacaggaaacgaatcatttagatttatatacatgcataagtagttatccctcgaacatttttatatatataggaaatataacatgagtgtgtggataacagtttacatttaaaaagattggaggaaaaaggaaactttggtgcaagaaatcagaaagacagaagtggtgaaaatacaagaacttataaaattaatgagtggatacatcaaaattcaattatattaaaaaaaacaatgattaagctgataggtcttcttagtttatatgtctttctttcctccatcgaatttgcctctgcctcatataccattctcttttagtatgaatttatccattgattttatgtaatgattatgttgaaactctcgggacaaatagagaaaatgagctttttaagtctctaaaatactttatttcttcaaactctataaacggaacaaataagtacatccacttttacaaaacctggtttacgtagattttattccctccgtgcaaatgggaggagattaaatcaacctacatccaataaacgatagcaataattacgaacccacatcaagatttttaacaatttctatatgagaaatgttaaaaataattgtaatgataataattaggtagttggagagacatgaccagaagatactcacgaaagcaggc

SEQ ID NO: 46742 - DNA, 553 bp, Arabidopsis thaliana landsberg
tatgtaatgtaattgaatgaagttctgactttttaggtgtcccaatgctattctcttttagttttagccacacaattttcaactcgtctttttatttctacttataaaaagataagtttttttatatatatctcagtggggaagaaactaatttgaaatctcttgcgttatattatgattaaaagagattaaaataattgcttttaatttctaaggttactatgatgaaattttttaaaagtagttactagtacttgttgaatcattcaaatcttattagtccgacacaagataaacttaagatcgtggtcgtgaaagagcttttttcatttcacgtgtcttgtaatctaaaagcgttcattgagataatttacgtgtttcagtgttactctatatttgtgatttggccgaataaaaaattaatcacggctcctctcttccgttgtgtaccattttcttttccctttgtataccatattgatttcaattttcaactatcaaaagtaattaggtactactatttttaccattacccagtttaaaatgataatgt

SEQ ID NO: 46743 - DNA, 799 bp, Arabidopsis thaliana landsberg
catacgtcctaacaattttttgttttgtatttggaaaagcacatgtttctttgtttttatgtttatgataacattctttttacacgtaagtaacgtaatgctgtttttgggactcacgggagctcatatgtaattattattttcatgtagttcacataagttcgaaaactaataaataattaagttatctaaaaagagtcctagtattatatgaatcaaattctcaaaatgtcccatataacaaattatgtcaacaacatacgtactaatctcttttgcaacaaactcagccttaattttttaaacaaactaaacatatcgaaatttaaaaggaatacctcatattaaaatatactataatcattaaaattgatataaatattcgatatattgatatatataaaccaacaaaaaaacccaagtaatattggaattcaattaatactgttactaaagagtgtatatcatggcgagatgtgttaaaacttgtatagttacgtaatttttagtgatggtgcggataaaaacttcgaaccattaattgtcaattatacagataatttgctatctcatacataaactataaaatattattatgaggcttttaacatgcaaaagatattagaacacaaataatgttttggtttatttttattggctgaaatgaaagtcactgaagaataacagtcgaagaatacaagcgtaacgcatatttctctcatgacatgccatttttacatccgattttacatatcagctgcatttctatttttatttatctattcaaattttattgatc

SEQ ID NO: 46744 - DNA, 729 bp, Arabidopsis thaliana landsberg
  unsure (1)..(729): unsure at all n locations
agcaaaaaccaaggcaaagtggaaaaagagtgaatccagagaggtatgttttttagattctgaatgtacagaaaaatctacagtacacgtaccaaatttaataaaggcataaggccgagcagctgcttcaatgttaggcccattgacacgttcaaattcattcttgagatcttccaggtattggaaagcgagtttctttgggtaagagcggtcacacattgtcaagtagcaaacacgtccttctatgatgtnnnnnnnnnnnnnnnnnnnnnnnnnnnnnnnnnnnnggtctttcttaaactttagctttgagatacaagcatactaatatgacaacgtagatttcaaacataatgcaagaggattgaaacgtgtactaagccaaaaactggtaaaaatgtacaaggatgtcaaaagtgtgaatcttaagtaaatcaaagtaaactttctacaatccttattatatctatcaatcaacaaacttttgcagcagaaactgaactaataaggaatgaagaaaaaaccagaggttaaggatactggaaaacataggggccagtttcaacggacattcttgaagcgtcattttgacctctggacagattcttaaacaaagctttgacctgttgtttatacatatctngaatccggtantcacgtccatcatcgagcccctcactagaggtaacccatcagtaacacgagctatcaatgtcatttcaccatctt

SEQ ID NO: 46745 - DNA, 1223 bp, Arabidopsis thaliana landsberg
tatacaactactttggtacccattgttataatttcagtgttaaacgttatctattcaaattagcaaaagggaaatatacacacaggggatgggtgctaactatctttaacatcattttttcaagtatatgcatgatgtttatatcgaattatgggtagttggacagaaataaacctcacattacatgtaagaaaatatcgaaaaaatattagttacctatcgttacgaaattgaaacgttacaagtgaaaaacgactgaaaaaaatattagtttgaacatctgccgtttcaaactaatatttttctccattcttcaaacgttacaaatataattattaaattataaattaaacaaaagaagacaccttacgtttctttttcagaaagtgcaatttatgtaactgatattttttatttgattacacaaaaagaaacttattaacttcggaacgataagttattctttgacagtagtagtataatcaagtcctaaataaaagtcaaacgctacaacattcgatgattaactgctaaaaactatggtttattggcttatcaaatgatctaaaacgagtaggaaagttaaatgcaacttaaattatttgacacagtaagaacaaaaacaatgtcaaaatcatcggtccctgatctccggtgccggcacccacccgttcaaatcaactatttaatttccgaccatcctattactctattccattaaatttttaaactccaaaaataacaaaaattaattaaagtaaacgtcagagatgtcccaggcaaccacagtcaaatctgcaacaatatggttacaaatctttaaataatattattgttcttatcattaatcaactcccaaaatgacagtccaattaaataatcacaaaacatcataaaagtgaccaaaattaaataataacaattgttttttgggtttcacatgatctataagcaaagccagtgtggtggacctaactcttcacgctgacccgaaaaagactcttctcttctctcttgctctttccttcacacaactatctcattctactctctgttttttttctttaatcataacattattttgaagaacagagactctttatgcttgtgtaagagatgggaaattgacaagcggctgatgcagctgcgttggatctacaacatactgatggcaagatcgatagatattacggtccctgatccgttagtgagatcatgcgtat

SEQ ID NO: 46746 - DNA, 286 bp, Arabidopsis thaliana landsberg
  unsure (1)..(286): unsure at all n locations
aaaaaaaaaaaaaaaataaaaaaaaaaaaannntaaagaaaaaaaaaaaaaaaaaataaaaaaaaaaaaaaaacaaaaaaaaaaaaaaaaaaaaaaaaaaaaaaaaaaaaaaaacaaaaaaccaaaaaaaaaaaaaaaaacaaaaaaaaaacaaaaaaaaaaaacgaaaaaaaataaaaaaacaaaaaaaaaaacaataaaaagaaaacaaaaaaaaaaaaaacaaataaaaaaaaaaaaacaaaaaagaagaaaaccagaaataaaacaaaaacaaaacaaaaaa

SEQ ID NO: 46747 - DNA, 839 bp, Arabidopsis thaliana landsberg
  unsure (1)..(839): unsure at all n locations
tctttcttctctaatatattctttatttttggttcaaaggtcctaaactatacgatacatttgattctctccatgaggaaaagaactcctctgatactgaaaacgatagtgaaggaaatttctttgctttggaagcatttggtaagatctttgaaggcttagcagattgtttgacttctcccagaaagacatcagaggtaattaaaaaaccggaaaaaaaaccctcgtgttaagtagtgtactgcaattggattatttaacacagctttcggtttatttgattttcaggatctggaactgtgtaggaatgtaataatgatcttggctctagcagcttcttcaggaaactctggctatgaactactctcaagtcacaagctacctcaagacagcagcttcttaatgctgatacttcatcttttagttgctgaaatagactcggaatcaacagaatttcatccaaaagcggaaatcttcaaagcaaggtttattctacaccgaggtgatttacaaatgaaaatttaatctagtgacttacaaaaatctatttgttttactggcgcagaacactattgatgagagagatattgatattactaaacagacttgtctctggcttgtcaagctctgctactattctaaaggaactaacaacgagcagagacatggcgagtctaacggttgatgcagccacaagattatcccgtaaaagaaacttacttgngaaaacctgaagcagtgttgagagaatgaggaataccgaaatcatggatttagcccgcattttcagaaacgggttttcgccttctaggtgacatactatatgacacatacatatc

SEQ ID NO: 46748 - DNA, 520 bp, Arabidopsis thaliana landsberg
gccgagccctagttttatcaaaccgaatcaaatttaactataaccgaaccaaatttttttgaacaaaccgaaataaaccgttaccgttttgtctgatatcaatattttaatgtccatgaaaaatggatctaaaaattcggactttttaaagatgagattcggacacaacccgagatcgccacaatttccgcaatttacttgatcaggaaagagagactccgttgatggctaccaccaccgtcgtatgcggcggaggaggagatgttgagggttgcgatggcgagagaagcctggatctgttaccggcggctctcttggagactattatgacgaaactcgatgttgcgtctctctgctcgttggcttctacttgcaaaacacttaagagctgtgtcactcgtgttctcaccttcactcccaacttccacatcttcgtaagtctccacatttctttaagggtttgatttggatttcgatttcaaactgaaactgtataaaaagttttagtctttttggattt

SEQ ID NO: 46749 - DNA, 473 bp, Arabidopsis thaliana landsberg
gcgccgagatcgcctgcaggcgtcccaaccagctgctgttgtcgaccgcgtaggcggtccacgagaccagggcggccagcacgcagaagaacccgatcacgccatccccgaagccaccagtgctggtacccaccgcgccactccccagcgactgccacgccacgcaggcgatgcccgccaggcccagcgccagggaaggcgccagcttgcgcaagggcagtgcaccgtggccacggctgccgatgatggtcaccgccaccggcaggaagccgatcaccagcgaggtcatcgccatgccgcccaattgcacggcactggccaggaacacgtaatacaccacattgcccaagaggctcagccacaccagcgcccgccattcggcgcggcccaggtgcggcagcagcttgcgcaggcgcggcgcgatcagcacggcggcgaacaggccataggccaggtagcgcccggccgtcaat

SEQ ID NO: 46750 - DNA, 850 bp, Arabidopsis thaliana landsberg
tacatctatcattggtaattgtatttataaaatggttttgatagaaagagcagaaagatgaatgcttacccctgggatatatagggaattcgtactgctgtttaggcactgttattatgtaagaagagacctgtggccaagagaataacaccattttagtttcatttttaatgtctattcaaacagatggtaatggagagcaattaaggaaaaaaaacagagggtaatggagagcaaataagtttaccaaaatggaagcagccagagattttgaagattgataaagaagggatgtgtcctctttctcgtaaagaagatccatcatgtccatacatgcttcaaagttcaactgttccccaacttttgcaacttctctgatagaagaaaatatggttaaggagttagataataacaacatggactagcacaatatcattcaggagcgttaagactttagatacttgataaggatgaaacaacttacttgaactgaataaaaagatcttcaagcagtgtataagctatatttagagtgccaatctcaaatttcagaacctgctcctcatgttcaatgaggaagagagacatttagttcgaatgagcttctagccttctatagcgtaaacaacattcccacaagtgtacaatggttaccttcagaaaaaccagttcctgcaaaagaaacctcaaaactcattgaaagcatcaaacaaaattcagtcacagatttaaggttttcaagactatcttactgcatccaagaaatcgcgaaccatgaagagttgctcagtaatcactttatccccaaaggatttcaaactatgaaccgataaacctcgtgtacaatgca

SEQ ID NO: 46751 - DNA, 274 bp, Arabidopsis thaliana landsberg
ttatagatgtttacgatagagctgctgacaaattcataaagaactattttaactacacatttgactgttcagaaaaatcacttaccgatctatcaaatcacgggcttcatggctcatatcttcaggaacaggaggccattgtatattacggttgagaatattgtcaaagatttgctaaaacccaacaaagaagatacagatcaaatatcagggagttggagagtgaaactagatattaaatactctgtagcaacatatgaagatgttaaatgga

SEQ ID NO: 46752 - DNA, 643 bp, Arabidopsis thaliana landsberg
tacctcctcgatgtaggcctcctctgctggcaggtcagcaagatcgccgcccacatcgacctagaatttgaataatgtatatggaagttgcatcaaaagaatatttgttaataccagggaatttcatttagtagaacaacaatgcatatgtatgtatacttctatttcttttgaaatgtgaactgacttctttgatttctttgtatgcctgaattagagatagaagtattcttgagtcttagcgctttggtttcttgtatgtctcgattagaaatagaagtattatccagtataagcacttcaactctcatcgtagtattctaccactagagctcgtgtcctttaatgttatgtgttgttcgtttccatataagcattacgtagtagtattttatcgaataatttgtgtgatgtcacaatgcatgtgcattgtacgaggttgatatgaatgcttgtgcttctcaactaactatggagacatcttatcatatccgctacctagttcaatcaatataactataccacagtttcacatgtgttgctttgaaatatatttgttgatcatgaagtgtccgcaatcaagcaaaataagggtggtgccacatacgtacactcagatgcaatgaagaacttcaacaaaatc

SEQ ID NO: 46753 - DNA, 742 bp, Arabidopsis thaliana landsberg
tttggatcacaatcttccctcttcccatcaattttatcctctaattgaatctcctctggttcttctcttttttagggtttttttttttgtagatcttaccaagcccaaaagggaagggaatatgaagatgaacgaataaggagaaagagaaaggtagaaatagagagagaggaaggttgagccaagagtcaacaatctattcgaggaataaactaagtatatatatgcatatgcacacacacacatacacactcacctctcagtttgagacatttttgggtagatttaatacatagaaaagtactaaatttctagtccaaaattagtatttgtgtgtatgattttatcaaaccaatgaaatagagagaagttcttataaagttcctaggttaagagaatatatagatatagcttaaatgtgtgtcatatatacaactttaatcactgattcttttttatagcttgtttattacgggagatagtggaaacttaatggaattgtttagataaaaaggagtgaaataatattaaacttagtgtgagttaggtaaatttccattatcaataatatttcctttttaacatgtccgtacattatttataatttattcttaagccttatttcaaatgccatgtgaaaatagtgaattggcgcataacacgaatgggtttctcttgctttatatgctgctttctttaatttaaatagcatctcttagaggggattaaagggaaaattaaa

SEQ ID NO: 46754 - DNA, 557 bp, Arabidopsis thaliana landsberg
gttagaaccaaatataatataaatatgatagtcaagatctgcatctagttagcactaaacattacttggctacatttatcgaaagtacatcttttccacttgaactagaatattcaccttatatttaaaatatattattgggaaactagttttttgtaatgtgtatcctggtctatgttttctggtcgctcgaccagctagtcgaactgggggaccgaccagcgactaatctcgattagtcgtcgactaggtctgactaatcgagctctggtcgacctggtcgtttactggtcgtcctgttcatccaggagaccaggacctatgtatatactatataatatatactattatactatatagtcgaaaggtggataagaatatagtatatatgaacttcatatactatattatgaaggatagggtaaacatgacatgaattcagcaatactgaaaagtgaaaacagcagagaaacacttgtagttattaatactacaagtcccagatacctagtccacacaacacacattaatactacaagtccaaaaaaaatctaggt

SEQ ID NO: 46755 - DNA, 595 bp, Arabidopsis thaliana landsberg
ccagatcaatttacttggaaattgtcttctaatggacagtatagcagcaggtcagcatgcaactcgatgtttattagctccatcaaattcttgccttcgaagaggatttggaagacttgggcaccaactaaatgcaagttcttcatttgtgttagaactgtattagtgtttgggtgtattttaccctctcgcccctctgtaaggggctaggcccatcactatgtctattaatgtatagcaaagaagacatgccttgacatcatcaggctataatgccccagagtcaaaatgactcaaatacactctatgaaaacgtattctctgaatatataaattactcattaagtaaaagacaatattagtgatgcattttcacaaacaaaagtctataaaaccatagaagttcagagaaaatactgaggactgaagactgttgcttgatccactttattggaaagacatacattgtgaaaatacaactacatgagcgactgatagtagaaacataccggatccaacgagaaaagcaagcaagaaaaagaagagaatataaccgaaagaaaatatagaagagattgaaggcgataaatggaca

SEQ ID NO: 46756 - DNA, 520 bp, Arabidopsis thaliana landsberg
tatagcatttctataatacattttcatcaattttaatgtttttatatgttaagtctacaatttaattattccatcaacccttgttcataattgactcattacttaggaaaattgaggttgtttgttcattttcttttaatacacgaattatattatttatataaacaaacaaataaagatcaaaagcaaaaaaaggttaccttcaccgttatcgttagcctgaagaacaatgaaaacgtatttgaggagcgctacgagagtaatagtgtagattatgagcgagagaacaccaacgacatcatctttgtcattgatgccatcagtgaaagtacttgcatacacatataatggcgatgtcccgatatctccatacaccactcctaggctctgaaatgccaaactcatcgttgttctccagctcatctatttcacacatcattattcacgatcaccaaatcttatattaatgatcatcttcttatcaaacaagagagatttagatacacaccaatgagcgacg

SEQ ID NO: 46757 - DNA, 693 bp, Arabidopsis thaliana landsberg
cgtatacttacagttttctacaaacacaaactgcaacgtttttgaggctacgagaagaaaaaaatgtccgtcacgttgcgtcacttgagacaatggctgtcgtcacattcacgccatagaaaattttggccatcttacccgtggtcgttgacctggaaagatatcaatagtctatttcatatacattcacacctatgtcaaataaaatttgactccaaaaacacttgaatataatagtgaattagttacaaataagcaaattttagttaggtaaagaacaaatagtaaatttgacaaatgagaatggagaagattaaaggtaaaaatatattggaacgactctaaataaagttttgtatttctctttttctttcttctctattactatatatttctcatagttttcattaccctaacaccacactagtcacacacttaaatgttcttccgcctttgacgccttaatctcatctccacaacccttgcagtcaagttggtaagtctcttaaaaatgactttcttttgtttaaactttaaatggcactgagtttttgtggtatcactaaaatcaaacgattcatgatgaaaaacttgacttggttcaatatttattataatcaatgactactttatgtaaaagagtttaggcctttgagcaatgattttcaaagagaagaaaataaagttggacat

SEQ ID NO: 46758 - DNA, 508 bp, Arabidopsis thaliana landsberg
catcagccctgcgaggcgtagagcgtgatccgcagcgacaggccggccgccgcggcgctcgcgagggtctttctcgacagcgcctcggagaacacgcgcgggtcgtctccgccgtcgaagccgaggtgcagctcgcgcgtggtcgctacgtaccagatctcgcgggcctcgccggtgagcttctcgatcgcgtcgacgatcgtgatgacggtcgactcgggggtcgcgctgcggcccgtgagctcgtagttgatgaaccaggcgccgtcctcgcgggtggactgctcgttgagcggtgggacacctagcgcgcgcagcatcgcgatcagcggtgcggggtcgcgccgtgtcacgacgtcaagatccgggttcacgaattgcgtgcgagccatcgtcatgctccccggcggttcgtcccgccgacgggtatagcgtaccctcgccgggtggtgcgccttggcgagaagaccatcgacgtggccagcgcgaccctggaggtgtttcacct

SEQ ID NO: 46759 - DNA, 610 bp, Arabidopsis thaliana landsberg
gagctatctgtatctttaggaagtgacgaatcagaacgacttcctggagggtttgtgcacaatgcatcagaaaagccattgcaatcatccattcagttcccaaccatgggcactgatttgaatagtcaatacgacagttctgagctccctacaataccttatcaggagtgcatagaggattttggttctgaggagaacaatcttttggctgaccatgcagctcagaaccacgagctcgtttactctcaagcgtcgtcattgcagctgcctcaggttaaacccgaagatttcaaggacgatgctgatgtgcatgaatctcaaagttcaagcgatgatcaccattgtcctgaaaccaaatccctgacgccaactcaatcaacaaaggtagaagataagggtcattcggttcctgatgcttcaaatgcagaaactgcagaatcatcaaacacgtcagttcagaagataaatcctgtttcagtgggagatgctatgtggcctgttagctgtttctctgtggcacctaccttggacacatataagacagaagtggccctacggttaggcttcctaggccaagaagtcgcttgtcgatgctgttgcagtcatgaca

SEQ ID NO: 46760 - DNA, 695 bp, Arabidopsis thaliana landsberg
aagtctcggaggctatgtgttggagataaggtcgattcgcactgtcaggttcatcgaccaatctctcttctccaatcttctcgtctatctcagcttttgcctttttcaacacttcaggtttttttaataaattggccatcgcccattccaatgttacggccgcagtatccgctccagctcgcatcatactctatatccatttaattcacacacgggttgatacattatctacacatgtacacatataatatctttataatataaatgtaaaaacataaaccatctttcttctttcagttttatgtttgcatttagtgagtccaaggaaaaaaaattatatttaaggtttatatgtatgagaatacttacgagcatgagccctttgatgatgacgtcactgtaatacttgggttggtctagttgtaaagacaacaagtgactaaccattgtgttgctctctccatttattcgacattcatcgagcagtcgttgtaagaaagcgtccatggcttcgcctagtgctttcacttttttctcgtagccgtgtccgaacactttaagaatcggtagataatctcctggatggctcgcaccactgttgtcattgatgtccgtcactagtttcttgaatagattcgcttcttccttgttatgaacctttaaggaataaatatttataagggtagtaaaaactt

SEQ ID NO: 46761 - DNA, 403 bp, Arabidopsis thaliana landsberg
ttatgatctctgtatggccaaaattctatcagggttcaaaatattttaaagatttctgggatttcaactggctttataaacaaaacgtgctggataaacgcgctgattggatgggctatgtttctactttctatgacgcctttaatccaaaagctggaaaagccttctggaatatcgttaaaaagagcatttacagttaaggcgtagacgcctggtggctggacgctaccgaaccggacattgtggataatattaccaatgcgcacagaatggaactaatgacccccacttacaaggtccgcccccagattaaattttatgcctatgccctggcccaggataaaaccttttatgaggggcaaagacaggcagatccccaataaacgcgtcttttattctgacc

SEQ ID NO: 46762 - DNA, 561 bp, Arabidopsis thaliana landsberg
  unsure (1)..(561): unsure at all n locations
cacaattttaattttctacaatcagttactccgactacttaaaactattcacaatttcatgctaacacgccatccacatggctcacttccatactgnnnnnnnnnnnnnnnnnnnnnnnnnnnnnnnnnnnnnnnnnnnnnnnnnnnnnnnnnnnnnnnnnnnnnacatcgagacccctaccgtggttccagcacgcgcgaaggcctnatacggtactagtacatactgatcggctacaggtacagacttgtgctaacgatcggtcccgtcccgtcgtgacacagcgaattcccgacctgatccggtccggtccaatcgtctggtggtagctagctaggtcacgtcatcatgcatggcagaaaatatctgagccgacgaagggaaagggaaagttaggtgtggctgagatagccaggcgtgcgagtgcgcctgtccatgtacttgtgccaaccaacccgtgggtggggccgcatgggagaatataataagatgctcatcgcgcgcgctcttgtggtgggtgatcagggggttcactggcggcctccgccgccgccagaaat

SEQ ID NO: 46763 - DNA, 617 bp, Arabidopsis thaliana landsberg
cctccttggtctcggtctctgtggtgcttatcctctctcggtctgtcacgagacctctctcgaggttgttcgtgagacagctcacgagacctttccctttcttttcccttttcccgagatttctcactggagacaaggtaacaacattatcagcacaatattagtcacaaggcaaaagagtttggtacgaatgaaaatatctttaccgctcttcccgtggtctcgatggctcctctgactgggaggttcttccttgcggttgttgttccccaacaatttcttcaccaccacccactcttgaggtcccaagtccaccaccaagcctgcgtggacgccagtttgggacggttctacctctctccacatcaaccaaaactcttctgccgtcaatcttttgtccatcagcttgcttatatgcagctgtaggaagagtagcaaaacacaatgcaacatcagtataaagagcaaacatctcagggagataaaagagggttgaaagaaaagagatgtgagggcacctttcatgtcacgggtgtgcatgtactcaatgaaagcatatcctttgggtttattggtcagctgatcagtcacaaatgaacctgagaagtttcagaaga

SEQ ID NO: 46764 - DNA, 700 bp, Arabidopsis thaliana landsberg
aggatgtctggttacgtatggatctcttatgagatttgtctttgagcttcgttttccgactgggacgaaaacacaagcaactaaccatgttttcttttaatcaatctcaaggaaaataatctttttgttgttggtgtcactcaataaacaaagatatacacacacatacactctctatatggtttatcaatagggctcaagagatgatcacacacgaggacaaagaactaacggttttgttatcaaaaagatgaaaactttgaaggaatcagacgaaccccaagaaacacacgatcaacagagattcgagttttgggaataattttccatcaaaaattgattacaaaaaaacacgagaaatttgtgaggtgataaggaaggagatttagattaaaatcgagagttttcgtaaatttttgggggatttagataagatttggttgaacgggttttgataggaaggaaagacacgttatcaacaaaagagagcatgggggtgcaatatatatggtacgttactcaccaattgtttctatgagataaaatcattcattgttttattatgccattgagggtaataatctacaatgttaattgctccatagtgagtctctcctctatatccctggaatttataattgcgataaatgttggattctcacatttaactaatttttatgacaaaaattagaaaataatc

SEQ ID NO: 46765 - DNA, 403 bp, Arabidopsis thaliana landsberg
atactttaaactaaaaaaaaaaaataacaattcaaggaagacttcatggcattgcagaccaaaaagaacctggctgcacatgcatgtaagaaaattaatatggacttcagaccaagaaactgatgttcttaaaaattatacaaagatagttctggattagggattctatttttatttttgcatgcttccagttcatttctcatttaaattcaactacataaataccagttatttttccttataagtggagtctacatatttaaataaataaaaagcaatgcccaattctatttagaattccaacaaactggcctgaacaagaaatttatttgtaagagagaaaaaaagggtgtacgatgggaagcattgcaaaaagttataatttagcagacttttcaatagg

SEQ ID NO: 46766 - DNA, 998 bp, Arabidopsis thaliana landsberg
ggggggtaattccgcttgttaaatcttcgtaatgatatttttgtaatttgaagtccatattagtgatatagggggggggatggaatacttttaaaaagtcttatattaggaaaatcattgaaactttatggtcgataaagtgatgtgatctgtgcatgggttggtgcgagccatcgaagagaacaaataataggacgaaattgcaaactgttttaaacctgataaaaaatatatgaattacatactacaaatgcaagtctccttttttattcgtaaatagaacacaactcataaaactgatgctttgcaaaaatttaacatggatttaaaatacaaaatgatttctatgaaaacaaaaagaaaatgtgtgagctccaatgatattgaggagtcgaaaataaaactataaatggatgtgaatcttcagcatgtttaagaccacaaaccgttttatgagaacaaaaaatatgtagtttgaaccgattttcttttcactggcgattagaaacgacttgtaatataacttttcttcggacattttaacttccaattttattagtcaagagttttgtgacaatcttcctttacgatcctatagtttacatgaaaccaactttttctttaatttatatttgtagtggtcataatttgaagtcaaattccaaagtttggcggcatattcattagtataatgttagatttttcacttttaaacatgcacaaattcaattagtatttctactaaataatgtaaaaacagtgtagcctaattgctttaaccaatctggcgactgtggactttgttcgccatatatacaactttttgcagcttctttttcttatcgagactgtagtttggagttggtgagtaagctccctggagctcactttactcgaccataccattatttctgacctctttttcaaaaacccgattatgttcattttttttcttcttctttttgccgtttatttattttatttttgcgttatgagat

SEQ ID NO: 46767 - DNA, 1355 bp, Arabidopsis thaliana landsberg
ccattttctagagtaaaatttaaaattgcatttgatttagagagaaatcaaacgaagtcttgaagagcttgaagtgtacctcataaaaagattaaggattggagaggaggtgtttgacatttgaatctatcaacattactactctctccatgtctcttcaattcaatttagaaaacaaaattttcttcattgctttaagtattttgttcaattaaacatagatcttattctcttttatcagtctcactctcaccaaattacctacaagttaagattttctatccacataaaatatcaaaatagaggactaaatcatgattttatagatacactacttcaaaatcttactatattcgaattcgatatgattcataaattcatgaaatccatgaaactacaattttattcctagtgtatagttcgatctatcaaattgtatatgggttatcgatatatttggatgattgacacgaaagaaccaagtattttgaataaacttttttccaaaatattaataatgcatagtacttattaaaaaaacaaaaagaccttgaaaaagagaagagattgaacttatttatcagacaccagatcaccaaaaatttagtgcgaaaaaggtatctagtaactagtaagattatttaaaagctctcattaatcaaaaccagactattattactcttttgaaaaaaagactagacctcgagtgaagaaataaaattaacggtcaaaattatttctcagataccagaataccaaaaattagcgcgaaagacaaaacgagaccaaaaaatgtagaataaagtcaaacttatttcttaaatatcagattaccaaaatttgaagcgaaaaactgaatatttgataaacacttaccgaaacctctcactaatctaaaataaagtatgtatcccttaccatgttcaaaaagagcgcgaatgaaaatatagaaaacggtcaaatttatttctgagttaccagattaccgaacatttaccgcaaaaaacagaaaaacggtcaaatttatttcgcagataccagattaccgaacatttgtttcggaaaaaacagagtatctaataaaactttctgaaatctcttagcaatcttacaaccattacaatttaatgtatcattaacacaaaactcttaatttcaagcttgataaacatctattacccgaaaaataagccaatccaattaaaaacatatccatagatacaacaacagaaatcaggagatacgcgtcaagatctaagaggatgaaagataaaacttatcgtgctctcttcctcatcagattcattttgcggactcctcctcatcttattaaatccgcttaattgttttgggtc

SEQ ID NO: 46768 - DNA, 731 bp, Arabidopsis thaliana landsberg
atgaaccctaaggtatatagagtgatgaaaatttagattttactctacgttattttcagtgcacaatttattagtgcttacgtgcaattggaatgataataaattgattaaaaaatcaggtggcagagctactggcgaccaaggcaataccattgacagttttagtggtgagaatagttttgagaatactcacattcagactggggacgttactgctttgcgggttagtctgtcttgacaagaagcattggccttttcttctcaagttctctgaaatgtccctggagaagagggaaaaggttcttcagagatggaacacacagtggtataacccactagcgagaatcggctttatgatgatcaaagccatcttcttgttctactacttcacatgggtaagtcttccatcttcctctgcataacaggtcattcgctttcgttagaaactataaaaaaaaggtgcaacatgagactttataagttatgctggaattgattggctcagtaatgatgtgttcttcttctattcccacaaaacggctaggtcactaggactagtgcgatgtcttcaaccagatggttgtgtttctaatccctatcatggttcgaacaacttttttcaaccagcaagaacttttccatgttttattacctgtgaatatatgtataactaattcaaatgcatggacagacaaatgaaaattcagaaaacccagtatgggatgcaatta

SEQ ID NO: 46769 - DNA, 710 bp, Arabidopsis thaliana landsberg
aagatacaaagcatggacagttatatgaggaaaatgacaactgagaaacaatgatttgtacacgtgctattacactggattctgtccagggttcatttcttaagatgcttctcatcggctggacaagagtcttctgtcagttttaactgtctttttttgcctaaaagagagattttgtaaccgttacacttttaagagattttgtcatgttaccatatttagtcaaacatggaaagtgtaattcacctatatttttattttttttgaatcaagtgtaatttaactataaaatattgttattaggtaatagacaaagataatcagatttttttccttctattatttaacttctctctcatgaagttattttccccttttttatgtgaaataattttgtttggctgtacatgaaaaaataaaatgtagtaattaggtgtcaatcttaatgatttcattgttctacgggatacagtgatacacctgtcgtaaaagaaaaagttttcttaatttgtagattctttgacaaaaatagaatccagcatgtataaacaaaaaaattaccgtttcacaaaaatatatataacctatttatacagcccatttaatacatgaactaaccatcgtgcttattaacccattaacagcccgttaaaagatttaacgtacaccttttaaacatcattttagcttaatttgaagaagaaacttga

SEQ ID NO: 46770 - DNA, 648 bp, Arabidopsis thaliana landsberg
cgattaagttcgtatttacgaacggaatggccttcttctttccatttacggatagtaacaacggcgctgcgtttcgtatacacaaggcttagtaatctccctcctagagtgtctcttcctccaactacagtttcttttttgttggtcgattctcctccttttcctcctccgctgcgagtcttcaccacgggtgccgtcgccgtgtccaccgtcgcggcggcggcggcggagaaaaggcggtgaatggaggctagggttggccgggcagagcgaaccaacatgtttttattcatttttgtttagtttactgagctctgtgattgcgagtctatctgctaagtgggtgtgtttgagctatttctttgttgggccttgtctcggcccaatgtaaaattaacaaaacaacaaaaataagagtgtgaattaacatgtttttctagccattctggttgtaacttaactctataaagaagagaaaattatacaaacttacaaagtctatgtgattaagctatgatttagtaaattaactattagggatatagagacttttcagttgattataagtacgtgaaagaacttttaaaattttctaacagccaataaaaatcactcaaaaattagtactatgtgaatcaaatttgactg

SEQ ID NO: 46771 - DNA, 967 bp, Arabidopsis thaliana landsberg
aaggcaagaaatctgagtctatgataatcactaccatcactatacataactactcatagcagattcaccatgagggcgggctcttactctcagatcttgttcgaatctatgaacatcaccataaccaacaaaaccacgcatagagctagaagcttcaccatgaaaggagctctcacgaccttggtaacatccatagccggaaaaactagagtggttaaaaaaattgcttctttcatcggagatactcattttagcgaggttttgacacaaacccatatcaacaccatccgccattaacgacgtcgtatcaagctttcgaaggttaagaaaagggtttgttgtagtacggtcaccggaaaagtgaaatccattagatacagaggaagttagaggaaacccattaaaacccagatcagtaaatgaacttcgttgtctcaaatcaccaggaaaaaacccaaaatccatgaacttgatgttgttcttcgtactctcttcaaacatgaaaaaggtgaaatctttatgatacacagaacactaaaggaagaacagagcagagagaaagaagaaaatggttttggggaataagagtttgttagcgtggctcatggacgtacggagacagagagtatttgtcgttttatgaatacagagtcggctgcttcctattgtaccactgttccttacctcctgcaggaaaaaaaaaatgttgtagagagacagaaaacgaaatttattgtatttcaaaaaaatattcccatttttttgtaaaagtttgtttatgtttttttttttcctttttgttgtttttttgctgtttgatgtaaaaaaaagttactattatttgactcaaattaatttaaattattattattatttttttttttttgaagattttaaaaggtaatattagaaagttaccatagaattgaaaaagaattgagagaataacccttgtgtaaaaaaaact

SEQ ID NO: 46772 - DNA, 720 bp, Arabidopsis thaliana landsberg
cttttcctaaacatcaccttcttttgacacaaaatagaagaagaagctttttatttttgttttccttgacagcctgttcataaatggatggttcgacatatatacttcccgtgcttgcgcagcaagataccaaaggtgagtgagatatataccgatatgcaattgtgtcgagatttgtttctgtgatataaatttaaccctccacacacttgtttttcagacactcgccattatcattgctttcctagtctctgcagtctttcatgaggtatacatactttctacattgccctgtctctagacgcatgaacacacgctagtgaaagaaatgctaatattcaaagcattgtttttacttaacgatcttgtgttacaaatttccttttgacagctatgcatcgcagttccttgtcgtctcttcaagctatgggcttttcttgggattatgtttcaggttaaaaaattactaaactgctgcagtcgatttttactaaactctaatctcatattctgaccaaccaatgtgtttgagtaggtgcctttggtcttcatcacaaactatctacaggaaaggtttggctcaacggtatgctctcaaaacccgagaaaatagaacgaataactctttcttttatagcctaaccatttaaatcgcaatgctgaaacttaataataaaggtgatctggtttgggaatgggaaacctatttataaggggggg

SEQ ID NO: 46773 - DNA, 1034 bp, Arabidopsis thaliana landsberg
  unsure (1)..(1034): unsure at all n locations
tgtccatgtagttgagaggtctttgctgttttgcagtttcgaaatactttagataatgtttacttgtctcatctaatctttatttgtttgactaaacaaatgttgtctcctagtagtattttaacttattgagaaaacgttcttatcaaaagagaaatcccctaatgatataatggtactagaattttaagctatttccataatcataatgtcctaatgatattatggtactaaatttttttatcttacacaacaattattctcacatatctgtttaatatcataccataagcttaaatattttcaataattatgccttggtttgtcattgaacaactagatcatgcattgcccaatcatgatttataaatcacattattaagaaataaaagaaaattacatcattattgtaatcaaaagattaaaataattaatgaatgttatcctacagggaacaaacatgtcgttaacgttacagcgcgacaaagttttatacaataccgaaaataccctttagaatctgtgtaaattacaacatcgctttggtcaacggccataaactttttctcacacgtcgtagttttcattttattcctttctccgctataaaaagcgatttttctattgtagctcgatttgcgggaaaatcttgcatctgcctcagaaaatgttctggggagctttcaccaattagttcttctcgtctctctctctctctttggttaatgtttctacagattctctcctcctaattcagagacgacaaaacgctataaacaacatttttacaggtgatgattttcttcgattctgtatcttaaatctgagtttcaatttctgattcctatctccgatttgatcgccggaaaaattattggtntatgtggtttcgaatatgtcagagcgattcaattcgattagattagatctcatatggttctgatttcgtagggatttcatttggatttttgttcgattttttcgtgaatagtttggagaggaaggagaaagataggtttattactgagagtagc

SEQ ID NO: 46774 - DNA, 638 bp, Arabidopsis thaliana landsberg
acgacgccgattttcattcacgtcttcatcaccttcaatagtttattttgccgcggtcagtagcccgtcacggcgaaatctacttatgggaaatgcgaccggagaattttgatccggagatggagacatatctgaagaacaagaagttgacagctttaggatttctcttgattcacgccatcgccattttgatcttcacgcgtgggtttcttctcacgcgaacagagcttcctttccacagtacttgctccgacgtttctctctctccttgccttgcttctccacgctccaatcacgattcaagctcgggtcaatctaatcagactcagccgaaatgttggaccaaaccagtcgtcgatcgtgtcataataattgtcttagatgcactcaggtttcaaaaactgattggttttgttcatttcacaacttcataagcatttcgtgatttttgactgttcttttgttttccagaatcgattttgttgccccgagtgcttttttcccaggtgcgttagaatgatctttgtgtgtaagtgtattgctttgttactgatttgtaattctttaattgacagaaccaaagccatggatggataaattaacaatcttgcagaagcttgcatttgctaatgaatcct

SEQ ID NO: 46775 - DNA, 614 bp, Arabidopsis thaliana landsberg
cgcgaacacctggaggactgaccaatacaaccaatcggttttgtttttatgatacaacaaacgataaccgggcctgttatacaaaccatatgagcaaatccattcaaaaaataatcgtttccgcagccgcactactgctgttgtactcctgcggtggcggcaacaagccggaacagggcaccaatacggaagaacaccacgaggaaaataccgtgtcggagcctgacccagacaaatggccgccgaggcattgagctgggcggtacggaacagaaaaacctggggcagtccatcaaagtaaacggcaagctggaagtgcccgcccagaacaaggctgccgtcacttccctgtacgggggcgtgctgcagcagatactggtgcacccgggcagcagtgtgcagaaaggccaggtgctggctaccgttaccaacaccgagctcagcggcatacagcaaaacctgatctccgtgaccgcacagctgaagctcgcgcaactggagctggcccggcaaaccgaactggtggccggcaatgcggccccgctcaaaaaccagcaaagagcgcaggccgagctcagcagcctgcaggcgcaacaagccgcactaaaaaagca

SEQ ID NO: 46776 - DNA, 581 bp, Arabidopsis thaliana landsberg
tttcacatgaaactactacgttttgatgttttagtttagtgagttttcccttcttttcacagagttaccacctacttgggcagcgggaaagtcccatctaaattgctcctaagctgcttgcttataaccgtctacttaacaatgcatcagacaccaagtctatgactctatgagttgtctataacatacttaattcaaccacaattgctacaataaactacaaaatcgagatcataaaaaagaagcaagatttgtgactttgtataacttattcaacgagaattgctagaatagctgagcaagatcgtaaaacaaagagagagcatcactagtgaaaagcaaactaagttttgtgatggtgtcaaaatgtttccaccaccatcatacaaacagctactttggtaactgtatttaccacaaacgttctttgtattccttgctcccatttcttcagaatcagcttcttccctgaaacaaaccatcattcattcatcatcatcatcatcatctaagtaactaagcaaacacagaaaaataaggagaatcaaaaacacttacatagatcagtcacataatgcaga

SEQ ID NO: 46777 - DNA, 551 bp, Arabidopsis thaliana landsberg
cggctgggcggaccatggcggatagaaacaacgaggcagctcgacgtgctcagcctgccgtgggagataagaccggcggcaaggcaagaaatatcccaggcggaggagataaatgaagagagagacacgactgaagaagaagataaggaagagaactgcgctcggcggtaggaaaatcaggaatagagaaagcggctggaaaatctgaaggggaggccgctgtaggagatgagaacgacttgagctacggtggatagaatttccaagaaatcaagtcacgtatgaaaagaaatagaattagataaatacgtagaggattaaaaaaactcagattttctctctcttttctaaacaaatatgcgtagataattacttttacagaaattaggtttaaaaaaatatagaaatagttcgcaccaacccaagttcaatgacaatatttggaccgaatttgattcggtggatattttcgatgtcagatgaattcttacccttcgtttatatttgaaggtttggatttgggcgagaaacaacagactgaattacactga

SEQ ID NO: 46778 - DNA, 759 bp, Arabidopsis thaliana landsberg
attatcaaaaatatgcatttaagtcttaagaagggtgagaaagggttcattgttaaatgaaatcctttatacattaatctacatagatatgtacttttggtcttcatagctaataccagattccgttacatatgccaacgaatctacttaattccagccacagagagaacaattccagtcactctaaagtgactttgctactacgttgtctacatattctctgaaaacatgatattatctcaagttacattaaccaatatgaatggaaaaaatgactgttaatgataacttattattttaaacagagccgatccttttaaattttgaaggctaaaaaagccaaaacagaaaaattaggacagttgttttgtaaatttaagatttttttaaaagaatgtgtgatgtagagagtcgaactcgtcacctcaatccaacgcaacacgttacactagaaacgaaaatttcagttctcccgctaaataaatttcccaccaataagatattttaaaaaatctgtaatattatccatcaaaatctgttttattaatttaaaatagttggtcatcttctctctcatttaaaagttaaatgtggaccgctaaacaaagcagtactcccttctggttcgttgccgcgttaccctctcctttctctcttttccctctcttatctcacttccgaaaaccctaaccctaattcgtttcctcttctcttaccttcttcggttttctttcgaaatcgaattctttaatcggtttt

SEQ ID NO: 46779 - DNA, 789 bp, Arabidopsis thaliana landsberg
caaaacataaactatcaaaccctagatcttttccaaaaattgcaaagaaactaaacagagaatagagttatcctttccaatcttggctggattcgaatttctctcttaactcaaggtatacatccaaaacttgagcaatctgattcctgaggtgaatttagattattgagcttatatgtactagcgtttttggcaagaagtggtgttgttggcagttcagcttcaagtcctaacattataattttgttggtgatctcttgtaatagtttttttcttggctatattgattgttggtgtgtgatttagcaccacccggttaaccaaaccaagaataaaccgaaattaatcataatttgttttgccacaagttgcatgcagagaaaaggatgaattagttttccagatagggggcatcgtataggtcaaactactttaaaaacatgaagcttttgacgtctcaaactcttctgtcccatttaaactactctacaaattaaaattgtctcctaatgtaatataaaatttatttcctcgtttctcatttatatatatttacatatcttttagttaagctgttgtccatttaggaatttttgttttgtttcgcacacaactggtctaattgctccttttggtgtaatccaattgagagtttctactcaaattgcaacaaaaagtatacattttggttaatacttactttctaatgtttttttattataaaagtttatacagtaatgattacgtgtatgggctttggtttatcctaatttttttttttttttctaa

SEQ ID NO: 46780 - DNA, 721 bp, Arabidopsis thaliana landsberg
cccaaaaacttgaaaaataggggaggctaaatcattttcttgacgcgcttgtaataggaggagcaattgtggtaagtggttggtgtgaattagaacccaattatcaactaagtcgagttttgtttaaaaccaataaatttcatatacaagtttgaaactgaacatataactttttctttatatatcataattttgagtataacggatataacattttacttaaatgagaaaatactattgaattatccagaagacgtgatccgatggaaaaattcgtatcacacatgatcttttctttttatggcacaccagattttgtttacatttataattcgatttcatctttttcttagaaaaaatggtcaaagaatgcagctggtgaccaactagtgaccatacaacaagaacaaaatctcatggactctatttaaggtttccataatttaatttaccgtatcacatttacagctaattacacaaaaccgtcgataaataattgtttatagaaagaaataaatacaagaaaaacgtcaaaggatagctactataagtaaggcagactttaggaacccaaaattctgttattaatttacaaaaactaaagagttgttcacttttcagtttctcttcttaccattcactctaaaaaaaacagagtctttataaaaccgatctcagattctgaatctgaatcagaatctggatcaacatcattttctac

SEQ ID NO: 46781 - DNA, 332 bp, Arabidopsis thaliana landsberg
gaaacaaccaccgtcagatcccacctacagccgcctatcactcaggggctatacccccggtcgcagccgcgaaaccaactctttttagacttgacctacgtgacgatctaacactagacggtaacattgattacacagcgactttcgcgaaacgacctacatattgagggtgctttataatcttatgcattactactatccaattggtgaagtgaatcgcgaccccagttacgctgatagttgcttacaacgggtacaacagagttgagctgtcttcacgtaacgcagaaaacgaggatgaaatgattttatacacctcatttgggctaggg

SEQ ID NO: 46782 - DNA, 896 bp, Arabidopsis thaliana landsberg
tctggcccgtctctctctccttggccaatcctttacacacagctcttatttctttggttttttttctaaaatcttaaggggggattaatccatgaagaagattcgcccaaaaaagatatgacaagaaatgatacaaaaaggttaaaatgaaggtacatacataaacggtaaaagtgaatttcttgtcttttgttccggttcgtccataaataaaataacataaagtcaacgaaagtttgtctccacattttttcccaaaaaaaaaatatattaggtttctttttgtgtacacaacatatattagttttcataattgagacgtttttggttgtattataacaagaccttcacatattgattacacgattacacaccaataattttacttaactattttgcattttataattgattagtagaaaaaaagattgggtcaagtgggttcacacatcacgagattcagtggatgttaaatcacagaagctagtaccacggatccatccacctagcttttttcttcatttcacgtctgtgactgatgagtttttttcagaaagtggaccgtacacgtggtaagattcgattggatatatgtgtctgtcatctacgtaaatgacagatccttaaaagctagttatttggtaaaaaaatcagattcttcttctcttcttcgtaacggtcccgttagatttacagtcatgtggaagtccccactctaaaactgctggtagtgtatcgtatttaaagctttatcacgacaatcaataaaaactgacgcttgcttcgtatattcgtatctatgttacggccgttggattctttcaacggtaaaataggtttacgggataaaccaaacaaaacacttctatgacccgatgatttagtccatctttaga

SEQ ID NO: 46783 - DNA, 711 bp, Arabidopsis thaliana landsberg
aacaataatatcaaaggaaatgttatataagcaatattttgcgtgacgtatgttccgttcaactcacaattgctaattcaaaggcaaaccggtgcgtatataaggaaggtcttgcctacataattaaagacctatacatggctacgtatgtcttattcatacatgcacatgtgtgatgtgtgcatattcgcgataaaaattcatgtgccatgtatcatgtgtatgcatataatttcaaaacgtactgttacgaataaaatagaaggactatgaaactaatttatacagttacacgggagtttccttagttacattgtaaacgttttcatacatgagtgtaagttagggagagattaatcttcaaaatcatgtagcgaaaaacactgaaagtaggtttgtgaatgaaatatacgcaaaatgatgcatgccaagaatcagtctaagtatgaactgtatgatatgcacaatggatggttttatggaaagatgacgatgaaacacgtggtttggaatggatcttattatacacatagaatgggtgatccgtgatcgacgtcctttctataacttaatgagaaatctcacgcaacacaatagacgtaatgcttgtcttatgaagaattcaatggcatatggttgtatagtgtcaaactgaaagtttggccagcattttgcctcgatctgagttaaaaaatcctctctaaaccagct

SEQ ID NO: 46784 - DNA, 593 bp, Arabidopsis thaliana landsberg
  unsure (1)..(593): unsure at all n locations
nnnnnnnnnnnnnnnnnnnnnnnnnnnnnncccgcctccaccagcttcttcactactggaacgactgtcaagtcggaatctttccacgcgtcgtttatcgaattactgaaggagagatagagagagagagagagttattacagcgacgaccattagcagctctgttgtcaccataaccacccttcaaagacagggcagggcagccaagttaccggcaaagcgagtaggggtaaggtacgccagtgacattggcgtcagcgcttctgcacgtcctcgcggttgaagtactcagtcgcgtacgtctgcgtgcacgggtcgtagcccatcggcacctcgagaagatccagctgagagagagagagagagagagagagagagagagagagagagaggagcacagatcagcagcgaacgaagaaacacgcggcgcgcgcagtgcannnnnnnnnnnnnnnnnncaggccttcagggcgcttacgcggccgcgacagactggcgccgcgcccggttttcggcgacaccgagtagttgaaatnnnnnnnnnnnnnnnnnnnnnnnnggtgtacaggctgtagatgtcgatgaccctgtag

SEQ ID NO: 46785 - DNA, 401 bp, Arabidopsis thaliana landsberg
  unsure (1)..(401): unsure at all n locations
naacattttacatatttgcggctgtcggaggaatgtcattcatttttatttggatgctcgtaccggaaaccaaaggacaatcattggaagaattacaagcttcgcttacggggacatcctaaatgcacatttatattgtaatatactattaattttgtttggtaaaaagataaaatttattttctgttgtcagtcgcattgcaaataataaatgtattttgtaacattatttgcatattgatattaataatattttacatttttttccttcgcaaatcagtggtttatttatcctagtttaagacaacaaatgaaggatagagcaacgatcagacgtatcggacaagtcaagcatgccaaacgatttcaaaacaagctagcataatcataaaaggatatat

SEQ ID NO: 46786 - DNA, 2083 bp, Arabidopsis thaliana landsberg
tggcgtctcgccttaaatcacgttccgttgtccggttttttcggtacggatacggttaagtttcttcaaggtttgttaaccaacgatgtacggagattcggcgaatcctccggcgagaagaactcggcggttcctacgccgaacatggcttccgttacgaatccgcctatgtacgcagcgttgttaactcctcaaggaaggtttctatacgatattttcttgtatagcccttcgagacccgatgaaaagcttgatcggactggttcaggacccgggtcggattcgggtcgtgatgggtctgttgagttgtttgcagatgttgatgttgatgtcctcgatgaattgcttgaaactctcaaaaagtaagctttttgaagaagaaatttgaaaaattaggtcttttggatcttattgttggcattgtcaatgtagattaggtttttttgacttgtagatgattgtaagataatgcttaggttttgattggtatattatctctattgattttactggaatgagtaaaaagctcagatttttagaaaagaaacgactcacattttcagatattcgacaacattaggtctttttggatcccaattttagcaatgttaatgtagattagggttaatttacttgatgatgattataagataaggcctagaatttgaatttagatgtgtcatctctattgatttggtggagaaggaaccagttttagttctgatttgtgtgatatgaatgttgatagatatcgcttgaggtccaaagtggatattgaaaacgttgcagaggagttttcgtgttggcagcgttacggtaggaatcttactggatcatcatctgttggttggggtggtggtgttgatcgtgctggtgagtctacagctagtggtaataagtatggatggcaatggtataaggatccgaggttggagtgtctcggttacagaagtatctttccgtctgatgcaactcgtgagtttcttaatcgaatataagcttttgagttcttgagcttgtgcaaaagcttagagatttgtttgttttgcagcgcctttagttgaggcagataaagaaacagatgaaagcaattatcttttatggagattagagcatggagttgctgaaggatcagctgaaattcctaaaggtatgatctgtttaacttcttgatctctcttcttctaggtgtagttataatatgtttttgtggtttgtacaggtgaagcaattccgcttgaatataatttcgttggtcttaatgctataagctttgacaaaggctgctatgttggtcaagagcttatagctcgtacccatcaccgaggtgtcatccgcaaacgcttaatcccattacggtttatcgatagcaatggaaaaggtaaactgattttccttataaagaactcgaatttctcacatgccggtcttaaaccgaatcaccaatgcagagttaaaccagaaaattgcggctggagctgaagtagtagaatcaggaacgggcaagaaaatggggacggtttcaacagctttgggtagccggggaatgggtgtaatgagggtagaggaagcctttaaaccatcagctgaattagcagtaaaggactcagaggaggtgaaagtcgaggcaatcaaaccaacatggtggccagctgaatggttccaacagaatcaatcaggagttgctgcagcgtagtaacttactaaggtaaaaaaagaattacaaaattttgtgattttacttgatagagttgaggattgaatgatcttctgagtaatgaaaatttgttcctattgtcagattatttttgcagttgaaaaaaataaagttggatactttccggcgaggtttctgtactggaaagcaacaagctcgtagctttcattgtattccactatttaactaataaatgttggaaccttcccgcgagtttatagccgtcggataactttgtactaactgctacaaattttgttgtgtccacttatcaagtttcaagttattgagttttgtggtttttgtagttaaaacttggtaaatgttaaagttctatatagtgtttataaatcaaaatttcaaact

SEQ ID NO: 46787 - DNA, 1171 bp, Arabidopsis thaliana landsberg
  unsure (1)..(1171): unsure at all n locations
aggttaagaccctttctgtaaaggatcatggaaaaagtaaagggacattatattacccaataaaagagctttaaggagggacctgtgctcatagagacggtttgacctctttttccaactgaaactctgctgcagccttctcactcgccatagtctctagttgtgtttgcttatagtactgaattaaaacccgtggccagaagctatcagacaacttcccaatatgactttgattaatagaatcagtacattcaagagttcacgttaccagtaaatctgttagttcacggtatcgtttctccagctctgtatgctcctactaggtcagaggaataacgattaaactcacgttacataatcatatgcattaaaggtaccacttgacgagcaaaatcagaataagttgagtattaagaccgtgttttagcaaccatcgaatgaatgcgtcatattaacaagaccgtgttaacaagaagagcaatgggtctttccctcaaaatattcaataagaatttttactgggcaatgaaatttattgcattcaatgaaataaatacgccaaggggtttaacagagaactatcagttctgcctaagccacttgatagaaaaagagtagtagctaggaagtcccataagtatagactaggagaaacgaaaaaatcagaaactgttgatacattgacaagaaaagacagactctcagaaactgataatattacctggcgtgagtaatgttctgcatccctcttcatggctgccatttcaacccttaacttttgcatttcagcctataacaatcaaacagatcatgtgtaaataaccaaaatcatgttataaagaattccaaggtaagtaacaagcatacctccatcaaagaaagtttctcctcagcatctctttgaccttgccgagcacggtccacttcgtcctgccatgcttgaatctgcattattaaaagtaatttctctggattagccaaaatctgaacttttcaaaactgataaaattgttttaagggttatgtaacaagctggagtagactttgacaacaaatgtaatttctaatgtgaaaacgacccaccataaaatccaagagaagatttaaactcacttacatgagttatcagagttgcaaggatcataaatactttntaatatatgtacttttt

SEQ ID NO: 46788 - DNA, 542 bp, Arabidopsis thaliana landsberg
gttgttcttctacgtaagaacgaaaagattggatgacgtcgggtttacttacaatgggtccgattatagcgggacgaaggttcgccaggttgtattctctcaaccggatgagcttctagtttcagtcaaccttgaaatcaaccaagaacagctcatcgagttccggcctgcatctttgtcccggcgtcttccagcctctgatattcttcaaccgacaggttatccatagttgacttgatgatgttgctaggggagacattgaagttatcctttagaccggccatatgggtcgatctggtaaatccaatctcagtttccaaaacataattgccaaaaagtgtgttggcgccaatccggacaccaaatattgggaatttttcactcgttgggctctctgcggtggcgcggaaggtccacaacctagatagcaggagcagggttcctgcgcgcgacgcgaatggtccacacctggtggctggacggtccgcgcgtgcgtagggtggaagcgttcacaaacgtcacctggatcttgccgcgggagg

SEQ ID NO: 46789 - DNA, 504 bp, Arabidopsis thaliana landsberg
  unsure (1)..(504): unsure at all n locations
cccccccacccccccccccccccccccccncccccccccccnnnncccccccccccccccccccccccccccncccccccccccccccccccccccccccccccccccccccccccncnnccccccccccccccccccncccccccccccttcttttttctccccncggttttgtttccccccccccccccccccggcggccccccccccacaaccccactccacccccccccccanccccccccccccctccccccccccccccccccctnnccccccccccccccccccccttcctcccccccccccgccccccccnngccccccccccccccttccccccccccccccccccccccccccccccccccccctcccgtcccccccccccctccctccccccccccccccccccccccccccctcccccctcctccccccccccctctccttcccccccccccccctcttcccccccccgccccccctccccccccccccccc

SEQ ID NO: 46790 - DNA, 913 bp, Arabidopsis thaliana landsberg
ttactcctccgtataacttcatgtataaatctaccgacaaatgaaatatagaaatagaatcatatatttcactatttatgtttcatagaacatacttcttatgattataccaataacctaacaataaccaaattgacattaatattgttcaggatataaacaatttattaaaagtaatttattattagggataaatttaatgcttgtgaccgaagcactaggcccaaacataagattcttttgattttgccttcgatgccacatgcaactattaaagagctttcacacttttctttctatttttgatgagccatcaaaggacactaactttctatacattttggctttttgcttcgagaaaaaataattttgattcctacaaaataaagtataaaccatattatttcagagcatattttccataattattcctaacacacaaaaaagtaaacttttccaattttcccgtttgaaattccaaaattatgtttttttatgatttgtgtgggtctatgatgttacttttttctgtagaatagttttgttcatgatcaacaatattatataggactctacatacgtacgttcgagattttcataagtttttttttcactaataatttgtattttctagaaatcaaaccgcaaatatggtataaaacatcaaactattggatcaatgaacttaaattcaaaaaaaaaaggttaggataatgtctttcagtctattttttcgtttccatgtatactaatattatgaattatattagaattatatatcaaaattcattcatatatatcaagtatagctgcgtgtgaattataaaaagtgaacaaggaaaaggcaaaagaaatgagagaaggccccgatttgcctccattctctcctcaaagtaaaagtcccacgaaacga

SEQ ID NO: 46791 - DNA, 526 bp, Arabidopsis thaliana landsberg
tatttggcaaatttaaataatgaaaaacttataaaataatatataatacatatttcaataacgtaatataccaaaaatcggtaaactaccaatacatacttaaaaatataaaaaaatcgatatataaataactaaagtacttaaactcaatgtgattagtaggtaaaattgaaattggtaaaaatagatatttatatatctttaatattgataaaattaatataacatctaatattagatatttgaaagaaaaattaatacagatgtggaggtagagaaaaataacggaaaataattaggataaattcagacagtatttatgttaaaatcaaataggaatatagagataacgtaaaaacgaatactgcagctgggctgctgctgtgccagtgccaggcgcccgtcacactcacacacaccccactccacgagctggtagcagttgctcggggatctaggacgggggtcctgtgatgcaacagcgagtcagactgcgtctgcgtccagccaagtacttcccccgccc

SEQ ID NO: 46792 - DNA, 602 bp, Arabidopsis thaliana landsberg
tgcctgcactagaggactacgggatccccacgtgatccacggtccgcccgccgcgcaactgggccacgggctcgcgggcgggcatgcgccggttccgcgagcgaccaccccgccatccgcggacctgccctgcgctgcccaccgatcctccgcctactccggcctcagctaataacgatgggtggtgggagccgagccctttccctctcctccctctgcgccaccaccctcgccgccgccaagtccccacagcaccccgtccccttcgccccggctcaccgcgcgctcccccaccgcctcgccgccgccatgtcctcctcttcctccccgacccccgccgcatcggtggacgccggtgccccggccccttcggcgtccaacgccatcgacttcctcacgctctgctaccgcctcaaggtgagcgactgagcgcccctgtttagtcgcttcgcatttccacgggccggcttggttgagatggatggaaatgtgacgcgatggatgagattgtggatgtaattgcagacgaccaagagggcggggtgggtgaagcgcggggtgcaggcgcctgagtcggtggccgacacatgtaccggatgggc

SEQ ID NO: 46793 - DNA, 685 bp, Arabidopsis thaliana landsberg
  unsure (1)..(685): unsure at all n locations
caccagatttagcgggcagtctcaagagtatatcaggaatcatatctttaggtttcagctcgaaaatcttaccaagacggctctcgtcttctttagattgatttcttgttcccttctcaccatatccagtttcttcttcttcttcttctcgtctatccatcggcggcgacccactctttttctttagtttttaactttttataaaaaatgtctaacatatataccaagtaagcaaaaatacgaacctaaacgatgctgtaacgtgaacaaaaagaaaaaaagaaacaatcgatgtacattattcttcttcgttaatgtgttacttcaatagagaaagtttccaaaaagatatagggattacgtcattcgacttactcgcaaaccactctcgtttaccaatattcctaatttttacgatgatatagtagtaaaaaatggcaaatgctgcttgcaagtcttcctttttattaaaagctactttttagtgtccaagtcaatgcttgcggactactctatcatgtggtacaaattggttgttttaagatgatgggcttctaataaattagactcctgatagaagggaaaagtacaagtaagcatattatgcgcctccagaatattttggccctttatttaaataaaagcgctcncanacatgcccactcgccttctcagttccattctg

SEQ ID NO: 46794 - DNA, 1678 bp, Arabidopsis thaliana landsberg
cttttgcgggcttaggaattgctatgtctatgagggcaggtgttgctgctgatgctgcagccgctttgcttttccgcatactctcacagccggcactgctttttcctccgctaagtcaagttgagggagtagaaattcagcacgcgcctattggtggctacagttcaaattacagaaaacaggcatggttcctctttatatttttctgctattccatctctgatatgcgattggcattctactagaaaattatattgaaactgactcatttcatctcaacagatagaagttcctgcagcagaagcaaccattgaagccactgcccaaggaattgcctcaatgctttgtgctcatggtcctgaagttgagtggagaatttgcactatatgggaagctgcttatggtttgatccctttaaattcttcggcggttgatcttcccgaaatcatagttgctaccccactgcaacctcctatcttgtcatggaatttatacattccactcctcaaagtacttgaatatcttccacgggggagtccttcggaagcatgcttgatgaaaatatttgttgccactgtggaaacaatactcagtagaacttttccgcctgaatcttccagggaactaaccagaaaagctagatcgagttttaccacaagatcagcgaccaaaaatcttgctatgtctgagcttcgtgctatggtccatgctctctttttagaatcatgcgctggtgtggaattagcttcacgcctactttttgttgtgttgactgtatgtgttagccatgaagcacagtctagtggtagcaagagaccgagaagtgaatatgctagtactactgaaaatattgaggcgaatcaacctgtatctaacaatcaaactgctaaccgtaaaagtaggaatgtcaagggacagggacctgtggcagcatttgattcatacgttcttgctgctgtttgtgctcttgcctgtgaggttcagctgtatcctatgatctctggtggggggaacttttccaattctgccgtggctggaactattacaaagcctgtaaagataaatgggtcatctaaagagtatggagctgggattgactcggcaattagtcatacgcgccgaattttggcaatcctagaggcactcttttcattaaaaccatcttctgtggggactccatggagttacagttctagtgagatagttgctgcggccatggttgcagctcatatttccgaactgttcagacgttcaaaggccttgacgcatgcattgtctgggttgatgagatgtaagtgggataaggaaattcataaaagagcatcatcattatataacctcatagatgttcacagcaaagttgttgcctccattgttgacaaagctgaacccttggaagcctaccttaagaatacaccggttcagaaggattctgtgacctgtttaaactggaaacaagagaacacatgtgcaagcaccacatgctttgatacagcggtgacatccgcctcaaggactgaaatgaatccaagaggaaaccataagtatgctagacattcagatgaaggctcagggagacccttagagaagggtatcaaaagatttcctcttggatgcttctgatctagcgaatttcctcacagctgatagactcgcagggctctattgtggcacacaa

SEQ ID NO: 46795 - DNA, 221 bp, Arabidopsis thaliana landsberg
atacacagagacacagaacacacacaacacatagagagatatacagaatcatacagatcacatacaagatagaatagataacaatacataacacatagaactaatagagaacagagataagtacacaagacataacatatagaagacaatagatatagagtacataagacagaatagagaacatataacacatagatataatactaagatacaacagataa

SEQ ID NO: 46796 - DNA, 751 bp, Arabidopsis thaliana landsberg
cacaagatgcctaatcaccctctcatcactatctaacaatctcttgttttcgttcaagtattttgcctctatctgaaaggtcatcagtatatagtgcgcattctctgccttctgtattttgtaagccagtctacgcattccccaatcactaaacctccaaactttccccttcttctccttcaggtaatctgaatatcaacaacaaacttaattacatacaaggagtttcactaccgcaatcactaaataaacttaattgcttgaaatctagtgagcagaacatcagagaataagaagtcaaaaagcttcaccttgtactttctggttaatgctttcaacctcctcagcatgtttttcatgaatcaagtaaaccacctcatagtgcctcactgcacaaacatagtttatacatcattaaatggactgatatcaaaccgattacagaatccatgattttctcacaatgtggctaagtaacgtatcacaaagatggataatattctaaggtaaggttccgaccatctaaagaacacattttgcatgtatatctaaattcatctcctaagttaaaattgacataccctatatcttacattatcatccttccttgataagaaagttaaaagtttacaaaagccatcattttcgaatcaaaaacttagctaagagcaggaacaatggcaatgctagctaatgagtaactgattaacagagaaccaacttctagataacgagtaacaacattttgccg

SEQ ID NO: 46797 - DNA, 733 bp, Arabidopsis thaliana landsberg
cctcgttcttttggtgaatttttagtttcaaatatctctgttatttagtatctttgtatgcagttactcttggctccgtttggacattttaatttgagaaaattgcctatgaagacattccattgataatttctttcggatatatcttagcaattcaaaaatttatctaaggtaactcaacttttgctcaacatttggtctcttgtgttctgttttgatctgcttttgttcatcccgctgttttgccagttttgtggctcagtctgtttccaaagcagagatggttttgtcgcgtacaatattatcatgtaaacgaaaaaagcagaggtaaacacttaaaacaatcatggcctaaacaagtatgatagtcccatttttgtaattatgtcttttgactcttttgaatgtaacgccgtttcataatcgttggccgtacaaaaccctaactcgaaaataaatgctatcgccgatgatgaattctcaccaccgggaactgctgaagtcgaagtgctcttctcttactctcgtcgggaggtttggccgccgtagatggtcgttttatcaccggaaaatcgcgtgctgttgactgggtcatcaaaacaggtttctgtttaaaacttcgatacttatgcaactcatttcattaaaagttccaacatttttacttattatggtttctgattacggagctctgaatgataatagttgttggagaggttgtgcttaaccttta

SEQ ID NO: 46798 - DNA, 663 bp, Arabidopsis thaliana landsberg
ttttggtcagaccctaacatagtaagaacaagagagagatgatcaaaccaaagacaacaatggaattataaccaaaaaggtactgttatatttagttaaaggaaacaattaaccaaccttgcgagttgattcagaagaactcgtcatttgtgtttattacagtgagtgtgagagagagagattgtgtgtgttttgtctccttagccatatccagtgagctttttatagtgtcttatcatctttgcaatgtgtctaaagcgtttgggtctatgtccagtcatcaatccgacgtcgtttttattgtgtcggctctctttaatccgggactttccacttgtgttggagaagcgaatcttacacgcttttgctactctcgcgatcatgatcaaaccagttaggaatattatcataaaacattccaatatctatttcggaaaaccaaatttcttaaattaaaaatctcataccattatgaatatctgagttatgtaaattttaggataaccaaactgatgcatgcatattattgatattaaccaaaaataagaattgatacatgcatcaggtaaaagttggcttgtaacattattttaatttatttcccgtttatggatccatcattcaacgatgccttggatttttagcgatgatatattgctttca

SEQ ID NO: 46799 - DNA, 929 bp, Arabidopsis thaliana landsberg
gttgacgattcgtttttaacacaggatatacatgggtttatacatgagttaggctggaaaattcaaagggccttatatacatcagttttactctcttttttatagtccagttttaccgaacttactgctatgactgtaattaggcaattattaatttactcatataattatcaaataataaattacgcttttaaaaaaaaaatcgttttggtaattttgcaattaataaaacccaaagataatcttctctcccctgactctcgtttcctctctctttctctcttcctttacagagaaagcagagagagagagacaaagggaaagctaaatccgtgacccggatccgaaataatcgggttttcaaaatctaattcctcttatcttctctcttcttcttcttcctgggttcttcccaaaattcaatttcattaaaagggcactgccctttatcatgcctaaaattctcaggtacctaatcaagattcttctttaaattcctccacattgtgttcggatctattctaattccgctacgtatgaaacatgatcgtcatagattcgtaaagtttgagtcttttttttttggtagtgtctgattatttgaataaagttttgatttttatttgatgattctgtttcctgttttcaacgtttttttctcattgatgatgttgacgttatgaagtcatatttttatgtttaagatttgtatctgaaagtgattgaattttaccaattagtgttggttttgttatttgagaattctctgtttgagatttttcttatgagtatagtttttaatattgagatttgttgttgttgttgttgttgttgttgttgttacatgttattgtgtcccacttactcttttaattgggtacactttttgagctggctacattattttatagttgagagattgttttttt

SEQ ID NO: 46800 - DNA, 602 bp, Arabidopsis thaliana landsberg
caacgactggggctgctctctccatcttcctcttcatcttcttctgttctctctctataaatacaagtttactcttcctcttcctcaaatctatgactcttctctgcattatctcttcgatctctccaactctccaaaaccttcctcaggtaaaagatccaatcttccttacaattccactaatctagggttttaaaatcccagattcctgaatcaaaacttctctgagatccgaatttcgcaattctgtgtttttggctaacttacgcctcgcaattttgtgtttttcgctaacttatgccgaatccaatgcatcctctgtcaaaactctctaaatcccaaatctttttacagaaatttatcacaaattaggattccacagtgatttctagctttcgcatgagagatcttattgtgtttaacatatttctttgcaattttgtgtgtttttggctaacttaagcgtcgcaattttgtgtgttttcactaacttacgtcgaatccaatgcattctctgtcaaaactctctaaatcccaaatctttttacagaaattaatcacaaattaggattctacagtgatttctagcttttgcatgagag

SEQ ID NO: 46801 - DNA, 1843 bp, Arabidopsis thaliana landsberg
  unsure (1)..(1843): unsure at all n locations
gaatacatttggcatgacaacagaaattttttagtttcgataataatacagtaatactcatagttttatgattctgactgaatcgccaattgtttttcattaaagagaaaaatactatggtaaggaactaaggatccatgtggtaatcgaagagtcgtcgatcacgtgcaatcctccacacgtgttaagtcagctcgtagttgattcttcccccttgacggtcatctcatcggacggttgagatcagccaactttaagtgtatcacacggaaaaaggaaatgtagcgcgagaaagtcaaaagatccaacggtcgatatgaaacaaaagtcagataatcgtacggtagaaacgaagctatatatagcaacaattggattattcttatcatcatcactctctgagatcgaagagaaagcaaaatcaaagttgtgatgaaatctctattgatgagaaccggttcgatgccggttnnnnnnnnnnnnnnnnnnncaggtggttcatcgcggaagatgacgcctatctccaggaccaactccgtcgaatcattatccagctacggcgagagattcgccggcgggaagatttcgatcgaggttaaggctaatgtagggatgcggagggtgttatcggaaagtgatgtgattagatctgagagaatgttgaaaagtgttggatctaagccttcgccggcgagaatcccggaggatgatgaagcgggggaggaagaaattaggtttgcagatggttgggggtctatgatctccggtggtttacctgtggaggagaaatgtttcacgggtggcggtgttggtggtggatctggttatagcggcggttatggaaacggaggaggaggcggttatgaagataagagcaagatcggtgattattatcgagagatgttgagatctaatcctaataattcgcttcttctgatgaattacggcaagtttttgtatgaggttagtgattttagaagctgaatttgagttttgggaattggagattaggttttgatttgggattgaatcttcaggtggagaaagatgcagagggagctgaagagtactatggaagagcaatactggagaatccaggagatggagaagctttatccatgtatggaagattgatatgggaaacgaagagagatgagaagagagctcaaggttactttgatcaagctgttaatgcttctcctaatgattggtataatttgtatactttgattacttttactaatcccaaattaattttctttactttgaatctaaaatgtttgtgttgttgtaactttgtagtatggttttgggatcatatgcacgtttcatgtgggaggcagaggatgatgatgatgatgatgaagaagaagaagaagaagaatggatggctgcatcaccactcatggtttctgcagtttagagactaacacgacgaagatgaagaagaagtaatggagactaagattatgtatcaagtatcaacctttttttttgtctatttcactgtctttttactaacttttgttgtaataacctgaagagtaatgaaaacatgtatgtgaaagaaaacgaatgtaaccttattataagagaataaaagtgcttttgtatagtttagaatttcgttgtttagaatcagaattaaagtggataattcgttgaatataggagaaaaagaacaagtctttatgatcatcacaatcaaaagaaactactaagaaacaaactaaacaagattgaatttgaaacctacttaacatgtctctctctctctatttatctaaaacgaaagctagatttaagagagatagtaaaggagaagaagatgagagagtaagag

SEQ ID NO: 46802 - DNA, 219 bp, Arabidopsis thaliana landsberg
agaagaaggggaggagattcacggcgaaggtttcgggtgttgaatgtggaggataaggcgaagatgattggggagaagttaggttatgtagtgaagaagaagatgatgaacaaggaaggagaagtgaaggtttgttggattagggagaggaagaactgtgattgtggtggaagcagtggagttaacggtggatgttgtggtggctgaagtgaaagttgt

SEQ ID NO: 46803 - DNA, 1066 bp, Arabidopsis thaliana landsberg
aggatatattcatgtgcacatcattcaacataaaaattactttgtattaaatacttttttggtaaccaaaaagttttaaatgtaagaatatccaaactcttttcgggttaccaactacaacaagttaaaatagttcgtgtcctgtgttaagttcaaattcatgttttgtatttaatctattctacggttgtaaccgtttattttatctatctcatctatgtatcattccgggacttttcgccatcgagtacccggtttctttcggttgtaatcgcattcgaagattaatataatattgttgacaaaaaaagggtttcaaattcatgacttcgaagctatattagatgctgaattttggttaaacataataaagcaatttatctttccttgggtaaatgaatagaccgataaatatgtgaccctattagaaggacctagtgcatggggcgttactttgggaatatcatttgtaaattgtacatattgtataatatcattagttgatacagctgatacatctcccactacgttgcatgcatacaaaattataatatcatttgttgcatgtcccagatctgagcacaaaactttacgtaactagtgttgctaatataatgctaccacatgaactggctggccggtctaacaaaatccaagctagagaagataactaagttccacatagaaatagaaatattcgatcatatctagtacgaatcctccggtcccgtcaaacacactagcttttattttgtttctaccaagcacattcgttttgacatgtacgaccaattaagcacctacatgtattcccacgttatctagaatctaacaacagtggggtgacaattataaaggcgagatatgtacgcctagccagagacgagcaacacaatgcaatgtgcctagatatatttcttcttttatcaataacttttttttcttacatccattttttatttaacatctatttaacttaaaacatttctctctctttttggttaccttaatattaggaattttacttttatgaaacaatcttcatgggcttttggtttttttttct

SEQ ID NO: 46804 - DNA, 683 bp, Arabidopsis thaliana landsberg
tcgttaattttagcacattttttcataaattgaacgaatcaaagtttcgaacagaaccggacgaaagtttccgattgaaaacacctattataagctagtctttttaaaacatattttatatgattttatcctctaaaattctaataatgaaattatttcctattatgtttgcaaatgttaacacacttaatttcctatatttatatgaataaacttttaaaaacatattttatatgattagctagtgtagtaaaaagttttctttaaaaaattgattgtgagctacgacatgaactatagcacttcacataaaatatatagagtaaattattgtaacaatacttacacgaaaaaagaatttgtatggtaataaaaagaaacaaacataacttatgtaatcaacactaacaactaaccattaatatttgttatctctatatgatctgatatttgtttttattttcaagattggtataaaaataaatctagaacatgggttgcataatattctattatccatgcttttcactccgtattcaaaattggattataaaaacatattttgactttatggatttaaatagaagcatgttgcctatgattagaaggaaaaacaaaaaacaatgtttggttcattgaaaagttgtttaaagtgctgaaaatttgatttttttatgtagcaa

SEQ ID NO: 46805 - DNA, 587 bp, Arabidopsis thaliana landsberg
aaactgaagttgacgctagaaaccaatcatttaacaactcattctccgttaaacagtttgagaacattaagaagttaattgtaatgactacaccaatcttcaaagccgtcttgagaaatgacgtgtcagcttttctcgatctcgtccaagcgaatccatcagtgctcgaggaaagaaatcatggggagagtttccggggaacggttttgcactttgctgtggaagcgggacatggagagtttgtggcaaggataatcgaggtttgcccttcccttgtccgatcaaccaacagtgatggcgacacacctcttcattcagcagcccgtttgggacaagcgagcgttgtgtctcagatgttagagtctggacaagctttgtgtatggctcttaacggcctaggggaaacaccgttaaacttggcctgcgccaacaaacaccttgatattgcgggactcattctggaaagaactagttcgatcaccatcgtcgaattttatgccaccattaaagaagactcgacaggttttttatagagtaccctatcagatgtatcctacaatttacatgcatgcagttattaaggactt

SEQ ID NO: 46806 - DNA, 825 bp, Arabidopsis thaliana landsberg
ctaacaaaacatatttgtttgaaatgatgtcattgaactgatgtttaaacaccttagacaacatatttgaagtgattttgaaatgatgtcatttgaactgatgtttgaaacacttgagacataacatgcatgtttgaaatacaaaaaatccaacaatcaactcaacttagtagtttaatgctcccaactatgatcatacatccaataactaacaggatttggcttctaccaacacatcttccaccctctcaaatatctctttctcgagcttcatttgcaccttctcaaactccatactatgtattgtaatctctttcatctcttgctcaagtcttgcaattttggaagccaatgtctctatctcattcaacaatggttttcatccacaagatacaaaatgaatgacccacaacaatgagaatcaaaatcaacataaaacaatcataagcgaaacaaaagtatcggcgataaggaatgttgtcgaatttgtatatctttgctaggatctgttcaccacatcaacatctcttatagatacatacacccataactcttaggaatggggtacggtttttcggtttggttttggttcgattgttttggttttacggttttacaaaaactgaaatcatatagaaaccgaatgccattcggtttggtgatgattcagtttttacggtactataggttctttggctttgtcaaaactgaaacctataaagaccacatgtatcttggttcggttaggtctccggttcgatccgggtataccgattattgcatgagacggccaaactgatgtaagctcttcgcataaatgaatgt

SEQ ID NO: 46807 - DNA, 1183 bp, Arabidopsis thaliana landsberg
gtttaagcgtggatgtcggtcatgtgggccaattggacttcttatgccacgtcggcagaaaatatcaattgcagagactttcggtgaattaagttgccgttaatcccctttttaagacgttacaaaaagaaagtaaaaacatgcagcaaagtaaaattttatttttgacgaagtaggaagctctcgaagtaaatttaatttttaagataaagcaacgttattgaaatacttaaaaggatttaattttatgtatgtaatgtggtgttgtttgtcagcttatatctactaacgtaaacttaatttaatttgtcattacatttaaataagattgatcagatatcccaaacccacaaacaaaatcaaaaaccaaagattgaacagatagggggcattgagaaggcaccattttcggattttgcttatagattatgaatcgtgttcggttgaaagattcatcacaacgacgtgccacttaataaaatgtgacgttttcatatacacgcaacttgtaacataccgatcgaatcttttattttaggcattaggatggtcactgtaccgacacataccaaacaaagcaatcgttttcatttctatattgaactaatttttatttaattaacaaattattttgtccacctagtcgtagggttcaattaggacaaacctcatcaaaatgggaatataaaagaattagaagttttagaaccaactagaaaagagaagaatcacttggaaatatgagatcacattacatgttttcattaaaaaaaatccgatagtaataaaaaaacaaacaaactaaattcatgtgaaaacatcgcacaaaattatccctctagaatttctacttttgagtagaatgagataattgtaccccaaagattaaacaattttatagatcaaacacacaaatgatccaactccattaattttcgtacacgtaacggcgactatccataaacgaaactcaaaatattttgtttagtttaagatctcgacgggcccaatgtgtaatacatcattacactaacatgggcttctaaaatcgaatcgggtaaggaaccggaaagttaaaacccgacccgggaatttgacaccgagacagagggaaggaggaagagtctacgctaacgaactttagacgaatcgaaacatctgttcgtctctgaattttttttga

SEQ ID NO: 46808 - DNA, 511 bp, Arabidopsis thaliana landsberg
  unsure (1)..(511): unsure at all n locations
tacaagtacaaattatatgtaccccttactctatgtggttaagtaagtattataattgaaagcatgcattaaattaattacctctagcttacgataactttttttattcattcttcaaacaagatcgtttatataatttagtttaagtatttagattttgactagtcacaagactagcagccaccatgtatactcgaaagtggacaaaacgatatcaccggactagaatcaagatctattagtattnnnnnnnnnnnnnnnnnnnnnnnnnttttttttatgtagctagatctcttgagcctaaaatagactaatcacgcgattttcaactaccatagaaaggttttaatagatatgtttaggtaggcggattttttaggacctaagggctagacaaattgtcataattcacaactgtcatgtgatgcatacaaaaaaatcaatctaattgtcttgaccaacaaacaaaactgtttaattacaacaactggttacaaaatatctatttgag

SEQ ID NO: 46809 - DNA, 538 bp, Arabidopsis thaliana landsberg
  unsure (1)..(538): unsure at all n locations
gtctccaatcacggtcgaacgcgttggcgatcttggcctgcaattgcctttgttgcgcgaactgccaactgccgcgcagggccagcttggtgtagccgcccagccaatgcgtgttggcgatatcgtcgtaacgcccgccgaaagcctcgaacgtggcgccgacgctgaacgcacccagccggcgatccaggtcgaaacgcgcgcttttttgcgtgcggcgcggcagccagttgccgtcgtcgacgccgccatcggtgttttccggcttctgccaggtgagatacgtcgcccacgtgaagccgttccagtcaccacccaactggccttccaggccgcggatggtggcgctggaaatattgcccggcgnnnnnnnnnnnnnnnnnnnnnnnnnnnnnnnnnnnnnnnnnnnnnnnnnnnnnnnnnnnnnnnnnnnnnnnnnnnnnnnnnnnnnnnnnnnnnnnnnnnnnnnnnnnnnnnnnnnnnnnnnnnnnnnnnnnnnnnnnnnnnnnnnnnnnnnnnnnnnnnnnnntaatacaag

SEQ ID NO: 46810 - DNA, 191 bp, Arabidopsis thaliana landsberg
tacagatatacaacacacagatatacaacacacatatacacacagagacacaacacagatatatacacagatactaacatagacatagactacagaacacagaaacatatagacagacatatacacagatacatatagacacacacagacacatacatatagatacatatacatatatatacatacacaga

SEQ ID NO: 46811 - DNA, 563 bp, Arabidopsis thaliana landsberg
attaataataacaagattattatcattttaaaagtgtgaatactctttaataattccggcatgggattgtcatgtcatggagagaaacccaaacgaacgtgtataaacaagctacctcttctttctaactttttttcaaataaaatatatattttccgtttgtggtagcatctccaaataaagtttatactctaaatttgtacaatgacttataaacatatttttattgcaataagtggaccgttgggagaagaattgaaattcgctagagaataaagttaacatacattttcttgaaacgggtggttaatcactcagataaaactccaacaaagtttcacgaaatcatataaaaaccgaaacgaaaagagaggacaaagattcgttttcaagtaaaaatggaataaaaaggaaagagagtcgtattaatataaaactataataacttattaagatagtcaacattaaaattaaattaaagatttcatctgaaactattgcaactactggtctcttcatcggaagaagagaagatctccgtcgtgacttcacttgaagcatga

SEQ ID NO: 46812 - DNA, 530 bp, Arabidopsis thaliana landsberg
agagcaaacaccgtctcctcccacaaatcgagggtcgtagcacagagatccgtaaccattgtagttcgtttttctccctgaaagaaagaggaacccgaaattaagccaagttacttgggttataagtaaacaaattcattgtaccacaaattatcaatccacaactgaaatctatattcttgttacttgtgcgataagctaactgaatatagaacaaaggagaccaattgaatagaatgtacttacatttgcaggtagcttcacatttgttagtgcagtcaatgaagcaacctttggtgttcttgttcttcgtgggcttcctcttgggacactcaccagggcaaacaagagtcttgtagtaacatgatccccgaccttggcacatggcctgctcttgtcctgtaggcaacggtgataatattctgtatctcgcagctgcttcactctcctctttgtctttcttctccttcgcctttctctctttctccttcctctccttctccttcctttccttatccttcttttccttt

SEQ ID NO: 46813 - DNA, 492 bp, Arabidopsis thaliana landsberg
ctttttttttattatcctctttttcctcatatttgttttttcttttaacgaggtgacataccgttcaggataataccatatatttttcaggaaacatagagtgattggttctgattacgtgttataatcaatattttattttatgatatatataaatataaataaaagagaaaaatttatagccgtagaaagatcgggtactgaatagtaaagagatgagagagacagagagatatatgagcttatacttctcttatatttgaagtaatgaaattgtattttacaaatgaacgaatttgttcgtttatatagacgtaagaaagtataactacaagtgacggtagactccacacaaattatattttactcgtaatacttttattgttgacgtttgatattgttgactttcataacaaaaaaaagattttttctaggacaataaataataattaaaactagccaaacagagtccattaaaaccatttaatacac

SEQ ID NO: 46814 - DNA, 165 bp, Arabidopsis thaliana landsberg
acagagaacacaagatagagatagcagatagaacacataagacaaacacaacataatacaacagtacaagagcagaacaacagagatcaacacagatatagaacagagatacaaacacataatacataacacaacagacaagacacacaagagatcataatataa

SEQ ID NO: 46815 - DNA, 179 bp, Arabidopsis thaliana landsberg
  unsure (1)..(179): unsure at all n locations
cacacatatacatacacagacacacacatagtaacacacacacacatacatacactagaacacatagacacagacacacacagatacacacagacacaaatagatagagagatatatatatatatacacacaacagataacagataacaacacacaanacagatatacaactaatagac

SEQ ID NO: 46816 - DNA, 787 bp, Arabidopsis thaliana landsberg
  unsure (1)..(787): unsure at all n locations
aaggacacgaagtactgtagagttatagggtcccagctcagaaatgccccacctatggttcttcaagtatcacttacnnccgtaannagctccttnggtggtgaaagggtatnngatgatntnnatgctcnnatctcanntcttttattattggcctntnncagaatcacttantcagctnnggttgttggaaccccactcnnccttagttcagtttnngctctattaaanncctaggattntgaggtcttcagactttgtgaattgtgccttcaatcactgttttatacctctgtcanctgcnnaagtgtcttcaccatttnngctgaaactctctnntaactattggtattgtaaacccaggaacccaacacatgggacccagattcgagcccttagggtaccacaagccgagttattagaatcttttcagactcttcctgatnngtggtcaagccagaatcacctccatttcaccattgatacctggtgttgaaagttgaagggtcaaccatcgcttgacntacgtagatcaaacccccttctgtgnngctctgttattcttctttttcaaaattcctctttaagaaaaccaatctttctttttccccgtaaccgaccattcnncttttgagtttaaaaacaaaaaaacaacatggttttgggtttgtagtggacaaccccaaggtttctttatggttttttctttaaaatttaaataagaattttttgaaatttcttttaaatttaagaaagtttccgtccccttttatattcttaaactttg

SEQ ID NO: 46817 - DNA, 591 bp, Arabidopsis thaliana landsberg
attggcattataattataacatgacaacaaatatatgatgcccatttgcgaatttacaaataagtttccgtttttattcatgatttcatttcacatattttacagataatttgatttttggtcaatatacagtattacagtcaaaactataattcatgctatagtttttttatatagcaaataatgcatgctatttgtcacgaattatttatcttttgattctttgaaaaacaaattcacgagacactgtcaaataccaatgggccaaatgtgtgtataatatattagtgataagttcgtagatataaaaaccacggaaactatcatgggcttctgttaattaaccgttatcggctgtcaaattgatgacttgtataagcccaattaaagcccatggtcatcaataattatttttttttttttttgtcggcaatatattttatttcttaaaaatgtgtataatatatatgggaatttcgacaaataaattatatgggaaaaaaataaattgtaaggaaaatccgaaaataaaacatttaaataagtctgtctaaccaaatttttttaaacccattaaaacatttttaaaaa

SEQ ID NO: 46818 - DNA, 1257 bp, Arabidopsis thaliana landsberg
  unsure (1)..(1257): unsure at all n locations
cggaaaactgggtacgaggactggacatcagtaaccaattaccgtaagagacattgtaattctgttgcaaaacgattataaaatggtggaacatatcgagcttgaaggtgacccttattatcgacaagtacccaagctcctatgcagaaaccagcttattaatccagatgaattaaaacggaaaaaaaaaactatgagcattaccatgcaagagaaatttaattatgagcttttgaagcttgaattgtggtcttgatttcagtgagtttgttttataaactgagtgataattgataaccaagtttagtggatttatgtggtcttttatttcttcatactattactgtgagtccattggccaaatatcaccaagagaatctactcggaatgaccagaacctctcctctgtggattagtattctcataacttggccaaatatcatcttccaccaaacagatagtcactcttgattctttcactaccatcagcagatgctctcaatgtgagtcccatgatcatatatcaacatctcattttcaagagaaactactctcttgaccagattnatcttgaagatgtaaaacaaacacttctctttgaagatgttcttgtgctccaaatgatcagaacctctcctgatttgtcgattactattctactactcttcctagtatgttccactacaaagcggagcacaacggttgattaagataaggattacctttgatattcataacatcactccaagttttgcaccaacctacagctacacagttatacacaacaagcaaagcaatatttttacttggtcaatccgtaaacgaacaataaattttgaagtattgtcccaataaactagtaatatcaagaactagctcgccaagtgagatctagataccgaaatcctaatgtataaaatatacaagagtcgcaagagccacagcagcagcagcggtggtaagcaaattattttggttttcgagtcgttttagaaaattggatatccgggagctcggcgcgtgatcaagaaactgaaatccgtatgtccttatcttggtaacagaatctggacgtcgaagtgggagcaaattctcaataaaaggagaaataacacatatgtctctctcgaggatacgaacctcgtcagtctttgtataatatttgtataacctcttctcattatcatggaagaaaagattccctcgcttagaaaccgncagtggcctagtccaaaaccacaattggaaatggttcat

SEQ ID NO: 46819 - DNA, 1193 bp, Arabidopsis thaliana landsberg
tcctcgcttacccctgaaggagctgatcgaggaccaatgtcagaacactcgagttggccttccttccctacggatgaggagattcaacagattatggtttagaagccgaacaaagagcattggtgtgaccgttagcagcccagtcgtgccctcccctgaacactcggacgagagggtgagggtgggtgcctctctatgattcgtctatctatgttcctatctatcggaatgactcccaccgctgcttcaatctatatctcccggtaaagtgaaatcatcaatctgaatcaattgaatccttccatatcagtgaaatcctccatctatgattgctccttcatttcctcaatcggaagagtcttcttctcttctgtcagttgatcaacatcccttttccaagaacacctcgaattcggcctactctacttcccggaatgagacgggggtcgagtcatataccgcagcagcaagggatcccgggccctcttcaacatctccatttcccattccatctctgggatccaatgctccactcatctttctcgattctattgacataatagtggtttcttctatattagtgaaatcattacatgacagtggatcttgcttggtacttgtccgaggggagatccatactcaactcatctttctcaattctactgacatgattacttggaattgattgtcgtgaactcaatctctcatataggcatagttgaatatcgcgaagcaaaaacccaaacttgaatatcgcgaagcaaaaggctacatcagacgatgtacaagtttttcaaaaatgatttgatcgattggtgtgtttcgatcttgttgattcactaggtaaatcacagcctcatccttctatattacctgttgatcgatcaaaaaaagcaccttacctcggatcaagaaaaaagaagaaaccgaatctcggaaaacgacaaatcacacagttgaacaaggtgggagtagctcgtgtgatctagtcgaaggtccataggaaactgataaggagaggggtcttccatctcactattctagattctaccgaattagttggaattgaattcgtccaagattaaatgccagttgaatgtcgactagtgttgaaggtccaagctgtactcgactcataattttgcttttctataccttactcgtgaaatcgatgatgattacatgacaggtta

SEQ ID NO: 46820 - DNA, 970 bp, Arabidopsis thaliana landsberg
tttttttattcaatttccttctaccaagagtataatttatttcacactcattcttgtatcttaccgattgctctcttttaactgtttaacaaatccaaagggaacaataaaaccatatcttttgttatcatcaaaggcaaaaagttttgagttctaaccaccatataatgtacatacatgcttgctctcggtgagtttttccaatcttggagatctcaaatcaatttcagggtttagatgatcaaacttttatttgttcagcatacttccctgacatatgagtgagaagaagaagaataatgcaacaaggtctatgatcttctatacattcacaaatctttgaataaaactggttgggctcgagacatgtttatctctcagttctcgtgtgagctctaacctcacagtcttctgaaacctgtacaggtgttggcttgtaagattacctcaacaggaagttgaacttttgagcaagaagaaaagaaaaaagaaacaccatttatacctctcttttctgtattgcaaagagatttgttgtttacactctccaaaaggaccaaactttgggggcttttctaatggctgctactaatatctcatctcttggacttctctgttgatggaactaaacagagccgttgtgatataccgctcgccatggcttggaaacagaacctgttttacgaaattattagagctaaaaaccaccaactgtgattactacatatgtcaatctgtttttactcaccgtgattagtttaccggcattctctgctcttttagccaagctgactgctgctactgcagcagctccagatgaaatcccaacctaaggtgtatagatttcgcaaaagttttaaacccaatgtcatgtataagaaagacgcaagaacataagtagaggtttatcatatataccagcaatccttgctctaaagctagtctcctcgccatctcaatcgcttccccg

SEQ ID NO: 46821 - DNA, 544 bp, Arabidopsis thaliana landsberg
catcatctctctcatcttcttcaacccttttacttctctgttcacttcttcagccaacaaatctctatgttccaacaaaatcccacctgacatcatcatccctttgcagcttccaattaacatcctttcaaatttcaccgctaagcactgattcacacagtcgaaaagcgcctttctttctgtcttcattgacgttgcagctcctcgagagcgttccatttcatcaaagaggctggagggtagtaatgattcattagtggttgtccctgaggcgaagtcttgaaacatgagctgcccagagttgaggatctcggttatgtactcgagctcccaatcgagtgttgctgattctgtttcatctaaggtgtgctgggactcgttggatgaaccccaagtgagctcttgatctgatgaactctgtttcatgcctgaaaaaaccaacaacattaagcttatctagctgcaaatcaaaccaatactaagactattaggtgtgaattcaaatcctggtgaagaaaatctagacataaattcacaaagacat

SEQ ID NO: 46822 - DNA, 1212 bp, Arabidopsis thaliana landsberg
aaatcgcacgagcatttctgtcactacacatcctgagtttagaaatgtcaattctttagctagtactattttatggtattcatcagtacatcaatgcctgtcagtattgaaacttcattgaaattctaagtagctcgctcatttcttgatatttgatatgtcataacttataggtaagactctttctggagaaggcttacaagctatcacaggaatggggaaatattcctgtggcgattgcaggtgatctgaatagcactccacaggtgatctctaccaacttttgttttttttgttctaatacttattttttagctgaattctaaaacttactctggatttgctgtacagagtgcaatctatgatttcatagcttcagctgatgtgagttccattgagggttctggactctttcttttacatttcgcctggtcataatttttttcctttctttactgggaaagttagaatgaactctttatattccttttttaattttggacagttggatacacaacttcacgatcgcaggcaaatttctggccagactgaagtggaaccaaaggagaggtcattcagaaaccattatgcatttaggtagcttgtaattcaccggggtctttggtttctctaaataatgtatccatattccttttctgcctacctgatgaacggatagattgcttatatctcttctgtttacctgatgaactgatagagtgatagattacttatatttttctttggcctgcgcttaatcaactacgtaatcctcagatgaagtttctatctcaatttagtctaactaaacaactccctctttcgtcagtgcttcagcatccatctccggatcactactcaatgagtggagccaggaagaattacagcttgcaactggtggtcaagaaaccactcatgtccaacatcaactgaagcttaatagcgcatatagtggagttcctgtaagtgtttttgtttcttgttctcgactggtggacgcatcgaaaagagttgaaatctgccttacaggaaaattaagttcttaggaactgtggctttcttttatactagatactgaaaaacgtttagggaaagtagcatgttgtatgatgttatatctccttctagtatgctaagacctgagatcttgcaaagtacatatagaactagagatcaacgcggtgaaccattggcaacagcgtatctttccag

SEQ ID NO: 46823 - DNA, 789 bp, Arabidopsis thaliana landsberg
ctattgatatataaccattaaagagaaactaaaagctttaatgagcgttttagattaattttttatatacgaaatatgtttggatcctaataatccaagtcatgtaaacaaatatgcaagggttagtaagtaccgacatatatagttctgcatcaagctcacaagctaaagaaaattcgagtaaacacgaacgaacattttgttgatctttttagtttatgaccaattcctataaccatttatcagttttatttctttaaagacctaccgacgtctgtaattcagaatctaaatgatttacgaagtgagtagcttttcgaaattcttataatttgagatgattaactttggccgtcattattctgaagtattctcacatatgtaataatcttttctgtctaataaccatatactatcatgagtttatgtaacaaccactatttaacccatttgttattttgatcgaacgacaactgcgatgaagacttcaattggcagaaaacttaatcgacggctgagatgtgatgatggaaagtgttctaatatagacacgtgtcatgttctctacacatgtccatgtactatctccacagcaaaccctcacgctgtcggccggaaatttcgttctcgaaaaatatgaaaatctttataaagatataaatttacgacaaaaaaaaaaaatattgttcgaaccacgacatgtagtaatatttaaaattcaaagataagaaaacgagttcgaaaatgaagcaaaaagaaagaaaaaaaaaaagatttgtaaaaagatat

SEQ ID NO: 46824 - DNA, 794 bp, Arabidopsis thaliana landsberg
  unsure (1)..(794): unsure at all n locations
cctctgcttcaggctgggaggtggtttgttatgagacgggataaggaactaaatctgagggcagaatctctagaggcagccaaccataagactaccactgttggttctagaattgaagtgctggaaaagaagctgcagagttgtataattgaaaagaatggattagagcttgaaacggaagaagctattcaagattctggtgatgttcaatccattttagtactcatttctttttcaacgctttctatgtgctcttaaaatatatcttccatgttccagaacggcaagatattaaaagcgagtttattgcaatggcatcaaccttatctaaagagatggaaatgatggaagcacagttgaaacggtggaaggacactgcacaagatgctctttacctgcgtgaacaagctcaatcgttgagagtttcgttaagtaacaaggtttgaacgcaaccacagctttaaagattatattcggtacaatattactctgtttttcctaaatgccatctaatttgttttattttgttgttgttttgatggactttttggtcactgcatgaattactagtaaggagcaggttactcaattaatagtgtgacagaggctgctattttctaggataagatgaggagaagtgataagattttgttgagtttcagctattctatgttgaccgttgtgtgcttttcttgtcagtgcanagactttgagtaatttacaatcttgtcagtgcaaagactttgagtaaattacaacttttatatgcaacattaaccggcataaacttgaat

SEQ ID NO: 46825 - DNA, 182 bp, Arabidopsis thaliana landsberg
acatatagatatacagatatacacacagacacacatacgagagatacagagacacagacacatatatagagacacagacagacaacacacagagacatataacatacatacacagacagacagatacacagcaagagagacacagacagtacacacagacacagatatacgaatacacacac

SEQ ID NO: 46826 - DNA, 1028 bp, Arabidopsis thaliana landsberg
ctctgtgacagaaaaaaactagtgctgtgaaaccaaaaaaaggttccaagaagaagggtacatcactagttacttttagtgaggattgggctgctactcggattcagactgcttttaaagcctataaggttctttgagtttttgttttccaaattcatttgcatgattttacattttttacattggaagtttaaagggatcttgtgttgtggacaggctagaaaaagcttacggcgtctaaaaggaattgcaagagcaaagttatcaactgagaaacaatctgtgaagaaccaagctgtggtcacattgaggtatcttcactcatggagtaaaatacagtcagagataaaggctcgccgagtttgcatggtaaccgaatggcgactgaagaataaaagattagagcatcagcaaaagcttgaggcaaagcttcatgatgttgaggtaagatttttgtgaaagactgaaacatgtttttactttctaaaactgttacttgagatgtttaaagctcatgctgagtttgatataattgcaggttgaatggaatggtgggtcagagacaaaagatgaaatcttggagaggatacttcaaagggaagaagcgacgattaagcgagaaagagccttggcatatgctttctctcatcaggtatagaataaaaaagccatttctttcttgtttgctgcttttgatatgagaagaaaagttttaatccatgacctttttaacagtggaaagctgatggtaagactcagtggttgggaagttatgagctaggaaacactaattggggttggagctggaaagagcgttggatatctgctcggccttgggaagtaagatattcagtgactcctaagaaaccaaagagctcaaagacagactcaaattcaccagcaaagagaacagtgtcattatcatcagttccagccaaaactccgtttcctggagctagaaacacagtgaaaccgcggagattgtcatttccaggtgcttgaagtgaagttaaactttgtttgcatct

SEQ ID NO: 46827 - DNA, 765 bp, Arabidopsis thaliana landsberg
aaaaaaaaaaaaaaaaaaaaatttaaaattataaaaaaaaaaaaaaaaaaaaaaaaaaaaaggggaaagggtttaaaatttaaaaaaaagaaaaaaaacacacaaccccaaaaaaaaaaaaaaaaaaataaaaaaaaatataaataaataaaaaaaaaaaataaaaaaaaaaaaaatgaaataaaaaaaaaataaaaaaaaaaaattaaaaaacaaataaaaaaaaaaaaaaaaaaaaaaaaaataaaacaaaaagatataaaaaagaaaaaaaaaaaaaacataaaataataaaaaaattaaaaaataaaaaaaaaaaaaaaaaaaaaaatattaaaaaaataaaaaaacaagcataaaataagaaaaaaacaaaagaaataaaaaaaaaaaaataaaagtagaaaaaaacagaaataatataaaacaaaaaatataaacaaaaaaaaaaaaaaaaataaaaaaacaaaaaaaaaaaaaaaagaaaaaagaaaaaaaaaaaaaaaaaaaaaaaaaaaaaagaaaatataaaagaaaaaaatataaaaataaaaataaaaaaaaaaaaaataaacaaaataaataaaaacaaacaaataaaagataaaaaagaaaaaaaaaaaaaaaaaaaaaaaaaaaaggaaaaaaaaagtaaaaaacaaaaaaaaaaaaaaaaattaaaaaataaaaaaaaaaaataaaaaaagaaaaaaaataaaaaaaaaaaaaattaaaatacataaaaaaaaaaaaaaaaaaaataaa

SEQ ID NO: 46828 - DNA, 460 bp, Arabidopsis thaliana landsberg
ggaaatccaccaaaatttaggggcatgcatatataataaaaataattgtcagtgattgacaacaacctggatcaccaataagaagcaagtgagattctccccgtacttttgtaccagaagcatcaacatgttgcacacctccaataagtgtcaaagcaactgcatattaatacatgcacacgcatacaaataaatttagacaactcaatgagaagagatgttgacaaaaaaaagtatgcataaagtataacctgcaagtttaacagtgaagagtccaaagacttgggggcagatacctcgtaagatagcatttctccctgacttcaccaaaacattaaagaatttagcataaatgtttacaaaattatacgtaatagttgttgacggcaggggaatagctggtcataataattgcaacatatataggcggtatagtttaccaggtaacaatgagctttta

SEQ ID NO: 46829 - DNA, 146 bp, Arabidopsis thaliana landsberg
taacattaaacagtagcaaatatagcagaaagtcaataaacaaacattacaagacaagacataacagagttaacatatggatattttaaacaaatataatacacatagacatgacaaacacaataaaacatagcaaagaacaagta

SEQ ID NO: 46830 - DNA, 736 bp, Arabidopsis thaliana landsberg
  unsure (1)..(736): unsure at all n locations
ttcataattgactcatctttcaatcattgacaaaatttgctttgtcaaacaaaagctaaatcataaggaaatagtgtctacatgaaactaaatcaaaattattccttctattcaattcctaattcataaggatgggcctcacaattggactttaattctctaaattagaccatttttctgctaaaagagcaaatgtgatctcttgaaaaggtgttggagaggcgataattcggagccgtggatgaaacgtgtgaaaagggagtgatgaggccatcaggaccgtacgttgatatcacgtgaggacacgtgggggattgagtgagcatgtacaaacaaaactgtcttttggactgactttggaagcaaccaaggaaacatcgaacatcattcggtgtaccataaaaacaatgcatatcattgagctgtttgttacccccaaaaaacatatggtgtcaaacacaagactattgtcttatcaatgactattattgatttgaatcttaatttatatccatcttaagcttatcaagattcgagttagggtggtggacattagttaattatcaaattttataaatcctaactaagggtagatttcggtgtataaaaccaggtcaaattattcgttttatagtctttctatatatagcgatgaaaataattgtatatatatcttccacaatactttaaaaatggacaaaagttcatatatctttcttacattngtacatgcatg

SEQ ID NO: 46831 - DNA, 714 bp, Arabidopsis thaliana landsberg
gttttaaaaaacgattctcaaaattagcttttaccaatacaatttgaataaacatttgtatttgtctgttatattgacattttactttttttttttttttggtaaaactcttttagagggtggtttcatccattccggactagccaccaatgtcaactttggtttgacattttaagctttttgaatacgcatttaagccatattcttgacaagttggcaagttgacattttacttgccaagtattaagctcattttttgcatttgcttgccaagttataaagtcttggttacttggattcgaaatatcatctttcctcgtaataggaggaggcatatgtcattgatgggttggccatgaacaacattggtacatctaaaaaaaaaacaaaaaaaaaacattggtaaatctatttcgtaaatttttcaaaaaaagaccgtgttttgtctttgaatttagtggtgtttcttcgggtttaagtttaattgtctctattcttagtatatgatttcgatatctttcgattttggctttaagagttctgctttataattctagtgtttatatttttcttgcatatagcttagtttccaaaaaatttaaagttttttttcgacttaatttataggtattctctttttttagggcttaacatctcttggttgggctttgtattctattttggattcttttcaaaactcagatgaccataaaa

SEQ ID NO: 46832 - DNA, 882 bp, Arabidopsis thaliana landsberg
gttataattgaattctctggaaatcttagacagctacttaaattattggattatttttatctatacgatacacctagtgatattgttaaatttgaatagaaattataacattgtggcgatagctaatactaaactacaaagtaacttttatcaacatttgaatagtagtaccgtatataattatatatgcttcaagagatccgaacaaagtatatatttgtaatctaatcagttttcagttctcatctatctatctatatatatatatggttcgaccataccattgccatcgtatgtatgataacttaaaattttggtatcttcatcttgcaaaattgatgatattcacgttccaagttgataaacaattgttgaatcttgtgacgcaaacaaaataaagaaatgtccattatgcttctcagatattttgcagatattttgacgaaaaaaagaaagaaagattatccactcatgcatataacgaatacgaaaatatccaacatcatttcatagctgtcctcttcttgttagataagaaccttaatatttgtttcctcctatcagattaatgtcaggaaaaatataacatttgttttttacgtgggtagaggacgacgcataacacaaccatacatatgataaaacgaaaaaagaaatatattaataaaattggtggtagttcgatcaaatatatagtagatgtggatgatatatctcaagacttgcggttatattacttttaggaaaatgaatttcttagggagctaacgaattcttaatctcaaataaatatattagccactagataaacagccataaattaatatacctacaatttttaaaatgactaatttgatccaaattaacgaatcatattcatat

SEQ ID NO: 46833 - DNA, 952 bp, Arabidopsis thaliana landsberg
gtggaaaaaccctaccccaaaaggtaaccaaaggctataacctacgaagtacctaatggtttaaggactatagaatcttccattactagatggataattttaatcatgcttccaattaagctattaagttatgttttcatcaaatgaagtatataaaacggcgttaattgaactaatttatatgtagatcaagtataatgtgaatgagtcacgcgcatgaaaaaccttaaagtgacaggctgtcatgcaaatgaaaacaactgttgaaacttgaaagtcgaaaaccattaagattcacgggctcgaaacaaagaatgcaacttgctcttggacctcgacaaaaacttaccatttgataactaatacgacaccgtcacgggtcactaccaaacactttcgcttattggggatctatgacttttctttttacacacacaacgtaaaatggtgattagttactggaaaactagacttaattgggacattgtgaacagtatataataacaatttttagggcattcacttttgttaaaagatgtgtctatgtgggatcatcaactggaccacattaagctaaatgattccacataagtttcagtatttcaaagtaatcttaaaacactttgtctttcttgtttacacgcaatagttagccacagctcttaatgatcattttcaaccaaaaaacgacttagcaaactctctctttcatatatgcacacgacacagtccattggactcaatcgtgttgagtatccaaaccacatatatcgaattgaccataccttaacgcttaaccaaacatagttatttcaccaattatctataaagatattgctacacttaaagaagatgcctacttctttataaaaatctaccatgcttttggacgtgaagagatacacagaccaaaaaactcaaacatctcgttattttgaaaaagaaaagcata

SEQ ID NO: 46834 - DNA, 592 bp, Arabidopsis thaliana landsberg
gctgtgttcctccgtcaattgtgccctaatccaaaaataagaggaggcttggagacggcgtcgtttaaacccataagcaaaatcattccactgaaccggaccgaaatttagcggtttaaagaagaaaccggttaaatacgaaacgtttctgcaataagccatacttcttgtatacagaatcgaagttggatttgaattggtgcgaagcagaaagctcactttcacactcagtgattcgacatacaacaccaataccaagaagcaaatgatcttattcaaaatatcaaatccatacaagagggaattctcagctataaacaatataaaaccggaaaaaaaatcttcttcaaagccgcttgaaatctttgttgcattggcagatgttccgccattgctgttttcttctttggttaagcttcaagacacaataatacagaggaaataaacacagctgctagatgcaatatgagcttcctaaagaaactaatgtaagagttatactagatgctaatgggtgtggtcactggtcagttgcatgatatacatcaggggcttgatcctaaatacaaataggttacatgcagatttcata

SEQ ID NO: 46835 - DNA, 674 bp, Arabidopsis thaliana landsberg
aatgtgataaaggaagaagatttgatgaaactgaagtcgagatcgagggtgacagagcagattttagcgaatttgataaccagaaaagcacaggtaggaataaagaagctaaggaagagagaaataaacagaatgctggaaatgacatggcagatgacaccagcacagtacagatacctggagacgacggtgatccagatgaaaacatgaatgcaacggagtcagcttccggagcacttgcggattctcagaaggatgaggcaaattcaatggagtatgataataggaagagcacaggcaggaggcgcagaagcaaaaagggcaaggataagaataaccagtgagaattaaatgaaaagagcagtgaagcggatgatactcaatatgtaaatcgagacatggagtcccaggattacaagaagggctcccagatcaaagaaatccaccagaggaatgaaaaccaaggtaaaatctttctccccttgtagcataactaaatcacatatttggtgtgataattcttgaaatcatatattatgtcaaaatgcagggcacaacgaagaaaaacagtagcaatgaatgtgatagatgtggagaggagtttgagtccaggttggttcattagatatttgttctttcgtcatttctcttatgctccagcagtgtgctttgta

SEQ ID NO: 46836 - DNA, 630 bp, Arabidopsis thaliana landsberg
tcgaacgtatttatagttggaaattattcttgttatttaccatttattttcttagtacctactaataaaagaagaaggggtcaacttgacattattaagccgagagaagaagacgaagtcaagggaattatcacgtaacaaacataattagtcaatcggaaagaaacaatacacaacaaaatagtcaacgataagtatttaatgacagaaacaaatttaatggtatagttggatattttcttgtatttcagctagaaattccgttctagctaataatatctaatataaaaaaattgtgaacgaacattcacagccatatgttttcttataaaataaaataattattaacaaccataaattgtgtcggcagatcatagaatttattatatgaaatcagtatctctacaaaaacaagtaatcttgagtttttgaccaggtttttgacaaggaacgacgagaaatagatatcagcttgtgaatgatctacgaaacatctaactatataaaataaactgtgaaatatatttaaagaaaagcatcagtgcttaactatatatggaatataactgttaatgtgtgttgatatattataaaattgcagtgtgaagtgagattcttagggaagtttca

SEQ ID NO: 46837 - DNA, 149 bp, Arabidopsis thaliana landsberg
tgcgcctaaactacactgtgctagaatcgtccacaattaggccagccgaagttcccaaatcaggctgggtatccagctccacacttcatcctggctaatagggtagtcccttcgatcgaggctaagagagccatcttcgatcgagcgaa

SEQ ID NO: 46838 - DNA, 604 bp, Arabidopsis thaliana landsberg
aaggacatatcgactataaaatcttgcatttgctaatcaagtttaattttgaacgacttgtagacacggtcaaaactaaaattatgacaaatgtttagcctatgttagttgatgtttacacgtgtttgcgataatcaaatcgttttattccaccattcttttctaaaatcatctatacaatatttagtgatgtatatcatttcttcttctttttttcacttctttgacaaacttgaaatacttaagtggccgtttattggtggcggtaatagaatagaggataccaaaaggagattaaaaagaaaagaggtggagctggattgcgaagacaagttggaacttttggtagtttgtgtgtgaatggaagggagacatggcttatgtgattgccctaaacatatttctattttttaagccaaaataatataaaaacaaaaatctttgtaattggacattgtaataatgggagacatgttttttttcctccaagacaaacaagaaacctccatgtgaattatcaccaccttgtaatatgttaacaacatgtattctattaaactagtatttctttctgctttgttgttatattttaggattaaaaaat

SEQ ID NO: 46839 - DNA, 782 bp, Arabidopsis thaliana landsberg
tgccatgtgtctccattgccactctaatacatttatctatagataccatatactgtactataagaagtaatgatattcattctttcactaatttaatttccaccgctagaatttaaatattctataaactattaaaaattgtaggaaatggggaattggagatgaactattacaaagagagttgtcccaaagctgaagagataataagacaacaagtggagacgctttactacaaacacggcaacacagccgtatcctggctccgtaatctcttccatgactgtgtcgtcaaggtatattcaccggaattcataagacatagacatctatacgactttgtccccaaaaaaaaatgtctatatgaatgttcatgtgtgtgtttttattttattttatagtcgtgtgatgcgtcgctgctgctagagacagcgagaggtgtggaatctgagcagaaatcgaagaggagtttcggtatgagaaactttaagtacgttaagattatcaaagacgcactcgagaaagagtgtccttccacagtctctgggctgatattggcgctcctttctgcgagagacggtattgtcatggtgcgtttatgcaaatatttacgtgcattttagttgggaattttttattttttttttggatatgtggggattaattttaggtgaaattaatagttgaaagggccaaagatagagatgataaagacaggaaggagagatagtagagggagctacttgggagatgttgagactctaatccctaaaccacatgactct

SEQ ID NO: 46840 - DNA, 635 bp, Arabidopsis thaliana landsberg
  unsure (1)..(635): unsure at all n locations
actgattgatttctcgggtaactctcggctaaacttagatctgttttcaccaaaaccctaaattaatggaaaatatccaaagttaatcaaaaataacctattttaacccaaaatatttttagaaattgttggttttgcttttcaattaatttagataacttttagaactatttcggttaaccgataaccaaagaaaccggcttggtttggtttgtcaaccgaagtagcagccctgcctgaacagacaaactatagatggaaatctagacagtttaccgaagtaagagaaattgtattatacattgtaaaggtgtagttgtcttcgattttcccaaagttatatgatcgtaaagtctcttagagctaaaacaatttgctttcataattgaacaagactttcttacaaaagagttgtcccaatttaatcgaaagaataaacaactgtgggcaaacccaaaagagagaaaagttaaaaccttacacattcactaccaacagagttaatccatgtccttcctcaatgaaaccgatctatgttcaatgttgtattgtatntttttgggtccagaccctcttccttnttctcttcatgtttcctgtcttctacaacgtctcttctacaagcactacttcaa

SEQ ID NO: 46841 - DNA, 264 bp, Arabidopsis thaliana landsberg
  unsure (1)..(264): unsure at all n locations
atctattttgcataaatgacagagaagcagtacggacagaagggctaatttcagggcataggttatagttcgacattacagaccnnnnnnnnnnnnnnnnnnnnnnnnnnnnnnnnnnnnnnnnnnnnnnnnnnnnnnnnnnnntgtgaaaggattccgaactggatccctataaacagaaacggtgaacgaacagaagcgctaaaatgatccacaatgttgtagaaaatagattatcaatggacgtgagcagtatgtcacgag

SEQ ID NO: 46842 - DNA, 869 bp, Arabidopsis thaliana landsberg
tggcaattataaaagaactgagacagagatcaactttttataatttgtagagcaacatgactcacatcataagaacggctcgttggagaatgtgttgagatcaaaaagagtatgggaaaaactttgttttcactttttatgtttctttctcggctctacttgcacgctcacatatctcaccttctttatattgttgatatgtttctaatatttaaaacaaatttatgtcttccaatatctattttattttgtagcagtaatctggatctaattcgattaatctcgaagatgaacgaactcttgttgaacaagcttatcatgtacaataactcctaacccgagcacgaatggcccatgcacaacttaattattcgtcaagagaatcaaaaatagagtctcttcgaatttacgtcctgaaattctagagtgtcatcaagccctatacctaattaaccacgcggattgtcagagtatctacttgcatcgacaaaatttttattgtaatgtgtctatttgtatatttgattgtccttggaatcattatatggagccaaactaatagatacaatatgcaaaatatagaaactaaggttgcactaattacgtccatggtctcatttataacaaactacctgatgaccacttagatacaccatatgtaccggaagattaagaaatgatgggctccctctatccattatccaacttgaccttagatcttaaaaagctatattgtgttaatctattatattttgtgtctctttttaaaagttctgtaagaaatttaagtattaatttcaaaagtatagtattaggtgtaggagctaaatatgttttacatctgttaccaatcagggttcaatcatcca

SEQ ID NO: 46843 - DNA, 1032 bp, Arabidopsis thaliana landsberg
attagattactttatttaagttaactcgcgagggcaacaattaggtgagcagttgtgacatctaagttgaccggtccagagtagtttgacttcgtgtcagagttggtaagtttatgataatagataaaacttttgcataatgtaaatctaaaaattacgttacatacaatatatggtgaatgtgacttatgtagcattaaaagatatatttgcttctccagagatttaaaagtgttatttaactaagttttagacgactaaagagaagaaattggcatcattttgaaatgttcaaaaaattaaagatattttactaaaaagaggttaacaaaatatacatgtatatggtggggtccaatgtgattcatatggacggcactagttgacttacttcgtgctttgaccaatgtttttttttaaatcattgttaatcattaaatctcatcttattcgtttcttttgtttgttatttattttcccgttataaatatttttctcttaccttttttttttcttcgtgataagagtcaaatgcgtgtattattttaccttgattagtctaagtattcaattaattttgaattgaatagtataacacttcgtgatagaccattgatatttttttgaattagaaaattcagaggctactattctcttccataaagagaacaaataaaaaaggaattatagttaattgctaaaatgatattttgtgtcattagaaacaaaatctgcaaaaagtagtattactcagaaacaaattaaactttcaaagttgttgatagatgatatgcaacaagatttaggataatcatctaatattttttatcttaaaaatagtctacttatatgtttatcaactacagtcatatttctataacttcaattttattactttaaagatacagtagtagcttcaagcttcaactaatcatagtaggaaattgtatcactctcttctgcacatatgtttcagcatccatgttgtgtcttctgacctagaatgctaatgatcaaaattctaaaaaatca

SEQ ID NO: 46844 - DNA, 488 bp, Arabidopsis thaliana landsberg
  unsure (1)..(488): unsure at all n locations
tcccccccccccctttccccccccccccccccccccccccccctcccccccccccccccccccctttctcccccccnccgctgttcccccctccccccccaaccaaaccacccccccccccccccccccccccccctctttccccccccccccccccccccccccccctccccccctccccccctcctcccccccccccttccccccccccccccccctccccccccccccccccctcccccccccccccccccccccttttttttcccccccgctttgtttccccccccccccccccccccccgctcccccccacaaaaataaacccccccccccctccctccccctctctccctctcccctctctccctcccctccccctccccccctccccccccctcccccccctcccctcccccccttctctccccccccccctcccctccccccctcccccccctctcccctcccccccccccctccccccc

SEQ ID NO: 46845 - DNA, 649 bp, Arabidopsis thaliana landsberg
gactcatagccttgagtaggatacagtgaattctcataagataaaagacttttgctctttggattatgatgatgttatgacttgtgagccattagaccgacaaatgatcctgacttgaaaattctgattcatagctaaagagccttgactgtaactatggagtaagtgggatatgatggaaagagttgggaaaccattttgtatttcatttcttcaacacaaatcaagattaagatacagtaatagcacggaagagctaattatatttgcgaataaccaaagaacatgagactataaacatattcttaatgaacccaaggtacaaaaattgttacatacaaaaaagttgcccagtactttcatatatttgatatttggttgtatacatcacccggtggttatggagaagagattgaattcacgttccagtgtccatagagactcattcttgttattgatacttagcgtatactcctggaaatatccgttataagtgatcaccgataccgttgctctgaaaagaacgtgaaaggtaaaagattatcaaaaacttgtcatgtaaccatggttttaaaatgaagatatcctaaaatcttacctaagagatgtaaaatgagatggagatgatgttcctttaagtttgtctatc

SEQ ID NO: 46846 - DNA, 143 bp, Arabidopsis thaliana landsberg
ccctccatgcacggcccccccccaaccccccttttcccccccgggtttgggccccaccaccaaaaaccccccccccccccctttttctcccctttttcacccccccccccccccccccccctccctttttccctccccccctc

SEQ ID NO: 46847 - DNA, 690 bp, Arabidopsis thaliana landsberg
ccttaggaatcatgtaattgtatccaacttgccactgaagaaacaagaatagattatgccaatatatgaacatatctttaaagcgtaagagtatactatatgtatttcttatcttgcatatatggcaaaaagatgatagaaagacaaaaacttacccaaaaccagaagaaagaagccagttcaaaagcattctgtaggacacagaaagcacatatatatgttattacaaaataagaaattcctttgtgactgatagagttttcaaagaattatacagacctgaaactgaatgaagtggataagggataagagtaattctggtttcttgaaccaaaaaagttcatcgcgaggtctcagctttataccagaagcatattctgttataccagcgttctccaatgctaaagttgcgatgacatgttgcaactttgcaccaaccaaaagaacaagctgttcaaaagaaagggatgcaaaccaaagtggaaatttgttatgatataagactcactttctaaggaaaaacaaaaacatagaaacatgaagtggaaaaatagttcttacagtgattggaatgatcgctagccagaaataaagatttgatcctacattataatatcaaataaactcttaaaacaacatacaaaagagtattaattcataagtactttgcactatgatttatgcggtgtt

SEQ ID NO: 46848 - DNA, 491 bp, Arabidopsis thaliana landsberg
ccccccccccaagcccacacacccccccccctccccccctccccccctcccctccccccccccctttcccccccccccgccctgtccctctccgctttttttcccccccccccccactcccgcccccttaatagggcccccccagctccccccccccgcggcggggggcgcccaccctctttttttttcccccccccggcggcggggcccccccccccccccccgccccccccccccaccaacaaacccccccccccacgcccccgccccccgcccccccgccccccccccgctcagccccctcccccccccccccccccccccccaccaaccccccccccccccccccccccccccccccctctccccccccccccccgcccccccccccccccccccacacccgccccccccccccagccccccccccccccccccgccccccccccccccgccccccccccccccccagtaccccacccccccccccc

SEQ ID NO: 46849 - DNA, 1001 bp, Arabidopsis thaliana landsberg
catggcttatgtgtgagaaccacgtttcctatcagtaacactaaatctggacactccaattattaaaaatagctgcaattggtgtcgctatgcaggtacaaccgagcagaaattgtgcgtgatttggcatggagagtaggacttgaacttctcgaccttccctctgaaatccaagagaagctcactacactagagaaggaatacttcaaaaaccattcggtagctctgaaatcatacatgggaaaagttggaatcgagttgaatgtcgtaagtcctctttccaccaccctggctttcttaattaattggattttacttgtttggtggacttgtaacttgtaatctcctcttgatccatttcttgaaggatatggtccctcctaaagatccttatatcaaggtcagaattttggatgatattgatgaaggaatcgtgctgagtgacaaaacaacaaattttgcccgtcattctatgcatttcctcaaacgtactgatgcggaaccatacattgctcgggtcagtctttttcgttatcccttccctaaaactagaatgatctaaagcccataaacttccacgaactgagaaattcaaagaatgagccttgctcaaattcgcagagatgtagatagaaccttgattacagccttccctagcaggtttaataggaaaaaagaagactgcttaagatagattataactgaaaaaacgaaactatagaattcctgaaagatctgaatagtgatgcaaatagaagtttaggtttagaattaagttttaaaaatgatgcgtgaagtgtaatctgaagaatagatttttgtcacatttcttggtaccgtcaaaataacataaggtcgaaacatttcataaactgtgagtgtatatgattctttggttttccatatgatgtttttcatagtatgccaaaggttgttaagcaaatgcagtctgattccactgcctaatttaaaaggggtctcgtgtcccatcacttggataa

SEQ ID NO: 46850 - DNA, 795 bp, Arabidopsis thaliana landsberg
ttttataagcttaacttacccccaacatctctggttttgtagtcaacacattactagtttcataaagttggcttccataaactaaataatagattatagaacttctacatctccaaaagattcattgtttcaaacaaatagaattaagtttttttctaaagttttttttttgtttgaaattgtgtgtataaatctgccaatattttatagttcgaattttatttgtcactaataaatgaatctaaatttttttaacaacccaaaaaatttaaatagttgagttttttttgttgagaattttcttttaaaactagtgttttgactcaaaactcaaaagtacgggttctctagaaactgaagtgttggctcttttaaacacttgcccttattcgcgcttcccaaagctgcaaaagtttcaactttttaagggtttcgtctgaaggagaaggagcttgaatcagccccaagttagagagaactcaacgatggatttggatggacctcttgatttcgagaacgaagatcctctcgttaaccctccaacgataattgaaaaaaggtgaatcctttattttatctatagcaacattcgaatccctaattacccattttccgacttatgtagtgtccgatttctctgaattgttgtcattgtaatgaaattccgaacttttgtaaattagggttccttgttgaattctgaaatttgggttcttttgtttagggttgatgaaaagtttgttcctttatcaatttctgattttgacacgaagattaaattttttgtaaatgtca

SEQ ID NO: 46851 - DNA, 695 bp, Arabidopsis thaliana landsberg
ggcgagatttcgaagatcccttcagcatcatgtagaagagaagttatcattcttgtatcttgaaagcttttgagaagtttagccgagaaattatatgtgcatttactgtaggctgtgtttgagtgttcatgtagtgtttcttagccctctcgatcagcaacgaaacactaaacaataacatagagactttatctgaactagctgaactaatcagttcttatctatattggaagtctcaggctccaatttcattgctttctattctgctattgcatgtaactaggcttgaactctgtactaattcatttctactctggtggcaggtaacaccaaaagccaatttccaaaatgatctcgggttggacagtttggacagtgtagaagttgtgatggcattggaggaggagtttgggtttgagatccctgataatgaagcagacaagatccagtccattgatctagccgttgacttcattgcttctcatcctcaggctaagtgaaaagagaaacaaattcttcagcgttcatgcgtgcctcggctgtgtctaccgatattgttaacctaataagaagtaaagaagcaaacaacattttctttttgtcatgagaatggagaagcttttgtttttggccgactactttggttcataagtttagatgtgttctgcatgaattctaggctctaagaaatttgt

SEQ ID NO: 46852 - DNA, 1566 bp, Arabidopsis thaliana landsberg
  unsure (1)..(1566): unsure at all n locations
aattcctaaaataataatgctctgttagaaacagtaaactatggtttatttatgtaatgaatttccaagagtttcctccccactggcttcatagtctctttggggggtgtctagtccagcatttagagctgatctgagtttttcaacagcttatttacaaatcaaaacagcttaaaagatatataacggcaacgagagatatttcaatatcatttgccagttgccacaacaacgaatatgggaagcaaattttctacacaattgcacgaaaaggagaaagtacgagtgatttgatcggtccagctgaaatgcaagagcaagcaaatttcatgttgatacttccttgccctaataaagtaaatgaaaatgcctagacaaacaactttctcacatgtgtgaagcttatgaagtaaactctagacacaaacttttgccttgatactacgactaaatgataacatacctagcattgctgctggaagtggaacctttactttttgctgaagcctctgacttcaactgaggaagaaccacaggagcaatggtagcctgttccaaaagcaatattcaaaagcgagaaacgtattttgtcaggaacacaaacttgaggaaatgaagtttttacaggtgggtttggtttatcagttgatttgggaggagctacacagatacacagaggcataccacacttgcattccattgtttcactacctccaagtcccatatcgttgtcgtcaatatccaatctcgaaacttgttctgttagagaattaactttattggaaaacagcatgcaaaagaatgacttctttgcctatgtgaataaccttgctgccacaagtagacatagacagattcatcaaatagcttctaatgtttatttgaatcaacctaacaaataacaatgattaatctaccatttctcattatatatctgaaatgatctgagtataattgatcattttgtagcttactatacatgggtttctccaaaatttctaaaaaatgtgtactatcaatcagtctaattcagattttttccaaaatgaacaaaaattggatttttctttctctgcaaatttcaattactccggaaactggacaaaaccttagatctacaagcacaaacacaaaaattcatgtggaaaagctataaagaagaagaaggaataatgaaagtggaatattattcaattcacctgtcagagatgatgacgacgactgagacgaaacaaaaagcttgaagagaggagaagaaacagagagatgcttttggagtttatttatttaggaataaaaagatgatccaactgattgagaactattttgatcgtcgtttattaattaaaaattcagataaatatttaaggacacgaaaaaagaaataaaataagaatctatttatattttgagaatacaaaaaaaaaaaaaaaaaaaattcactaactaaacttctcttaccataaaaaacctatactattcttcatatttttatcatttcagttntcataacatgttatcctttggtcaatgtgtaaaaatataaaaataaaattaataatgctt

SEQ ID NO: 46853 - DNA, 371 bp, Arabidopsis thaliana landsberg
tgcaggtcgactctagaggatcccctgatggtttttctacatagtcaaattccaaaacaaaatatcagtattatggaattaaacaatcaaagtttgcaacttggtatgtccaatatcatctttttcttctatcgaaattcaaaaaaaaaaaaaaaaaaaaaaaaaaaaaaaaaaaaatacaccaaaaaaagggggaggttattgagggagggaggaaaaaggtttttctaaaatggttttaaatggccccttttggaaatccaacgggcaagaccggaaaaaaaaaaaaattaaaggccccacccccagggaattaaaggcccccaaagggccaaaaaggtttgggggtcacctttgaacctaacctttgg

SEQ ID NO: 46854 - DNA, 1074 bp, Arabidopsis thaliana landsberg
  unsure (1)..(1074): unsure at all n locations
taaatattcatgtggagttttcttttcctcaacgtaatgttttattgattaaataatgaggtaacatattgggtatattagtgacgattagaggctgtagatttgtagccattcaccaactcaaaaagttgaaaatgaaggagtaactacctaaattgaagctatttatcgttccctttaaaatattctcatatatctagatgtagaatatacttttttccgatctaacttagttttcctacttactaaaaataccattgtaacaagactttgtcactacatgctttaacaatttcatagaaagaattaatagggacacatcaacacctttggctatagttagcgagtttttgacatctaatccacatccttagtaaatccaccgtctatgcatgagtactcgtgtcctttggtcagcgaatcataccaaaataaaaacatttaccttatttcaagattaaattttaaagttgaaaacctacacacaatttccacatgtatatatttattcttctctaaacaactaggaaaagaaaatgattacctttttcacccttaacgaatttcttaaaatattcttctttgtaatagcattttacataatattcaacacgtttaaagtttcttagcttataaaatgattttaatttaatattattagattctcataatctattgtattgtaatagcattttacatcatattcaacacgtttaaagtttcttataaatgatttttaattaatagtattagattctcatatctggttgtatcagattctacaataatcttactttgttggtttaacttagttttcttacttgttaaaaataccattgtaacaagactttgtctttacatgcgttaacaattttacaaaaaaagaattaattgggacccttcaacaactttggctacaattagccagtttttggcatctaatctcacatccttaaatccaccgtccatgagtacttagtggcgaaggcagaaatatatatntatgagatcaatattaatatataattaaanaantatattatatatatatatatatctaaatactattaaaaa

SEQ ID NO: 46855 - DNA, 508 bp, Arabidopsis thaliana landsberg
gatctcgctgccgctcccggcgcgccactgctgctcagtgttgccagagctgcacgtttccagttcgagcggcgtgtcggccgccgagccgggccccgccatctgcaggcacttcccgccgaacctgatcgtcccgtcctggacccaggtccagttctcgttggtcgccccgcacgtgtacatctgcggctggttgccgttcgtcgtcttgccaccggtgtcgttcaggcacttgccggagccgccgatctgcttgatcgtccccgtcgtgccgctgttcgcggcggcaccgatcgtccaggtgaaggacaccgagccggatccgccgacgcggtcggtcgcggtgaccttcacgctgtaggtgcccggcctggacagccagccggtgatgaggccggacgaactgatggacagccccgtcggcagcccgctcgccgtgtacgacggcgcgtagccggcgttctggtccggtcccgaactggcgacctgatagatgaccggagtgccc

SEQ ID NO: 46856 - DNA, 581 bp, Arabidopsis thaliana landsberg
gaaagcgaagttgaagacatagcagaacttgcagatcagctggagttatgacctaagttttatctaattggaatttccatgggatcttaccctacttggggttgcctaagacacatacctcacaggcaatttaaccattcctgaaacccttaaggataagttgtaaacagatgagaaactattccgttgtctttgcaggttatccggcgtggcttttgttgctccggtggttaattatcgatggccttcacttccgaagaagctaatcaaaaaagattataggacaggtattatcaaatggggtttgaggatatcaaaatatgcacctggactgttacattggtggatcattcaaaagctcttcgcttcaactagttcggtccttgaaagcaatccggtctacttcaacagccacgacatagaagtgctcaagcgaaaaactggttttcccatgcttactaaggtcactcctagttttcttcagtttgttgcgattgatcagctttggcatgattatatatctctaccttacaggaaaagctacgggaaagaaatgttttcgatactctaagggacgattt

SEQ ID NO: 46857 - DNA, 631 bp, Arabidopsis thaliana landsberg
ccaatggggactgtgtttgtactacaaggcaacacactggaccaacacatgggacctaacttcaaaatcccttccgcatcactctccttattcgatacgcttagtgtcctgttttgggcacctgtctacgacaagctaattgttcccttcgcccggaaatacacaggtcacgaacgcggattcacacagcttcaacggattggaatcgggcttgtaatctccatcttttctatggtctctgcgggaatcctcgaggtcgcaaggttaaactacgttcaaacacacaatctttacaatgaagagactatcccgatgacgattttctggcaagttccgcagtattttttggtgggttgcgccgaggttttcacgtttataggtcagcttgagttcttctatgaccaagctcctgatgctatgaggagtctctgctcggctttgtcgctcaccgcaattgcatttgggaactatctgagcacatttctggtgacattggtcactaaagtcacgagatcaggtggaagaccaggctggatcgctaagaacctcaacaatggtcatcttgattacttcttttggctattagctggtctgagtttcttgaatttcttggtctacctttggattgcta

SEQ ID NO: 46858 - DNA, 492 bp, Arabidopsis thaliana landsberg
ttaaaacgcgtctcaacatcttccaaatcacttgaataatccaactccactatctctggctttttgttaggctcaggagaatcctcaataacatgaacttcgactcttgaatcatcatcatcatcatcatcatcagtatcgaatccgttatcactaggattagtagatttatcaaacatttcagccaaatttccttgagcttcagactctatagcctgtatatcatcccattcctcagttccttcctcaaaatcagctaacgccgcaagaaaatcatctccacataactcaacagtgatgaaatcccgaccatcatcaccttttaagaccaaacacacagacaaaaaaaaaaacactaattaccgcaatcgattacgagagcataggtttctaaaatcttgatttgaattttggtaccgtaaagatcgacgaatcgatccaagcatttcttcgcagaatcttcgtcgaatccgagctttgtagctaggctta

SEQ ID NO: 46859 - DNA, 1125 bp, Arabidopsis thaliana landsberg
ggggcacgtcatcatatgtaaccacaaatctaatctatgtaaggttgtgtccgtgacagttcagaacactcttcaccaccttctcctttcagctttttgtctcttctttattttcttttatttttcatttacaagagtaataatcgaaactatttcactccactaattctttatttgagctcatacttcaaccagttcagaattttcatagtgtaggctcctcaatatttgatttagattattcgatcaagttaattagacataatctttatatagtatagtttggacaaacccaacaaattgtctcctcgatttcactaatattaacgggaagcttttatgttttgtgattttctttgaagaatcgaaacattgtcttggccttgacgaaagatgaaactattaatatattatttataagaaaatatgtcatatttgaacaaaaaaagattagtttattaaatgtggacaaactatgagaatgtttgcagccgaaggttactaaacccaactaaagctcttttagccttttcggcacgcgggttcacattcaagtttcaacacataagtgtatatcacattttaattaaccgtaaaagtacttatttgtcacaatttaaatacatattgtgaaaaattaatatgaacttgatcaaatcatcttgcgcttttgatagttttttgtgccaacattttaaaactaagcaacttcgaatgtcgacaaatgtcaaaaaattagtaaatgtaccaacaagacaaaacactcggtgggagatgtaagccggagcacatccaaggtatctaaaaagtaaaaatacacgatttatcggagtcaaagtaacatacatggaagcaaagcattcatattttggtttatcgattctgtcatacacatagtcataaaatgcggatacaaatcatgctcgaaaatgtattaaacacgtatccaacgtatgaaatgagcatgtcgtacactccatcacacatttggcgagaactcttaagattatcgaactaagagctgcattatcgaaatgaaatcatcgaccatgtcaagaacattattatcaatttacgccaaccatatgcaacattaccgacacaggtcaaaccgatcacgtcgac

SEQ ID NO: 46860 - DNA, 505 bp, Arabidopsis thaliana landsberg
tttttctataacttctgtaatattaataaaagataaattttagcatatgctaaaacgagtattaggatgcttatctgtctctgcctcacaaagaggatatacctctctttcgtcttcttcagattctctctgacggttgttaaaaatccgattataacgacgacgacacccaaatcctcacaaatatataattattaatttaagcttctctgtcaaaataaaaaggagtcatgacgactctttcttctataaatctctctatacctcctcatttgcttcctagcacgactaacacttgttcttcttcctctgcaaccacttgttctcctcccaggtcttcttcttttgttcttcattcccctctttcgtttggtcaccggagattacccattagcaagaaaagcaagctccgcttctgtggagtgattacaaaggaagctgtttctgggtccaacgatatgactattactcaagtcagagaagatgaccgaatcgagattgatgc

SEQ ID NO: 46861 - DNA, 512 bp, Arabidopsis thaliana landsberg
  unsure (1)..(512): unsure at all n locations
tttcttacacagctccacctgataccttcatacagcgaaacaaaatcattaagccttctcaaaaacgaatttcaccacaagcaacacacacaaacaaaaaaaactcgtcgcgatctttccctaaagacaatccgatacaacaacagaatcgataaaataccatccgtacaaaatcgtaagcaaggaagcaaagcaaaaccgaagataatgcgagctatgaaaagtgttggcaaagacgagaaaaaatcgaacctcctggcgatttttcnnnnnnnnnnnnnnnnnnnnnnnnnnnnnnnnnnnnnnnnnnnnnnnnnnnnnnnnnnnnnnnnnnnnnnngaaaacgaagaaacagaggaagaagaagtgaggtgaaggtcggaagaaacatcggcgtggtcaaagtcgagtgagcgaagatcgtcgccgatttcactgtacggcatggtcaaaggaggaggaagaaacttgtgagtggcagcactagtgtgaagaagaattgggtccttttg

SEQ ID NO: 46862 - DNA, 711 bp, Arabidopsis thaliana landsberg
cctcgcaagtagcttagtttgagtgatgttgaacacaaaagtagacaagaggctctaaaaaacactgatagttgcatatggatgtggacattacatatagtagcttagcttatgttggaaaatctggaggtcaaatttacttttaatagttttttcaaggaggcaatatcatcaatctccagagaagaatttcatctctcctcttccacttcatactcctggttcactcaagagcgtagcatggggattcatggaattggagatgtttgttgtgcattagtttcttgggagacactcatggacttcttttgggcctttgctcaagtttcttggtgaggagccgcaaacacttaggatcctaatctcagcaacattagacctccattctttccttacaaactatgcatctatctgcctctgcagcccctagtggaggattcataagattggtttctcatcaacaaaagctgatttttaattaatgtttcatctactaacccaaaaatctatctttcaatgtatttaatcattaatcaaaaaatttaaaatcattcttcatgagtatttttctttttaatcataatatagtttcctactttcctcattaattaattattatctctttaataaatatgatctgatatttttgggaaactaattactaatttgatgaattattaatatgtttaaaaataacatcggcaaaagatt

SEQ ID NO: 46863 - DNA, 1051 bp, Arabidopsis thaliana landsberg
atgggggcggtggccaaataacgcgatattcttttatatagtatgggaacagaaataactttggacaagatcaatcatatgttatgttgtagatatatggatcataatccaagctgttccatggaaaaagggtgcccagactcagagaaggcaatagtcgaagccatggagaaacaacttactgagattttatctccgttgaaggaaagtaaaatatttggcctgaaaattgtcaagaaattcaccaaaggcacacctaatccttattctgttccaaaagaggtatgtcgcttattgtatttttgcaaatttaacttttggatgtaagaggagaagacattgaccccattttggtataatttcagcttggagttcttctcaactcaatgaaaagagtgcttgacattttacgcccgagcatagagaaccgcttcaaatcttggaattcatatatccctgatggagaaaacagagtcttgggagagcggttaagtgaggtgacagtattgttaagatccaaatttagaagttatatgcaagcgcttgtggagaaacttgcagaaaatgtatgtactctctagttgtcttccaaaatatttgattttcttctggtttttgttctcacagccacctttgttgaaatcaatttcttgactttgttatgttaacagacgaggatacaaagtcacatgaagctaaagaccatcatccacgacttaagggaaaccacagcggaaccggatgttagaaacagaatgacgtcattgaaggatttgctagacaaaaccatcgatcatctacacggtgttttcttaccagatgtgtttgtagcaatctgcagaggaatctgggaccgaatgggacaggtaagagacatcattacatttcattatacgggttggttttgtcttctgcttttacctctactggtctgctctgtctattccaggatgtgcttcgtcttttggaagacaggaaagataatgtgacttggcataaaggcccaagaatcgcaggttctgtaagtatttggttgaaactcttttgggag

SEQ ID NO: 46864 - DNA, 683 bp, Arabidopsis thaliana landsberg
aagccaacaacgcatacaatgctttcatgtgacggtttattttttcaaggcctttgaaatctcttgatgcgggggggggaaacataagcctaaggtcatcagcaatctgcttgatccggtgtgttccgtgcatcaccgcaagattccgagaaaacgagtactgtgcagctatgttgtccagtttggcaattgcagtcctccaaattttggctctctcaggaaatatttgagagactttttccacatccaaagggtgttttgtgaggaagactggtatgacagtgagtgaacgtttctcttgaaactcaattattacaatgagctcttcaaggaacccaactgaagaaacttcttcatcagacgtcatgacaactgcaactttggactctgtcaaagcctcaagcgttcgtagatcaattggtttgaagctactctccttccagctttcggatttaaaagctttgataccatttcgtgacaaatcataaccaaaatcaacgtcaagagctatcttaccgctgaaactcaagaacacatccaactttcttccagccaacaaaaaagaataagaagtagacattcacttttttgttttagcagcaactaaatatacaaagattacaaaggttatttctttttttttttgtgtcagtgtgtgtgggcattttattccctttgaagga

SEQ ID NO: 46865 - DNA, 884 bp, Arabidopsis thaliana landsberg
ctccttggtcttagattttctgagatatttctcttttcactctttcttgtttcgattttatctaaaaatttaatgaatgatatgtactgaccaaacacattgttgtggttttttcatgcagagaaatggctaatctgttgcaaaggcttcgtagacgaaccgggccaaagccagattatattgaagacaagttggatgaatacattcgtgaagaacaagttgaagaaacaggcggaagtaaccaggtatgtctttgtcttgttgtgaaattatagatctgcagtgacttttaattatttgatccatttcaggattgtcctcttggcgagattgaaaagattttggaccgtgaatggcgtcctactgcatctaacaatccgaattcttctgacaacgggacaccaaccctagttgtcgtgaaacaatatcttgtgaagtggaaggggttatcgtacttgcactgctcttggtaaattcccagcaatatgcgatatcgtgttgtatttaattaaacatgtcgattattatgtttttgttgcttctcttgtctggttatcttatcatcacttgattattaatgtcaattcttagggtgcccgagcaggagttcgagaaggcttacaagtcccatcctcatttaaaactaaaattaagggtgaccaggtttaacgctgctatggacgtattcatcgctgagaacggagctcatgagtttatcgccattcgtcctgaatggaaaactgttgaccggattattgcttgccggttaagtgattcaagtcttgtcctttgtttttatgtccttcacttgatagacctcgttgtgacaattatgttaaattaaatttttttttcctttgtgattatttattcatgcgtttata

SEQ ID NO: 46866 - DNA, 699 bp, Arabidopsis thaliana landsberg
agatgcagacttaaaaatatatatccagaaaattcccttaagctaacccattcgggataaaaagtttttgaggcttaatcccaccagattcaagccggcctaaaaaaattttaatttttttttttacttttcttttgttaatatttttctttaattggaatatttgtttttgttttttttaatagtattgaaaaccctaaacctagtttttcaattgtgccttactataaatctaaaaaacaaatcttggctcgactgtctagattaaaatcttctgattttatattttatttgttatgagtttaaataaaaaaattagattattttttttgattttaaacctttttttttgaaaataaactggctttcatggttatttaaatttcaactgatttgttttgttcatatatccatctttcagaaatattataaattataaatttgtttttttctggaaagaaaaacataaaaaacctggaaaagtcttgtccctgttattaccagatcttgaaatataagttcaaatttttttatttcaaaatttttactaaccgaaccagactaaataaaatatattcgaattttctggactttgtcagactggactagtccaattgacatgtctaaactattataataaattatttatatgtaagaaaatatatccaagtaaaatgatgggttacaagacagatggtt

SEQ ID NO: 46867 - DNA, 1701 bp, Arabidopsis thaliana landsberg
ggcttgttctttgcttcatagattttgttggaaccgcaataacattcaggcagtatcgctctctctctatctttgtcttattgtataaattaataaactcagaaagtgttctgctttgtggttaagtattgctttggatacaatactattttctggtctttctaacaatcctttttcctttcatctctctgaatcagttttgtgcaaaacctcagtctctagctagcatctgtttttgtacattagattaatagcaaaatgaatcaagtaaagagttgaggtaaagatgaggttacatgaatactcattaccctctttgctctagttgtgacatttgtgcacataaattgaagctttggatgagcacaaatgtatatcgttttcaattgaagatccatgggcacatcttgaagagctagaagatctaaagtctatttaaaccatttgaagctcacacgtagcaaacgtcataaccttaatactcgggctctgccgacgaatacgagacagttattgcttatcattctcgtgaaaatgggtgactcgccataaacacaacatacacacttaaagatggtgatgtaccgggacatgcagcataatataagtcactataagaacaatatacacactcagcttttcaacatggtacctaaacctaggcagcaattgatgtatcaaaatatatgaaatgatgctttccaatgtactaagtgcaactcatccataaactgtgatattacatgaaccgcatatcattactcttgactcgtaatcgtcagtgtcctggatcggtgtacagagagctagtatcggagaagaggtaataattttgttcaatccgtattccacaaagcctctatcttccgaagcaactggtcaaatagccttccctaacttataggcacaccccatcccgtactaaagtgaagagcgaacaatcgacatatgattgaacaaacccaaaccatacaagagtcgatgtgaactagtcaacccactttagctggatcagatgtttgaaacctcgcaaagagttttattatatttctttggacaaatctccatgtaataaacacaaatggacttctcaattcacacccatgtgaaacaattccttagcaccgttctaaggaatacattattcaccaaatcgataatcccagaagtagacctcacttcatcaaaagactgataagaatacataattcccttcatattccagattgctgaaaacttaagcgggaaagagatttaacatcaaattaagtaataagttccgagttaaaagaatatcctcacacactttgatacaaagcatgaggcagacttagtgaattaagtggcgatccagccaccaacaacactcctgatataatgcttcttaagctttctccgtcgaatgttctttcccctgcgcattgtattcacttagtactccatctatgcagttactaagattactaacgtgagaaatagaaaacttaccagtactggttgtgtaatacaaattcatccgttgccactttcttcccatcatcattgcggttccagtggtatatagcgtgtgttcggttctttatatccagagtagagtggccatagctagcttcccgacccgcaccataatctggctgtggttccgtaaacctaaaacaaaaagggcacattttctcatcacccaatactagtaaataatgg

SEQ ID NO: 46868 - DNA, 738 bp, Arabidopsis thaliana landsberg
  unsure (1)..(738): unsure at all n locations
ctcggctatctccttttgatctttccaagaatctgtaacatcgaaaatataaaccttagcgggcaaaaccgagctgtcccaatcaacccatctcacggtatacttcaaatacagagttcttgttttctccccattgtcaaatccgcttttcacccgacattgagtcttatcatagcagcagtataaacctcctttgtatccaggccttatagctcgaccatactcatcaatggtaacattatacagatcacacaaacattctatgcatcctttcttatcttccacacctctggtgtctatcgcgtgaatgttaagaagccatttgaattcatnnnnnnnnnnnnnnnnnnnaggattaccgatttcaatagcgtagggatcaggaacatacgtcgaggtttcgcgggtttctgatcctaaaccaaagaaatgtctgagtgttaaactcctgcacaaccctccatttttcacaagaataatatctgacttggaatcaagattgctttcaggatcttccctggaaaatccatgattcctgaacatttctctctgtggaagcttggaacctttacgtacatagtatggctcgacaatccaatggtggagataggtctcgtgtagaggaacgggtttgcccgcttcgtcaaccacttcagcatcgaaagccttgaggccgatatgacctctggggaaatcgatgtcgaataagtaaggattntgcactgatcctggattcat

SEQ ID NO: 46869 - DNA, 890 bp, Arabidopsis thaliana landsberg
  unsure (1)..(890): unsure at all n locations
ggtgacacattttttctcacatcgcaagcttttagacattagatctatatatctgaatttaaattagacttctggtgatggaatattctttctctaaatagagtgctgtactcaaatttggtttgttaagcacgtgaatgaaaaattgtgctggctactattttgctaattcttggactctatgaatttcgtgaaagctcatttacatagtggctgacaatgatataagtcagaatcaatacaaaagaagagaaaactaaataaaggatcataagaaaatatttaaaaaatcacaagaaaattctacaaacctccaaaaattggcattcgcataataaataacagaattagtttttaccaattcaagaatgacttgtatgaagagaagttgcaatttcaagtaaacaactaaaaaatgtaggatatcgtccttagttggcaagtgtttaaaatcatctgtataaatccaatttggtctaagacatcatatcatccttgtcggatttattcatatgttagctatgtttttttagttgacttatggatttgatgaactagaaagatgcctttttctctctgtcgaacaaaccatatattaaattgtaaattttcaccaaccaaactaaattgcatctacacaagattacgcaactcatgcatatagtactaatttagttaacgtgattaatttctttttgttttatataatgttctttttggttggatgctagaagtttaggcgtattttaattttattttataggagaagtatggctgcaaattatccacatgtacgaaatccttattgactccgatcacccaatatatgatatgttttctaaaatgataaaatgtgttgatttcagtgtcgttttgcntttgttccttcg

SEQ ID NO: 46870 - DNA, 495 bp, Arabidopsis thaliana landsberg
tggggattatcaatgttggatcatgtcgccactctttcggaagctgagacaaaagcttttttagattcgatatgcaacaagtttggttaagaggatacaagatggttcagtttgaaggcgattgtgaggtgctcattcaagcgatcaatggaaagtcgtcacagtgtgaaatttatagtcttctataagagttcacaaaaacattgtttcaagcacagattcaaataatcagcatttgtggctcacaaacctcctttgtaaagatttattcttctaaataaaatttagttttcagtaaaaaaaaaaaagaagcaagagagctattgagttacggattttataatagtggggttatgaatgaaattttaattactcgtgtttcttttgtaactattgtgggtttatgattggtagtctacaaaaaattagaaatacctaagcacctactaaagaaccaagaccaatatttgtacttgacttgtttttctatacaac

SEQ ID NO: 46871 - DNA, 873 bp, Arabidopsis thaliana landsberg
tacatttggaaaataagacagcaaatattattgggtcagcgaatcctgcaatttgcatctaccaagaatactattcatcacttatactttagggccaccggattagatcaatcggtgcccatttcaagcccaatccactcgtcttttgttagattttttttccttttttttttatatatatatttgggtttgctcaaacattaataattgattgaagttaattttaaaatttagaaattggacttgctgttttatttagaatatatattttatttagaaaatccacaactgaatgagttctaacatgtacaagattcaccaaaactttgtcttatcctgtcaaatggttagtcttgcggatatgatgctaatttcatgttttaagttatttcaatttttcaaatatacttttttcttatcaataaatttaccatcaaaaaagaaataaatttaccatcaaaaaaaaaaaaaattgaccaaagaaaaaaaaaaattgaccaagaaaaaaaggttatttgtttttctattaattttctataattggatcggatctcagggattcggatcccaatttgtacccgtttcagtttcacgaactctgtcatcgtttataaatgtaaaaaaaatctcaaactttctctttcttgactctctctcctaaaaatgtctcgattgctctcaaaaaccctaattcccaacggaagattcctcctccgtcgtttcaacgagccggcgattacgacaccaccaaacgtcgtctgtttcagccgccgcttttcatccatcccacaagtcatcgagcttgaaatcgattctaaaaacgaagccgaagcagcaattctcaaaaagctaaacgaattcgtacgaaggatc

SEQ ID NO: 46872 - DNA, 1622 bp, Arabidopsis thaliana landsberg
cccttgatctcgtcttgagcttttcctagttcagattccatgaacacctttatgaaattcagatcccaaataaatgccttgcgttgatgttgatgctgttaagactgagaagagcagtagtatggattttcataaagcttccaaggtttgcagagtgagtccattacatcttctcgtacaccggtactgtgaggatctggagtggggattctggtcatcatcgtttcagggctgctctgcatcttcatatccttcatctttttggttggccttctatatttgagataaaagggaaaaaaagggaaaaagaaagacaaaaagtaagggttattatatatcactttagaagatggaagtgtgttgtaaagctgaaagagtgagtcatcacatgattaccaccttcaatcattcttcctcaggacctcgtcgttaaagagtaaggaaaagtagcagaaacaaacagatggcgtctaactcttaggtaaactaacaaatgcgattagaagatatatgaaactgacctttgttgtagtttcatgacgattgtttgttgggcaatgtatctttgaaaagccaacaacttctctgtgctttcaatgaaccacctctcattttgtgtgttcgtacacttgggggtgtcaattaattggcccattcaaacattaatgcctcatctgttccacttctcctagctatatgtctctctataaattaaactatgaacagattttctttatctaaacatttactctgtgttgttcactccctaatcagttggagttgcaggaaacaaaacaagaaacacatttcttttctctatttttgtgtgcaagtcaaatgaaagttaagtctttcagtgtgtatcaaagtaccaaaccgcaaactaaacaatctatgaaagtaagtcgtaaaagcaaaactacagttggcttactcatataagtagagagggttactttaaagctaagctaatctcagtttttggttttatattacaatacaaacggcaagtaacacttgagatccaagttataaccaacatggcgagttcaaacttaaaacacaaagaagatgagtaagctcaagtgtattaatcgtatactttacacaacccaaccagaatagtaacacagaacactaactcgtcttcacaactgtcttttatatgtaatgtatgtgtttggaaaagaaaaaaagtatgtatatcgcttggaaattgcacatcccgtcaaagaagtggctgctgatccactccactcatgcctctagtttagggcagattggggagcttggattcgacatagaacctgcaggcaacatcatcaccatcatgttagatacatcttgcatgcatgtatgcaatctgagcattgtaagacttacatatatctgctagacaaggttgcttggtggctacatcctcctcaaaggccggaggtgcttgcccgtatatcatctcgcagctcatgtcttcataatctacaaaccaaaatggagagatggctaatgaaaacaaacaccaatgtataaggatggtcaaaaggagatatgttacatacttgggttcatggtgagtgggaggccaaactcattggtgaagaaatcttgggttggaatcttgc

SEQ ID NO: 46873 - DNA, 888 bp, Arabidopsis thaliana landsberg
ccaatacaaaagatcaaatgtttggatttttttctaaagtatggatcttttctcaacagatcttaaaaacaaaggtaatgaaacctctcatataaagaaaaacacaaacaacatcagatctgttcttcaattcacaaatttgaactcatcatacaaaagtcaacaacaattctctaactgtggtaagatctataaagctttaaaatcaacagatccaagactcaagcgtaagaggtaagagctatctctaattttttaagtcaaaaccattttcttctgtataaaaagccaaacccagatcttaaaagatctgaaatccgaataacacatatctaaattcagaaagaaacgagatcaaagacctcaattcaaacacaagattataataacaacaacaacatgaagcgtagacaaactataaagccgaaaaaaataaacaaaactcacctaaagagatagatcggtggacaaaaactagaccaaaactatgaaacttgaattcgcctgagagaagtttctgagcaaagaagataagaaataagagtcggaaaaatattaatcaaaagagccgtctgatagagataaaatcttaataaatactgcgacaaagatcaatagatcaaggaagggtcagtgttcataccgaaaattaaagactaatatttgtggacagaaatttccaggaaagacgagagaagtttgtaacgcggttgttcttatatgactaaccacaaaagttgccgtatttctgcagattaataaaccactaaagaaaactaataagtggtatttaggttttgtcgtggatttggtagacaatagtgacaggtggagattatgtttcagttacggagctgtgacggagcaacttatatgacagatcaatgc

SEQ ID NO: 46874 - DNA, 758 bp, Arabidopsis thaliana landsberg
  unsure (1)..(758): unsure at all n locations
tgaccattgggtcaaattgagtgaccattcatcttaaatgatgaaagcaatttataaactttttctttggatttaaaattgtataatttgttcggccacgccatcgaaacaataaatatgtcaacaaaataaacatgtcatgactattgtattggacatttggatatattatttggttcaacaattaaggaaaaatctgttttagtataaatataaatgtgactcttcattgtggtattaggacgaaattatgagcattcccttggttaggcttgaactttgaattatacttcaagtacaataaacaacatgtatttatacgaacaactcgctaaaaaaaaaaagtattgatacgtaattagtaaagaaaaaacagtttttagttttctttcatatttttttttttggatttatacaatttctacttgctttgttgggctgtctacttaggcccaatgttttctaaaatagtataacctcttcaattcctcatgtctaaaatagaggatttgattggttgacactggacactaggagagattgttgctattcctcatactatatttggcacaaaggtattctataatgcttcataaacattttaatactctctcccgccttttccaccctccaagtctcctttaccaataggttntggttcttaagtgcgactaacagcccactaatgttagtttcattaaggctatctaatttgacaatcatgccaaatgtagaaagtgcatcttttggactcatgt

SEQ ID NO: 46875 - DNA, 423 bp, Arabidopsis thaliana landsberg
  unsure (1)..(423): unsure at all n locations
aaactcagccggggagggaaaaaccgtcctcccggtattatatcaccccacactgacacatggtcccggcccacaaaatccccgaaccttggcccccatcactagcggaccgtcaccacccactctgcaacggcccggccggagggtnggcgcgcaggtcgtaacccagaagcgggcggggcacaacgaggggattttttaaccaaggcagaaattcgtccccgagaggtatggaacccggaacctggaggtcctactcggaagccttattaaccattacgctagaggccctttcgctattgaatcctgaacttgataatgcctcacatacatctttcatggtgccttcatagttactctatttcatttgaattagcacaaagataaatcaccggtccacatattatattctcttactatgat

SEQ ID NO: 46876 - DNA, 925 bp, Arabidopsis thaliana landsberg
ttctttcgttctatttttgttaaaaatgaacaactctaacagtctggaatatttctgaagtgagctaatgattccaaattggtaacaatatcttaaacggaaggtaaaatgcgggtaagtctggtagaatctgttaaattgaggtagcataaattttaccacacaaaaaaaaagcagaaaaggattataagattcaaaaaaaaaaaagtaaattcacttaaccttcttttttttattgtcaactgattttgttattgataaacttgttggaaccaagataataggccaaaacttttttataatcatatatattaaataataattgtatttaagataataggccaatataagctataggttagcatagcgctgaaattaagagagttgggtatgtagacgttgacgtgtaatattcatgataatcattgcaagcaattttattttttttctatactaagaactacttcaaattgtatacatattactttttggtggaacatgaaaatgtttatagattgctgattaatatttgaaggaaaaaataacagaaaaatggatatatacttgaatcggtttgataatatattggaacaaaagtgaaaagctaaattaattaactagtgctactgtgctagtatattactatttttatcgaattaaattggacatcgagtctcactgaattcacaatttcacatgttcaacaactattgagttcagatagctagctagctagtggttttaaatttgagtattaatatgagtttagaacgattaagatacccccgaatattgaaaaataataattaattaatagtgacagcaaccactatggctaagaaataaagatgcttaattttatcttacacgattagagaggttctcaaactctatataaccctacattggaacacatattgagccc

SEQ ID NO: 46877 - DNA, 459 bp, Arabidopsis thaliana landsberg
gcctcgggaaagaaatagggaccattatatctggaaaagcttaggtgtctggtcaatcaagggtgatttgtgaaaacagttgagcccagtcatccgttagtgtgccacctcattctcaaccctttgataaagtggaaggtttctgattgtcatcattgagaagattagcaaacagcacttcttgggaatatatctttgcctcttcttttttttttttttttaaaaagatgtttgtttttatttcatgaatatgggtgttttatctgcctgtgggtctggacaccaagtgagtgcctggctgtcctggagacttgtagtgggatttaggtatcctggaatcaaagtgacaggtggttggtgagtcaccatgttggagccgggtaagaaacataggtcctcccaaaaagcttcaagtgcccttctctgcttggccattttttcagtttgccttcttcctga

SEQ ID NO: 46878 - DNA, 1035 bp, Arabidopsis thaliana landsberg
tggcccggcagaatgagtgacatttcggtttgactagattgctaaatggttagacttcactagggcaaagggtttcgttagctgggacggatcatgctatattccacatcgaatcaagtgctcaagagaattgcaacattctaaagtcaacaacgatcacagacttgaaaagacacaattcagactaacgtagggaaattgcaaatgataataagcatctctatatacgcagccgacaaccgttagaatttagaaaactaacaaaaataaggatagaaaacttctccttttgaatcaaaaaaggaaaagaaaagattctcatattttatttctgttaaatctagatttcgtatgcaaatagttgggactgatgcgaacttgctaagcacagtatttgactgtactagtcatctaccacggccagactctgtcggatgacgtggcgtgtgattattggctgacaggacctcagttgtgtcatcgtttcacgtatatggttaaatgctgccaagtgcaacctctgaaacatggaccaacgccgtaaaaagatggcatacccgaaactaggcggtgaccattgcattgcttgcatttctcatttatatctcatgcatcgttttctcttctttttttcctgtagacaattgaaaaaaatattggtttcaagtttgtagacaagttaaaacatgattacaagaaaactcataccactaaacgttagactataagttatattaacgaaatgataaaatgttatatatttggagttcattggttgtatgtcagatcaatgtatatttttgattagttgttagagtaggggacgaactaattatgtggacaaattaaaataatgtttttatttatgttggcttatctatttataattccgaattcatatttcaacaagtatgaactaattcccaatctcattaggttctaaatagatatatcaaatttgatattttgtcaagtgtatttcttaagttgctgaatagttgcatatcttaacacgccaaaatatcatgtggcccc

SEQ ID NO: 46879 - DNA, 653 bp, Arabidopsis thaliana landsberg
  unsure (1)..(653): unsure at all n locations
gggctataaatatatggtagggtttttctccaacttgcttgattctgttgtattaaaccagttagccccaaatcttctttcttaatgaatggcctttcaaagttagctgttttttcctcttcttcttctttatcttgcatcttgatctatcaaatcagtaatgtgtttggaataccaaattaggagaatttttcacatacatttagctttctggttcatgcattgtcttagcattttacggtttcgctgtttcagattaggggtttagagtcttagggtttagacaaagctttccctgttttgttacttaaatgtttgctttgcattcggatgatgcttgtgcaggtacttacttcttagggtgattcaggacttgataattataggcaaaaaatggttttgggtttaaactcaaagaacagaagatgctcatcggttcaagttgattacctgatccacattcatgacatcaagccttggcctccttctcagtcccttcgatctcttcgctctgttgttatccaatgggagaatggtgaccgcaattctggtaccacttctgttgttgctccttctcttggntctgtcattggcgaaggcaaaatcgagttcaacgaatcatttaagcttcccctcaccttgttgaaagatgt

SEQ ID NO: 46880 - DNA, 696 bp, Arabidopsis thaliana landsberg
aaccattctcagggggaagaggaagaggcagaggaagatcattgcaatggtcagagtcttcggcgttctttagtgtatgcatgccttgggaattgctcggttcgtgatatgaattccttgcctacgcctggaaatttatctcgatcgtctagctgtaatggtgatcaagatgataatgctgatttgcacaaggcaatggcacttgttcctgcaaaatttccagaagatttgaccccattcattacaatgctggtaaaagaactgcctgaatttagaccaggttggcctttgctttgtcgtgtagcttcttcagatgtattagcttctgctccgagaagttcttcgttccgaaagataccagttgtgcagtgggtgctgaagctgcccgctaggaccaattctgttgttggaagctcagacacaaagcagattggttttgattcttctgaatctgaagaaaatgataagttgtctagctcaaacgttgaaaggcaagcaattgttcctgatgaatctatgatcgtgaaatgttctcttgatcatagctcaggtagatttccagagaatgtagagggtcttcaggcaaggatctccacatcttgccagttttttacgtataaggcccctgtgtcggtgacatccaatttctgtgatggtttgttcctctcttctcataattaagctaccgctttgttt

SEQ ID NO: 46881 - DNA, 788 bp, Arabidopsis thaliana landsberg
caatatttccttgtttggatattaaattgtgtagttttattaatatgtgtacttttattataaccaaaaactgttgggtattaaaacttaattgagatttgttttttagaattttcccattagtcaattataggtttttaatgctctagttctttttcatatataatagatatacatgaagttaagaacttcccttttgatttgttcatccataaaatcacatccttgattatatcatttgatatcagtgctaaaaactttatttgaaaaggatattgcaagaaaactttatctgtaatttcatagggaactcactaatgtaatcttctatgcaatcaaagcaagatcagttcaaaacttttgctatgctgtttacacaagtttagatagaggcaaagagcaaagatgcatttgttcctccaaagccaaacgaattcgacattgctgtcctaactaacatctttttcgaagtggttaaaggcatgaacctcttgtcgaagatgggatctggattcttgacattcagcgtcataggagcaaccccctaccaagtttttgcaggttctggttaggtcactaaaccttaatcatcacaacacaaaactaagaaatgagaatgcttacgtgatgtatagcaaggatactgaaaatagcttccactgctccagctgctccaagaagatgaccagtagcccccttcaatcaaaacaagtcaaattatttacagacaaaacttagcagacatatagttatcacttggactacaacttcagtaacatcatgtcaat

SEQ ID NO: 46882 - DNA, 768 bp, Arabidopsis thaliana landsberg
  unsure (1)..(768): unsure at all n locations
atatcaaggaacaaattcaaatctaattactaaaaaaattctatgagaattcaaatttacctactaaatatataaatataaagttaggactaaaaacttatattaaaaatgaggggttttaaaaaaaatatcttgcgaataaagcaattgcaagaataaaatatttcgaaaaataaagtacaaaataattttaaaacatagccattaaagtaacaaatactactataatatcataaataaaatagattaaaattttggaaaaaagaagtccaaaaaaaggttctgtagtggaaataaatccgaaaggagggggccataggtttctgctgtcgagtcgaatccaatcgaaatcgaatcgaaattgagtcgagtcatcatctcctccgccattatcgtcttctctctctctctctccgccacctctcttcaattctgacgcttctcagatcctccgatccggcggcgttacttttgctgatacacttctctccatttcttctttttgttcgccgagaagctaaggtaagacgaataaatagctaaaagcaagctctgacgacgatttcgttttcagattcgtttatcatttgcttccgattcctcatgatctgttgtatagtgttcttattttgattgaatttccatcaaatgctggttataaatcgatccatggacatgaattttgttacaggagaattcttcctgaaaacgcgttgatggatctgangtatagctaccgattaaaaatgggtgattctctctaaaaac

SEQ ID NO: 46883 - DNA, 871 bp, Arabidopsis thaliana landsberg
aagttaaaagaggctaaattgttgaccagtcgatttgagaatgaggcagatgaaacgcgtacgtcaaatgctaccgcggatgaaactttgattgaaaatgaagatgagagcgaccaagcaaaggcaagttatatctcaggttattcctttttttttttttgggtaagctttcttccatctgtttctcatggttatgatacatactatacagcattacctggaaagcaacgaaaaatactacttgatggctcacaggtaatattctgcattctatagttacagtctaaacattacccttaatgacattataacgttttaactttctgtttcgtatgtgagttgtcacctttcttaccattttttttcttctcgaaaaggtggttatgttgtttgtaaatagtcatatgtggatattattcctcattcatctattcactagatttttccttttttttttctttttttttttgcagtataaaagaaaatattaacgagcagccatcgtccctagtgggtggaaagttaagagagtaagtagaccatgcccctatacatttgagaccttttggtaatagtttttcgtgggatgtttacagctacaaaacctgacattttaggtaccaaatgaacggcttaaggtggctagtttcactgtacaacaatcacttaaatggcattttagctgatgagatgggtctcgggaaaactgttcaggtatttaatgccatcccatttgggatataggcacacatgtcagattttcttataagatgcctttgtttcataagttataaagctctttgcttttccttttcgcattttgtaggttatttctttgatttgctatctgatggagacaaaaaatgataga

SEQ ID NO: 46884 - DNA, 813 bp, Arabidopsis thaliana landsberg
taattgagaaaatgcaataaatagagattgaatggacttataatattgataggtcatcatagccacatcattcaaataaacatttttgtatttatcttggagagattattgataaccaaccccacaagaaccctcccaaaaaagttgtctttgggacaaagacaaatgtctagaagaaaagaaaaacagttggggcaggcttgattatatgtcaattgtgactttaaatttaggttagactttgaaacataatattaaaaaaataaagacatttgtaaagaagaaacgtcgcataccctactgatatttgaacaaagattgatcaaatttaaactaataaaaaagaaaagaagcaaagaagaagaagaaagaaggattaggcaaacaagtcattgctactattatataagcaaggagatatataattaaggagtcatataatttgaccaaaaaagataaaagtcaaattatggaagaggctttttttaacttataaaaaagcaaaataaggatctcatattcttaagttattcaactaatccattcattttttgtgtgtgtatatatataacacatccttgcttgttccatttctaagccagttggtagtttttcacatatatacgaccttgaagattaaagatgaggttcttgttgatgagcttgacgttggtattaattgtgacgtttggggaagcacttagtgatagatggagcagagatgagatggtggagatggctggctacggcgaacaaaaactctcctatgttcttctcaccgcctctgttttttctacctcctcctcccttatt

SEQ ID NO: 46885 - DNA, 621 bp, Arabidopsis thaliana landsberg
tgcatttctcttttcctaagaacagaaatacaattgccaacatcaataacaattaattggcaaaacaattaccacctaccaacaaatggcattataaccagacagcaaatacttcccttccctaaaacatgtcaatcaattaactggggaaagggaatccacaagaccaagtgtgagtagaaacccttcttactagaagacgaattaagtttggacaaccgggaagaaaaaaggttggttcaaggttaggcaattcattatggtggaagacaatgattggatgagagacggagcaatggtttattaggaagagttagggaaagttaatgtggataatctggtggggaggtgttagtgtagaaagatggggttcaggagtttgttaccttaaaaatgtttggtaggattggaaaggttaaggtttgtcaagaagacattgaaatttgggcaaggaaataaatttttgtcaatggcaaggagttttaatactagggttttgaaattcaatgtggaaaaaaaggtaaataaaggtaaacggtgtttttaggggagacaaggcaaaggaatagatgaggatggaaaagattgatataatggtgtgaataatggaataaggtgatt

SEQ ID NO: 46886 - DNA, 621 bp, Arabidopsis thaliana landsberg
ttattttgaggggtttagccttttgtttgcctttcgatgatttttgagttttgaatatgtttcgtacatcttaaaattgagtacaagcggcatgcagtcgtctgtcaagcggtgaaacgcgcgatggcctaacatgaaacggtgcggttatttgtcaaataaattaatgagtcagcttgactaatttaaaacggcagagattttaccgaccaaattacacaaaacagtatgaattcagcactgaattcttcgcataattcagcactattattttttatgagatgcatgcaaataagtgtccttcgacatgtttattaattaactctagtttctttggttatatgatgtacaaaccattagaaaccccatacaacatagaaaaatactcaattttaatcaaaaggaacaaaaactacgacatggaaaatatatacttaacagttaacaccatttttcattatgaaacttgatacaaatacattaaaatggtgggtctaaagtttttctgaattagtattttaaacataaaccgtatgatgcggcacagttcaatatgagacagtgagagtgattcatcaatagacaacttaccatccgaagaagaaacaacaacaatgttaa

SEQ ID NO: 46887 - DNA, 591 bp, Arabidopsis thaliana landsberg
ggaagaagaaccgtactgaattccaatggaatgaatgttgatgtttgaagtttttgaaggtcgctcattagttaaccagtgtttaagctactgctttaatttggtcaagcaatgaatctgtatcatgtataaccgaagcttgtttagtggtttatatttagcatatcttttaaattggtatagttggccttctggccctatcatttgagtgtagtcaatcttgtcaacttagttcccgcatgattgctcaagttatactgtaatgatctttctatcctgttttcttgcagatcattgttctacagatacctgtaagttcaagtgtctccatttggtgatttacaattttgtctagaaaattggtttcgctagttctaatacatgataatttagaaagagaaccaaacaaatcatggaattaaaaagctgattcttttcttcctttcagaatgtcacattggatctgatggttaaacaaggggcttctcctggtaatcaaactcaatacgtctttgcagtgaacgctgacaaaactccatgctttactgcctccaatcttgaacggttgaagtctggtcttgggactatgtt

SEQ ID NO: 46888 - DNA, 585 bp, Arabidopsis thaliana landsberg
  unsure (1)..(585): unsure at all n locations
cgagacaccatcgaaacataagtgtgtcacatttcatgccagcgaagcgttgcatggcgttgatattatcacatattttcgccgccttctgaataatttgtagccctacgaatcacattggcaactacatatacctatccagacgcacgctcacaccaaaaacacattaattgttatgacgattaaattttagctttcttataagccgatcatatcaattgtattagtgtatggttataatatcactcaattggttggggatataatcttaattacaatgaccaaaacatttagcatagtaaattgtgttagtgactatatgtcattagtccatgctatatattaaaaggccatgcttcaagaaaatataatgataatattttattatattaaataaaactaaagagaatcgataatatgaaagaagacggccggaattagtttaaccaaaaacgtgattatgataggaaaatatcaaccaaatttatcaaactgaaatgatagtatgattgtcatctgacattatttgtatcagaagtaacatttgtcatctaatattntcataanatatatctaattataaat

SEQ ID NO: 46889 - DNA, 1619 bp, Arabidopsis thaliana landsberg
ccatctttgggggtttttgtttaccaattctaaaccttttcttattttattttgaccacaggcaagaattggagggaaccgaacttttacaaggttgagatacttgaaaatgtttcagctttacaagaatgattgtcttaatataacaacatacaatctgtcatcttgtttgcatgtaagagaatgttgactataagttacaatcaggacgatcttatcagctccaatagttcactcttcctcaactttgagtatcctttgattcctctgttctttgcaacttctttgagctctgcaagtttcatagtttctatcagtgaagctttctcttccttctttgtcaattctcctaaagctttatcgctgtttgatactgggagcttacctcttggacctgaggcagaagaagataaaggagttctcttgacaaaactagacggtggtcgaggaagctctacttgtctctttggtggcttctccttcacactagtatctcctacagttgcagagttgattatattaacaaatggcgagaacatggatttgacatttgaccaaagcatagttgattaccctcagttttttttcttgatttctcaagaacgtcaagaatagctttggtcagcggcttttccttagaagactcatcgctgttcttctcttcctcgactcctcgagactctcctttagagatcgaagattgaatccgtttcaagagcgaaatgatctcctcttggttcgatttacttgggtttgacgttcgtttatcagacggtttcttgcaacaaacacatcctttcttggatcttcccattgaagaaaaagaagaaccacctttctcttgaaaccaaatacttctatctccattaatcgttgttctcgaaagactctgctcaaagcgcaacgcaaacggcagtgaatgagtatctgcaatctgtccaaattcagtttagctgtacagaaaaaatggttggcagttcctaaagttctacaaaactcggaacattctcaatatctctaatgattttagcaaatattcgattacctcgaacatgaagatgattggctgatttagctctcatgaatcctagtttgatcaacgggtaagcacaatgacaatgaagagccaagtccatagctttaattcctgactttccctgaaaatcagagattgtcttccgacagttctcactttggcctctttcttcacctcacaacaaaaaaaaaacaaatatttatccccaaaaaatccaacctttatatgtcagggtccaattacagctacgcaaaaacttgtggaccataataaatggctaactttgaagttttgggtgctaaaaaaacacactttcaagtttttgaaacaacgctctcaagtgggctctgattttcacaaggagacttaaaccttcgaaacaacttttactgaagataaaatccacttacagaagcattacaattttcccgcgctttttccgtctgatgagttagaggaagataagagaaatggcgatgttggtgacgaatttatcttcttcaagcttctgtttttttcctctcctcatttacaaaaccagaaggagatcagaagcggcgtttgagttcgaaaatatgtgatt

SEQ ID NO: 46890 - DNA, 707 bp, Arabidopsis thaliana landsberg
tcccttctccgcattattcgaaggatactacaagcagattcaaccatctgagctctcgctagagacaacgacaactttgttaacacatcgccacttaacatacctggattttgcttcaaagccaaacgagtaagatcactagccttacaaagccaaccagcatcagacgagtaagacaacacagtaacaaatctgttcatgattacactctctggaaatccatagaggcgtttgaaatctttaaacacgtcccaagcatcatctacacggtgatctttaagagctgtttctagcttcttcttgagaattacttgagaagaaacttcccagtttaatctagcaggtttaacactagtacagaacagagacggctttgaggtgcgactacacaagacccatgaaattagggtttctacgttaccgctatcgaatcgacgaaatgattctagaactaagttccgtttcctaaacattagtctagaatttcgattccaaatctagaatttaacaaagaaagcacaacaatgaagagaacatgataacaacatacgaattctccaatcgagaaagaaccctaaattgctggaaacttcgaaatcgagagagaagagaggaacactgtaacaagagaagagtggccagactgtaaaattcattgggtcgggtcctaggacattcgaactttcgcttttgcggttaaggaccca

SEQ ID NO: 46891 - DNA, 596 bp, Arabidopsis thaliana landsberg
gtgaagttttcaaatttgaaattcaaattttgtaaacggcctcggatgtagaaactatcgaaatagaatttgtagtgcaactttatagctggtcacatttttaaatgaattcatttagtgcctcaaataagatgattcttaaaataagatgtagtagtgtagtggtagaggagggtattcgtgagagaggttgcgagttctaatctcaccccattcacaaacatgtaaatttgattcaaaatgatagagcgatgggtatggtaatggggttagtggttggagagttcttctcataatttaataaaatgttttgctgtgattctgaaagtctttaccgagtgtccgaaaaagtaatcgacaaagaaccatatatcgataaaatatttgcaatagtctttgttgagtgtctgaaacactcgacaaagaaacgagtccggtagtgcgtacatacttgtagagctgccgggggaaagaaaattcagagagggagagagagattattctagcaaagtaaaagcaaaacaatgtgtgtacagtacacgctgcttcaagacgaccttgtattgacatcattagggtacgtcactgataatgga

SEQ ID NO: 46892 - DNA, 1136 bp, Arabidopsis thaliana landsberg
gaatttttcgcactctttcatccgttctttaactttttatctgttgaaatttttctatagaaaaatatggcggtgaagaacattttgttatgtcgattttgtccttagacgtgtcttgtaccatttgattcattgggataggcgtgtctattgtagtaaatttcagtttatgatggaatccctttaggccaaaacaaaacaaaacgtgtgaccattatgagacacgagcgtaactaaaacccatgcaacaccgaatattcttcttttaaaattttcataaaggcttttttgaattgtgaaatattctgaaaatatatatgctatacgaaggaaataaacgcatgaatattcgaattcttgtaacaaacaaagggaaaattttatattttaaagtaaaacagggaagaaactagatcatttgaggacaaagaaaactagtcatcagtattatagtacccattaaacccaagttattaacactacaactctacaagcccatctaagcccatgttaataggtcttgtagtaaaagctcttatatattatatgtatatgtaatgtatgtcatgggttaatgtaacaagagtacaaacattcaaccttctataaaacataatcgaaatcatttgagtctttggtgacaaatccaaagctttttcacattttcaaacctaaagcttgaaaataagatagctcattggggctttattaggtgcaagaataataaaggaaaatgctttaggtttgtcaccaagaactcaaacgatctacttattgttttaaatcaagtttacgttttaggcccagagaaatttgaagtttacgatggaaggacaaaatacgaaatcgatatatggaaaacagcaacaaagaataaaagagttacaagagattacaagtttccaacaatgattcttttagtattacaatttttcacactttactttcatatcgaagctcttttgtgtgtggttgcggttcaaggttcatggctattaacacggctatggagttcgagcatctcctgatggttggggtcgaccgagagcgctgcacgacagtcccgcaacgcactcgtgacatcaccgatatgctcgtggaaagccgctcgtaagtgaagaagatgaagatctgct

SEQ ID NO: 46893 - DNA, 539 bp, Arabidopsis thaliana landsberg
  unsure (1)..(539): unsure at all n locations
cccccccccccccccgcccccccccccccccccccccccccccccgtgattcgccgcgccccccccccccctcgccccccccccccccccccccctcccccacccccccgcccctttcccccccccgggttccggccccccacccccccccncccccccccccccccccccccncccccccccccccccccccccccccccccccccccccccccccccccccccccccccccccccccccccccccccccccccccctttttttcccccccccttgttggcccccccccaacgcccccccccctcaccccacccccttctccccccccccccccccccccccccctccctccccccccccccccccccccccccccgctccccccccccccccctccccccccccccccccccccccccccccccccctccccccccccccccccccccccccccctccccccccccctctccccccccctcccccccccccgccccccccccccccccccctccccccccccctccccccccccccc

SEQ ID NO: 46894 - DNA, 645 bp, Arabidopsis thaliana landsberg
cctttttattttttaaaatagtagtatgtatctccgtaacacctcctaatacttttctagagctggacatcaaacgaatatcctataaaaaatagtgtatatatagtcattagtgaactagtatgtaattgtttgaagatttttttaaaggattattgttgattatgccattttttatagaaattttttaaaattattattttactaaaattttataaatatatcattttttaacatttaaaaatatatgtattttgaattttttttgagtaaaaatacgtaatttatacaaaatattaaaccgtaagaaaaactacaatcgactaaacctaaacatatgtctgtaacctaaaaaaacaaaatccataaactattgttaaaaggacaaaatccacaaataccattacaaataatggtaaatttataattgattctttttttattctgtagtatagccggtcagctatgtttcttattgaaaaaccagatttgaagctgaagaaccatcctttgttttttcataccaacgtactttttttggccatagatggattggaatccccgaacacaaggggaacccaaccgccccaatattacctacccactttaggcccaattcaaccctttttttttgggttttaaaaa

SEQ ID NO: 46895 - DNA, 270 bp, Arabidopsis thaliana landsberg
acaaaccgatcttagggggcggacaatccccacttgtctctacttcaaaagccatactgggtgtgtctctggactcggtgtcaagtataaaggcatgaaccacagtgggaatcgttactagcgtggtggagagacagattcttccttacattgcattgtacaacttgctctccatcatctgcctcaattaatgcagagtgtgccctgccatacactggagaactgtcattgaaacatctcatgtgcaatctctccaatgaaagaccagat

SEQ ID NO: 46896 - DNA, 404 bp, Arabidopsis thaliana landsberg
atcaacagcgtttataacggattttcagactttaaggaaacaaaatcgctggacacgtcacgcgtcaatttttgtactgtaataaaaacatcacttagatcaatgatcccatgcacgcgggaccacgtacgcgtgataaagtcttgtgatacacaccgttggatgataaagtgcaatccatctaacggtgattttgttcaagttgagaataaaataaatattttagttagaatactttttaatactatataataatattgggaaagtggctgagcataaacatgtgcatgcctgcctgtatcttgcagccttcatgtggatttatcagtgcgacactatccatcatcaaataactaatatctacactttctttcttatatatgtgaaatttatacattacattt

SEQ ID NO: 46897 - DNA, 256 bp, Arabidopsis thaliana landsberg
  unsure (1)..(256): unsure at all n locations
tgataccataaatccaaacacccaaataccaaactttatcccgaacaaatatagagaggacacctgggaacaattacccctggaccccacaagaccataaccgaccccagacaccctacccacacnnnnnnnnnnnnnnnnnnnnnnnnnnnnnnnnnnnnnnnntccctggctactataacactcaacatcttcctcataaatgtgataaaagaaatcaaaacactatccttgcttgccacctgagcatgctatg

SEQ ID NO: 46898 - DNA, 980 bp, Arabidopsis thaliana landsberg
  unsure (1)..(980): unsure at all n locations
aaacccatgacggtgaggagcggaataagccacaaattttcctgcagtatggccacagaatagcgagagtgatgggcagcagacataccacacctttaaaacttataagggctgccatgtggaggcagaaagcaataaaggaaataaatcagctccactaagtgacatccatataaaattcaaatccaacacaatctagcagaggaattaactggatttagcaaactccacagcttgctctatggctaaccccctaaaatcccaataaacctgaaccatcatcagacctgtctttatatagtggcttcaatcaaaacgagtgattctagaacgaaacataacaacgagcattcagattttgaggagacatcaatcaatcaaccctctctgacaatatttcacctcaccaatcgaaaaattcagaagccattttgccagaaatttgctaagcatcaatatctagcgtaaagccactcagaactgagcatcatctaatgaaatcagccaacaaaacacaaatgcaaacccatttctgtagatatgaaataacgaagaacaaaagctagacacttgacgctcacctgctacaagataaatagatgatacaaggaagattatagtcgagggaacgaaaacgaccatccagtaataatcaacagtttcttgatcggtcaagtaaaaagcaccgggaaacagatcggagtcacgagctttgccatagataggcaaaggttgtagctttatgtcgctgcaaaatggcctcttaagaacattcgaaggaaatacaattttcaagctgacgatcgtgcaagtgaagatgacaaaacaaaggaaagccacgatcgagactaaagtcggcctctgaagcttaatccaggctctatcttcttccctaaggctctcgtactcttgctttggcataaacgcttgacgcaacgcatttncaatgatcgccattgaagaaacacaaaaaaaaaaac

SEQ ID NO: 46899 - DNA, 541 bp, Arabidopsis thaliana landsberg
attaagcatcaaattcagagggtaagaaacttttgattcaccattaatttgagaattaactaagagaaaagaaaaaagctatttacttttccagggatgattagttttttcttctctgcatctgcaatcatggctatagctggtctaaagacaggaaatggaacaaaatcaatacttgctactagtgcttttgaaggatttgaagactaagatttcacaaagcacctgtctttaatgctacaagttggttggaaatgttcttgtttggctgcaacatacgcttcacaaccttcagtgactttgttgaggaacacaagaggcgttttcccaataagctacaacgttaacacagacgaatttgttaatcgacatcagaagaaagacgagaaatttgctacaacccagatcgcaattttgtagatactcaataaaaaaaacggtttcttttttgttcgttcttttaccagagaggcgtcacgtttggcgttggtagaggggaagtctttggggagatctctgagtctctgagcaaaagaaggag

SEQ ID NO: 46900 - DNA, 645 bp, Arabidopsis thaliana landsberg
tacgtgtgaaaagtagtgggcatcgatcaaacctacttatttctttcttaatttgtcgactgaaattatttgtctgggtctgaataaattatgattgaataactatatttccactattttaaaagctccaaagtggtttttttacgtttttcatattcatgtgtatacacatgttattctattttcatatatatataattatttgtcaatggttttcttatttgagaatcttcttactaagatctaaatctggaaacgcaaatataactaaactatttgtcaatggttttcttattatataacagtctaagacgtatcttcaatgaaccattttctcaaacaatatatgttccactctcaaacatatattatttttgatcatggctaacaagacaatataataagaaaactattttatatacatgttgataatatggtccatgatgtaagaaactctatgtcgtccgtataaagatacgtgttaaaatagaaatgaaaaaaaaaatacaaccactatacatctcagaccccacgatctcaatatctatttttcattgttccaatatctcaatatctcaatatctcaataacttttacaatagactgttatcatcttctaccgacggatcatgccaagtgtttctc

SEQ ID NO: 46901 - DNA, 1188 bp, Arabidopsis thaliana landsberg
  unsure (1)..(1188): unsure at all n locations
acattactaaacctaaagaaagataggttatattcacttttttattttgtttatatatttcattaacatgtaaataaaatagagagtatatacaacgttacctttttcgttgtgcctagttccacaacaccatcaagcattggaatgcaaaccactgtctgcttttttaaaatacattttcatcagaatacaattctcaaatcttactaaaaagagcaaactaataaagacaaattttacctgaattttagcactctaagtcattgaggaaccgacgtaaaaggggcatcccataaaacgacaagaagaattattcaagttaatcagtgaaaatgtataaaagtatagataaataggtttacaagtagatagatacatagtatagtgtatacataaataggtaaaaatagatgcatagtatagttggtgaatgaataaaagaatttaccttagcgagaatagctctagaaaaagttttactgtcaacttcatttgcaccacttagccatacgtgcttcctccttgcatacgcttttcctggcatcctacaaattactacctcccaaatttatatttgaactttttttaccacatagagaaaagcatgaagtatacccataactaacccattttgttatgcatttatgttatatctattcatgcttctactttagataatcaatcaccaaacaatgagaatctcaacggtcgcaataatgttcatgaaaatgtagtgtgtgtacgtttcattaactctcatttctttcttattctagtaactcaacttcctcagtttctctttaatgtcaacacaatattttcgatatccgcatttaacacacaatactatttttgtcttcacttagagaagagaaaaaagaaagaacaaatttagaaacttgagtatagggagagagttgtttacccagatggaggaggaaaagagaaagacacacacattagataaaaccattctgtctccgtcaaatcctccggtgacaatgcggtgcatgctcttgcttctgacgttgactctccggctaaaagtgtctcataaagctccctgagctgttggctcctctctaacgcagcctcttccgccgncaccttcgatggttgagttgtcttcctcgtctttattgcaccgctgtagtatccattcccccacaccaagaccctaaacaatga

SEQ ID NO: 46902 - DNA, 1669 bp, Arabidopsis thaliana landsberg
gtactgctctggatgaaactcaacattgtctcctcagctttagtatctgcagaagacaaagataagctcattagagtaaattaagaagagacagatcttatgttacttatttcaattgcatatttctccaaaaaaaaacagagcttaaatgatcagcctttcatgcttactaaccgagttttggtataatgtgtccacctgaatgatggatcaccactggctctacgaatgattctacaagcacttcaccttctatcttcaggaaatccctctcacctgcagcaaaaccgatacagaattacaaacaagttgtctcttatgtcatatcaaatgttgtaggagagaatctctaacgttaacatgtagtgctgcagattagattctagtctaaacactcccatgccaatcttggctacactaaaggcacactactaaggtaagcttcaaacaactagacagaaacttggcattacaacataaccgagaaatcaagtcaagaacatgcgcaacgtagtaacagtttacctatgaagtggagtgatgggcaacgaactggagatgagaatgcattaacagcagctttaggctccccaaacatcaaccctggaattttcgctccagaaatgataactaaaaacttgacttttggcaccttagttagagccgatccctacaaaacagtttacaacatcacagacttactcaaactattaaaacaacatgtttcattcttcaattcagattcaacctctctgttgcatataaatggtttcaacatcacacacttgctcaaaacagaacaatagaaaactactctaacaataggtttcattcttgaaaatatcataagcagattcaatctcagaaccaggattatgatcagttatgcagttatgtacctgttcttgcattccaggaatagctgcagttagaaaagctccctgcaagaatggatcaagaatcaacggtccacgatcctcctgctgatatatatgaaagtgatcagtactaaaatctcgccaaagaatcaaaacaaacctgagaaaaaccaagaagaccatcaaaaggtccattctttatcatgtagtcctctatataagccaaacactcttcaaaattcctatattccttaaacccctgcaacacacacacacacaaatcaaattatgtatacaaacttagaccaaatctctctgttttctagagaaaaaaaacaacctttactctgatagtgttaacagtgtcaatgatcaatactgaattcaaggaaatttaggattttgttgcaacgaaccttgttagcctggtaccactcgtaatacggcgggtcaaagaaacgctcgacgtccgatttcccggtggccggaaaaggagcgtcaaggaaatcgaggtcgagatctcggagaattgtgtccggccatttacctataccggcttggagaatccgaccactagttctgaatccatgaaggcataaaattctagggttcttcggtttcaggtgaattatccggcgccatcgccagtcgttaaccgtaatcccgtttggaaacaaggataggagtatcctaacatctgacaagctctagctgtcttctcaggttgcgaattgtccttgtgccataatactatcgcttgtcgcgagagttctgctaccgaggccctgtta

SEQ ID NO: 46903 - DNA, 686 bp, Arabidopsis thaliana landsberg
caaaatataaaaaaaatctttgattaatcaagtaaatgtgttagatttgctatctattgaaataatttctggttgaaaaagtttgataaatgatattgaaggcaaaaatctaaacaatactatatttacagaattttgtttttacttacaaactttttataaaattaaaatatgttctataaaatttagtataaccgatcatatattactacattatttgtgattttataaaaaaaaatattataaggaaaagattttttatttgcgtagcgcatttaaacatgccggaccggtcctgattcgaacttacgaaattaaatcggctgcacaactataagtgaattaactttttgtttttcaatttttcataatttatactaataaaaacgttgaaggataacacatacttctttaaataattttttgactagaagtaatctaaactacaaaatacactcattaaacagttattaggtttatgctgtatgacaaatttagagtaagataattaactaatcatttaatttatatcaacgatacgacgctataagtcaataaaagaattaatttttgttttttatttttttgtaaatttttttagttgaaagataattcctagaaaataagttatatatttgagttttcatacatcttaaaaacagttaatgattagctatatacctatt

SEQ ID NO: 46904 - DNA, 577 bp, Arabidopsis thaliana landsberg
aatcatgttctactactagcaccccaaatcaaagtacacgaacctatagcctataggatgatgtatgtctatttttgcgaaaccaaactataaaaaatctcgattatttatcaaataaaatattagacctaatttacaaatggcggacaaaaactcaactataaaatgtaaacctttggcactatcaatatcaacataaaaacgttaaaaaaataacgcaactttagaatttcatatactacttgcatcaaccatcttctgtatctatcactatccgtatgggaatataagtatcctttaaattaataaatcatcgcaagtaggaagagaaacaatactcgaaaagatataaaaaaaacccaccaagacaacgatcatctaatcacagaagagaacaaaattcttagaatcataaaagtaattaattaagtaagtcatcaaagacaatcacctggaaactcgctttctaatcaagatttctcgataatcctctcaatcataatcatttctctactatcaataaaataagcaaacaaaggtagaccataaactaatcatttgggcttctactattaac

SEQ ID NO: 46905 - DNA, 553 bp, Arabidopsis thaliana landsberg
tttaaatactaattaacattcatacaaattaacagatacaatgtactatatcataattcgtttccgtaacacaacgcaacaatttgaaactagatgtactttagtacttagttagtgtgcaccaaaaaaaaaaagatgtagttagttagtaaggggttaaatgttttaatttattaagaaaacttaaattcattaaatgttagaaaaagtctaattagtttatattcgaacactgtgctcaaaattaaaaagtcaactattttagactatagagtttattaattaataataaattcgataaatcaccgtattattttcttcaacgacaagtagccgtgaagacacgggagcgaagagagagactcgtgagataaacagaagatgaagaagaagatcaatgtcataatcttcaggcaaataaatctgtaatctttattaatcaaggttaatccttttttttttttttttttttctcatcttcattctttgcgtcttccttttctatttatcacgagatctgtctttctttttcctcttctttctctctcttctc

SEQ ID NO: 46906 - DNA, 710 bp, Arabidopsis thaliana landsberg
tagaactattaaaaaaaaaacacaatttgtcaattctaacattatatatttatatatataatgtaattattaaaactcaaattcactctcaatatttagaaaatttattatataaaatagctgagacgtttagcaattattttttatgattattctaagatttttctttaatatttatggaattaacaaattaagttatatctaagtatcaaagtagaaaagagaaaaaagattgtacctgacatatgcacttgcaaaatatttgcattctgacttcattggacatgcattacaattaggaatagtttttgtgcagaaaacctaaagttgacaaaatttgattaaaccaacaatattattttattcattaatataaaaaagaaaaaagtaacgcacacctttccaaatgttatcatttgataatgtagttcatatctgtaaaaatatttagaaataaaattaggtaatatgtgttcaaatggcgtaaaaatagttggcttcttaaattgaggaaaaacatttgaacttacaaagtttcttggggaagtttacacaatcgtggccaaaggtacttttgaatcggatccattgaagggtacctgaaacgagttcatgtttatcgataggagatagttgttagtaaccttgtaatgtattttcttaatcaaattaatgagaaaacataactcgaatagttgatgcatttgaac

SEQ ID NO: 46907 - DNA, 741 bp, Arabidopsis thaliana landsberg
tttgcacttctctgctctgtaatggtgatggcgagactagcggcccaacttcggcccatcctgaatacagcttccggcccaacatagtaccgcacgtgaggtactcgtgtgccatgtagccagccaataaccagttcggtgtggcggcttctcttagatcactctccgtgtctttacgttttctcgacgcgccctcatgcgcgtgatggttttgattcatttctttgccttctttatcttatgccacgtggatgacaggttgtaaacaaggaccagggttataatggtcaatgtcaaacgtaagggctacaaacgtcaatgtatgtttaatttgaggcgaaaaccgtcaaaagcgtcaaacgcatgagtgtcgagaaaaaaaaaagttttaaaattaaaataaaataaaataagaaaaaaaaagcgatcgaaggcagaataaagacgttgccgggttaatctgagcgtatcggcgcggtaaatagagagagcagagacagagataagatttttaaaatcgggtattgagaacggaggcggagatcggagagaagattacgtcgccggagatcggcggaggagtaaaaagcggaggacggagagaaaaagggataaaataaagagagagatatgaaggggatgcgaaaattctcaaatttggatgcgaaaattctcaaatttggttagattaaattttttgattattcggattctttcgaaaaaaaacatatcaaaatgttg

SEQ ID NO: 46908 - DNA, 540 bp, Arabidopsis thaliana landsberg
gaaatgtagaccttatatctcagtcgtcttcgacttcataccgccaaatgtagaccttatatctcagtcgtctttgacttcataccgcgaaatgggacaccttctcccgactatagtgtctttaaaccaacctccatataaatggatgagagatcaaaattatcttttttcacttgacgatcgagtatcctcatcccaaacatagttttagactcgagttatgttccactaacattgtaagagcatccctcatacccatataagttgaagttgttgagacaaagtttatagtgagtaataaacatatttgatcttttgttcaataagtttgttggagatagcaaataaaaacatagataatgtagtaaaaatatagatgaagaaaagagaaaacatgagagtttgtttacattgagaggaagagaaagaaagagaaggaccacatggattagattctagagggaatgagaggaatgtggtgctgaagataagtagaggcagctgcaactccactttccattacaactgggtattcaacat

SEQ ID NO: 46909 - DNA, 567 bp, Arabidopsis thaliana landsberg
acactcacgatctctattgccctaagtgtactagtaacatgactaaaacagctctaatcgttgaaaagggagatgatttttctcccgacgaccagaaacctttcgcgctctggatccctacctttaagttcctttcaagacctcccagaggtatccatatgtacacctaagcatgtgtatatattgttctctatgatgatgaagataactttttttctttgaatgctgagtgaccggtttttttgatctgtaggatctgcctaaagtaaaccattgaatcctaaactcagtggtatgtgtcgacacacttttttatgatggatgcactcttggtttgaactattgcttatatgatacgatttggatgtgtgtaataccagtcgagagcatgtgcttgattatcatgaaagcgtatacttgcgactttagttcctgaatgatcgattacctattttgtaggacctgtcgaagaatactcatctcagcctggttccagtggtatgtgtactcagacttctttatgatagacacgtgattactttgaagtgctcatcggtaaatggacga

SEQ ID NO: 46910 - DNA, 739 bp, Arabidopsis thaliana landsberg
  unsure (1)..(739): unsure at all n locations
gtcaactattccaatataaaggatcatataaagctactataaaggagtatgttatctgctaaataaaggattaaaaataaaggtttcaaacgtacatatgtggttttagtagacagacaatcataacatttgacagaaaattctatagaacaaaatacgtttggtattaagaaagatggtgaaagttatatattaccgacacaagatctaaaaatgtcagcccagttgaactctaactgatcaaacaagtactactacttgcgttttgacgtggcaatatcaatatttaaaaatctttagaatgacgacttgataagattagctcatggattagaaagacatcagtcaattaattatgacgctatatttatataacgcaccattaaattaaagagtaacaacattacatcatccatgactgtttatatacaactgctatgacgtcattttaaacttgatcatcacgaggaactagtaatttttctgtcccaaagatcgaacatttacacttacttacacatgagtaaaattgtacataggaagcaaatcatacgatctcaatacatccatgacaaatcttgcttaaacgagacagacgttgcagcaccatgaacacctcttcttgaaacctgaggacaatcttcaacaacaagcaactccaacttgtgagaaccaacaagtggtctcattccatcgtctgtcactcccagacattntgataacttcaacacattgagcg

SEQ ID NO: 46911 - DNA, 1000 bp, Arabidopsis thaliana landsberg
catcaaatgattcacacccgaaatcaagaaagggttacccagaaacttagatttccatagtggcttagacacactaaaatgaagcgatacacaacagtagaagtacaattaaaagcaaagagcaaagtcaattcacaaaaaccattagaattgaagatacccgaatctcagtttcagcgaaattgatggaaaaaacacaacgaaatgaagatgatgatgatgataactgaacttaagaacagtcactacacacacagaaaaaatcccagaaaatgaaaagcacatggaaacttacagagagagaatcaagtgcagagaagtggaagaaaggaggaggtagaagaagaagaataagagtaagattttagaaagagaagagagtagtagggttttgggttttttatcatcttcccttctttctctgattctggggttttacggatattttttttgtttttcactcctctcttaaaatgctaaaaatatctctgttcataacacgacgtagttttcgtcagtaagtaattagggttttttcgggaaaaatcaatctcccggtttaaaacccggttatttcacaactaaaccggaatcttcattggtttcgagttacatatagtattaatttaacctcgcaatctcgtttcttcaaggtctttgtataatcatcatcaatggagaaattggcaaaaacagcttcgacaattccgaaacggacctcaaataaatcccaacccgatttcgattactctataaggaagcaaaaggttccttttcgatttctctttctgtgttcatagcttagaaagatggatttagaggttttctttttgtgttatgcttgttgactgaagtatctgaaaatggcattgatatatatacacagttcagagagaattgcttcagaagagttagagaagataggactcgtttactatggaaattaaagatctctgattgtcaatcttcagatcaaaaggttttttttgtttttctcttc

SEQ ID NO: 46912 - DNA, 790 bp, Arabidopsis thaliana landsberg
tttttataatatctccactcacctcattctcatgaacccaccaaacaaaaaaaagtaaagaaaaaaaaaatgtcctcttcttcatcaagaaacgcctttgaagatggcaaatacaaatcaaatctcttaaccttggactcatcatctcgttgctgcaaaataacaccgtcttctagagcttcaccgtctccgccaaagcagctgttggtggctacgccggtggaggaaggagattatccggtggtgatgctcctccatggttaccttctctacaactccttctattctcagcttatgttgcatgtctcctctcatggcttcatcctcatcgctcctcaggttcaatattaatttttaatcattacattagtttaggaactaattagccactgtaatttctttttagtttagattccaatatgtgttagtaatttagtatataaattattttttgggggggcaaactagtgtatagtttttgtttaattagtaaaatgttatgagttatttttatgcaaatggtactatcggaattgttaaatccagtgtatagtttttgtttagggaattagtattggtgtagggtttagaaaaatgtaaattcgctacaacctcgttcgattccattttgtgcaaatattgcatgtgactacttggtcatttgaggtttagtgtgaatgttcatgaatacgtaggtccatgtattaagatattctaattgaatccaagatcataataaatacatatacattgatttggtaggacttataggatttaaccaagatgtatc

SEQ ID NO: 46913 - DNA, 886 bp, Arabidopsis thaliana landsberg
aaagaatgaataagaacatacgaggaagaatgttaaagacagcaaaaaaaagaaataagtcgtatctagttggttgatatccaactgtcgtttcttcatcagataaatttccaataatttcagacgacaccaactccagtgttactccagttgccatgcggcttatcttcaacctatttttgaaggctattaagtattaacatatttaatatctccaaattaaacatttgctacctaccttaattgaaacattcaaatctaagctcctttgcgatattaattatgacttataaaccaactttaagaaagaaaaaaaaattgtttgtcacacataatattaattgcatgatagagcaatgagagaagaacacattagtgttgggaaagaattttattactctcataagaatgaactagataatcatccacgttgtgtgaggggacaacaaactattagatatttgaagaagttttattatacagaattatatatatatacgattgtaaacaacggatgccattttttcttataaagagaggccatggattatattcttcaattgaaatagagaaacataggagaattgtttactatcatggatcatataactagtttgttaagtttccccttaattataagcatcctacaaaaaaaggagttttaaggtctatgcgtagactctcgtaggtctcaaactactcctattattagtatagatttcattctttctctcccaaaaaccaaaaactattttttttggatttttgtaactaaattctaaaacagaaacaaaaatctaaaaatcttccttcaaacgctgagataattgctcactggtttgaccagttcaattctttaatgattggtcaagcgaagctttttgac

SEQ ID NO: 46914 - DNA, 816 bp, Arabidopsis thaliana landsberg
gaatcacgacacgtgtcaataacgtaggggtaaaatagtaatcacgtatatcctacaagattcctttatagccttcccggtctttctcactttcttcctcatcattttctcgttttcttcattttttcttctttctgcaaattttattttcccgaggaaatcatcactgagaaaaatgctcgctgtgtttgagaagacggtggcgaatagccctgaagctttacagagtccacactcgtctgagtctgctttcgctttgaaagatggatctctcgctactcatttcgcttccgtgaatcccaactccgtcacgcttaacttcggatcttctggatttgttgcttactctcttgataatcctgatcctcgtgttcctaggtcaatttcaagtcctcttctctttgattctatgcttgatctagtcaaatctttgttgtttctttgatttctaagtagtagattttgaatctccgatgttttcggtttcgattttgtttatttctggaatcttcttgatttgatctgcgataatgttggatatattcgctattttgctgcagatttacttggattgactttatttggcttgcgatctacgatttatggtttttggcttgcttgtgttggtactatagcttgatgatgatgatgatgaacagtaacggtagattttacaaactacattagatgatgatgacataacagtagctagtgatttttggtagaatctgggattagagattctacagctccactagatgatgatgatgatgataaatggtattggtctacaaagtcgatcacatgatgatgata

SEQ ID NO: 46915 - DNA, 510 bp, Arabidopsis thaliana landsberg
gagtccggcacctgtgttaccagattgaagaggtagatcgagattcttcatcttcttgtgaggtctccatgtattctcaatcggaggaataacgtatttggggatggaattagctagggttttcgatggatcgaattcggtgacgaactctttactagttccgtcatcgacggcgttgttaccgtcggcggtgattgctgtgactttgggcttagatttagaagggagagagaacgagagcttcatgatgaatccttctcttctcttctctctcacacgaacaaaaaccgaaacgtcacggagacggtgagaatcgccggagattcggtgcttgtagtacataaatataaagcagatgggccttttaaattatttgtgaggaatgtttacaaatatatgggccgacctatataacacagttaggcccatattcagaaatggagttcggtcacaactcacaagaagataaaaaggatccgcttgttatccaaaccgggtcgaatataatcc

SEQ ID NO: 46916 - DNA, 701 bp, Arabidopsis thaliana landsberg
  unsure (1)..(701): unsure at all n locations
ttgcatgcttcattttattcttaggaatacataagaaagttgtatataagtgaagatattaattttagatattccttgctagtccatttgataggaggatgagttggatagaaaatgatggtaccaaagagcagaactcttgaggtgtcgtttaagtccatcttgaaaatcaacgtagaccaatccgtatctatatttgtaaccaaattcccactcaaaatcatccattaatgaccatatataatatcctctcacatctgctccttgactgtttcaatgttccatgaaagaaaaacacatcagtcatcaacattattaatttttttgtaaaactatgacagaagtctggatatttgaaattctttgtatatgaaattaatataattacctgactgcttctagaagagcagtgagatggagttggtgatatttgatctttgcctcgtcattgagtgctatgttcacggacaatgatttgtcattctcgctaggcattcctaattaaggaggtaaaatgccccccaaagtatgtaaatatcagaataagtagggccaaagtaataaaacacttgcaatcaaattgtttgaccaatatatccgatttacctacaaattaaagtttatcaattcctaaaaatataattctatgttttttttaataatcttttatttctaaaatacatatantatttggctttttt

SEQ ID NO: 46917 - DNA, 755 bp, Arabidopsis thaliana landsberg
tatcataataaaactttcaaaaaacaaacatttaccatacgcattccttatgtaatgtaactatattttcatgagaaacattatattttttttcttttcgtctcaacttcgttaaagttttcatcaaaaattttgtgtccaaaaagactaatgtatacaactattatattttcttacgatcaatctgttggccaaaataatagcggtctatgagaactactggccgttattccattttatatgacagatgcatcgtagccgtcaaatagctatcagccagaagttagatgctcctaatcattcaccatatgcatttgacttgactccacaaaaaccattgtgatttaacgattttaagatacatataatttagacaagaaaaaaaaaaaaaaagataacatataattaaaaattgtatctaatatattttcaatcttcaactaggttcttgacgtcggcacaaaaaaaagagtaaagaaggaaaacaaaattcctgactttattttatttaattaatctagcaacagaataaaaaataaaatataatcaggagttcttacttcttagcatgtgacattgagctgagttggttattacgacaggcgatcgaattttattagtactaatcattatttccactaaaactaatttgaagtccatgttattgtattgataaacaaaaataatgtctctgtagtttgattgatatttaatgacgttttagttcgactaaacaatagcgaaaagaagaaatt

SEQ ID NO: 46918 - DNA, 1150 bp, Arabidopsis thaliana landsberg
tagagaccaggccaggaggagttccgggtcgtgttctatggcaaagctttgaccttcccactaacacattacttcccgggatgaagattgggttgaacctaagaaccaagaaagaagtatcagttacgtcttggataactgaccaagtcccagtcccaggagcattcagactaggactagacccatcaggagctaaccagttactcgtctggcgccgcggggaaatctactggtccagtggaatcttgacgaacaatggaagctctcatttgaacttagaagtatccagacactacattgattatgaattcaagttcgattcaaataagtacatgaagtacttcagctactcaatcaagaaagctaatagttcggtcttttccagctggttcttggatactctaggccaaatcactgtaaccttttctctcagcagtaacaatagcagcacctggatttccgaaagcagtgaaccctgcaagacggatttaaagaacagttcagcaatctgcatcacggagaagccaacggcttgtaggaaagggtcagagtatttcgaacccagaagaggatacatgatggaaaataataccggttattatccattttactatgacgatagtttgagcgctggtcttagcgactgtcatggaacctgctggagaaactgttcttgcatagctttccaagcctttcctgatggatgccaatattgggaaaaaggatcaaagtttgttccttatgatagcttcaactccaatttagtaacttatgttcttgattctgtaaagagatgtgtggttgtaacttgaacgagcaattatgtaaccagactagtatcagtaaaggggtttattaagaaactaaagaatcaagcagttcaaagacatgcaccaacttcctctctttacaaattgattcaaccacagctccccaagatttgggccctggtatgagacctatcctcagaaatccaataagaacccgaaccccgatttctgtatacccggattcgcaaagccgaaccaccaattcattccaagtagcatggtgaggccaaattcctctctcagacatcacactcaagaacttcaccgctttctcgagctcaccattacaacacaacgcgttcaatatgatcctataacta

SEQ ID NO: 46919 - DNA, 518 bp, Arabidopsis thaliana landsberg
cttggggaaatcaaactgcgagcactataataacattcatgtgcacgataccaaaaatcaccaagagcaagcacgtctacaagaaaaagaaaaaacaatggaaagaagaagttagtaggctgatctgatcatccaaaatcctcaaaaacacatttcatggtacgatcaaaagctttaatatattaccagagaagaatttgatctttgtgtctttgatgcttttacgagatgggattttccttgggcagttgcagcgtaagagttatcgatgtgagtaccaatatcatctacacaaaaataggtcttacgtcttaggttttgaagacataagtgagagttttagcataacaagagttggaatcagttttacctatcatgtttccttgatcgtgcaccaacactgccaagtctttgaagatctcgtgcacctcgccaatttgctgctgaatttcttgtatcccttgctctctttcctcaataacagcctcattgaacgcaatctcattgtccaacagtac

SEQ ID NO: 46920 - DNA, 1472 bp, Arabidopsis thaliana landsberg
tgctcatgttatatcacagtgagttcagttttgcatgtgatctttcaataatctcaaaatggcctctacataaattgattagtggtttctatgttcattttcagataccttatgtgtggaatactcttgtggaaactgatgggtcaagttgatatcttcaacatgagtaccaaacatcttcagttctgtagattcatgaaaaatggtattgtaaaatacttcaaagaaaattcaatgtgtttacaatgaaatctctgataaaataacactgtttggttcttgttttcttgtgaaatatttctctcccaggctttcttttgctgatgagagtaattgcagtaacattctgtgtaactctctccgcgtcactagctgcacgagaaggatcaacttccatggcagctttccaagtttgcttgcaggtttggttagctacttcacttcttgcagacgggtacgccgtagctggccaggtttttagataatgatgtctctaacattgcatccttttacgattaagcgcgtggtttaaagttttaacaaatgtcttttcctttaggcaatactagcgagcgcgtttgccaaaaaagactacgaaagagcagcagctaccgcctctcgtgtactgcaggcacacacaatttatgcatttgtgtttgcgtttacattatgtttacgattttggatttatatgaagaaaatatacacagaaagtatacataataggtaattcaaaggcaaacaaacaatggaggcctatgtgtactttagcttataaagattcgattctagatcaatttaaagctaaagaactaaatcttgtgacagttgggattggttctcggttttgtacttgcggttatacttggagcaggattgcattttggagcaagagtgtttacaaaagacgataaagttttacacctaattagcataggacttccggtaactaatcatttcccattaaaccactaatcaggatcaatattattacgtaacattaatttggctaaaaatcatttcttgtttcctaaagtttgtggcagggacacaaccaattaatgccttagcgtttgtgttcgatggagttaactttggagcatccgatttcggttacgccgcagcttcattagtaatggtggctatagttagcatcttgtgtttgctcttcctctcatcgactcatggttttattggactttggtttggtctcaccatttacatgagtcttagagcagccgttggattctggcggtaaaactttgtgaaactctctgtttcttgtagtacaaatgtaaaaacttttccaactttcttataacagaatgtaaatgtgactgtaacaggattgggacaggaacaggaccttggtcttttcttaggagctgaagaaggaattttagagggaagagcatgttttaactgttcttaaacctttatttctaatgaggttgtgtaacgaaatatcaaaa

SEQ ID NO: 46921 - DNA, 332 bp, Arabidopsis thaliana landsberg
atttcaatgttaatgttttgactcctattaacggatatatctattgggcaggccttggtatatttcactctggtgtagaaggtaagctttaggcgctcgcttgtgttttcttgttcatatggttgaagtatccaaagatttgcatctttggtgtacttatagttactgctatagctaactctgaacatttggcgtttacagttcatggagtagagtatgcttttggtgcccatgattatgcaacgagtggtgtttttgaggttgaaccaaggctatgcccttgcctaaagctcaagaatatctaaatttatttgtaacctcaaatttaaacc

SEQ ID NO: 46922 - DNA, 1107 bp, Arabidopsis thaliana landsberg
  unsure (1)..(1107): unsure at all n locations
gaacgtcatagacaggagcgcgagcttgctgtagaccttcatgcataaaaaacagcgaatccgcagcttgtgtgaattatatgtcatgagctgataatgtactcccaaggtcttgaaagtagtttataagaggaacctgcagcccaggaggtttagccaaaaatgaataaatagctcaataaattttcgaatacttactctgtaaagaaagtgaacacaagcaagcatcaacaatctatgaaatcataattttttaaaatggaacgttgatctgaagtaaacaccttgaatttttacagagacactacagtcataaatttcttaaaatatgcagaaataacagaagtacatgataacattgataagcctacttggaatgtgaagttccatggaatttaagagacaaatctaaactttagtagacaagcaacgtaatccaaacaacaaaaacccatcaaggacaagatcacacaaaaggatcttccaattccattcaaagtctgtaaatcatcctacaaacatcaaaactatatccacgggaaatgtgtttaaaactaatagatcatgcaatcaacaaaaccaaaccctaatcttgcaacatatccaattccagtccaagaaagcttcaaactttcacttcgacccacagacccaaaacgttaatacttagcgagaaacagagaaagacaaacctgtttacaccacttggcgagggcattgaggcggagcatccgttgctgagtcttagcgacatacttaaggaggctaaccttcttctcagtatcagaaagctccgtcgacttagacttatccacaagttccttaaaagaaaggaacgattcctctgcggctcgaccaacaagagcagagaaatccaccgtctgttgcccnnnnnnnnnnnnnnnnnnnaaagaaacaaaatcgccaccacccgattcagaaacttaggagatctcacgattcgtaaaaaattagggtttttatcctccccttcccccacaccactaccccaaacgcacaaagcttcccttttccagcaacaaaatttaaatcggacaagagagacagagaaaaagggtttaaaattaagggggtgggtttactgtt

SEQ ID NO: 46923 - DNA, 734 bp, Arabidopsis thaliana landsberg
tgcattcttgcacgcccacaagactgtatgaaactgcaaatgttggaagcagggtcaaatctgataacttttttgcaactatgaacatctagaccctcctgtagaatagatgttgctacaatgatgttaacctacgaatacgaacaggttactcagaaataaagataacagtaagcaaataaaacaacagtttacagttttttgaccataccaagcctctccggaagtcttccacaatttcattttgcttcttccgagtttgattttgcagaccagagttatttcctgcaacgtacttggttttccagttattacagtttggaagaatctcagccaaaagggattccagaacgatggctgttatcaccctatccacaaaaatgatgcaccgtatgttctccaaggagctgtatcaataaaaattcagagaaatagaactggaaaacaacacagattttaaataaccattgtactccaatatgtattgatataagtaatgtccaacattcaaggtttatcatttcagatcgtcatatctaactccaatataataagcataaacaaaaatgtgtgcatgcaatccaaacctataaccaagaagagtctcaatgaggcagacagtttttaaagttaggagacctgcctccgcatttccatttatgtttgcaacactccaataaaaacctatttacacatgaaaagaacaaaagaggtgaggaaacataagaaatgaa

SEQ ID NO: 46924 - DNA, 362 bp, Arabidopsis thaliana landsberg
cttgaatctagaaaagagaaggaatatgaaaacatgaataatatatttgaataaatattctcaaacctaatacttttaattgcacaaatatggtttgaaaatgaactagtcacaagtttgaatttaaattagtatttaaatttgaatttgtgaaagaatggagaaaggagaaaataaaagaaaataaaagaaaaaggaaaaggaatactatacctggatgggccaacgaacctgaattcggcccatctctactccatgccgtccggcccagctcctggagatggcgccgacaggtgggccatgtctgtaagtcacgcgcgcgcctgtgcctgcttctggtcactgaccgtgggcccggttcg

SEQ ID NO: 46925 - DNA, 463 bp, Arabidopsis thaliana landsberg
ggctgtcttcttcttcttcttccccgacaaagccatgtcttctccttcactgcgattcgccaatacgcaacggtcttcacttcctcgacctatcagaagaagagaaacgcatcaagaccaagaaattcacattaagattcgcatcttccatgccggagtttgacgtggtaggctcttgtaacggcttgctctgtttgtctgattctctctacaacgattcactctacctttacaatccttttactacaaactccttagagcttcccgaatgttccaacaagtaccacgaccaagaacttgtcttcggttttggattccatgagatgacaaaggaatacaaagttttgaagatagtttacttcagaggtagtagtagtatcaataacggtatttacagaggtcgtggtagaatccagtacaagcaatcagaggttcagatcttaaccttgtcatcaaaaacaac

SEQ ID NO: 46926 - DNA, 573 bp, Arabidopsis thaliana landsberg
gaggatatcttacaaaattattttgctcaaattcactcgaattatcgacctatgagcatttgaaagggactaaaccagactcgacaacgcgttcgaccccggctggcaagcaagagcgcggccaaccatgcgcccgtgcaccccccacacgctgtcggccatgaccgtgtctaggttgcgcctataagaccaccctgaccctcggtctcactcctcgcgctcccgtgaatcctgcccaagctttgtccgtcggtgctcgcctgagcgttgcgagcttcgccgctcgccatcaccaccgaaccactactcgcgtggccagagcccatcttgagagggaactatttaaatggcttgatcttcaaaatattaagaaggcctttcagaagaaggatatgcaaatgcaattgcctaggtctccacgacgtttctagcaaaattataggtatgactttatattgcatattatttaccgttgtatattttgtagaaatttattcttattatagacaatgttttatttatttatatatatcaagttattattctataatttgatttgttgtgtgctaatat

SEQ ID NO: 46927 - DNA, 920 bp, Arabidopsis thaliana landsberg
ggaaaatatcatgaaaagaccatggctcctaattttgagcgagacaaccaaatcccaaataattattttcatttcaagatgttttaattgtatttaatttatgcattcaatttcttttgtctttctttttgatatataaatattttattacattttttctgctttcgtgttatggtgttatttaattaggtagggttcaaataatacgagtggagcgggcagagaggatattattatactaacaatttcaaatagaaaataaatgtaagttatgtagctgaatgaagaaatttcaaattttctgtcattaaatttggaacgaaccatcaacttctgtacttatttttatggtatacgaaaagaaagaaccaaattcagccttttttagttacgtcagccaaacgtattcagaagctacgcataaatagttttatagtacattagtgtatgtgaaatacaagattttacaaaaaaaagcatttggaaattgaaagatgtggaacggaaacataggacaagaggacacgaaggcgagaagcagagcaaactctgtttatcgagatttggtgggcaccactttattaagtcaaaccagaagaaaacactcttccttttccttatttccattatttttattttataggttacacaaaaacctattttcacttgtttacacgaaactctcaaaagcctgttactaatagaacttagaagtctaagctagaaatatactatattggcattattttgggcagtggatcagcttttcattgtgctgatataggagagagatatatatctatatatataagggacgaaacaagatttgggaattatgagaaggttcgattgccttttctatgactcgaagcgaatcttgtgttatgcacttttgattaagttattctacggtgaatgaa

SEQ ID NO: 46928 - DNA, 728 bp, Arabidopsis thaliana landsberg
ttataacataagaatatagataacaaaaactattattaaaaaccacttaccaaattttaaaaagaaaaacattattaaaaggctaaagaagaaacaaaacctcacacgtgtacgttaggaacatgaagtgcatctccttttgtcgtcatgaagtgcatctctaaacacagaaaatgtcaatatatgacaaataatcgatttttgcatttttagatagataatatcaagaggaaaaaaaaaacacattgatgtagaaagccttcctcaagttacagctacccgagaaagacactcccataggcggcaataacaagaagtatagttgagataaagttttatttctcgttaaacgacaaaggtttttaatatatagataacggcaacatattatgcttatttttagagtagatagagatatagctaattagagctccaacgaatttaaatgcggagacttggagtagttggtgtggtggtgcaagttataaacaacattatttgggaaattcgattcctctcccatgcgtatgattaagtggcctagttggtccaaactccaaaccatatgaccaatttcttttacaaaagttcgtcacgcaacccaatccgatatattttgactttttctgaggtgagaaattggagcttttgaattattagagatcatttctcgatctagtagtatttggagtgaaccatgatttgtagggaaattcctcgaatcttta

SEQ ID NO: 46929 - DNA, 1256 bp, Arabidopsis thaliana landsberg
ttgttgaagaagtcttatttgaaagactaatttacttttttttctgcaggttctgtgtgcagctgcatacttcccgagtccctcaagataacagcggtctgccacgatccagacgggcaaatcccggaggaagaaaacgaaaagagaagtcttagaagctcattcagctgtttatcatccatctccatgagacaaaaacagctttcaacatcatcattgttcctacaatcacctctcagaggctgcttacctccttggcaactcaaacgctcaaaatctaacagcagctccttgaaagaaaggtagacattccaacaaaaaccattgcggtctctcattcgtttccttagcaacacaaaccacgatttatccttcttctatctttgtaatggagttcgaaaacagatttcccgcgccatcgcttttcatttgattttaacaggctttcataagccattcttcatcttctttctgtttgtattgcttccaaatttgaatcttttctcattttcaaaatcatgtattgcatcaacgctgtttatatctaaactagctctcttagttcaaaccaccgaagaatcaaaacgaaacctttattcgataagcaaatactataattcaatcgaaaaacgaacgatgaacatcatcatcatgatcatcaacaagagatccagttcttatgagtactaacaatagcagaaaacaaacctgcagaagatatcacattaggagccgataacactcccttaccatcacgaatatcagcaatcgtcatcaaaccatcagcaagatcctgcaaaatagataaaaccttcaatgtcttcttctccttaatcatcttcatcttctcatcttcaccatcacaagctaatcctctcgaaagcgagatctcgatcgtcgaagcaacacaactctcttcatcattcaatttcctcaaatccctaatcttaatcgaaacacttcctacataaccaaccaattcagcccaagcactaatcttctgaagccatttcgaatgtttcgcatcgatcagtcctgatttcgttaaccatatgaattgttcaacgaaatagtataatccttcaccaccgtacgcgattatgagtaagacgagctcgtgatttgaatcccatcgtgaggatcttaatgcgttgatgtcttgtacgaattttccgagacggaaggctttgcgactgactccgacgcttgattcgaagcttttgagtcgggggattctctagagctgtagagaacgg

SEQ ID NO: 46930 - DNA, 619 bp, Arabidopsis thaliana landsberg
  unsure (1)..(619): unsure at all n locations
nnnnnnnnnnnnnnnnnnnnnnnnnnnnnnnnnnnnnnnnnnnnnnnnnnnnnnnnnnnnnnnnnnnnnnnnnnnnnnnnnnnnnnnnnnnnnnnnnnnnnnnnnnnnnnnnnnnnnnnnnnnnnnnnnnnnnnnnnnnnnnnnnnnnnnnnnnnnnnnnnnnnnnnnnnnnnnnnnnnnnnnnnnnnnnnnnnnnnnnnnnnnnnnnnnnnnnnnnnnnnnnnnnnnnnnnnnnnnnnnnnnnnnnnnnnnnnnnnnnnnnnnnnnnnnnnnnnnnnnnnnnnnnnnnnnnnnnnnnnnnnnnnnnnnnnnnnnnnnnnnnnnnnnnnnnnnnnnnnnnnnnnnnnnnnnnnnnnnnnnnnnnnnnnnnnnnnnnnnnnnnnnnnnnnnnnnnnnnnnnnnnnnnnnnnnnnnnnnnnnnnnnnnnnnnnnnnnnnnnnnnnnnnnnnnnnnnnnnnnnnnnnnnnnnnnnnnnnnnnnnnnnnnnnnnnnnnnnnnnnnnnnnnnnnnnnnnnnggtagtcggtaaattggtttaatctaattaataacgggcaaagaatactggccaccatttgagtattgatcagccaagcaaactgggaattttgttgtttttt

SEQ ID NO: 46931 - DNA, 203 bp, Arabidopsis thaliana landsberg
  unsure (1)..(203): unsure at all n locations
gcaaaacaacaagcaaaacgtagagtgatgcgtgttgtctacaaatagtgaaangtgggtgtgccactctgctgagccagcgcaaaggaaaaaaacaaagaaaaaaaaaaaataaaagacaaaaaaaaacaccataaaacaaaatgcaaaaaaaaaaaaaaaaaaaaacaaaatgaaaaaaaaagaaaatatgaaaaatgaag

SEQ ID NO: 46932 - DNA, 749 bp, Arabidopsis thaliana landsberg
ctactttgcgacgagatataaaaatggcaatttcacaagccgtcttggctactgtctaatcatcctaggtatatatttttttcttattctttttgtgttagtgacttagaatatatcttctcacgttaacgtataaaattcaaaatgcatgcatttacatgagacatcgtgaattctaacataacgataattattttgtagggaatatcatctcctttttcgtctgccttgccccaatgtaagtactctataactctttgtaatttcgtcttatataagtaaccttttaactcaagaatttttacgtgtttttatatattagaccgacgttcgttcgtatatacaagaggaaatcatctgaagggtatcagtcgatcccttacgtgatttctctgttcagcgcgatgctatggatgtactacgcaatgatcaagaaagatgctatgatgttgatcactatcaactcctttgcctttgtcgtacaaatcgtctacatctccttattcttcttctacgctcctaagaaggaaaaggtccttattctatatgaatatagcttattgtcttgtgtttacacacaagagttactacatctttaacggaaatttttgtttcaatatggcagactctaacggtgaagttcgtcctctttgtggatgttttgggtttcggcgcaatcttcgtgttgacatactttataattcatgccaataaacgtgttcaagttcttggaataccattttgtatgg

SEQ ID NO: 46933 - DNA, 913 bp, Arabidopsis thaliana landsberg
ggttttacatgataagtagttcttaaacactgatgtttaataaataaaccctacacacattcgttttaccttaatattcgattgtgtctttttggtcggaaagagaaatcatacggtaatggaggagaaatcaaagtatctaagtctcgtcggagccggagctcttatcggatccatctccaccgtcgctctccttaaacttctctccaggcaaaaccccttttttttatcatctctagattctcaatttcattgttacagaacttctaaatcctaagtagcttcgaaatagttgaaagctgactcgagcttttatccatggcaggagttcattgaagcagcttaatgaaaacccagaaactaatttcttaggtacttgtcattttgcaatgcaagtttttttttttttctcttgtgatgaaaaaaactagtgttctttgtttcttcataaaaatctgttttttgttttaattcctatgttcactgcaggaaatggtattggatctgaaacaataccagatactgtagcaaatggtcaagatcttttgaaagatgaaattgtttctgaacatttaaccaggtaccttttaattagcaatgaaattgttgtttctgaggacttggtgctatgttgatactaaatggttttatgttgatttatatctcttaaggaatatacagtttttcggtcttgaatcgcagcataaagtaactggatcatatgttgtggttattggacttggaggtgtagggagtcatgctgcgtctatgctcttgaggtcaggtgttgggaagcttcttcttgttgactttgatcaggtatcattggttacacaaatttaaggtctgttttagagaaatttgcatgatccacttatgttcttccaagacaactttgtttcccctttacata

SEQ ID NO: 46934 - DNA, 571 bp, Arabidopsis thaliana landsberg
gagatggcttagacatccttgccgggataaaaaggtggctttcattctcaaattggcgtaccaagcttcagtttaccacatctggcgagagagaaatattcggctccactctaataaatctttcccttaggcttagggaagaagttggtgacagtcacctctccaccagagaggaaatttattgaatagacaaacccaaatcagaaaatcaaaaatcctaatgtatatatacatttttagagatatttggatgaaaaaaccatttgtgtaataactattggcattaatgacaacttattgtttagcattaattaatctttttgtgcacatgttcagtacgaaatgtagattccggctctcagtgttctcttatataattcagagctcttcacttgacatattccacagtaagagtgagacaaaaagttaggttttgacatttttaaatgtcatcattaacatataaaggcttctctttaatcttggtggtgcatcaaaccttgtcgtcatggaaccaccaccttcgtctccttaggagacctcccattctacagttcttcacataacgatc

SEQ ID NO: 46935 - DNA, 692 bp, Arabidopsis thaliana landsberg
ctgagcgcggggctgtcgaatacccgtctgcaaatgctcctgcgcgggcagaacctgctgggctaccgccattacagcgatgacgtggtcaaggcgttcgtggccaaggccgccgtcaatggcatcgacgtgttccgtattttcgatgcgatgaacgacgtgcgtaacctgaaggtcgccatcgaagcggtgaaggccgccggcaagcacgcgcaaggcaccatcgcctacaccaccagcccggtgcacaccatcgacgcgttcgtggcccaggccaagcagatggaagccatgggttgcgactcggtggcgatcaaggacatggccggtctgctgaccccgtatgccactggcgagctggtgaaagcgctgaaaaccgagcaatcgttgccggtgttcatccactcccacgacaccgccggcctggccgcgatgtgccagctcaaggctattgaaaacggcgctgatcacatcgacaccgcgatctccagcttcgcctggggcaccagccatccgggcaccgagtcgatggtcgcggcccttagggcagtgagttcgacaccggcctggatctgaattgctccaggaaatcggcctgtactgctatgccgtgcgcaagaaataccatcagttcgaaagcgagttcaccgcggtggacacccgcgttcaggtcaaccaggtcccgggcggga

SEQ ID NO: 46936 - DNA, 428 bp, Arabidopsis thaliana landsberg
cagtgtgctctaaagtgaaaatagaaacaaaggctcgcccctgtgacaacaacgcggctggaccagaaacaaataaacacttgattcataaaccagatgaagcgtcattagaagccgtcggatgacatgcaggttgtattattagacgcaacacgtcctcaccattacttcatggataatgtcttccacaatcctttcccaatggatcacatctcctccaccatgctttgatcgatcctttagaacgttattttattgtatatataatcattagacagcttatcatatgtataatctgtggttctctgtatacttaggaacatatgagacatgttccaatttatgagcaagcgtttgatgttgtcgtgtgtagcctggcgtggaggtctatagttatatgaaattcctattcctatgatgaggacagt

SEQ ID NO: 46937 - DNA, 948 bp, Arabidopsis thaliana landsberg
ggactctcttagctaataatactactcctaaggcattttaccattgttccaaaaacaaaacttgaaaagttatgagcttatggagtaaacactcacggctttggagaatgtgacatatttgattcaagcctgcgtaaccagttaacgtattgatcctgctccttcttgtttaggtcacacaaaaggaaattagttaagccttcactgacccccttagatattaggtattgctccagtgcactgtgtagtttgggatctacttggctaaagaaacaaagaaaataacactggtcattgaaatcaaacatatgcagacacatgaacctctaatagtctacttctttttcaatatatatagaacaattactccagggaaagaacaatgggaagtgtacccaatgctttgaggtttggatgaagtaaaacagatatgattcaagtaacttaaacaaaatgttgagagattatcatttatgagcttacttcacctgaaaaaatggtctccataagtggaagaaggagcagaaacaaaagagcggataaagtaggcgctctcgatgtcgaaatgagaagatccagatcctgattcgtaaacccggcaatgaaactgcaagatagagctgagaccaggctttttgatacaaactttggcatgagcttccctaggaaacactaaatcatcttctagttctataggttctggttgcaataaagcagagaccacaaccttctcgcctgaatcaaactgtctcttcagaacaatatcttggctttccggtgaatcccaatccaatttgaaatctcctagagaaccggtctcaacgccctgtggggttcaagcacaaagccaaatcataaaggtagaatgttaggacttaaaatcctatggtttatgagatccaacatcaaattcaaattcgcccatctggtaaatcactctaatgttca

SEQ ID NO: 46938 - DNA, 360 bp, Arabidopsis thaliana landsberg
aaaaaccgtaacaggtatatatgttcatgagaagattgtcaacttcatggctccacgaccagcaaagattcctccaaacactgcggatttgcttaagaatctcttcggtctcaagaccagaaacgttcagtctgaagcttaatatcaaagaaaccacaattttgaaacgctgtaatagatcgtccctttttctgtggtgtgatgtaatactactattgacaccgtttctatcgaaagccatatgtgaaagcatcgagttaatttttgtcaaaatacaaatgaattttctgatgtcactacgtaacgaggattgggtgacacaagattctgatggatgtagtaagttttttaacagattta

SEQ ID NO: 46939 - DNA, 720 bp, Arabidopsis thaliana landsberg
taataactacacataagcagtaagggtattattgtcaatttagtccccaatcataaggcccattataaataacgaaagtctttattttctaactaatattttcattaatcgattctcaaagtcaagcaaaaaaaacgaaacaatggatgcgttctcttccttcttcgattctcaacctggtagcagaagctggagctatgattctcttaaaaacttccgtcagatttctccagccgttcagaatcatcttaaacgggtaagtttcttcgccgccgatgtctattcatatcacacaccaaaccgcgatgtctagattagagtcgatagattgagattcgtttcgttttcgtgctattgatcgctctatgtttctatatttcatctaatttctatgatttggtttccgttgaacgaatcgttgcgatcgtactttatctagggtttctaattgggtctttccatgatttagtttgttgatacttacttgattatgattctgtggagatctttcgttatactttactctgcttattattgttaagatcctcttgttcatttgtcatgttccatttgcagaagggaatgtgatttgtatactcactcatgttacaaatgctcattggttcttattatttgtggtggaatctttgtaggtttatttgaccttatgttgagctcttgtggcgtctgcctttggagcttacctacatgtgctctgga

SEQ ID NO: 46940 - DNA, 881 bp, Arabidopsis thaliana landsberg
aattcacgttcatggtccttgtgtgtccatatccctttaagggctaaggctataacacactgccataattctcactcttcttctttttactgcaactaagaaagaaatgaaagaggttatgttgtgtctctataatgtctcgtcgtttagaaatggaggtcataataaaaaaaagtattaatataaagataatattatttaaatactacaatagaagatgaaaaaaaatctgaattagtagatacatatgaagttgtaaacagaatttattgggatcaaaacctaattttcaccaaattatttacgaaattcaatcaaatttacactataaatagttatatattaattttatagaagtctcatgacacccctaaatttcgtaaataagctttgtttgcttttttgatggattatttacttagtaatttggttacatatagtcgcaaataaaggtttgactttgctccaccgttatctattaataggatcaactagttttatcatgtgtttgggtatgattgttacgagattaagacaaaaaaatatgactttacgtatacatacatcaagagttaatgttaaagcatttttaagtcatgaaatcagctacattgttcatgatttcttgtgttatcatgttatttgttttgggtcattttcaagggaataaatttaatcagcttgtgtttaattaattttaaacttttaactggttacttgtcgaaagctgaaaaattaattgcaaaaatattacacttgaatcgaagcaaaaaggaaagagatttctatcaaaaagcaagaaagaggtctatagctagagaatagtaaatgtctcattcactaaggggtgaagtggagaagacttcactacttggttttct

SEQ ID NO: 46941 - DNA, 100 bp, Arabidopsis thaliana landsberg
caagctaagagtaaatggttgggagtgacatactcaatatcatttgtaagaacaatgcgcgcacgtagacattgaaaagagtactcgaacatagtataga

SEQ ID NO: 46942 - DNA, 694 bp, Arabidopsis thaliana landsberg
ctccatatgcttattgccttggctagacaccaatgtttattgcccatattgtagaactgatatttgtaattaaatgttatatttttgatgtcatatttcgagatgtttttttatggcttatcttaggttttaggaatttaaacataaaatgactagcgcaatcaataaaattttaactaaatttagcctctttttataattctgaatttcaagctatggttgttttcgatatatttgaccagaattgtcatttcttcattttaaatatatgattacaaattgcagaatatgctagtatttttttttccaccataagtgaattatcttgggttgagcaaatagaaaatgtgtgttagatactttagatgtaggctggatcttgtaccagataacgaaaactggtttgcatggtattgcgacacgtatgtggaataacaaaacctttgtgtgtcggatcattctatcaaaatcaaaaagaagttgaaatatacgatacggtaaaacaaggtgcactagactaaagaactaaattttcgaaaagcagatgagaaatgagcccaataacttcaacaagaggtaacgtcctgccaccaccatctccttagtccaaacgtccacatgtacaacatttatttgcatatgggccaatgttttaaaaatatattaattttgaaaagcctaaagctgaaccgat

SEQ ID NO: 46943 - DNA, 778 bp, Arabidopsis thaliana landsberg
  unsure (1)..(778): unsure at all n locations
ttatcttcatggttccttattatataaccaagataatagttgtctagttgaaactgaaatagctcaaggatggagaatttatcgtctttcactttacttttcttttattcaactttctccaatgtataactacttcaatactcaataggaactaggttagggaaaatgtatgaaattttaattgtatatttgtatgtatgtttatttttctccaagattcagattatatcgcagtaacattttttgtaattgtgggcattggtcaaacacctagtactactgtcttatgtcagacttgaagaatctagagaatctaggaacagtagtcagactttgatgtttcgaaatatacaaatataaacagtaccgtacttaatcaacggtcatattataaattcatacaaataaaagacaacggggtattaaatactgaagattagagaacatttaaagtcttttatggatttatgattcagtgattcaaagactcacagtgcaatattgatgtatctaggaatttacactaagaaatcgacagtgattataaatagtactcagttgcttggacaaaactaaagatttataaagaaaaatccgacaaaaggcataattgggaattgaactcttttttgacaagaaactttggaatgaagttttgttggtgttcaagcataggtttttattataaatatgagtaattntgaatttactgcactgttctaggtttccgacctaaagggattatttgataaatctttaaacatttactattacatac

SEQ ID NO: 46944 - DNA, 1257 bp, Arabidopsis thaliana landsberg
tgaaggagaaggattttttctaccttaagtttgatctccaagctgttaagatttttaatagattccttcagctgggagatttttgaggttaattcattgctgctctcataattcatacgatcctgtattggtctgacctctccggacaagtaaggatctgcctgagacaataattcatattgtcagaacatcatactttatatgaagacaaacaacttaaataatctcatcaaatggaaagtaaaaaacggttctgagtaagagcctaaacaaccacaacaaggtgaaagcacggaagattagctcaagtaacataagttagaagcatatgaactgatttgcagaggataagctaaggtggaataacattttcgcctaatcaacagctttggccaaagagaaggaacagagtagctcaaagtctagttctaatccagaagcgatagtatcacattctaatcgttacctcaagtcaaagatcacaaactcatactttatatctcgtagtctagttctagtctacaagctaaagcatcacattctaagtttgtgttacacaaacacatactgtacatccacaatcttacccctaaaaacctcgaaatcttcacacgacccgcgcctcttatcgaaacaagtgcaccaacatccaatctctcaacctacaacatatagtaagcttcagaactcacacaatacctgactcattcaacaaacaacaacacaaaagatcgaaggaggcttacgttttcaataagtaccaagcaaccatatctagcagcaaaagaagcttctgttgcagtctcactaatcgaaataggatctagaatgaaatgaacaaacatattcttctttctcttcatagactgaaatcaaaatcaaaaccacaacaccaacattttcaccaccaacatgtaatcaatctcacggagtaaaatgtatcgaatccatacctcttcgagtaaagctaagtacctagcttcatataaatgcaaagttttactctccgttggtacaagaacctgtgtaagaatttctcaaatcaaaaatcagctaaggaaggttaaggtgagattcatggtgataacctcgctcatgctaaaaggaagaagaggaagatcgagagatttggcgacgatttttgaacggcgtgcgcgaatgttgaaacttccgggaattgaagtcgtcgggattcgcattcggtggatattttggttgggaagaaagaggaagagagtttgaggagattataagtga

SEQ ID NO: 46945 - DNA, 730 bp, Arabidopsis thaliana landsberg
aaagtaaagctaaaagtttggtgctataagaaacatccccaccttttttaacctttcaacaaaaccacctaatcactgcttattaagctctaataacttctttgacctcattttctaacaacataagtaatattcaagtgaaagagaagtgaatccatgttctctttcttctcaactattctcacccacctaagtgtaagctaatccaattactaatcaaaacaaaagatattattatagagaaacagtactcacacgtgtaggatgaatggtagtacaaagacccacatgagaaaatccaaagagagtccctaaaagaaaacaaagcttggaggcattaacgatgtgtacaattctaataaatcctaatatatctccattcatgagacccacaatgagtattattatttgtactatgaggatcaaatttcataaaggccaaaaactgatttaacttaaatgctcaaaagaggggtcaaactcttcttacaccttcaccgtttttaatgttatatggtttcatttctcccacacgtgctttgcttagctgttacttaccaagatggactccacaatcactgtaaaaaaaagggtgaagccattcatagaaacaatttagttctttacttttttcaccacagttgatactaatctctgatccgtcacattcctcaagaatagaagtaaatgcaaaaaataaaagcaaataaaatccagttgcgttaccttc

SEQ ID NO: 46946 - DNA, 702 bp, Arabidopsis thaliana landsberg
  unsure (1)..(702): unsure at all n locations
ttagctaagagttcgtttgcttactatgattcatcttgttgtctttgcctatgagacttagtgcgcgtgtattattgcttaagttcgacgttacccgaggatagctcactcgataattctaggaattttttacttagcgctgtgtgatccttgttgataaagtgttcttagaggatattgtataacactgaaactcttgaaacaattcagcttctaatctgtttatttgatgtttgttgatctgaaaaatgtgagatgtgtactaatcgtgactttgtctctgcttatgacccggcatggcactgcatcgtttcgaaccacacaccgtaaaaggaagaaacaaattcagggtttatctcaaaaatgtattttgtttaaaacgtatgacatttatgtttttggattatttgtgtgaaattgtttatcgcagatattcatgtccttgtggaccttgtcttgtcttcagaacaattttatggtcacacaaaccttagagataatacaagttttggtttatatttcgttaatgaaggaaacaattgtgtcaacaaaaagaagacgtttttagggaaagctatgtttctctctataccaatggataaatgagagagaagagaccttggctttcttcaaaanaaaaaatgaaaataatgacagtgatagaaactataaagtcanaatcaacatgtatttattaataaa

SEQ ID NO: 46947 - DNA, 1253 bp, Arabidopsis thaliana landsberg
gaactcagtctatctattttgatccctgtaaaatttacattgaccgcaaggaaaatgttttgattccacatttaaactttaatttactagtactgatctttgttctaatatgtcaactgtacatggtgtatttaaatataacaaccaaaatttcaaacagaaattggattaaaaggctttgaaaataatcattggattaataagtgtgttcaagtttgggtatttgtagggtctttgtttgaaaagtgtgtacccttgatacaaatcttcgctttcgttttgattcattaacagcattgaaaacttacaataattacgtacgagtttggtatgattccatctttacttttgataatggacccaattatcttagcagaattcaatttccaataaaattttgcgtcaataagtagacttaagatcacacgtggtgctgcactcatcgaacctatgatacattacagctgtatgggaaaaagtggtgaaaacaatgggcttaaaagttaaaacttagattaaaatcgatcatgtaaccaaaatgaaacttttcctttaagaaaatatattggttttgactaaaatcatctaaaatgaaacatcacttagaaataagaactagtataatagagagtgttttgagatcaaaccgattaaaattgtaaaataaaaaaaaatgttttctttttttaatgaaactcaaaggatataatgaaaatttatatggtcaagagatgaacttccactcaagttaatgaattaggtcacttttcttgcatcaaacaaaccttttttcattatgatttgatccacatatataacctttcggatggcttagggcacaacttactctaattcaagtatttgatggttcccacttcacttggttcacaaacatttacagttagtaatctatactcagatttaacttgttattcctaattacattttcctatctggcaaattaacaatatagataaactatttatctatcatcaaaaattgattgccagaagaaaaaaaggctaattaaaagaaacgtcaactttttgtttggtagttaaagttttgtgacttttgtctatagtatatctagtacggtctaattaacataatcataagataaaaacgatatacagaatttgaaatttgaccaatgtcatgctataaggaaaagtgtgttaagaaaaaaagtgaggttactagctaatatacgatttttgtccacaagcataaatagaggtaagcattaagtg

SEQ ID NO: 46948 - DNA, 735 bp, Arabidopsis thaliana landsberg
aataattcaaaaagcatgcgaacaacaagcctataaattagacaattacttaggcccattaacgacttttgaggccctaaaaggtaagaaatcaaggtgaaacaaggaaggaaattttgatcaagacaaaaatactaaaacacccatgtaaagagaagataattacatgaaactgccatgaacgtccataaaaagccattctagccatctgactattgaatctccgcccttccttccttatcactctctcaaaccttttttttaacacactctctgtgtctctctctcacaccgtttctccagtttcagcttttcttcgaaccactaaacaaactctcttataaactctttctcatcccttattctctttttagaattttcatatatttttcttctgttagctcactaaacttagctcccgctattcctctcactcggtaattattgaaaaaaatttgaatatctgttttccaagttcgtgttatatatatgtttcagtaaaccattttgttttggataagattttgaacgtttatatcgtatactttagttttagttttatgggttctttatgaggtttgagtcctacaaaattatacatttgaatgcatatttgacaatgagattattgcaattaaccaagttgaatttgttttcagatcttatttgtttatttcaataaaagaaaagaaaaaaagctctagaagaaatggctcccaagaacaaccgtggaaa

SEQ ID NO: 46949 - DNA, 636 bp, Arabidopsis thaliana landsberg
caacttaccgatctttggcccatgagttgcaccactttgaaagttattgaagcctagtaacatttgacctccttcaatgagctcgaactgatcctggccacgaggaactgactgcctatttgtatccttcgcggatttacggttcttcttctttttggaaggtccagctttcaaactaacatcactgcccctcgacgaaaactttttaatgaaaacagagacaacaacacctagaagcactaaaggggccaataactttactggtgaccattgtccaaacaaatatgtatatttctgcttatgttgctcttgtaactttcttgactctctggcttttccaaaaggcatgatgctgttttcgctctcgaagtgatttagggaaggggagggtagcattttcacattcattggctgatcatggagcaccctgataacaatttctgggccacgaacgtcaatttgtgatccacataacaatggcatataaattccagtttgaagtttaggaccgaggtcatagccagaattgaaaacaggatcacatagtaaagcagctctgaagtgagaaaccgtcaaattccaaacaagcatacccagtggttttactaaaatgctcaagtttggaatctgttcgcc

SEQ ID NO: 46950 - DNA, 586 bp, Arabidopsis thaliana landsberg
aagctttccctatttttacccattgaaactctcctttttaagaaactacttacgtgtggctcaagcattttcgacaacatgttgctgtaaaactcagcatctttcttgttatactctttcaccttctccttcaacttcttatattctatcttcacctccctgtgcatacccatgttggaaattagaatacatcgcaacgaaaaaaacaaaggaccaatagaaaattactcacttgttgtctggatcgatttcgagagctttcttgatatcaagctcagccagatcaagatccgccgtctccaagtaggcatgtgctctcctatacattgccttcacgttcctactatccatctccaacacctattcacattcgtttcattcactacttagtcgttcatctccaattgtaatatccaaaattactgaaactgaaatgttttgtttttacctttgtggacaattttgctgcttccttgtaatctttcagtttcagcttgcaagctgcatcattcaggttacaggcaatcttgagatcttttgatttctttttctcctcttcgtcgaaagttgagtcatattctatata

SEQ ID NO: 46951 - DNA, 675 bp, Arabidopsis thaliana landsberg
ttccacaaatgatcgatgctaatttggccagaagatgaccaaacgaagcatcccaacatcactgagttcaggaaaaatccgagaaaaaacaaagaagatggagaattgaagaagtagaactcaccggcgtgaaagggcgactaaagaaaagtcgtctctgtggaagcttggaataagataaaaatggtggaggagcgcgtcagagacgaagaacaggagaaagaaagaaaactttgttttattcttttttcatttctcttccttttgttttaaattcatttgaactttttttgtttttatcatattcgtgaagttcttatacttttctctatttcatacaatttgtctacaaagtttattttagttaatataaccctcgtgttcattaatcttttatttaatgtccaataaattgtatctcccagatccaatctaaaatcaatgaaatagttataacttgaattccattttctgaattttatagatcaaagattggtggtggatacagtggatattttcccatttaataagttagggaataataaagaaaccatcgaatattacaattacaaatttgatgcaacgtcaatttctttttatgccaagagaatatattgaaaattacgtttgcatttcaaaaggataaagtttattttaatcaaaagaaaaatgttc

SEQ ID NO: 46952 - DNA, 864 bp, Arabidopsis thaliana landsberg
ccgtttgggtggcattaagtcattaacgtcacattagatgcacttttctttgacgtttaaagcgacgtcgtttaggttactgctgtgttcgatgtggaatcccactcttacacgtggctcgttaagaaccctcgatcttcgaccgttcaaagttcaaaaaatttcaggtatgcgcagagaacgggaattgaaaaaaacaaagtaaaaagacgaagaagacgaagaagaagaaagtagcaagaaaatagtttccgttacacattctctgctttcggttttgcctttgcgaaaaccaaatccctaatcatctccaccatcttctcatcgatttgattttctccggcgaatcttccgtccgtcgtcgaccaccaccgccgcgttttctttctccgacgtgttccctctgttaagtcccttcttctctgtaagcgatcttttaatttctctcttgtttcctattctggatttgatttcaggtgactattatgttggattctcatgtattggttgttctagtttccatagatggatttctcaacaatctaacagttacgattactgattctcaagtaaattttcgattaggtgattagattgagaagaaagtgtgtttaatctacagatttagagtagttttgtagcgtttaggtctgataagtttctaaaattggtttcgattttctgtgtagaagatgatgggacctccgagaactccgttaagtaagatagataagtccaatccttatactccatgtggttccaaagttacagaggagaagattcttgtcactgttcggatgagaccattaaattggagggaacatgccaaatatgatctcattgcttgggaatgtcctgatgatg

SEQ ID NO: 46953 - DNA, 528 bp, Arabidopsis thaliana landsberg
taagttaagatctaaccaagtccggtccggttagagtttaattgttaagttaagatcgattggagtatatactaatacacgtctttgatactaaataagtgacaaactagtaacagtgttctacatttgattagtatgcaaaactaatttaacggaacaaagataattatttatttttagttcataaaatagctcctcctataacaacaactcgaagcgccatgactcgtgaggaagcaatcaatcacagatgctgaaacaacgtgcagtccttttgactagtttccaggaacgacactgaagcttgcggcaagtcctctgcacaagaatttcctttgatatataacacagatgatgatgatgtaaaacgacaacaatgcatgatgcatctgtgattataaaagagattactaacctctagaactacaaaggaagagagtatccacgaagaatagtcgaatccactccagattctcttaccaatgccactttttctgtccgagccacctttcaattttcataaaacac

SEQ ID NO: 46954 - DNA, 818 bp, Arabidopsis thaliana landsberg
tattagagtgttattatactctgtataaacagtaatagaatacaactataaatttagttctaataggagacaactcatattagttaggatactagttatatttagtttggccaaggccgctatcgtatgaacatttttttcttcgttagagacagagtacttatctgtaatttaatatatcggcatacaccaaagttttttctttatatttgttatttttttgcacagtttgcccaaagcattgattaaaaattcaccactataatgattgattgattcacttccagaatgtgtacgactattccttgctctgataggttcaataaccagagaagctatttctagctgaacaaaagatggaactcgagtctaataaagaaacaagcttgagaaaaaaaggctgagttggttgaatagctgcaatgaaaatgattgaaataacaaattttgtacaattttctcatttttcacctacatcattaaaagttttgtagactcaattcaaaaatcagcctgctaccattttttttgttgttttttttttgttgttattgcataagttaaaaattcaattgagaaatcgtcataagagtttggttctaaatttttaatttttaaaaactatatggtataataccttacattgattttaatttattctttctttatttttcatttttaataaaaaaaattacatatgtattatgaaattcaaaaagatcaattccaaccatcatacaataaagaaatcaagttgaaaatatcaaatctcttttctctagattgaatgtttcattattttgttgcacactcatgca

SEQ ID NO: 46955 - DNA, 960 bp, Arabidopsis thaliana landsberg
tgttattttggaaggtaaactgatgatgttcttgttagaataaacttactttttgcagaatcttgtaacttctggaatggatagatcaaagataacttgagaacaaccttctccattaatattcttgaatatataagaaataaatacagaactcgctaaatatagatttagaaattaaatatgatgaataagatttatgctagctaattatagtacattatcatcaactaattataactttattgcttcatcctgaactccctcttacttccagattctcaagatttttacacgattttgctagtctgatatgagtgaatgaagatttgaaacatcaataagataagcaaaatgagaagaaacaacaaaaaaaaacgtaagacaaatcaccataattccattagcagcttcacatgatttaacaaattatcataatttgtaaaagatagatgcaacatacctaatattcccggtattcctcatatgcctatcaagttatcattcatagggagatgtttcacatacttgataaccaaatcttttttcatcagccatcatgttagtatacacacgccaagaggtctattctgaacctatatcgttagtgagaaatggtgttaagcgtgtagagatgcaatggaaatgagtcttatttatagtggtgtgacaggttaacagggttttggggatggagaatattcaaaatcttgaccagcactgattgaatatctttgaaaatattcaaatcggcatattcagataacaaataaggataatatcaaattcgttacagtttatgtttagaaattgccatatattgtagtttggtttaatactgaattgatatgtttaaattttttgggaaccatatttatttctattacttttttgcatgttgacgaaggatataaaaggggattgaaaggaatctccaagaaattgacattcggaatatatgtg

SEQ ID NO: 46956 - DNA, 557 bp, Arabidopsis thaliana landsberg
catctactgtgagagacacttcagtgtagttgaaaatgaccactctgtttcttttctacaattgcatgaaagaaaagttaggaatatgttttgctaacaataaccatgaaaaacacaagacttacacaaatctattacttaccatggtacgacttctaactcgagtgcctggtgcgatgactatatcccaattgttttggtcaatgtattcatcgcagtcccttcggtatagtcctgtgtgtaactctggcacatgttgttctcccccaccagaaaaatcttcaaagtttatcattaatatctcgatctcaactatagtaagaaatctaactctggagatttgtaaaacttgatttactggttgacctcctgtcatgtgattggtttcgtaattaaaagattgtaaacagaagataataatcaaaagaaaatactggttgaccttctgtttacattcaataaatgtaatctatgcaaaatatcttcaaagtttatcaagataatctcgtaacataatcaatcaacatcacatagaaatttactcgtaattgcaatga

SEQ ID NO: 46957 - DNA, 343 bp, Arabidopsis thaliana landsberg
aagatactgaaacttggtcaatatttttgacggttccggatcgtaattaaaatttactcggttccattgaatcaggcatgggtgatgaactttccatattatcttccttttgcaaaaccgacattgtagtttccttttttcattatttccattttcttttaaagggttttcctttttgcttctgttatataaaagacgacaaaacgaaacgatacaacaaaaaacaacaacaatacacgtaaacgtgatcaaagtggtcaaaaaggagacaagataaattcgatcgacaatcagatattcgaaaatgatcaatcaaatggagaagatttgtttttctgaagac

SEQ ID NO: 46958 - DNA, 1154 bp, Arabidopsis thaliana landsberg
cataattggagcggtgtcactctgtacttatctgtgtttctcttttttagccccaatccgggagcatttgtgattttttctgttgatttggttccctaggttgttctccctccaatgtatggtcatgattaatatcgagtccaaacttgtttcaggtattttctgcttttggatttgtgcataaaattgccacatttgagaaagctgctggtttccaggtgagatgttgagattggtattgactgtcttgtatctatggagatgaatgaagtgatattaatcttattttttgctttcctaacctgccaggcactagttcaatttactgatgtggagactgcatccgcggcaaggagtgcgttggatggcagaagtatacccaggtatctgctttccgcacatgttggttcgtgcagtttgcgaatgtcttattcagctcatactgatctcaacatcaagtttcagtcccaccggagcaggtagagtttctgcatatgctgccagtaatgttgaacaccttatgttagaatagttgattcatatgtttgattcgttggtgtactcagagattacacaaatccataccttccagtgaatcagaccgcaatggatgggtctatgcaggtatcattttcgtcccctgcatttctctgcacttttatctatcgctttccaccaatatttacctttctatgacattgtcttcagcctgctttaggtgctgacggcaagaaagttgaatctcagagcaacgtccttctcggtttgattgagaatatgcagtatgctgtcactgtggatgttcttcacacggtaaggaacaacagtcatgcacatttctgcttctaagcattcttagtctctcaaaaataacatcctttgcttctcataggtgttttctgcatatggaactgtccagaagattgctatatttgagaagaatggttcaacgcaagcattaattcaatactctggtacatccgactgctgatctgcactaatgtttgattgtgaccgaatcaacgttttataattctgaacatttatttgttactgtacaatcatcttcagtttcgtgctttctatttcgtctctgtagatatacaacatgagcaatgggcaaagaagcactggaaggacactgcatttatgac

SEQ ID NO: 46959 - DNA, 901 bp, Arabidopsis thaliana landsberg
  unsure (1)..(901): unsure at all n locations
tgcacttgtgttgcaagaacggtaatgttatagaggccctgtaattgttagtcgtcatgagcaattgtgggctgaagcttgatcttgtgtcatacaatgttttgattactggactttgcgccaaaggtgatatggcacttgcatttgaactctatgaagagatgaaaggagatggatttttagccaatgcgactacatacaaagctctcatcagggggttacttgcccgggaaacagcattctccggggctgatattatcttgaaagatttacttgcaagaggattcataacatctatgagcttgtcacaagattcacacagaaccttgaaaatggccatggagaagctgaaggccttgcaaagtaacaagaaggattaacatcagaacgagctttaagagtaatcatatgatcaacttccgtacgcaaattagtattaacgcttattacaggcatctgtttctctgtagcacggttcgttctgaatcctaatgtttgttactctctctgagatccttacaaatccttatttatagtgttttctgttttctagatgatattgcagtttgtcaccgtgaagagctggatttgcaaagtaatgttctctcgaagaaccagctaaagctctttgaactttgtctgattcacagtatgcatcttactcattctctctctgattgacaataaattatgcatcatagcgatgattattttactttcttgatgtgagtgccagtcagttccagaagcttaagcttgtactgttatacagaacaagacaagcaagacagtgaaggcgcaaccttactggctcctttctctgacacatacaactcanaaactacaccaaaggagagtttgattgaatctcttaaacttccaggtgggtttataaacgctg

SEQ ID NO: 46960 - DNA, 1959 bp, Arabidopsis thaliana landsberg
agatacaatcgagatatcatcggatgcgccagtcttaaacgtttttttgtcacacggcatatctcagatcagatcaagggactagaattggtacaatggtagattttgttcataaagttagagttggtacacattaagagcccacttgtctgtagatatggtaaaagattccttggtccgaaagattcgttgattcttgaatctttggtgcttgaagaagtttaattcaagtagctatctttctcctaccaagaacgtggatgtgtctaatcctcttgaataaaacttatatttaaagaaaaataatatcaaaatcatctagaattcatatctcatttccgtgcaaaatgttaattttgggaaaatatctttttcaaaatgggaccttattaatgattgatttattattgtcctttgcctgataattatattgtctatggcttgtgttgttgaataaagatcttcgtcttatgtatgtccgaatcatcttcctctactcgtaaccatacgttgattcatataatcttcataatgaaagatttttctgaaaatgcatgaaccgggacaaaattttctatatcataacaaaaaaaagtgggcaaaatgaatagacaatcgtttgaaacttagatattctactatattctacttgaaacatacatatcagtcactttcagcttataattttattttatttttataaacttttctcttcttaaaagatctagaagcaaaaaaaagagctaaaatcatttggcttttcttttggggacctaatatttgagatcttttgattacaatacagcttgagacagcaaagacggtctcctgcaattaagacacttgtatttagatttttcacgtgtctatccattgttcactcatatactatagtctaaaaataaatatctccttttaacgccttcatatttctaaatctaccccaccactttcaaatagtgcactgagaccctctcttttttttttgataagaaatcttcctaaaattaccactatttattattttactaatataaatgatattttccaacaacgacttatctagaaatccaaatgattcaactaattttatttagtcagaaattataaataatcacattttccgatgacaaataaaaatcaaagaagttgacaacaacaacaaaaaatccaaagagaaaacgtatgagttgcttaaaccataaacctcaagctcaaaattttatcaaccttataaagtttcgttttctcgagattttgaatcttttcagctaaaaaagatcacagctttttgcgttttctggatgagtttgagataagagaagatgaagattcagtgtaacgtttgtgaggcggcggaagcgacggttctatgttgcgccgacgaggctgctctttgttgggcttgcgatgagaaaattcacgccgctaataaactcgccggaaaacatcagagagtccctctctctgcctctgcctcttccatacccaaatgtgacatttgtcaggtctcatcatctctttgactttttctctcgatttacaaaatctttgatctgatttcagattacccttgactgaaattctcaatatttagagaaaagtttgaatctttttaggattagagaggccataaaccagtttttttagttctgattctgttagtgtgttttttctcaaatttgggatttttgtgtgtacaggaagcatctggattcttcttttgtctgcaagatagagctttgctatgtaggaaatgtgatgttgcaatccacactgtgaatcctcatgtttcagctcaccagagatttcttctcactggaatcaaagttggtcttgaatctatagacactggtccttctactaaatcctcacctaccaatgatgataaaaccatggagaccaaaccttttgttcaatctatacctgagcctcaaaagatggccttcgatcatcatc

SEQ ID NO: 46961 - DNA, 795 bp, Arabidopsis thaliana landsberg
ggttttgtctggaccatagaagtgagggaagctattcacttcatccacagcttcatatatcaatccatctccaagctgccaaataaagcacatcaaacaaaaacaaaaatgtcaatctcttcttagcactaaaatgtatccaaaacatcaacgtagcataacgattcaaatgacaattttgtaagaactttacatcaatgtccatgaccatcctaagatcatggttctgctacttagattgtgtttatccacaattgcagcttggtaagaaaaatgtttgaaacccattttgttttcaagtgtacaaaataacactaaactttagcacaaaccacacataaccaactctagcatcaatcaacatcactgagtccactcacactatgactaggcaagcttaagaagtttctcgccttcacctcatacccactttagctaactgctcctctacttaaacatggagctaatcacgcaataaactaacattcaccaaatcaaccactcaccaaactagaggatccctaacacaaaaatgatcataaattttctatccacatatgtttcaagttaaaggtaaaagtcaaccttcttaggatcgacttgaagaaggtaaagatcctccttcacatccacgaaaaagttcttcaatgtcaattgtacctagaaatcagagaatagatttcatcacaaaagcagtaaaaatctacataaaagtaatgatttttcacaagttcaaccccaaattgcctaaaaaaatgagaaaatttttgagaaatctttaatacccaaatgaaa

SEQ ID NO: 46962 - DNA, 896 bp, Arabidopsis thaliana landsberg
aggaggtggttcctaccttcttttttactagctagtagtatgttttggttgtttacaagtaaattattttattcaagtataacataacaattaccatgttcaatgaacctagcatgttctgtaagataattttgatgagactttaaagttgaagttacaaattgagtagagcaaataggaaaaaaaaattgaattgtcgaatttgattatacctactcttgttgtcatttcgtgatattgaagaatatttctaggtggtacatttattcaaataaaacaaatactaaaaattaatacttgaattcaacatcataaaaagtagagctcagatattaaaatgaaaattcctaattgcaaaaccatcttaaaatagaaaacataagatagattcaaaaatatttctgtctttttgttgatgtgaaactttacaaacttcaacacataattacatcctttatacaagtaaaggctagattagtaattaattaatttctaatgtcccttatgtaatcactatatataacgtacattctcaacctgataatatcactgagcctcacatctcaacaatgtatacgagtatatttttcatcttttcccttctttctgtgtcagaagcgcttgtgagaatcccgttgcagatagatcatgccttgtcaacaaacaatgatggagttcagttgaagaacgtaaaggactttctgtactatgggaagatccaaattggcaatccaggccaaactttcactgttgtgtttgataccggaagttcttccatttgggtcccgtcagaaaattggctggccaaaactgaaaaccctcgcaatcgttacatatccagagcctcaagaacctttaaagaaaatgggaagttttcgactgtgttattatagttt

SEQ ID NO: 46963 - DNA, 1027 bp, Arabidopsis thaliana landsberg
  unsure (1)..(1027): unsure at all n locations
tggaagtgatagttaaagtttataaatagaaacaaacaaatatatgaacataacataagaaaatggcgtagaacttattgttggtttctcaactttcaaccaaatattgaagtaacttgcacaaacctgtgtcttagcatggatccaagaatcaccccaaatgtaaactccgtgattgcgtaccaacactgctgttgcttttggataggcttctatctgcaaatgagagtgaaatatgtcaaaactaattaaaaccattattttgttgcatatattcaattcaagcttcctcagaacaattagacttacagctttggtaagtgaatctgttagttcattctcatatgctgtgttctctatgattgggacaacaagtttttcatannnnnnnnnnnnnnnnntcccttttatcatctccatgtgagttatctatgaaatgtcggacaggaagaaacattaaaatgcaaagtcctaactctactggggaacctggaattgtctaccaaataagcattacagcttacacggaattctttggcttgcggattcagcatcgtcacaagacaagattccatgccatgactgtgaataacagctccagcatttcgcatctcatatgcctgcaccacaacaaggttttgctatgaaacttattgataacgtcactatctcaatgttattagagattggacatctataaaatgagaagggaaatcatacaaacaaagcaagtcaatttggcattaaaacaacccacatacaacttgttgaaacacaactcactgaaggaaaaagagattgtcttaacatacatgcaaatcatatataagtttacacattacaagcaatgatcatgcaacctcactgatcaactgaacccaggaaagatatatttgatagtctaaggtggttctttaataagtaaagagaagatacaaccaaaactccattttcaagagtggttgtgtaaacatcaataccgctctaaataataatttcatttctcttgagcaccatttgtagtttt

SEQ ID NO: 46964 - DNA, 748 bp, Arabidopsis thaliana landsberg
cctgatatagatattccttcttcacagcctccaacaccggttttttgacttcccaacatccatataacgctgccactggattcatatggatcatattcatataacgcttaacattctgcaaacttgaaactttagtcagatagcattataacatatctaccatccttattggaaccagaagcgttctacaaccactttgtgatttttacatcggaattgttgtacacgtaaacttttttgtgttatgaaaaatgtatttaaaagttgaatgaacatatttatatagttaggcccacttgtgtgaattcagattttcaaggctcaaaagaatatttttgttttagagaaggttgagtccatcatcataacccatatgttgcctgtcatcatatttttctttcgacctttttctcctcgagatttcaaaagataatcactattaagaaacaaaatttttgactgcggttactaagtgacaaaccaatgaaataaagacacgtcagcttctgtcaaaataagaaagataaactaaaaaaacgacggtcacacacaggttctttctttttggttatattaaaatgtttttgtttgagaagacaaaaaaaaaaaaagtgggggaagagaacccaccattgaaattgggggaagaagagaagagaggctaacacaaaaaaaaaaaaacccttctttttggttggcttactcgtgcccttgacggcttactttgccggaaatctgaattatcctt

SEQ ID NO: 46965 - DNA, 451 bp, Arabidopsis thaliana landsberg
tcaagtggtagttacaccatactctattaatcttaattttgacagattagttattagttaatgtggtttgtggaattcaataactgcgattaaaaacaaatgacgaaaaagggaaagaagttgagcatgtggttcacgacggtctcgagagcacgtgtcgctgtcttaacggacacttgctcacttctcgatcactgttgcctttaccagaccactgtacgtgtttgcttcttggtcacccaaatttctgcttacttattttttctcatgcttattctttttttaattttctgcttctgctcatccaagtcctctaaatgatgtttttttttttttttgacaattcatgtcctctaaatgaattttcaattcacttaaatagaccacctacgaaatataaccacatcaaaatactataattaagaaccctggtccttatatagatgttgct

SEQ ID NO: 46966 - DNA, 459 bp, Arabidopsis thaliana landsberg
agaagtgttgtataaagtatgacactagggtgtttactattttctggcgatatcaatatcttgtgaaggaggactctaggtacgactatattacctgtcatgataacagcctcagtacttgtactgcacattgaagttatttgcaggcatcagccattcattaaacctactctggcatctaggttttttagcaacattacaggacaaccgactgtcaaccttatatcatgacttggtaaaccaccatcctttagactgtacaagagttctgatcttaacactggattattgataccctgaatgtaagaaggaacaacatacccagaaattaggtataaaggctcatcaactactcatactatcacactttgattagcttcatgtgacgccgaaagcctaaaaacatataatcttggtagaatactaacctttacttgatcaagcatatagatgcttgat

SEQ ID NO: 46967 - DNA, 467 bp, Arabidopsis thaliana landsberg
gcatgtattgaaggattctatcaatcacaatggtaaaccttagatcatgggctctgaccagggatgtcaagataccatctccgtatggacgcaatatctggcacatgagggaataaagatctgcatggatggcaaaggtcgggcgcttgacaatgtttggatagaacgtttttggacatcgctcaagtaccactacatttacctcaatccacccaatgacagaatcgaattggaggaaggtgtgcaacgacatatactttactataacttcaaaacccatcatacaaccggaaaggcgcccaatcaaatgtaccaggatccaatcaaaacagcagcatgaaacgctttcttaaccacccaattattaacttagatcactgactttttggtctcaaaaagggggagcgttataagggcacaaaagtttttagcattcatagtatgatcacagacttacataccagaac

SEQ ID NO: 46968 - DNA, 1115 bp, Arabidopsis thaliana landsberg
taatgattacatttttggatcatattcagattttccaagagctttgtggcttaagattttcgggtctcttagtgggaatcgtcttaaagattatatcttttggagagactgaaccttaaaacttgttccagattttatgctcctggttcttgtagttaagaataagttttaaggaaagtaaaatcaccttaatgcctgaatagctgtgacccagcttccttcgctactcgggatgagaccaagattgactctgtcagctactccctgagaatcaaaagatttgaaacgcaaaatctattacttcagcgatttactcgatccaacagttataaaaagaaccatttgcatagaattaaatagacggtgagccgattggaatatcatcaaccgtacttttggtgcggtgatccggttatccccttcaagaatgatacaacgctcagaaacagaatttgcttcaacattacgcccaagagcttcaatagcatggggattccactcacaagcatatactagctttgctttggccctgtaaatgttaatgaagaatgcattgtagttgcatgcgatctaataaagtattgacttttgattgtataaaaccactttctcttctggtttattcaataatggcatatacctcacaagaaatgggagaacaaaatatccaattccagcaaacaggtccacgacaacttcattttcacaggccatgttacccatacgaagcttttctgagagattaccccatgagagcatacacttcgtagcatcgaaagagtacaagatcccattttcacggtgattaacccatccattgtctcccacaagaatctccaatgtgctatcccttgtaccattaggttcaactcgtccctgaaaaagacacaaaatcgatggtataagtcatgctgctaaggagatgcaattgggtaagacaacggtttgtaaagttctcagcattctcacagcttataataaatcaatattgtaggttttgagtggctttaagatgaaaagatgtaaacgtttgcacttatagaatcatggtgtaaacttctaaaagaaacatacttggcgtgcaaggcggttggcactaagcgataaacaaacag

SEQ ID NO: 46969 - DNA, 1109 bp, Arabidopsis thaliana landsberg
tgatagtttgtagaatatagtacaagtaccaagatcacactaatattttaaataatctgtaactcttaaaaatgccagtatctcagataagacaaagtccaatttcttgcatgtgccatagagataagaccatggttacttgaatatagacttaagtaaacattaactagaggtaaaagtcatgtctctttaagttcatcaacagcataagatctaaactagtgtctgaaataagcaaagttcaacaaagacactcatcaaacaggtgtgttaaaaaggctaatttggaatcaagaagggtaaactagaaatccttgtaccaccaataaatcccaaaaacacaataaccatctctccttctatgcattatcgattattatgactaagtaaagactaactagagttaaatgtcctgttttttttcaaagttcatctacagtatcacaaaaatgagacaattacaaactcagacactcactctcagtgtgttaaagctaatttggaatcaaaaacaaggctttcttctgtgatcctactaaaaactgcagctttttagaaatgtcgtctccaagcaaagcaaaaccctaattttgattcctgaatcgacttatgtcataaacatgaaaatggaaaatgaacaaaatatcaagttttgttcttcttaccaatgttctcctccgccaaacacggcgtccattatcatctctctgaatcccacaagaaacctgaaaaaatcaaccacagtcactcaaaactctccccaaaaacccacaaattcgtttagatatcaaccattcaaaacctgagactgaaatgtgcatcgcaaattcctacttctcgtatcaataatctgaatatacaataatcgaaaatgagaaatcacattgacatcaaaggatgattatgagagaatcaaaggagggatttttacaggttaaatcgaagatggagaagaacaggtgaaggaagccattgatacacagtgaatagatagaaccggatcctattgtatatgtaagcttctgccgttcggtttaatggtttatctttggtcgtgttcgtatttggacaaatcatccctaaaccgaccgggcattttttttctcgca

SEQ ID NO: 46970 - DNA, 648 bp, Arabidopsis thaliana landsberg
gagcggaaatggtaaaatacctcacatgaacgcatttcagtacaaagtgataaagcatttggagataggatacatgtagtttcgaagttaaaagttccaaatgcaataaccctgtaggtgaccatatgacataaccaaaaaccaccaaactactaaaggttaacaaagaatgaccaaattgaagtaccataggagcaaccactacagatgctttgacaatcagtccatggaggtgtgactttgtccaagtgtccccactttaaaagtcccgagagtcgagctgctagccgttacagtcaccggtgatgctttaagctgcatgatccacaccctcttaaaactcatctaactctgagaacaacaaatctcacatatcttccattttttctgtatttccaacaccaaatcatcatctgatcaacttggttactttctgtttctctactagactggtcaggtcattgcagaatcatgtgtccgtagaagactgcattttatttacgaaattgaacttatgatacaatatctcagcttgccgcaaagcagtaattttcgaatctcaccattcccatttatgtgtgtataacaaaggtagatagagaagaaacccatacataaactgatcaatgggaaaattcctctttaaga

SEQ ID NO: 46971 - DNA, 892 bp, Arabidopsis thaliana landsberg
aatttggtgcctgttgttgttgttgatatatggatgcattttgaatagatacatggtccaacaggcgaacaaattcatgacttcagggagcagataagcgcaaagcatgattttgttgtccaaaagaaaggggtttacagattctgtttcacaaacaagtctccttatcacgaaaccattgacttcgatgtccagcttggtcactttgcatactacgatcaacacgcaaaggacggtaaggattatctgtttagttttgtatcagtttcgtttgctgatgaggtatttagctgaagatggtttttgtgcagagcatttcactcccttgatggagcaaatatcaaagttagaggaggctctttacaacatccaatttgaacaacattggttagaagctcagaccgatcgtcaagccatcggtaacattttttcctctaaaaaccacatttgttgttctcacttcaatattgagtgatggtttgaatatggttgttccttgtgcagtgaacgagaacatgagcaaaagagcagtacacaaagctttgttcgagtcgtttgcactgattggggcaagttttctccaagtttatcttctgcgtcgcttgtttgaacgcaaactcggcatgtctcgtgtctaaaagtatcgagtttattacgactttgaacttattttgccttaaaatgtaccagggaatctttacttaaaacctttttacagacagatcgtagttcattggaagatttgctttctcccatgttcaagaactaatcctctcgtgatgataattcttttttttctctatattaacagacaacttttccacaggctaggttttcatttcaatagagaaaatagcgattccttaaaaccttttttccctaaaacaaagag

SEQ ID NO: 46972 - DNA, 964 bp, Arabidopsis thaliana landsberg
agccagatcctataacttaactagataatgtaattataaaattgtcgtattaggtacttgcccttactagaatagtttggtaagagtacccataataattataaacttataattgataatacatgttgacaaaaaaaatatgattatacatgttttgaaaagaaaaaaaaacacatactatttgctccggttgacatgttcttttttttttcttatgacaaattaattagtgattcattttaacatgtaatatacttaaaaaaaacaattacatttatgcaaaaaaaagtgcatacattttaatcatgttatttatacgatacactatatttaatcatatcaaattaacattattatgcaaacttgcaaagtgcatatacttttcattcaagtcaaattcagcaataggaaaaattgttactcatgaaccttttgcttagcattattaggtcttttcgtagcagcaactttaaaactgattcttgtagactatcatttttaatgcttcgacaaaatttcgacgaatattttcgacaatacttttttaaataattttcaataaattttggttcacgagcaaataattccacaaaattgatttttgtcataaatcatcggaatatgctatttctaacaaatttttcaccaataccgttatcggaaattataatatttatcgtagtaaatcaaataaaaatacaatttcaaacgcaaaaaaattatgacaagcaattttttattgtgctaatgacatactttcagattttaactctttgctatacattttttctttctaattcaacttaaatagttaaattgtaatacctagtacatcacttttatccacgaattgaatatttgtagaacatatgtcaaccttaatttttttttggtctcaactgcttctgccacaaaagcatataaagactgaatcttcgtgactaaactataaaattaactatta

SEQ ID NO: 46973 - DNA, 571 bp, Arabidopsis thaliana landsberg
ggctgatgcaatgaggatttgccggatttgctagatcgacattttgcttagtcaataataaagccattgatattgagctttttccaacccaaatctagttatcgcttaggtgctccctatcgtttcgatgccacaggcttagcttgaaagtggtttctcgttagccttcatccaacctttgtcttcgcactcactctttgttgtcttacctaagctaacaaagccccatttgtggatgctaacctggtcgatcaagtgtcattcttgttcctgatgtttatcaagatggttagctttcgcttcttgtcttcaaatttccgaaactgattgagattagattcttttataaggattttataggcgctccattatgcatcaattgttttcgccgcatcaagaagtgttttatgaggttcattttttggcgtatacggactatattatgaagtcttgtgtttttggtttcgagagatcatctttcatcgtgattagatacaaaaaatgttatcgataagttagccggcagtagcattggataatctcattcgctgatttagtttttcaaaagaaa

SEQ ID NO: 46974 - DNA, 698 bp, Arabidopsis thaliana landsberg
cagatagactataagtaactaattttgtcaaaatttcttctactttctagttacatttcgtatcttccacttgctcacatttacgaacgagctaatcagatcctaacagtgtactttggagttgctgttggattctaccaaggggttagaaactgaaccttctccttttaggttgcattaagtaaccatcatagacctatacacctgtgatctggtctttgcttatactcttccttcactctcaaaccattttctattgatttgattggacgaaccacttgcaattttttctgcaggacaatatgaaactactggatgatttggctgctctgagacctactgtatttagcagtgtccctcgattatacaatagaatatatgctgggtaatataatggctttggtttgttgatatgcgctctctgctgattttgagaatccactgaattaatgtaaaattcttgttcccagtatcattaatgcagtaaaaacctctggtggtctgaaagagagactcttcaatgctgcctataatgcaaagaagcaggctctcttgaatggtatgtcctgtcatacttatttacattaaaatcagtctatgcaattctgtagctttattttgtaatttctgacacagataaggactttgattactgtcgagttctaagagatgataaaaagtaaaagatcctttataca

SEQ ID NO: 46975 - DNA, 1011 bp, Arabidopsis thaliana landsberg
  unsure (1)..(1011): unsure at all n locations
aagtaatgccttaaacactcgcctataagaagcatcatcacattcggaaaatgttgtcttcagcatggccaaaatgacttggacaacctaacgtggaaaaagttgatagctgttatgtttagtagatggagcttattgtccgaaacaaataaagctacaataaccatgcggatgaattgtcaatgtcaaaacattgagatacttagtgatcatgcaacagtttaacacatgagatatttctgaggcaatctacctttttcctgtagaaagcaacaccatgaacgttaaatggtatttttctctggcggaatgcattttgaaacactttacctgacacctgaatatcagtacattcatggtttaccaacacataagtaaatatgttaaaatcttaaacattctaacagcatgtcatcaaggaaaagaaaaggactgacctgcctcctataaagaatagcaatatctccatgggaacaacatggtgttgagccatcattagtgatttcaattattttgtcaatgacatatgcacactgtgcttcctcattatggcattccttgactgtaatctaaactggacaaaacacgaaaaagttagtgctttagtgattaaatgatgcgatttctcatagtgaaaaattcaacttgccttcgatccttgggagttttcagacgaaatgctttttgattggcaccgcttcgtattgttttttatgatagaagaggcggcttccacaatatggcgggaggagcgatagttttttataagcctgacctaaatcagaagcagtaagataaatgttatgcattcacaattcaatgggagcttttggttcctcaagctaattaatcatatgtggtataatctttgagttagcctcaaaaagccaaacctctttgtagtttgggaaatctcggcgaaatgaatcanatcctgaactgtctgccccgttaaaaccgaagatggactgcaagaaaatatacatcatactttacttcgatattcaactg

SEQ ID NO: 46976 - DNA, 737 bp, Arabidopsis thaliana landsberg
aatataatatgagtaaatggtacgaactattgaagaattatgcttaggttggaaaaaagaaaaaccttttttcatatattgataacattgcaaccctgcttaattccaaagttatgcttccaccttgaatcttaactttggaatctctaaggcctaactaacctggataaaacctttacttttactcacgggatagatatatcatctgcaattttcagtacttctaaaagtaaaaaagagtttatacaactatacaagccttactagcaaataaaagtttgaactcttttctttaattgcgttggactaaaacatcgtttgcaatacctctaaaggtttagaagtatgtagacacattttacaattgcactaagcttaatgtttactacaaaaacttgaaacattttgccagttcttagggttagctagaatcaccattatacaaaactttatttcaagaagacaaaaccattttacgatagaatgcttctaaattttaagaggtagaaagttaaagaatcagttctaaattttttaaaaaaatatgtgaaacagagagttaataggggcgtgtggtgaacaagtgaggaggttattataacataagttataaacaccagttcctttttttttaactggctagcctttttatttatttttaatacgagtattaattttaagatttttaattcttaatcgggtttgacagagaataaatttctcgaatttcaagatga

SEQ ID NO: 46977 - DNA, 964 bp, Arabidopsis thaliana landsberg
ttactctttcaaaaatctcttaaaaattcagattttacttatcgcatcataattgacaaaaacctaataactaaaatatagacaatgcaatttacattcaaacgaaatcagttccagtcaaccgaactatgagcacactgacgtaaatatgatatgagcacaaccaaatgtctaaatctacatttaagtcaacgaaatttaactaaataaaaataaataaaagtttttgatgtagccttatttgaagtaaatttagtgtatataataagattaagtaacattttaccaaaaaagtaacaataataaaatatcatgaatttatgttttttccccaaatcaaaataaaacctactcttttatgaaatgactatcttttagtggcgaaaccaaaatatgaaatggagcaagcagaggatttaatgctcctatacagtctagaaactctgacagcgattaactaatcccctcttaattagcgttgatacacatacgcactatatagtaatattacctgtctgtcatataatctgtctgtcacattctgctggcaataatgtatttcgatatacgccctaatagttatgttttgtcaaaagtagtccttttttttttgtgcaccaacctagccaagtatatatatgtgaagaaaaaaaaagactggtaatctggtatggttgagagagagtacactatctaatttaaacaaaaccaaaaaatagagagtagtgagtacactatctcagttttctcgaggattattaacaaaaagtgcattttaattaatactcaccccttcaaattattagaagaaaacacctagtttcaagcagttaattcggtcttgtcctaattaagtctaccggtccacaacatctccacgacccaatgcattacacatatacattataaataaatacatatatcgacatgtgtctatatatataaataagtgtgatagcattga

SEQ ID NO: 46978 - DNA, 508 bp, Arabidopsis thaliana landsberg
  unsure (1)..(508): unsure at all n locations
tttcaggtgaaggcagngccggcaactacagagtgnnnnnnnnnnnnnnnnnnnnnnnnnnnnnnnnnnnnnnnnnnnnnnnnnnnnnnnnnnnnnnnnnnnnnnnnnnnnnnnnnnnnnnnnnnnnnnnnnnnnnnnnnnnnnnnnnnnnnnnnnnnnnnnnnnnnnnnnnnnnnnnnnnnnnnnnnnnnnnnnnnnnnnnnnnnnnnnnnnnnnnnnnnnnnnnnnnnaattaaaaaagcgatcgatataatacatatatgtctaagttcagatacttaagaaggtcactnnnnnnnnnnnnnnnnnnnnnnnnnnnnnnnnnnnnnnnnnnnnnnnnnnnnnnnnnnnnnnnnnnnnnnnnnnnnnnnnnnnnnnnnnnnnnnnnnnnnnnnnnnnnnnnnnnnnnnnnnnnnnnnnnnnnnnnnnnnnnnnnnnnnnnnnnnnnnnnnnnnnnnnnnnnnnnnnnnnnnnnnnnnnnnnnnnnnnnnnnnnnnnnnnnnnnnnn

SEQ ID NO: 46979 - DNA, 1015 bp, Arabidopsis thaliana landsberg
  unsure (1)..(1015): unsure at all n locations
accacacatacgcttcaaacacgtatcgcaccggtttaagagactactagccacaaggtaggcaatgagagtcatttcactttatttggtctaagtcttgcgaattctccattttcacgactgatatgactcgttttatatctagtcgtcaactgtacttagttttgttcgggttgtgaaattttcgtgattgcatagaatgttactcttaacttgatgttaaccggtttctccatcatcgtgcaaagctggaaacaaattacaacaaaaaatcatgttatagagctaaagaaagaaagtatgttgctattcatgaaatcttgagtatatgaattatttttgaaatttatattaatttttctatacttgagaacatctaaatataatatattttttatattatacatataatacttttcaagatttaaaattgaagagtatatatatatatatataccaaaaaaaagggacaacagataaagataaaaggcccaaataatcacaaaaatcctagaatcgcatcgaacggttagaatcaatcgatatccatcatatcaatatacactgcaccgtagaatataacaaccccctgggcttctccaaagttctggagtcagagaaaatgaagaagaaacaagataacgaagaactgtctcgacttctgtaatctgtataaaatactttccactcaaacatatatacacatctctagaaaacaagcttagctaaagaagaaagatagaagaatatggcagacagaggaatattcttgtatccatttagaagattccaagaatggtcaagatcaacggctctgattgattggatggaatcaaacaactctcatatcttcaagatcaacgttcctggttacaacaaagaagacatcaaagtacagattgaagaagggaatgttttgagtataagaggagaaggaaataaggaagagaagaatgagaatttgtgtggcacgtggcggagagagaagcnttttccggtggtggagtgagttttg

SEQ ID NO: 46980 - DNA, 338 bp, Arabidopsis thaliana landsberg
tggcctccatggtttcgtgcagctggttaacatgggtgatggttttttccatagtcatctccaggtcttcaaagtctagggggttgcacacaaagtcaaaggcgccgcggttcatggccatgcgtatattctgcatatcgccataggctgaaacaacaacagcttttattaccgggttagcttcgggcaaacggctcaacaaagtaagcccgtccatcaccggcatattaatatcgcttaaaactatatccaggtcagggtgttcttttacgcgttgcagcgcttcctcgccgttttgggcaaatactaattcataaacgttttcacgtatcttccgg

SEQ ID NO: 46981 - DNA, 502 bp, Arabidopsis thaliana landsberg
ggatttaagaaatatgtccttgaaaatcacggcccacaaaatcaaaacccttatcctattattaattattcacagcccacaaaatcaaaactggtatcctattattattcatttattcctctaacatatcttcttcttcatcgttggtttctcattttctttccatctcatccaataatctttatttctcaaatcaaataaaatctttgaagtttggtttcttgccaagtagagagagagagggtggatcattcgatttttcttgattcacccatgaggcttggtttcttgtagttttttgttgtaattatcttctcatctttcttcttttgatatctccattttcaatctcacttgcagtcctctacctttttttttttcagtttccaattggttttacttggcctctttttctggattttaaggtcagatattgcccatgaaagagggctaatttgaagaaaaagatcctaggttaaccgaatacatcaaaaaaaattaa

SEQ ID NO: 46982 - DNA, 466 bp, Arabidopsis thaliana landsberg
  unsure (1)..(466): unsure at all n locations
gggcaaactcctttcggcatccgccagatcgtggcgggcagcctcaagctccatttctttgcgcnnnnnnnnnnnnnnnnnnnncccgccgtagcgggttgcccccaacgatgtcagttcgacaatcgcnnnnnnnnnnnnnnnnnnnnnnnnnnnnnnnnnnnnnnnnnnnnnnnnnnnnnnnnnnnnnnccagcagatcgatgacggcccgccgcccgtcgcggtcgaggttattggtgggctcatccagcaaaagaaaatccggcgcggtgaacaccagcgccgccaagctcgcgcgcgtgcgctgaccgccggacaagtgcgcaagcggcgtatcggcggtcgcgttcagattgacgnnnnnnnnnnnnnnnnnnnnnnnnnnnnnnnnnnnnnaatccgcccgcgccaattcatcggcactgatgtcgcccgcgtcggccttacgcaagatcgcgagcgct

SEQ ID NO: 46983 - DNA, 566 bp, Arabidopsis thaliana landsberg
  unsure (1)..(566): unsure at all n locations
gggagaacccgcggagcgggctgttactatgcggtttcttgtttgcaagttattgcgcaagcgaccacagggattttaatgcgcgtagataagctgcccgattatatgcaacagttgctagccttcgctaccaacgttactagagaagatgattctgatactagctctggcttgcaatccgaatttggaaaatatgcgcaagcgatgtttaaaagttcgaaattgcaatttagcacaagtagttcgcaaactgagagcggcagccaagcattgagtttgcaacaacaaattttagccgattattttaatttattttcaggagtagtatccgctcccgatatgagcacatcttaccaaactactctgttaggcgtaacacncgccgcgcgcccctgcccagacaagccgtatgcggcacccgatagcgcttacacttatttaagatatgccgcaggcctaaatttaacgcacgaaatacctaatgacaaagcagcgggtaaagaatctgctaagataatttataaaaacttgtacagcagtgctgtcgcaatacaactaccatgctt

SEQ ID NO: 46984 - DNA, 339 bp, Arabidopsis thaliana landsberg
tttcacttgccccatatctacttctttatcataagggctctattgaataactaacggaaatttattaatatatgtcacatagaacacaaacaaaaaaaaattcttaatttctatcatcgcttcactaattactttactgactgttatctgatttctttatatgttatatcctaaaagacgaagactcaattattattctctcaccgaaaccaaaattcaaaacttctttaaatatttatcccataaatacttctttcaaggaaagggctaaaccctttcatttctcaaaaacaatagctaatgtaaccttattctaccacctgcaatctaaaacctaca

SEQ ID NO: 46985 - DNA, 387 bp, Arabidopsis thaliana landsberg
  unsure (1)..(387): unsure at all n locations
ctgatggaggtccgggttctgactacaaggacacctgctcaaaagatggggacgtatttgtgtgggccttgggaaaagcagatattttgatagggtagcgcacagannnnnnnnnnnnnnnnnncccaaagacagctggcctcaaaccttggggtaagtgctggggactctctggctggaacgctttgatgggggagggcagctgagacagccagaagaaaaacagacttatttattttcctatccaatgcctcgcttaccgtattggcataactaatgtacctgctcccgctcgtaaagaaaacccatgacatctgatacgttgccatcccatggatatactatgattagcgcacgtcatgataacctggctgacgatccaaggga

SEQ ID NO: 46986 - DNA, 279 bp, Arabidopsis thaliana landsberg
aaccactatcaatttattttgactaagcgtaatcaaaaaaataaagaatgcccttactaactttactcaattatccactatctcttaatacattaaacatgccctataagtcgtagcttaaaagcaaattaaataccactacttcatactttatatcacttacactaagaatatcttcacttttccaacctctacaatttaacccacggctcgattagaagcatcaacacatacactttacattctcctaaatgaattttgtctaccacaaaacatttt

SEQ ID NO: 46987 - DNA, 1121 bp, Arabidopsis thaliana landsberg
agcgagatggtacaataattgggattggtgaataagattttttgtttttggttcttctataaagggaacaaaggaacatgtgcagagcagtgagacagagtgtaacgataaagaaatcacattcaaaatagccaatttgaaagaagctaagagagactgtgacttgtgagagaacttgttggcagaacaaaacaaaagtactatttgactcaaagtctcttcaaatacacaactcaagaacacaaaccaatcaagtaaatatgtagaagaaaacaggggaatgggaagttgaggtggttgttgtagtgcttcttagaggatagattctggttttcttggcatgtttccgaactagactagggatgggtaattccacggagaccaccaagaaaaacaagcctaatccgaaattaggagaaagtgtagccattgcaaatccataggtcaaggcaacagcagtcaatgaaacttgtagctcaaggtagaaagggagacctttttgtgagtaaagagattagttcaatagaagtgaaaaacctgatagagtttaagaagtataaaaatgctgtaagaaatccaactctttgatcccattattgttgttcctgcgtaataaaccgttttagttttgtttccttttaagttagttacttgacagtatccatcaatgcagtagtcttcttctcaccaaaaaaaaatgcagtaatcttcttgccaaacacctccaggtggacttagcacgggtcgataagttgctgtaggcctttagctatcagaatcgcgataaccagtaacacgttacgaacttcgttaggagagactctgtctttcttgtacttgaagtaaaaccggtttatccaaactgaatcaaaaccaagttgggaacaaatcagttccagttcaattctataacaaaatgtcaaaaatcgatcagcatcaattacaattaggatcggttatgcaaaccagacatggcgtaggtaaattacagagttactagtagtaactacctatatcctggtcaaccttgtttgaaaggaacaacactgtaaatgatactatacaaagttcagtgtctaaacataaatgcctaacatgttcctcggatcaaagtttgcaat

SEQ ID NO: 46988 - DNA, 1036 bp, Arabidopsis thaliana landsberg
aaaccttttattaacttgttgtatttctctaaaaacaccatttgttgagttggcgcactataaatcttatatactcaacaagaagagaaaagagaatattattcatttcatctagtcagatgtgccataatgtaattgtaatttggtatatttgttaattacaatatgttacaattaaaaaaaaaatgttacaattaattacttgcagtttatcatcccgaactagcgacgaagccttcgtgtatgtttggactagctggcccaagtcaagccagccctgtggtgccttttttttttttcttttttttttttctctctgcagctgccttcaagtattcctttccttacgtacgaaatatatgatggtttagaaacacatacggatgagaatgatatctagaagaggataatttgccaaggtaagatgtgcaaccgtatccaaccagtccagataagtgtcgagccaagaaattctccgataagggcaagccaagtggtgtaagagtaaggtcgacatgtacaaaataagtgatctttagttttgttacgctctctacaaaaacacagcctttttttttccgcactcttatacgattacatgtagacaatctagtgtttagagcaagccacacaatgaaaagttagcgaagaactccctgagcaaaccgtatgagttgactccaagccaccttattcgtttaggcccaagtgcatttcatacatacaaaattttggatagctaatattcttctaagaacgtttcttaaaaccagaaaaaggaaaactaatgaaatgctaagttacgttgctaatttaaccaaaatataaatgtaaatttactaattgcatattacttctctgccaaatttcacatgctcattaatttactcatgtgggcttctcaaatgtctctctttaaatccttttcttaattgctccgtgtacgcttcattttaagtacattataaacctgaaagtccttgttatcaatcttttcttgtatttgtggttctccctttcttcatataaggccggt

SEQ ID NO: 46989 - DNA, 958 bp, Arabidopsis thaliana landsberg
gtactggataacatgatatttcttgtctacaacattattagctcatctaatggttaaatcttctattagggattccctaaagtaacattctgtatgcttgaataggaagttgtatggtggcatcaaagatgtcttggttccaaagatgtacacagagtacagtaccagcaaagttcttgtaatggaatgggtggaggtatgaagtcaaacattcgcaatcgacaaatcatttttttggtttgcgtcaaagagttgtatatgttttctcagtcaaaggaattttatatatcttaagcacactataattttgtgtgttctactttctgtatggcagggtcagaagcttaatgaagttaatgacctttatttagttgaggttggcgtttactgttcgtttaatcaacttctggagtatggattttaccatgccgatccccaccctgggaattttcttcgcacgtatgatgggcaacttgcatacttaggtattcgttgatcttgatactaacgttatgtgttattatgctgccctccatgatccagaattccagataatgtttttgtatacttgtttttcgttcaaagaataacgactggttactgatgctttggttaaagttcaattctacctgtgtttcagctaatctatgtcatcataccgcgaattaaccagaaacgtgaatacctatgtactattttgctgaatggtttttctattttcgatgattcgatgttatacgctccagatacgaatgggactttcgatgactctggatatctgattttctgtatatatactttgtttgatatctacaaactaaagagagattttactgtcccaagaagtatcttttgtttataacttaattgaacttttagttttttttttgctggcagattttggtatgatgggggactttaggccagaattacgtgatggattcatggaagcatgtct

SEQ ID NO: 46990 - DNA, 797 bp, Arabidopsis thaliana landsberg
  unsure (1)..(797): unsure at all n locations
ttggttattacgtacgaacttaaacattagtgttgaaattttctttccgtaactaaaccttcaagtccgatgatgtatactatatgattatatatacatttcatatccctttgacagatgtagtttacaagacagaacgaaatatgaaagtatatggtggtaaatggtggtaaatggtgttgccatatttaattacagcgatcgagtgtggtgaaaaagaaaagagaagagaaagaattttgttggtgtcagtgagggaaaaaagtgaacgttggttacggagatgagagaatcaaagaggtccacacgacaatcactgcacctgataacgttttaggtcccacgacccttacaatgctacagtcctcatgtcaccaccacaatcaatctcttttttgttaatgcaccacaatcaatctctctctctctctctctttctctacttactgaatttgtataatttatacattcaatgatatattatatagtctgcattcacatttatttttatttgttttctgtcttcatcctttttgtaaaaacttatatttaacccatgcgaaaacagatttttaaaacttcagattatttatcttgattcttgaatatatgaccgatcgatgttgagtgaatattttctttcacaacataataatagattttatagagtaaattatgttctaattaaacactatcaatttacaaattgtttatattactttctaaaggcatacaaacacaaaaagaatattactgaaccntcaaatatnttttgtgtacttcgtaaaaaaaaaaac

SEQ ID NO: 46991 - DNA, 866 bp, Arabidopsis thaliana landsberg
cggacactcgtcgacccagtttcagccatctaccaacaaatttttggtaacctcctcgcaagagaagaacatgtgagcgttccactgtgacgcctgtagcccaacttcaaacctcaaagaagctagaaaggagcttgtagatgacgctgcaacgaaacaccatccaaaagacaagcacaacccgtaacctagccaaaaacaaaaccaccaaacgcccaagaggacccagcaaagcagaagagcaaaggacataaaggcaattccataaccagagagaaactgacttgcgcaaaacacaaaccaagaaggatctctgagcttagctaattcaattggttaaacgcaacaaaacaaacctaaaactaggaaaattaacacaaacgagccaagacttagcaaaaccaaggacaaactatgagcagagactaaattacccaaccaaaggcaacctaatattagcctaagacagaatcgagactacatagcttccactagatcaggtatgtataagatgaagaaaccaaacctccatctccaaaaacaactgccgtaacagtgaagaaccacacgggctccgacaaaaacaccaaccacccacggagaaccaagcgacaccatcactagaacggaaccaaccttccaatcgaagcacaaccatctagaatctcgtctttaatccgccataggaggagccagagaagacccaaaacaaaggaaaagcaaataaaagacaaacagacacaccctctctgactccggccaagggcaccagataatcagaaaggtaacgacagaaatttgagaagaaaagtttggtggtggctagacctaaaaaaatcgcctctcaaaggccgtagagccaaacc

SEQ ID NO: 46992 - DNA, 758 bp, Arabidopsis thaliana landsberg
tttaattctgaagttatcgatatgatgaagaacacagaagcagatactgcaatcggggagactttggtagatgagtctatgaaagagatccaggagaaagaaaacaaagatgaagatgctgatgaatctagttgctttgtttcagaacttatcgatatgataaagaactcagctgcaagtgatgctattgaggataaagatgctactggtgaagagacactaaaggataaagctgaagattgcaaagaggtgtctaaaggccagactgaagttatattgatgacagaagaaaatgcaaaggttccatttaaccgtacacgaaaaccctgcaaacaagaagagtcaggctctaccatttcatggactatcatcaaatgcaagaaacccgttgcagagaccgaggatttaagagaatttaatccaagagaaccaaattaccttccagctgtaatggatgaggatgctgaaaaagtggacctcaagcatcaagacatagatgagaggagaaattcagaggattggatgtttgattatgctctgcagcgtgctgttagcaaacttgccccagcaaggaagaggaaagttgcattactcgtagaggcatttgaaaccgtgcaaccacatggtagagaacctgaacaggttttaagttatggaagacaccttcaagcctgcaattaacgaaggtgaaataacaacatttcttataattcggctaataaaccaaatatgttgcaagttctgcttatgaacacctt

SEQ ID NO: 46993 - DNA, 598 bp, Arabidopsis thaliana landsberg
agctcatgaattggacataataacctaatccatgtgtacttgtttatcacttgttaaattattaaagagaaaattaatgcagaaatttaggtcaaaagatgggttattatatagataacacacccttttgtttattagtgcttgcgtttggttgttgttctaattaattaggtaaattaacattgcaaagtcagtactaactattccaatatgcatcacttgaaaaggaaattccattttaaactcatgtcctttgattatataaaatcatactatacacataatttaattcagcaaaacttttatgaatatcgctgtcatgtctcatctgaaatgaaagtacaattagtttcataaagcctaaacgtaatgtcacatttgaattcaaattttaacttaacactttttttctgttcttacaacagtttgtgttttgttctaaatctctgataggtgaaacatggaattatttgttgaaattcatttatacaagagtctactcattgcgttgttaaatttagacttccgtgtttcatgcggatatagaatttggtggcccgatgaatgataaataattgtttttacttatgaatcatat

SEQ ID NO: 46994 - DNA, 532 bp, Arabidopsis thaliana landsberg
taagtatctttttgtacttgcttctgaccaccacacaaaccatcattgtcacgacatctcatcatcataaccattttgtttgcagtttcgacttcttccgcacgtctattttatcaaatggcaagatttttaattttaattataaattaaaatagagaaagaaattgagagcaattttttttttatctgggtacaagaaatagggtattttgcaaaacttacgagtttggataaaatatttaagaatatagcactgattttgagagatgggatgtctaaatactcattcatagttgtttcagtttgtggatggacgtgcgagtgagagattgtgagctactgattttgttctctcatatgttatagaaagagagaagaaaaagagagcttctgaattttggtaagaatagatgacgagaaaacaagatgagatatgaagtggtgatggtgatggtgatgaggctggtgacagtgatggcaaactttcaaaattccgtacaattgtataacagactgaagtcattagtagtta

SEQ ID NO: 46995 - DNA, 771 bp, Arabidopsis thaliana landsberg
agcattataacaaatatggatcttaagaaacattctttaatcagtactattcttatccaaaagcttacttgttttaagagactaaatgtgaatatgtgtatgtgtatgtgtatgtgtatgcaggagtagacacgtgcacgtggcacatgcagggaatgggaaggtggagtgttgacaaagaagaagaggatgatccaagtttcgaaatgattccaaaagttatgaactataagccaaagtgctcaatcgccaaacatgaacttaaataaacttcactcgttagatcgttttctcacattaaagccgctctacacttttacccattttaccatttataataaccaccacacatagatattaagttctatggattttattcgtaaacttaagttatgatcaaatagctaaatgattttgcgatttgcccgagttctgtttgtttctaaaatggttatccaaaaagcatatttttgttttatatagaatttgtgatatagaagaaatatactaaaaatgttttaaagtctgtctaaatcataaaccaatgcaaagaaagtgaaataaaccaagatctcgagcaatagacataataaataaacaaacacctaataacatcacatccccactaacaaatgtgaacattaactgttaaaaatcaccaaaaaagtcatcaagatttggctttccttttcaaaagcagtatacggctctgtctcacacagacagagtattcaatgcgacgtgttgtcttcccacttttcaccagctgag

SEQ ID NO: 46996 - DNA, 1031 bp, Arabidopsis thaliana landsberg
attctagggaaaatctcatcaagatcgatacgtatttttgtacatgacttttagatagtatattcgccgacaatacgttgatgtctcggaatttgacgcctcaaaaacattagaatatacaaaatcaagtatcgagtttgtaggttgaaactaaaatgccacggaatacagtgcgtagggtccattcgatgtttctagatcaaagtctacacactatagagacttccagatacagatacacattctaaatcatcaatgaaaaataacaatttaagtatcttcttatcctaatgtgtgtgtgcttttttttagtcaactattttgtgtatattgtaagatgtatcatgttatgacatgagtatgttgctacgtgtcgtgagatatcgaacccaacgcagatatgagtatgttacgctagtttcttcttatgaaacaatcatatatgtctataatgaatagatcacattatctgcctgaaaaaaatcccgtatattactcgacgaaatataaatacccaatgtagctgattttgctttctctggtccatatccacgttggctaaatttgataactagtctattataggtttataatagatctagctatgttaaagatactaaagcatcagttacataaatttttggcgcgagtttatatcttttggaattaaaaataagagaatttaaaaataagaagatcattttgtttggccacaggagttctgaaaggtcaggtatgattttttccttgctcgctcttatgattttagttttattaatgggttttcaaataagaaaaactgttttttcaagcccggttcagatacattgttttttgtaagatataggtctaatttaccataagtccatgaccaaaacaaaaataagatagaaccaatactgaaccaagatcttctctcgctttcgagatcaatgtagccaagctttttgagatcatgtggtaacttcaattgtataaatacaaatattgacgtaacaaaatctttacagttccatcgaatatcttgaaaa

SEQ ID NO: 46997 - DNA, 434 bp, Arabidopsis thaliana landsberg
  unsure (1)..(434): unsure at all n locations
atttcatctatttaattataaaaatactcacattttttatccgtgattcatattaacatgaacaaagggaaaatgcataaccaaggtttgatatgagcttgacnnnnnnnnnnnnnnnnnnnnnnnnnnnnnnnnnnnnnnnnnnnnnnnnnnnnnnnnnnnnnnnnnnnnnnnnnnnnnnnnnnnnnnnnnnnnnnnnnnnnnnnnnnnnnnnnnnnnnnnnnnnnnnnnnnnnnnnnnnnnnnnnnnnnnnnnnnnnnnnnnnnnnnnnnnnnnnnnnnnnnnnnnnnnnnnnnnnnnnnnnnnnnnnnnnnnnnnnnnnnnnnnnnnnnnnnnnnnnnnnnnnnnnnnnnnnnnnnnnnnnnnnnnnnnnnnnnnnnnnnnnnnnnnnnnnnnnnnnnnnnnnnnnnnnnnnnnnnnnnnnnnnnnnnnnn

SEQ ID NO: 46998 - DNA, 734 bp, Arabidopsis thaliana landsberg
ttgttacttctcctctgaacgtgatatccgcttatctctgtagtatgtctgcctctcatacacatcatccttctttgactcccatggactgcatgaatagctctggcaacccgctctctccatagccttacgatccacttcacctccaccaaacaactccataaagaaacttacctagagagttatcataatgatgcgtaagacaatttcaaaactcatacacatttccacaacacagttgctttacaaatgaaagataagaactcaccgggacagggagagtcaaagagaaaacctcagagaatcgcacatcatcaacacccaagaacagaccactctcttcactttggagtttctgctctgattcctcttcaacagcttgcactttctgctctggagtcaaagattttgctttccacagagccattattgtcctataaacgcaaaaacaagtacaaaaagtctatatagatattatcgtaacaaacgttcatttctactaagggtgtatgtaactcttgatagttagtcaagaggcatccaagtctaaattcatctaacaaaagcagttgatactacaggaatgaaccaattttcagattcagaagagaaaatggcatatccaaattaaactaagcaatattgatgggggtacataaattcctagtaggacgttgataggaccaagcacacaaatagcaaataaaacattggaagactcaatacttactttt

SEQ ID NO: 46999 - DNA, 842 bp, Arabidopsis thaliana landsberg
gatatcaacgagttgaatggggaaagtttggatagtaaacctttctctctcatcttctcgaaaacgggttcagctttactttgagtgttgctagatcttgcataacagcttaagagtgtatcgtagacagagtaatctttcatattctccgggatgctgctttcgaaaaacttctctgcttcctccaaacccaacactttctcagtcagatgaagccttgttgcataatcttctgaaaagagattaaacacctttttttgacacatccatgttgatgcctcaagtgctttggacaactgatttgaatcacgtagattcttgatgaggtctctcaagcccgacggactcactttattcccctttttatccatttcttccagcaacagagtgattggtgtagccaatcctctgatccacaaagtcttgttcaccagtttatctgccttcatcaccattcccttttcgcgataacccgacaccaacatatcggggattcggttatcaaactcaagaccggagcactcacactcattgtagtatatcttctctgctcctttggaatcaccaagcttcaagagagaaccactcaaagttcgcaattgttcattatccttctgtcttgtcgccttgtacttgtcctatgcacggtgagcatattcatatctctcctgcttctccatataggctcatgagttccttatagtcatgacccaaccattcctctgtttcttgaagaatcctcttagccttttgttcacatccgtctctcacaccaccccttgccgttgcgagcattgtgagccaaccaagccttgtaatctctttcctatcagctagaaacc

SEQ ID NO: 47000 - DNA, 732 bp, Arabidopsis thaliana landsberg
ggcggagttcgtcaacagcatcaccagcctgtcaattccaagcccctaacagagacaaagaaacaatgatagtgaaccaacataagtacttgagcatagtaccggtcatgttatagacttgagtgtgcaaccattaactaatgaaaatattattactctaattgtatagaagaaagaaaatagacataagtaccattcccgaagccggaggcattccgtattccaaggcagtgagaaagtcttcgtcaagggtcacttcgtatgactcatcatcatcatcatctttctttgcgtttggttcaggagattcccgaacagcctctgctctctttgcgttatgctgccttacttgctcttccaaccgtgtcctctaccatattttaaacaaatcactaatcttttatgatccagtctacacaaagataactaaaaagcagatcgttcactatgtagaatgttattcatcaagacacaaaattggaggaatgtggaaggttgcattatcccattacctggtccacgggatcagtcaattcagagaatgcgtttgccatttcacgaccacagatgaacagctcaaatctttcagtcaaaccggcattgctgttgcagaaaaaaaaaagctatttacacttggtaaagttttcttaacataagacgtatgatccagaagatggtgacagtgttggaaaaaaaggataaaaatcgagtcaatgctaggaaacagagttc

SEQ ID NO: 47001 - DNA, 693 bp, Arabidopsis thaliana landsberg
  unsure (1)..(693): unsure at all n locations
cactttatttatttgtaaggtaagatgtttattttatcttttcgtattaacttattttggttgttaagtattgagtttatgacatacaaatcaactaaactgtaattattgtatactttcttttgttttttttatcatgtatactaatatattatgtatacatcacatatttacttttattaatattttgaaggattatatatgacatatttcatagtaatttgctagtcacttcttcatattcaaattttaattatatgtttttgataacgggaaattttaaaagtcataaaaaggtaggtcttctcttgcactttagctttaaattatattttttcattcagatcttataacaaagataaagttcgaaataattcgctttttgcatcggaattatgttagacgaccccatgcgggcatgccttgaacatgtgtaatcctaaagtcgaacaatcttaagtataattgtctcctaatagctgtgttaattcttagccgttcatgttaagcaccgattcagatcaacggtggcagatcagccagctgtcaattattcattggtcggccacatgttaagattgatcctataacgaattctccttggctccaccagagtagaatctcttcgtcaccaaatagttggccaccacccgctaaacaccaaagatncaatctattttcttaatttttttt

SEQ ID NO: 47002 - DNA, 498 bp, Arabidopsis thaliana landsberg
cggacaagcccgagtggtcggccagatcatgacccgcagcgtgcgcgtgatgagcgcccagcgtcatgtgatcgagctggtgccgctgttctcggaagatgggcatcaccacatccccatcattgacgaagagcagcggctggtcggtatcatcacgcagtccgatctggttcgcgcgctgtaccgcgccgtgaaaccggacgcctgaacggagtttccgacatgtccgaaaccgaacgttaccttcagcaagcgatcgaactcgcgcgcagcaatatgcgcagcggcggccggccctttggcgccgtcgtggtcaaggatgacaaggtggtttccactggcgtcaacgaaatcctcaacagcaaggacccgaccgcacatgccgagatgatggcaatccgcgccgccagccagacgctggactcggccaacctgagcggtctgcgccgctacgccagcgtccatccttgccccatgttcatggcggcgatgcgcttt

SEQ ID NO: 47003 - DNA, 992 bp, Arabidopsis thaliana landsberg
caattttaaatcactttatgatttaacaatcctaagttcctaacttcaaatttaagatttacaatagcatgaattttagtctttcttattgtttcatagcattattgtattaaaaaattactctacagttacaccatctctctttataatggttgtttcaattgagttaatcatttactattaatctgaaaatttgtagtatgaatgttattgttggtacacaaattggtgatggaacaaaagattaagaggatatcttttatgtcgacaatggtcgagtggttcaacaaaatccacgcaatcgcctgagcgaaaaagttgaccatactcagccccaccactctccacttcataacctttttcttttatccttcttccttttgcatttatacaagtattttccaatgacggaatgcagaaagaaaaaaatttgttaagcaaatgtcataaaatataaaaatatctatagcaagtgactgtaactacgattaactcaaccgattggagaattgagtaacttatatcgaactcaagttcgaacatacgctatatatgagagtcaaaattattgatcaaaatatgcaatgtaatggtccaaaattcaaaatattaccaaaaagaaattctataagttaatgttggaattatgataataaaaaaatactaattgatagatatgaaacaatttaagacgatccatttgagacccgggaaatagattagtttatcaagtattaatttataaagattttactttggactatttgttcaaaaaactacgtgatgatgagttttctatgcaaaatcaattaccgatatgtggatgattcttgtcttttgtagtaatgttggttatctttcactcttaatgagaggtttaatatcatgtgagagttaacgagcttcttatttgagtcaattgtagataaataacttaacatatgcccttataaactagcgttgattctcaatccaatttaggctattgcaga

SEQ ID NO: 47004 - DNA, 1168 bp, Arabidopsis thaliana landsberg
acgcattcataataattaatatatatacttctactcgacgcataatttaattcacaattataccaaattatttctgggcactttctctttctcctagtccataatttaactggtatagttccaatcaaccgaaaattttaactttgtttccttacaacaaccatcgaaaatttaactttgtttctatttatttcttctgctatccttataagcacatatctctctagtgtcaccttacaacgttgtacatatcagacaacgtaaccacaccttatttattaagatgaaaaaacaaaactattcatagagttgtatcattggccatggacgagactgatcgagtcaatgttacccagaaaataattcgagaagtccacgagcgactggttggagctacggttgatattgaatatctgaactgcgtaaactttgagacgaaaaaatgcaatgattttatgctcaaggagatgaaactatctctacacttgcgtctcaccgtttgccaaatttccactgcgtaaaatatatacatcaaataagcataagaagatgatgcataaacttctttttcctatctactatatatatatatggttacctaaagtagaatacttgaaatgtgaaactaatgttaaggaattctttaaaaaaacaaacctgaggctagattgaatcttttgagatattcattataagatgggaatgattttagcatcttgtctttgttttcgacagcaaagaaacctccagtggaataacttccaacaggttcataagatggaacatcgatcgagttcccatctaacaaaaacgataaattatcatagaagattgttatacattaaaataattgacgattgagtattctcattagagacaacaaaaactagcataacaaaatacagttaaaatagttcacacataaaaattgaatatattcatatactctacgaaattttatgtaattaccacataattatatatttatatgcctgcatgagaagaaactttggctcacccatattctcgaagaagcaataaacaactagagccaatattgcaaccaaacctcctttgcttgatctcgctttcattttgatactaagctctactactaatttctttggtctgcttttttttattggcggtttctttaatacttttgagt

SEQ ID NO: 47005 - DNA, 979 bp, Arabidopsis thaliana landsberg
agacgaagtagctaagcgatcaggacttgatcctgaatcaatcaaactaattttcgccggaaaaatcctgatagacgacggcgatgctactctaacgctttcgcaattgggtattaaagaaaactctaagatcctctctagtcgtcaagctgctcctgaagaaggtaagtctatcatggctgaagaagaaagggctcgtcgtctctctcgtgtcaagtaagtcttttcgtttctctcttttgatcatctttgtatttcgttccttgtacatggtttggttgttttctctgtttatgtctaaagtttgaaacttttatatgtctgactgtttgcaagaactcaatttgtgaattagtgtaatgatcctctgtgtctttcgttcttaagccatggtttggttgttgtctttgtttagtgtgtaatataaagtctaaagtttgaacttttatatgtatgattgtttgcaagaactcaatttgtgaattagcgtaatgatcatctgtgtctttcgttctttagccaatggtttggttgttgtctttgtttaatgtgtaagataaaagtctaaagtttgaaactcttacatgtctgattgtttgcaaaaactcaattttttatttagtgtaatgatcatctgtgtatttcgttctgtagccatggtttggttgttgtctttgtttaatgtgtaatataaagtctaaagtttgaaactttatatgtctgattgtttgcaagaacccaatttagtgtgatgatcatctgtgtatttcgttctttagccatggtttggccggtgtctttgtttaatgtataatataaactctaaagtttgaaactttatatgtaagattgtttgcaagaacccgatttgtggattagggtaatgatcatctgtgtctgtcgttctttagccatggtttggctgctgtctttgtctaatgtataatataaactctaaagttgaaactctatatgttga

SEQ ID NO: 47006 - DNA, 576 bp, Arabidopsis thaliana landsberg
tgcatcgggtgtatcggagcgtcggcgcagttcaaagtggcgaggaggagagcttaccatatcactgcgacaacgcgaatactgaatcaaacgcgctcgagtgttttgctgccaacttcgttaatatggttgccaggcctgcatgcatgggctgcggggcctgcggggcctgccatcacacagacatccttcacaaggacagcagtttacagcatcgccaaaacgcgggcgctactcaactccggcggtggtgcgcccggccgcggcacgctttccaaaatccggccgcaaatttcatatgtagagtgacccatgacgcgacggctgtgttgcagatgagcaagtccttgacacagagctgtgtgccatgtgccatggcaagctgcctgtttaagcacacattcaacagcaattgcacacattcaaggttccctggtcatgagatgagctctgctgttgtcaatctagaacgtgcagcagtcacgcactgttaggtaacagcaagggggccctacacgtcgtgcgtgtcgtccgggtgtaggtgcaacctcacaggcctgctgcaggagctgtgca

SEQ ID NO: 47007 - DNA, 554 bp, Arabidopsis thaliana landsberg
actcccgctattgcaagcgaataagagaaattcggaaagagccataatgtgttatcttttcggtactcctccgagaattgctccagccacgcatactcctctgctctcaaagcaaagtagtccacacaaaacaaagcgcccacaggattactcgtgtccaaggaaagcaagagtttgcagacctccaacgctgacctatgacagccacgcctgtccatgtttctcatgtgagtgaaaagcgtcttgaagaacagcttgttttcatcgtggttaaactccaaccggcagttaccctggaacggagtgaacataggatgccacgcacgctccaaaccgtacaagcattttccaatggaatctgcagccatatcattctcacctacaaacttaaagtaatccgccatagttatgagcgactcaatatggtaaggattgtgtataaggacacttgctacaccattcaaatcatggatagcttgtgcagcctgaaatgctctctgagcctgctcatatgaagatgaatgggtatatctacacatcaaaagaaaagtttt

SEQ ID NO: 47008 - DNA, 651 bp, Arabidopsis thaliana landsberg
aggccgtaggttagtatgaaagactagagaaagtcaaaagtcaagattattgtttaagaagaggcaccaacttaagaacaccagctggtttagttcatgaaacaagacattttacaacaaaagttatgaccatctcgtaaagtaaacagtgttgttttggcaccaaatcttacaaccacacgttacacgtattacgcatatatatatatatgctcattttcttgttccgtgtttccgagttcatcttgttcacattgttcaaacagattatatcttcacttccataactattatagtcaaacctaagacatgaatagattgtcatgtttcggtgaatagtgaaccaacctcgtatctcacatgtcgactgtgtagagagcatagaaacaatgaaccatcccaatttaagaaaaaaaaaaaaaggaattgaaggataagtgaggccatatgcactctgcactaatacacatgtagagagcatagaatcaagtatagtgaaagagtacgataacgtcagcagcattatccttaaatcccaaaggcaaagggcaccttattccttcctaaatcgagtaatatttccatgtggctctatggttctttaaagaatattcatacacgataaaatccactttcgtcgaactaattatt

SEQ ID NO: 47009 - DNA, 427 bp, Arabidopsis thaliana landsberg
atagctgttcatggtctcaccgtgtgcaggacccatttatgattatatcacaaattatatgaattgaggcacagggggagcagtgtcacgaacatcgatccacatatattgctgagattcttcaggagaaattaatgcattcttagtccttcgtcttgtttcctcttttggacccaaaataaaaaataatactataacaaaaactaaaagctgccaccttctttctctgccactcaaattcgatccatgtcttttctctttttaatttccttttgtcactaaactattttcgcttaaacaaagtgataaaacatgtgaccaaaccgcatcatttctaatcctttttagaataatgcatacatcaccataatcacatgacaacatttggctttatttgctagaagagatcgtccttgctttaccaaaa

SEQ ID NO: 47010 - DNA, 580 bp, Arabidopsis thaliana landsberg
  unsure (1)..(580): unsure at all n locations
tctgaagtttcttaaaatggtattcaaattttggccataactttcaatatattaagaccgagcatgcgaccgagaaaaatatgatcaccatagtttgcagctcgattacttctaagttctaaccatgataaatttaaacgttttgttgaagtaatatagagaggcatgcaatagtattgtgccaaaaagttatagcaagagagatcaatatcatgatatgtactcctaaattaacgtggcatgttcatgcatagacaaagatgcaatcatatctccacgtttgcatacagcttcaaataacaaaatcatatagtcatacaaaaaaaatgaatgtccgctgcttatgaaaattaattatttggatagtacttcgtataaaagttgcatcaaatgattttagttgattttaaacaagtnnnnnnnnnnnnnnnnnnnnnnnnnnnnnnnnnnnnnnnnnnnnnnnnnnnnnnnnnnnnnnnnnnnnnnnnnnnnnnnnnnnnnnnnnnnnnnnnnnnnnnnnnnnnnnnnnnnnnnnnnnnnnnnnnnnnnnnnnnnnnnnnnnnnnnnnnnnnnnnnnnnn

SEQ ID NO: 47011 - DNA, 982 bp, Arabidopsis thaliana landsberg
gccaaaacacaaaacctgaatatcttccacccctaaatcctacatcagaataacaattacctataaaaaaacacaaccaattcaaaatccattcctcttctataaaaaggttaccaacttaccattaattaattagatgatagatgaaaaattatgttcaccaaagtccaacctaaaaaaacaatgtaaggtcatctcgtctttgtcaaatcgccacatctcacgctaaaccaataaaccgattgagaaaattaggtcaaactcgcgtttgttcacacgcgcttttaaaacaacaacaaattggaaaatttcaacttttggactaactcggatccaactaggattcttctctttccttatccaacacggtcttttttcgtcgcgtctttacaaaaaaaaaaaaaactaaaactcctatataaacaaaaaaaaccaaacctttttttttcttctcattcaatctttgttcctttcaccaaaacccatcaaagatcttttttttttctcaattattgtgataatgaattcgatgtttagtgccttcgacgccatgtgtgcagagattatgggaaagaaagtcaccgctgcttcttatgtctaccgctctgaacgcaattctgcttcttcttcttcttccgtcggcggtcaaaacgcgtctttgtctctcaagaaagatgaaaaagcttcaaagaacatggatttaccaacgaagacaccgaggtttgctcttgagctcgatggtcttcattgcttcgagactatagttcgttcttgatcaatatcaagattaccaatttttgctgagtttttttttctttttcttgttttgttctgtttcgattccttttatgtaaatacaattttggaagatttaatttcttgattagaatcatcatccttatgtgatttgattcatcgtttctgctttactaattcatgaatttgtacatatattaaagaaaaaagaagactttttgtttct

SEQ ID NO: 47012 - DNA, 440 bp, Arabidopsis thaliana landsberg
ctttttgcattggattctaaatcgcagggactttttcgacttaacttgtggatggaatcaataggaacgaggcaagaagacgagctttgattcttttctgtttatattttcttgatataaacgcaagggtaaaataaaagcttatatgatgagttatggatttcggattctctatgttagtttggtcattgaccggtgttatttttttttggcgagtaggatgcttatatggtatcagtggataggaaaggtttccacttgttggggaaggtaccgagtgaacaataagctggagatgagtatcagtggagagagtttaggtttgagtttgaagaagaggtgaaagacgttgaatctttttgccaccaacttgtggaaatggaacaagaggttgtaagcaagttttactgaccataccggttttggaattccattctttt

SEQ ID NO: 47013 - DNA, 504 bp, Arabidopsis thaliana landsberg
gatgccctgtcaccactgtctaatactgtacccactgcttatcaccgagcatccgagttttaagaccttcatcttggagacctgcatctcataaaaattgatggtctgcaactttttttttttctatcttcctttcattttctaacaacatcaaagagttctcatgtattttgtgttgtgtagacaatgatgaccaacaaaacacacaagcaagcaagcctctttgggtggcagttgcagttacacaatcttacaattcgaggcgtaaagtcccacgtagtagcatttcaattccagaccttgaaagttgcttagccaaagcttcattctctgcttctcagaaatcaggtacgaacttaattactttctttctttaaagtttcatcatatttggaattataaacaaaagtgctcccaaagagcttaacacttgtgttgtcatttctggtatggtaatgttctctcctcaaaaagcctcactccacatgccacgtattggttacc

SEQ ID NO: 47014 - DNA, 819 bp, Arabidopsis thaliana landsberg
  unsure (1)..(819): unsure at all n locations
accagcttctctcatttgaagaagagtttcctttgcctctgaaaccctcccactacaagcgtacgcagtgatcaacgaagagaaggtccagctgtccggatcacaagtctcacaattcttcatatcttgaaaaatctcaaaagcctcatccacatatccgatatcagcacacatggacaagagagtattgtaaagaatcacagttaaagacaatcccttctccttcatctctcggtagatagcaagtgcatcatcgccataacgagctctaccataggctctaacaagagcagcataagtactccaattgggagtaaagccattggtaataagatccttgtagataattttagcctgccaaggcnnnnnnnnnnnnnnnnnnnnnnnnnnnaacctattgtaaataaccagattaggcttcaccccaagagccttcatttcttcatagatattgagacacccatcatagtttccagaaacaccataaatcctaatcaaagtcgaaaaagtaacagcgtcaatacgccatttctcagtccttgctcgatcatacaaactcaaagccatgtcaacgttaccagcacgcccgtaagcatcaatcatagcagccatagtgacattatcaggctcacatccaaaagaagacattttctcaaaccactcaacagctctcttaggtacaccattctgcctagcacaactaattatcgtagtgaaagttgcattatccggtttaatccctctctcaagcatttcatcgaacagcttctctgacttttcaagatccttgcttttgctaaacaccttcatgggtacatt

SEQ ID NO: 47015 - DNA, 1296 bp, Arabidopsis thaliana landsberg
agggttgcagactactcgataactaaagttttggactgataaatcatttagctgtgcacaggtgatcaaaagaatgtgcttttgtccaaacaattgcatataccttgttgcatgacgataaactctttcgggcgttggttagtctgagttcgatgttttcttgggtatggtttgtcaaacccaaccatgcaaatttgggagctcttcccacggacaaatcaagacccgaaattgtttgttcgtttcatccttctggtagctgaagcttggaagtgagtaatatttggattcaagggtgatgtagtgaagcgcctcacaagcatacttacaaatctatggtctggattttgaaacctcataaccttgatcccacttccctttgtgcgagttcaaaatgattaatggcattccttgtgctagttttgatgttgcagcttgaagttttgcttaaagtttcaatattgagtccttgcaaggatgtttatgaaactcacacttttcacatcaaatggttgccaattctcacttattataaatctaagattttttgttagaatttttgaaatgtcagaattgaaataaagtttaccataaagttatggtttttatttcccatctttggggaaatggcagttaaattcccgtgtcgatggctttgaaaagtggttgcatttatgatccacccttttattttaatcacacatccgaattaccaatcgttacccatttcttcaatgaacactctggtgaggagcggtggcgcgtggctggtatcgccgtcaatggcagtggcggctctgaggaggatgagagtgtctggtttagccacgtcatcatcatcttctgttcctaattggaaaggtggagtttccatggtccaaggagcttccagaggcattggtctcgaatttgtgagcctctttcttaatccatttctctctttcatttacccaaatcctgaaatttagtgactcatttgagagagatctaaatttggctgatttagttcagctttttgacgttgctctttaggtacgacagttgctggagaacaataagaacgggtatgttgttgctacttgccgaaatccaaaagaagcaacaagtctctctgatttgaagaaccgtttctctgaaagacttttcatccaaaagcttgatgttacagatgaaactaccattgaggttgtctctacactcaaatctgtctcctttcattaatcaacactcaaatgctacactcaaaactgtttctgaaactgttgaacctgtttactaggaatcagcggaatctgt

SEQ ID NO: 47016 - DNA, 551 bp, Arabidopsis thaliana landsberg
gccggacgcaggagagaggcttttcagctacgcttctgcctgctcttcagttgagcgttgaattttgtggacagtttggatggagcagaacatttttaggattgatgaattggcaggaacgcttgttagtttaacgggccggcttttgcttgcggttgtttaatccttttgcaaacagtaagtgtgtttctcccgcaggtccaaacacgcactgcgcccggctggttggtaatactatgcagcatgctaggtgatccggctgttagtcgctgctatacttcatcaagccattgcgccgtgcaaggtgctttgttttggacctgctgtggagaagtgcctgcggggcggtgtgggcatttccgcgctttcgcagcgggttccggtggggaacccttactgccgtttaatccttttccacacagcaagtgtgtttctcccgcatgtccaaacacgcactgcgcccggctggttggtaatactatgcagcatgctaggtgatccggctgttagtcgctgctatacttcatcaagccattgcgccgtgcaaggtg

SEQ ID NO: 47017 - DNA, 825 bp, Arabidopsis thaliana landsberg
  unsure (1)..(825): unsure at all n locations
aaccttatccttgttgtctaaaagggggacagagcgcgggttatacttacatttctctttgtagctggtatcaaaacaggtcttgaggctctctttggtacaaggttgcctgctgttgttggaggctctcttgcttatgttgtccctattgcttatatcatcaatgactcttctttgcaaaagatatctaatgatcatgaggtaaaaaaagatactcgacaagatcgttttttgtttttgtatgtatatcgacaatgtagttatgttttttttgttacagagatttattcatacaatgcgtgctatacaaggggcgttgattgtagcatcaagcatacagattattctaggatatagccaagtttggggtcttttctcaaggtactcattgcctttgtttttgttattgttatctttatcccaattcattacttgcttttgatcctttttcaacttgtaggttcttcagtcctctaggaatggcaccggttgtcggattggttggtctcgggatgtttcagcgaggatttcctcaggtaattcatacaaagccccactccacaccattgaatttgcattaacatcaagaatctcttctaaactttgattctgtagctcgggaactgcattgagattggactaccgatgctattgcttgtcattggactaacccaagtaagagctttgtgttgtttagactttctttgcttgctttccaagttgttttctctcttacatatcttgttttttttcttcttggcagtatctaaaacatgttagaccatntaaagatgntccaatctttgaaagatttccgatattgat

SEQ ID NO: 47018 - DNA, 933 bp, Arabidopsis thaliana landsberg
gcttcttgaaaccgcaatgttcttctctaaaccgaggactcttggcgtcaatttttcgtcttttgttattgtcgatttcgcaaacgggtaaagaggtgatttaaccgatgtaaactcggcttttccctttgatgcataagggatattcttaggcttatgtatgctacggatttcgcttggttcttcacttggtttaactttgcccttcttgctcctatagtcttttccattaacttccatcagttgaagattttcctcctttagttcttgtagctgccaaaatccaaatgtttagaacatatgtatatgtggttatgcaacatgtctactaaaccagtttttgtgcctcggcctctagcttttctattttggaaatggcttcatcatgttcatcttctagttcatctaagtcgtgttccatgattcgatattcttttattgcttcccggagattcttctctatctcttttctattccattcaagactctctagctcatacctcaaatcataaatactctgctcaagctggaaatacaaaatatcttcttcctttttgttaaattatacattaaaagatctagctcaatcaaaatgtaaccattattatgactcctcaaaagggtaactataaaaacaactgaaaatcctcaattttccatttattcataacaaatcaaaggttactgaaactactaaagtttacctaaccttaaggatcaaaacaatcaaaggttactgaaactactaaattctcataaatctttaggatcagtaccaaatctttgcacattcaatcaaagtgaataagataacgaaccagtctttcccttggtatagaggcgaaaaagcgaatcgggaaagtaaaaagaagaacggatccccagatagagccccgtacagctctccacagcatacttaggttgaaacaaatt

SEQ ID NO: 47019 - DNA, 465 bp, Arabidopsis thaliana landsberg
  unsure (1)..(465): unsure at all n locations
ccaaccaagaggaacaagatacaccggagntgcagagcagcaccaacccctgcccaccttttgaaacatttgatacgatggaacgaagaccaagtccgaaaaaaaagcgtcactcacacacaaaaagcaaaaagagaccgacccgatacgaagaagaacaacaaaaaacataccacgaccaccagcgaacacgcataaacaacgggaaccaggccacgccaggaacaatcaacccaaaactggacagcctcaaaaactccagacaaaataaacagcgcgcacaccaacatgccttaagcaccactgccaacgcccaaaccgctcactcaacaaccgccaccaaccaaacctacaccataaatcacaccccaatacccaaacacgcagcaaaagccgcggaataggaaaaaatacccacaacacaggcaccgactaaaacaggaaaatgcaccctaaaaaagaaca

SEQ ID NO: 47020 - DNA, 948 bp, Arabidopsis thaliana landsberg
gatacacatttttgacaagcgagtgacactttctgtttcacattatatcccaccagtttgttgataaggactatgattttatgagtttttcaatcatgtttataaaatttttcgtaatttaacaatcaattattttcaactaaagtatgatttaaaatagttttgttatatttttcaaacatgttaaaacaaatttttattttcataatatattatttctttgattattttctcattttatgagattaggaatgtacagcgaaaaaattgtcacatgcacaaacagcttcagaaagaaactacatttggataagctttctaaaacttgtaccgactatacttgtaatgccaacttctcattcttcaaaacagaatcttacaatcttcgatgtgtgtggttcaaacttagcggaatcttaagtccctatatattgagattagattccttccaaggttaaaaagaaattcttattgttcatcattatcttgactgctcaacgtgaatgttcaaccttcttactttctttttttttcggtttaagatcaaccttattacgtacttagtctaattaaattagactagctttaaccatatatgatcatctaatttgactaattatcctaaaattagttagttaaaccaaataaatttaggcatatactgtaaatttaaaaatgattaacaaatagaatcagtcaaatcttgtatcattcttttacacgttttcattaactcctaacattcagtttcttaaaaagctttacgttttgataggatttccgactaaattgtaaattaaattaaaacgactaaattctagaatctcaaattggtgaatatcaagtttcataagcagaattgattggctaatcccttgtatatatggatctatttggggtcagctaggaacaacaatattgatttaggttcatgtcaacgtgtgtttg

SEQ ID NO: 47021 - DNA, 916 bp, Arabidopsis thaliana landsberg
ggtaagcatctatgttaaagcatttgaaagcaaagagcactctaaatgttaataattaatctttgatttttggctgtgaaaagttgaagaattaattctaggtgttattaaggcaggtatgatgattcagttgcctgaagctttggtaagggatcggtgccctcaaacatccagatatacatgtgtttggttaacaaagagacctctcacaccacaaaaccagacttgagaacaaaagaatgtactttacaaatcaatatgatcttttccccttttgagatttggtgtggtatattagaaggactctagactatatcatccggtatcaaaggctccatcttagtctccatcaatgggagctgaagtttccttaaacctttaccactagccaaataatgtcccccgagtatatgaacgtagcatactgaaccgccagtaccaaaattgtaatcgttcctgaagaataggttgcctaatgtatcagataccacataacatttcacagcattactaactggatcctacgaaaacaagacaaagtagtaagatttatccaacacaaatgagagatcaagacatgaattgtatcaaacttacattagcaacaaagaagcttctattctttgcatcatagagataaacgagaactctccccggaagttgttaacaatttcgagccatgaatcttcagcttccccacaaagtttatggtacacatttatgactctcaaagagtcattttctccatctttgactacataaaatttcaatataaaatctacattattaactcccaaaggatgcaataaggaagaatatccattgatatggagcttgaataagacactttgaagcgcctttgcgatttctttgatggcgtctatggaatcatcagtgggaagattcttcgaacgtt

SEQ ID NO: 47022 - DNA, 685 bp, Arabidopsis thaliana landsberg
aggaattttaaaatagatatttaggtagaaatatttttttattactttagcaatacatttataataatatttggtggttctatatagttatgaaaaataatggttttctttatatggatcttccttcgagattttcttctaatttataatattttctacccattctagcatgaaaatgtatccactgactaatatgatgttatcaaagcttagagtagaaatatatcatgatagacatatcttattataaatcttttgcacttttggtatttgataggtgtcatattttaacattttttcatattagctgtacttacttttatattttatcatgcttttaactattgagtcaacttatatattttcatttcctttataatattttttaatttttgacacgtttttaaaacaaatcaacaaatttgtagaaacttttcataaaatctccttatttgtgagtcgtgaccttcctttgattttgttttcattttcggtttcacgttagtagatttatatacacacacatatatcacaatggtgtaaatgttcaaaaatcacaattttttagtatattcttatacacatgtgtgagatattaacatgtacatttatatagatacacgtatatcacttggtttaagtctagatagtttatctagataatcactcaaaaacagcttaaacg

SEQ ID NO: 47023 - DNA, 607 bp, Arabidopsis thaliana landsberg
  unsure (1)..(607): unsure at all n locations
cccccccccccccgcccccccccccccccccccccctcattttccccccggccccccccccccccttccccccnnccccccccccccccccccccctcccccccccccccccccccccttttcccccccggggtccccggtccccccactcactcccccccccctccccccccccccccccccccccctccctcctccctcccccccctccctcctcctcccccccccctgtccccccctccccccctccccctccgccccccccctctcctcctctcctccccccccccccccccccccccccccccccctcgcccnccccccccctttctttnccccccccgcgttgttgggccccccccccccccccccggccgcccccccccccaaatcaccccccccccccccctctcctccccctccccccccccccccctccccccccccccccccccccctcctcccccccccccccctccccccccctcccccccccctccccccccccctctcctcccccccccccccccccccccccccccccccccccccccccccctccccccctcccccccccccccccccccttcctccccccctccccccc

SEQ ID NO: 47024 - DNA, 620 bp, Arabidopsis thaliana landsberg
cacatactttgtctcttaccaattaaattcgaaaacaattcccacttgcatttctttaaggtattattctttctttaaattctctttgggtacagtgaattatgtaattaaacaaccaatagttgatcaaagacgtccgattatatatatgttataatcatatccaatccaccaccacatctattatatatgtcgagataggccattttaatataatatggatcacaataataattcaaactattcttaaattttataattctcatttctcgactcaataatattcttccatcgaaactggtcgtcaatcgtaccggtaagagagtcgtacgaagattgggctccatattttgctatagcattattggtacacaaatttataattaacttgtccgtcaaattttgttgtcttcttcgaccgacgaattagaaaaagaatcttcactgtttaaataatctagtacatatagtattaatgtacatggatgatcattatatatttgtagtttgaatagtctgcattataagggaatgaagaaagatggcgttggaatttgagtggagaggaacttgacaaaggtacgacattgcctccctgtaaaagatgcctatcattgagc

SEQ ID NO: 47025 - DNA, 675 bp, Arabidopsis thaliana landsberg
tggcttcgacaagatcctgaaactcagcttctatattgtttgtgccacgtacttggatcaggcacggctttagccttctcgagcttcccttgctcgacaagactattgggtgtttcaggcaaaacgagtccaccgaggaacatgagtatagctgggacggtggcgagaccgagagagagtctccatccccatggatggatttgctctgttttgtagtttatcaaattagcaactagaattccaatgcaagttgttagctggaaaagctgattcacagttcctctaatcttcgctggagccatctccgagaggtatagcggaaccgactgtaaacgcaaacgcataaattaaacgcaaaaccggaccactcacttagacattagagttaataaattgtggtgttttttttgcctggtttccgaatccaatgcctatgccgaggaagattcgaccaaggattaacatgaggatgtttttggctgcagcgttaatcactcctccgaggaagaagctgacagagccaacgaggatgcttcctctcctaccgtaaattctggtgacgtaagaagctccgaaagttgagattaaaccggcgaagtacagagaataagtgaagagtgtgaggatttgattgtcgtatttgcagaaatctgtttctttagatgcatttgcttt

SEQ ID NO: 47026 - DNA, 727 bp, Arabidopsis thaliana landsberg
tggtactaactctgtgtctatggctaagacaagaagtaagcccagattgtgtttttatgttagttttctcttcgttatcgagtcactgtaatttaagttactgaatgttgtttaatgcagtgagagctaactttgagttcttaaagaaacttggagttgattggtggtgttttcatgacagagacatagcacctgatggcactacacttgaggtaactcaagcttctgaacttataccattttgctttacattgaaactacaatctgctttattgcctggtgttataaaccattttggtcctgatatttcctttgcagcttgctgtttcttgtggtacttgataactttgttttgctcttgttggcccaatgttaacttgtttcagtcataaagaaagcgcctgtaacctgtttatacttaatctgcaggaatctaacaaaaacttggatgaagttatcgaactcgccaaagaactccaaaaggtgattcagtttgttaattttccagttcttattacacattggattttggaagatacttcttgtagttaatcaattctccaatacagactcatgtatgccattttataattgaatctttttatcactgaaacagtactatcttgttaccattccttagattgatgtgctaagaaaaaaaggttcttcgttttcttcaaatgcaggggagcaaaatcaaacccattgtggggaacagctcagcttt

SEQ ID NO: 47027 - DNA, 512 bp, Arabidopsis thaliana landsberg
cttcctgccctgcttggtctcgctgtccactgccactggaccttctccgctgtacgtacagtagcacgctggctggtgccggatgaagacgtatacggacgtggacgctgctgcccgtggcccactttgcccacctttacctctactatttgctggtgctaccttaccttacctccaaacctacctgcgaagcagcagagtgcgtggatcgtgaatctacaaccccctcaaaagtccatcactagagggtcaccaagacatcgagacggcgatcgtccattgcccgcgatatctttatcgtcgccctatatcggccgacgagcccccggactgaggccccaggtttgacattttgctcatccggccgcctctccccctcgaacccgttgagcccaaactcgcaaagccgactgttgcttgggcagaagcagccccgaatcttgcggagactcgcaactcccaccccaacgggcgcagcctcgcgagggaatctgcgacgccagtagacggac

SEQ ID NO: 47028 - DNA, 493 bp, Arabidopsis thaliana landsberg
ccgcgctggcgttcgcccggcgacagcttggccagcagctttttctgtgcgatcttccagcgttccagcgtggggggggcgaaattcgcgtcccagcgcgggtagaagcggcccacgtaatcgagcatctgctgcgcggtgagccaggccagcgcttccggctgctgcggcacgtaggcgaggcgggccttgctgtcgtcggacaacttcagtgccggctcgccgaacacgaaagcctcgccggccagcggttcgagcaggccgagcatggcgcggatcagcgtggacttgcccgcgccgttgcgtccgatcaggcccagcacgctgcccggttccagtgcgagatccatgccggtcagcacgttgctgccctcgtagcaatgcgcgaggccgcgcacggcgagcggtgcggcggtggatgcgatttccttcagtacggcattcatcggtcctttccccaatctcggtcaacggtggttgtgcaggtgcggtc

SEQ ID NO: 47029 - DNA, 783 bp, Arabidopsis thaliana landsberg
aggacccatcagctatttctgtatgttattcttgcgtttttgtattcatttttgttcaattgtttggttactggtggagattagttataactaatccccctgactttataaatagtgtttccaccacgctgtaacatctagcttttccagcttcgtttgaacctgtgtcattgcttgttctgattttggatataggagatcttgagctagaataaggctatttctttatgagtgaaaaatcccctattcattcttcagttacttccaacacctccagttaaaagagagctagttgttcataatatcatcctttgatctttctagtaaataattcagtgatggaaactcttgtgaggttttctctgttgtcttcaggtattagtctgttagctgaagtggtctacggctatctgaaaaacttgtttctctctatgtctaggtcaattgaaaacatcgctcctgtaactgtacaaactttggcacgaccacaaattgaaaaggtactatagttgaaggaaaatctttgatggtaacagaatttaaacttaatccacaccttttggcatgtttgttgtggacgattttcttgtctatagcttacttttttccatttcctgtctctgaatggataatttaggtcaccgttgcaattgaattctggtttttgtcagattgatcttcccctggcagagaagccttacaacaatcattgtacatataaataacttttgttatccaatgttttcaggcttggtgtactcttataaatctatcaaagcttta

SEQ ID NO: 47030 - DNA, 620 bp, Arabidopsis thaliana landsberg
tgcacatcgactctagaggatcccgatggggtcaaagccagggccgtcctcgtcatggtccatattctccttatcctgaaaagttgtatcagaatcccgagggggatgactattacccttttggaagaccaagatattcagtaaggcagccacgtgttcttccccctccccaggagtctaggcaaaagacttcctttagaagcgaggttgagcatcctggtccctcaacgtctattggagggattaactacagccataaaggtaggactaattcgactgttctagccaattatattgaggatcatcatgtgctgcctggaagtggtatcgatgaacatcgccggttcgataccaagctgactggaagatgtgactctcaatcttcactttccgttactagcccacctgattcccctgttcatctctctcatgatgacttggatgaatcagcagattcaactgtcctacctacttccagaatgggagaagatgctggtttactagagaaggggggagcaccaattatttctagtgatattggaaaggatagtttgatgatggcgacaggctctgtgtcttgctgggataatgaagagggggccatggacaggaatgaacgg

SEQ ID NO: 47031 - DNA, 648 bp, Arabidopsis thaliana landsberg
tgacccaaggtgcgccattggaacagtgtaataaaacttcccattgttcgcatagttccctgccgcggctgaagtcaaaattccattcttaagtgctctcaagaacgcccaagagactttatctttttgcagtggcgtaaattgaaacccctgagaatacgagatgatgtcgaccttgtccgcgatcgcatcatctattgccttcaagatattatcttctcgacaaactgaatcctctctaccattttttcttattactctccaacatgttttataaacggcgatcttcgcgttgggaacaccgcctctcatcgtgccttccgctaacccaaagtaccccgccttctctactttcctgccagcaacaatggaggctacgtgtgtgccgtgtcccgtcacgtcaatcaccgatttctcttcaacccacttgtacttttcttttttcgggtagtatgatctagccccaacgatcttgctgcaattgtagtttatgatagcaagattaattctcatacttaattccaactttcaagattcctaaccatgtcatcttgaaaagagaaaatcatacatatttttgttttacataagtaaaggtttattatagtacttgttgccaagtatgttttcgcattgtttcccaccagg

SEQ ID NO: 47032 - DNA, 893 bp, Arabidopsis thaliana landsberg
ctttaaaaaacatgataggaaacccacccctgcaaagaagaaacaaaccgttgttaagaaagacagctcagatgaatcttcttcagatgaggtatgttgcatctttacatgttacctcaagcttaggaggaacgtcataagcttaatctgaaattgttgatttaataaaattttatcaggaaaccgctgttgtgaagaagaagccaacaacagttgttaaggatgacaaggcagacagcagttcatcagatgatggatcttcatctgacgagtcatctgacgaggtaaacatttagttttacatgttagcttaaggttacagtaattccatatgcttattttgggaataaaatttgtgttgaacacatcattaggaacctgcccctgcaaagaagcaagcaactgttgaaaaacccaaggcagaaagcagttcatcagaggaggaatcttcttcggacgatgtgagaattgcgttatacatgttatttactcaatggtaaagtaaaatcatttacttactttgagattcgttttttatcaacgtaatcaggaaccaacccctgccaagaagccagcagttgttaagaatgctaaaccagctgcaaaagattcatcatcctcagaggaagattctgatgaggaggtttgttttgtcttttaatttgttatttctcaagattagatatttttaatgacttgtgactagttttatattctatacactaaatatttcatattattttcctacttgcaggaaagtgatgatgaaaaacctcctacgaagaaggctgaagtttcgtcaaaaacttctaaacaagaaagctctagtgatgaatctagtgatgaatctagtgatgaatctgataaggaggagagtgaagatgagaaagtga

SEQ ID NO: 47033 - DNA, 563 bp, Arabidopsis thaliana landsberg
acttacctgtcgcaaatacgcaacttcatcccccatttgtggaatataacgagaaccctcttcatgtatcgataatgtcaaccaggatacattttctattaactgctgaggcttctttgtttcaataggtttagtttcactaaagggataagtagactttctatttcttgtggatctcaaccgaagtgttgctccagaagcggatctcaattcttcctgagagttttggtttccacgtgaatcacttattttatcttggatgtgggtcaaactgccttccgacttctctaatccattcaactcagtcccatggaacccattagaggcaccttcatgggacttagagccactaccatgatcctgactacaagaacctggactgacttctttagtaagagcagcatccctgtctaagttgttcttatgcttccgtgactttcgtctatagacaaaatcaaacatccgtttaggattgtgagtgtgacacaggaacatcattagcaattgagagcgcatacagatctgaggatttaattccagaacacaatcatttcgcagagata

SEQ ID NO: 47034 - DNA, 979 bp, Arabidopsis thaliana landsberg
atccttcagttgacgtggtcaaaagcttatccttcacataaacaaatgactacaaacttgcttgcaatttttaacaattttagcagccaaagttacattaaatcacaagcatttgctcaaaacaaaaaagcgcctggaaatagagacttgacatcttgagtattatggagattaatgctgatgaagaagctgggatcaccaaagaagaaacagttccactcctggatgatcaaaatcgtaatcgggacttacctgacatagaaaggaacactatgatgcaaaaggcaataggtaagacttttcagacaacagctaatctagctaatcttttacctacggggacagttcttgcattccagattttatcgccaatttgcacaaacgttggacgctgcgatctaactagcagattcatgactgcgttgctagtttccatctgcggattctcttgtttcatacttagcttcacagattcttacaaggatttgaatggtagtgtctgctatggatttgcaacaatccatggtttctggatcattgatggctcagctactcttcctcaagaactttccaaaagctacaaactacggtttatcgacttcgtacatgccattatgtcgtttctggtttttggagccgtggttttgtttgatcagaatgcggtaaactgtttctatcccgaaccatcagctgaagtagtggagcttctcacaactttgccagtagctgtaggagtcttctgcagtatggtgttcgctaaatttccaactacacgccacggtattggttttcccctctctgctaaatgatgttctgaatcaaaatgtaaaaatcctcataattcttttggaatttctgaaattctctgttgtattgtgcgatttaccatttcttctgagatgatctcttgataaaatatctcaatgtttgtgtagttgctccatccgaccatgtttgttcagctggcttcatctaatct

SEQ ID NO: 47035 - DNA, 1002 bp, Arabidopsis thaliana landsberg
tgactgaagtcactacactattgattccataatactttatggttgatacactaatgaagaataaaacaagagtgaaagctagaaaaaaacctagcaagagaagcaacttgtaaggaaacgccttagtaagcccggtccggctgcttgtaactacaatctctttaccttcttccaactgaagaaccctactacactgcatccttacactagatattaataaataggtgtcttgttataccgcgttacgattctgcttcttgtatctttaatatactcatgaactagaataatcaattccacaaacagaatcaacaaaattctccaacgttttgaatataaacccacagaatagctagctgattcaattcttgtaatcgccaaccataattagaagcaattgatgggaaaccgtcaaaaaatcctaaaagaaaacaaatgaaatcaagaactacttcaataaactgaaatagaatgtaaaaaagacttacttacaatggttggaagagcttccgaagccgtgtagaagaaacttagagaagatgagcttaaaaaggtggccatttgcagaaagtttgaaaatttcaaaaagtgaagacttcataagtcagagaaggttaggtatccaaagccgtcctattttaaggcaactagagtgtttggtttcttaagaaggtttggttcggagttcggtccacttgattcctaacatttttgttaaaacttaaaagcctgtattaagggttgactttcataatatttagcttcttcctttctgttctttaaaaaaaaaaaaaagagatttgaattcatattttttaattattagttaacataagaaatatcaatatgcaaactcttaattattttataagtttatttgttgtgtgctataagttttgtaattttcttaagctaatatatatgtaatagggatggtaataccccaattctatatttctattactcattctgtttcaaaacacatgatatcataaagatttt

SEQ ID NO: 47036 - DNA, 1392 bp, Arabidopsis thaliana landsberg
tactttttctcatattcatatagattcattttttttccgtaataggcttcttgtccatgaggcggggaagcgactgggggcgaacggtgctgcagaggttacttcaattttccctttactttttattaaagccgcacaattgagaaacaaatgcctattagatgctgttgttgtggtcattactaaaattttcagtaacatcgctggtctcattttcaggtaaagtcgcatcccttttttcaaggagttgactgggagaatcttgctttgcaaaaggtaagtactccactcggaacctctttttacattcaagacaaattatgcaaataaatacatgttacttactggatgaagaaagaaaatagaaaataaagcagaagctgtttgatcaaatcgagcttagtcttcacaaatgcatattatgaatgtgaagagtgaaaggttctttaaagccttagctgcctttccttttatttctttttggtaggctgcttttgttccgcaacctgagagtataaatgacacaagctatttcgtatcacgctttagtgaaagcagttgcagcgatacttgaaattggaacaacagttgggcaaattcagaattcaggagacgaggtaggcatttggaaactccatccttttctctctaggtactctatttgcaatcatcgtatctatcgcaaattatttttcctgcttttgtgtgttttttagttggatgaatgcaccaacctggagaagtttgattctccgccttattatctctcgctcattaacttttctttcaaggtaaatttggctgctaaaagctgaaatatgaatcccagtttacgttgattggagttgttgggtagttctgtcttgggataattattattgaagtacaggatattaacagcatgttatgatgatgcagaatttgtcacaattggcttcaatcaatcatgatgtgctattgcaaaaggatccagctaaaggaggaggagactcaccctttaaaagccatggaacgtagagctctcctacaaccgtcaaaggtggccttagtccgctgttttctctggtttgcgccctgctttgaccgttgtagctgctgctactactatgctgaaattgttacctcaaggtctttgggtaattattttcagttttgtcataaattgatttggaaccatttcaaatgcaaatccaagtatttattgcgtggcaacaacacacatatacatgtgtataagcttgtgtgtattgaggctgatggaaataagagagcgctttggttactgaattatgggcatccacttccataacttttatctcgaaagaagtcttcacactctatcagaagacaagccaaaactgcatcaatccaccaaggtcccgcaatgaaaaa

SEQ ID NO: 47037 - DNA, 337 bp, Arabidopsis thaliana landsberg
aaatatcgtgtttgacatagtatacaatttaaactagtactagtgcctgcctgcgtgttgatctcttacaacacatttttgtaatgcgaaattattgatttcttgaccaatgtagtctataatgcgtaccttttgaagaaacttaaaataaaataatgataaaagcttttaagctttaagcagtaatattgattagaaacggatttgtaggtattatgtgctttttgtatgtatttcaatgacataactataccgataataattgttacttttcgcgaaaattaaaacgtttattttaaatggaattgtgtggtaaagatgtgggtgttgtatatga

SEQ ID NO: 47038 - DNA, 437 bp, Arabidopsis thaliana landsberg
tggaggatccagagagagtgacgctgagaaatctcgaagatggtgagaaggtacccgaagactatgcacattggcgaaagcattcatgtaaagaatttgagattgtcgataaagatgcagactttgaaaaaaaaattgttttgtccaaaaaaatcttctaggtatagagaaactctgaaaggactagagggtttcaggttcaccagacaataatactgaatgttgctatattgtggcattaatcaatctgagaagtgttcatgataacaattccaaacaaaaatggcacacctttagactttttatacctattccaagataatagtatcacacacacacaaacactattaacatacacagcgttttcttctctgttctcatcatgcttttcaatccttgtagttggtgatacatgaagccgagtctgcatgatgtga

SEQ ID NO: 47039 - DNA, 542 bp, Arabidopsis thaliana landsberg
cggtccctaagaaaccatattctataacccatccatttcgaactacttggttaatatgtgaaatatctatatgctatatagttaacgtaacatacgtgaatttaggcggctcatcaatcatatcctctcctttttttgtcatgggttttacatgacataatatttaatattgaaaactaaaaatgtttccatcagctgatggatggataaatttaaactagacttcactaagatatatacaatgtcaaactcatgccatctaaatgttcaattacgagaagttcaattggttaaatatatatttttggataaactttttctgtccaactatgcctcccctttgaacgttatcacattaacgcgtactacctacgaattttcaaagctggaatattacataaataaagcatccagaaagaaagagaaaagcattcaaaaaaaagaatgaaggtgtatataacaattagagccattgatgtcaatgtaatgggtcgtgttcaataccatactttttgaaaatcttgatgtattttatagtagga

SEQ ID NO: 47040 - DNA, 827 bp, Arabidopsis thaliana landsberg
cgacggagttgacaaacatgaaagcaaggcaaaccattttcttttaccttctcatagctttcacatcttattctgacttatttaatttgttcatctgtgctattggtgccgtgactggagtgcatattaatataaatgataccgaaatgcttggttttcctatctttgctaggtctcaacgagttaaagagagttgagattaaactgctcattttctgcttgctgatcttatcttttgattcctatattggaaactcatttattcatgcatctttgtttgtttgttcagataacatcaactgccggtggtggtactttgtctttagagtttggcgtgcttagtcgtttaacaaatgatcctggtgagtaaaccagtttagtcactgagatatacttctataatcataaatctgttagtccttgagaaatacttctctttagctctctttactcttctatcattttcgttgggatttccaagagatgtaattttgattttcatagtttgttgtgtttcttacgtgctcttacatgggccaactttgttaaacttgaagttttcgaacaagttgcaaagaatgcggtgaggggactatgggcacgtcgttcaaatctcgacttggttggtgctcacatcaatgtctttacaggtgaatggacacagaaggtaacaaaaaatggcttctgtatatgtcagaagaactacggtttgatgaactttacttcaacaaactaattagtctttttttgtcacccaaattctaaaatggtagtgtttacttggcaggatgctggtataggaacaagcattgattccttctatgcta

SEQ ID NO: 47041 - DNA, 1197 bp, Arabidopsis thaliana landsberg
gttattcaagaacacatgaagcataatagatcctaaaaggtttaatggtttcaccacctagcttactagaaaataaaatactaatttttccgattgattctccctagaaaaaagtttttttttcggtaacttaatataatggagtttttgtttaagagactatcattttgtttatgaaaaaaatatcatccgaattgagtaaccaatcaattttttttttttttttaatagaagtttagtaaacagaaaacttgctcgaattttacgatatttaagtgagttaaaatgtttagatataaatcctcataagccactgccaatttgcatggttcgatagaaggttgaaaattagatgacagagcagaggaagaaccatagtacttttgtaatcccttatggcacatgaaataaactcatgaaatatgttgtaacatgacacatgaaataaactatagaaaccatcagaaaactcaaggtcgggaacatatgcattgcttcgtattcatgatttggctctgaatcctacaagaaacagactattgcgagttgagtctgttcacatcacaactattcttcgaatgcaagttctcccacaagatttggctccctttttccactagctttggtcattctcctccaatgaatggcaatggttagtcaaaccattgcatgttggtctcattgtccaatgccagaatacaaaggtaagggttctactaatacggtaacggaacacacagatcttcaccatcaatcatgcctctacaacttctcttagacttgaagcagctcagactatcacaaactgactcctctcccttccaaccacgggtcctataaaaacccttcatttattaggttctctctcgtgttcatgtttgtagtcagatggatgtaatttttttggtaaaagataaaatttacaaaaaaaacaattccaaaataataccaaggctcatgaaccagtacttaaagagtcaaagatggacaaggcctaaagaaaaatagtacaaactgagatcatctagttcaatagtaaactttcttgcaatcaatataacttgaccaatgctgatgaccaaaatccctgaaccaagaaaaccactcttctagttagagccaccgcttctcccacctattcaatacacatcacagtacattgtatgagtctctttaaagcatccatatgaagatatg

SEQ ID NO: 47042 - DNA, 494 bp, Arabidopsis thaliana landsberg
aaaagataaagcgttaagaaaatacaaaaagcaagtcttggatctgatttggtcagtttcaaatgttttttctgcctcctagttgagtatatcggatcaaaatctgttttttcttcttaaatcttcagtcaatgtacaaaagagagatcacttggttctgttatgtacttctatcaatgatgctttctcctgcaaactctacaaacaaaactctcagtcacgacctcacaagtcagtttcctataatcaatacatctattttcatttttatgtcatttcttatctcagttcttaaatataaatagatctggaaaagagaatgacctcgttcggagaactgttctcagaagggaaccatcgaagcaggacaccgaggttcattgcactcggtattaacttgaatagcaacggagtcgttacctgtaacagcattttcaggtaatcagttttgaactaaatattattttaagtatgttctcttagaatggaaaggc

SEQ ID NO: 47043 - DNA, 848 bp, Arabidopsis thaliana landsberg
ttagtattaaaaaaaaaaagatgctatggtaagagctagtctccatcgtattttattagatagatgcttttttcaaggatgtgaggataaagtctaaactaggaattgctccacacacaataaaacaaagaaagtgcagtcgactattaaattaacgagggacaatggtcggccaataataagttaataacataagctaaagcaagattttttttttttttttttgaaagttactaataggccatgaactagatccgaatcattctcaaaaagtaatttcttatgggggaatggttaaagtgagggctagtcatgtgcggactggtgctttctcactacgggacaatgggaactgaaacttcacagtttacccactcaccacactaattttggtagtcatgtgactacttaattattgtgccgttaattattgtactacatcaggccagacaaatatatgggccttaaaccaactatagatgaaacgttacaaaggcccattaaatgaggaatgtaaaaactaagaaactcaaatttggccctaaaattacaaacacaaaaatacaattgttgcaataactaatttctacttgatgcgttacaaaccattattgattacagtttgcaatatactctctttagataaatgatgagtgtaccaactacaaaaaatagatctgaccattttttaaatagacagttgaatttgtagttgtaataatcggatcaagacgacttaatctacaataattgtaagatattcaaaagaaatcatagaaaattgaatattctagcatctagtttttcaaagtcttaagaaaaaaaaaatactcatgatatatacttta

SEQ ID NO: 47044 - DNA, 1049 bp, Arabidopsis thaliana landsberg
agaacatgtactcgtctgacccatatataaagcttcagtagtggttccattcttctaaaaagccatataacatatactgacctttgaaggcaaccacttagcagcaatggctattgatatccatccattcccacagccaagttcagaaacagtcttatccttaaagatggtgtcaggatgtctattaagtccttcataaaatgtaaatgaccagtcttctggaataaaaatactaggaatgaccatcatggttaactttttcctggactgaaagcctatagaaaaaaatataaagatatgttggtgtctgatacaagaatggtttcctgaacataaggtagccaatatctgcagcaatgggatgttagagatatattgcaagaagttcctagaaagaaaaaaggaccatccaaaacaattttaacttaaactcctgatgatcatgcctctctgtcaatacggctcatagcaacagaacgttttgtaaaaatttctgctatggataaatttactgttctaaaaatacgatcacaaatcatataagaaaaaatatcagtgtcagtattgaatttgttaaaacctaaagctcatatggtttcccaaaagtctggaattcaaaccttaaaccatgatcagttttttccaatgctaagaaggtggtatatgacacatgtgacacattttggaaactaatgagaatgacagataacaaaagtagtaaaaggatgcaaaaagaaaaagaagtgaaatgtgtagttcttcactatgtcactaaaatcctaagaaaacgacaaaagatctcgaaaagctaaatttctatatccgtagcctattcattagacaatcaagcagacgtgtttttcgagtactcggcgattccagtaaacaaaagcgcagattgatacccgaatcatcccaattctccgggaaatcaagcaaaagaagccagaaatcagatcattttaatcgatcatgaagtcaactaaaacaaagtacgtaagatcggcgagatacacacagggaatcaccaatcagtatatcagctgatc

SEQ ID NO: 47045 - DNA, 462 bp, Arabidopsis thaliana landsberg
tttggagggtgacgtggaaatcgtcgatggaagtgagaaggataaggacgaggaaaaagaagaagggaaaggtggattcctcgataaggtgaaagatttcattcatgacattggtgagaaactcgagggaaccattggctttgggaagccaactgctgatgtctctgcgattcatatccctaagatcaatcttgagagggcagatattgttgtggatgtgcttgtcaagaacccgaatccagttcctatccctctcatcgatgtcaactacctggtcgagagcgatgggaggaaactgggtttctggtttgatcccggatgctggaacactcaaggctcatggagaagaaactgtgaagataccattgacgttgatctatgatgacatcaagagcacttacaacgatatcaaccccgggatgatcataccttacagaatcaaggttgatctgattgtggatg

SEQ ID NO: 47046 - DNA, 499 bp, Arabidopsis thaliana landsberg
attctctcttttctcaatagtgtaggtggttttatcatcatcatcatcatcatcatcaccataactatagtagttgatatttagcatactatattcatattttcattcgaggcaaataaaaattacagtatacaatacaactataacctaactagaaacacgataaaaaaaattaaaatatctaatattgtcaaatgaatcaaacgacctttaatttcaaatttagtattaaaagtgtttaaagttaaaaccttgattgaaagaaaatatagttaatcttgtaatgtttctcgacagtaaataagtctatattaaaggaaaattacattattctttttttacgagattagatcatatcaacgagcttaaaatgggccggatgtttaacttagcccaaactttgaaattgtgataacgttaacttgcttgtttggggccttctcaatttcgaagggacgactgtgtccaccacacataagtttccaacgatacgtgtaag

SEQ ID NO: 47047 - DNA, 553 bp, Arabidopsis thaliana landsberg
gatttaaatcttttcttatttgcatgggatcgtctttcttgttttatgcacaaacgtaaacatcaatataaggctatttctaggaataagcatgttttgctccaaagagattggtctaaagcaaagacaagacatgggcttttgagttgggattttgatcttcttgctggatcctctcacttaaaggcctatatcttatttgttgtacgacgattgcaaaacctatgagaatccaatcatattgtaaaaataattacatatccccgttaatattggactattgaatttgttaaacaaagttcaaattacggtaatattttcaattgcctaaataatatatattgcaaatgtttacaaacagtgacttcaaaacaaagtaatgcaccaaacgtcaagacaaattctactttgcatctgatttttttttttacttttcagtttcttgtgattaggccttaaatgtcaaaaagaaaatatatacttagaataatgttggttaagcttgtgaattactttattttccttacttttggttagggttgtaattaaaaca

SEQ ID NO: 47048 - DNA, 1048 bp, Arabidopsis thaliana landsberg
actatcaaatatttgctggcaaaatttttggattcttatcatgtcctatattcttatacgcatgttatatctctagtttataagtcatgcatatttctttcatatagtataatcaaagttatttagcttgtatattggagtatttattatttttctataaacatattatatcattctcattcaactagtcgtaagtttcattcgtcatattcactcactttttgtttatggtttataatagtggttctctatggcttatttatttatatgatcttgcctaagaaaattggcacattcaaaaacctcaaactattgtggatcaaacttcatcatctttttcagaagacgtctagagattgtattggatcactgtttcttttgcatgatttaattagatgaacgttgtacttatctatgtctcaaattatgaaatgtttattcagaattccccggatcaaaagcggtgagtgaggcttcgtctagcttcggagctggctatgtcgcaggaccggtcacgttcatattcgagaaggtatctgttttcctcccggaggaggtgaagactaaagaaataccggtggaggaagtgaaagctgaagaacctgccaaaactgaagaaccagccaaaaccgaaggaacaagtggtgagaaagaggagattgttgaagagacaaagaaagacgagacccctgaaaccgcggtcgtggaggagaagaaaccagaggtagaggagaagaaggaagaagctactccggctccagcggtggttgaaactccagttaaggaaccggagacaacgacagcgccagtggctgaaccaccaaagccttgatttcttttcaagatggtatgattacttctcttgtatgaaaacatctttgtacgtaacaaaaaatgaaaggaagaaacgcaaaggaagaaaaaaaaaaactttttgtcatttttttgtttttatatttggtttgctttgtgtggataatcctctgtttttttttaatattgggaaagtcttaatgtgttatttatttaattcagtgaattgtacaaa

SEQ ID NO: 47049 - DNA, 534 bp, Arabidopsis thaliana landsberg
  unsure (1)..(534): unsure at all n locations
aaaaagaaaactaggtaagaaagtaaactaatcctgaccgtccggacagagggaaggttctcactgccgnggaanatagacgncacgtcaatagtgtacaccggagcacagaggatcgtgccttctctccctctctgattaaaagtatagagagcctccgattgaaaagatttgatcggtgaaaatttccattcgacgaatcggagttccaaaagctcgctgacgagttctcaatagtaacctctccggcgcttatcgtgaaaaaccctatgttccagacttctcttacgctttccttgcaaaatctgcctcaattttggattgaagacaagagcttgaggctttttctccaatcttaattgaaactttggggtttttctcacggggattttgcgaattagggtttcggattggggattttgctacatcgaaaggactttggagattcagcgttgggcctcgtaattgaagaatgcagaattcatatacaccgctctggaattttactttttagggaatctctcgttttcttct

SEQ ID NO: 47050 - DNA, 483 bp, Arabidopsis thaliana landsberg
ttcagatttttctgaaagacatgtatgacctaacttcacaaatgaaaggaatatacatcaaaaggaatcactagatcatcgccaatataggaaaactatctaacaaatacacgactatatttgtttgaggctaaactatggacgaatgcacaattgattttcatgtgcctttttggcatccaccgtcctttatagaaaaaagaatcagatatgaaatgcgatgcgaaaatggaaaaaactgaaagtgtaaaaacctgctcataagggattagcgggaattgcatcattctgttacaatactgggctatatagagaataattgagaagtacaacatgtatggacggactatccagaggtccattttttgtaatgaatcagatttgaacaggcaaacagatttgaataatcagtgagtctacagtcaaagtgtttacatcaaaaactaactgacgaaaccaatcaccccctaaatctaacaagct

SEQ ID NO: 47051 - DNA, 595 bp, Arabidopsis thaliana landsberg
  unsure (1)..(595): unsure at all n locations
gcatgcagaactcgtcgcacttgtccacgacagcgcgcatgtattgaagcgccagtttcgggatgcgcgtggtgttgaggacgagcgcgccgaggcggaagaactcggtgccagcgtgatagcgatgcccgttctcgccgcgctccaccaggccttgctccatcagcaaatgaagcaggcgatggacggtgctcggcgccaactgcagctgatcggacaaggatttgatggagacatcgtcctcggcctcggcaagcgaacgcaggatcaccgccgcgcgcgcgacggtgccgagcgtatcgctgtcacgggcattgnnnnnnnnnnnnnnnnnnnnnnnnnnnnnnattttccattgagcggaaagtaattttatttgacggaacggtaagacgactcacgaacgccgtcaagctgcagcggaacaggctcccgcccgctgacgcgcgcaaaaccaaccaactaagaaagtagaggggcgaagattaaaccgcagttccgatgcgctgacgggcacgtcgatataaattaaccacactatgacgggcgcccgaatgtcgtaggcctagacctcgcctgtagagtcgggtacttc

SEQ ID NO: 47052 - DNA, 933 bp, Arabidopsis thaliana landsberg
agaaaaaatcatccaagcaacgtgcaaagaggccaatatataacccataatccagtataaaaacataaaaaggttcatgacaaagataaagttgaaaagaagagaaaccttcgatctcctgtcgtgctagaggtcattataaaagcagctacacgatccattaacaccacttgaaacctgtaagtcacatacagaatcagattcacaaatgaaatttgaagctcaaatcccaaagaatcaaacaagaccgacactgaagaactattgctataacactgctaccgtgaaatgtgttgcagaatcagactgcctatacaaattctccaacatgaattgaaatactttctaaaattcaccatcataacagaaagacaatgttcgacaatcaaattggtacagaaacctaaaagtatgaaagatcgtcaaactgcggaatcaaaagtggttccagactaaatgaccgcaatactaaaaaaacaattgacgtattcccagaatgttgacaatttcgcaatcaacttgctagaacaacaacagcaacaaaaaaagagctctgaaacatacaaatgtctccagaaatgtcaatcaagctctacaaaaggacccaaattacttcaaaatgcgataattctataaactcatcactcgattcctctggaatacaaaggggaaaaaaaggtagagaagaaactgaccaaaggggattatagagaaaatctgctctctttttttgaatagagagggggggtcctcgcaaaccctatatattaattgtgagaatcgaactaaaagggtgcagatcggatgtcttcctgggccatgagggaaaaggaagaaggggaagatgaaggagaaaaggaaggatctgtgtgagaaagaaacaagtgatgatgattgatgaagatgaagcttattaccacaactttcaacgga

SEQ ID NO: 47053 - DNA, 549 bp, Arabidopsis thaliana landsberg
  unsure (1)..(549): unsure at all n locations
gggggggcggggcggggggggggggcgggggcggggggcggggggggggggggggggggggggggggggggggggggggggggggggggggggggggggggggggggggggggggggggggggggggggggggggcggggggggggggggggggggggggcggngggggggggggggggggggggggggggggggggcgggggggcggggggcngcgggggggggggcgggggggcggggcggggggggcgcggcgggggggggggggggggcgcggggggggggggggggggggggggggggggggggggaaggggggggggggcgcgggggggggcgggggggggcggggggcggcggcggggcggggggggggcgggagggggggaaggggggggggcgggggggggggaggagagaacgggggggggggggggggggggggacggcgggagggggaaggggggggggggggcgggcgggggggggcgggggggaggggggagcgcgaggggggcgaggggggggggggggggggagggggagggg

SEQ ID NO: 47054 - DNA, 1374 bp, Arabidopsis thaliana landsberg
tttagccaaccaaatggtttagatgtctaaatgtctctatcgcaagtgttgatcctacctgggattgtttttgaataagatggtcagtaagctggttcagtctttgtttcagttcaatttccacttcagttggttctcgaagttcctttctcatcatttctatgtctgcttccagtttagttgcctgaaatttctcaaggaatcaaacaaaaaatggaatcttgaagaaaagacaatagcataagtcaaccagataggaacaatcattccataagggaacctgaagcataattcaaccagacaactatgttagctaaccttatcttgtaaccgcccgattttatcagtcagcaaagaaatctctgcttcaagcatctggtgttcgaatttgtctcctctagaagtatctaactatacagcccacatatcagcagcatgattctcagaccaaatagacaaagatttccacattgagattgaagaaaaagaaacagaaagaaaagaagacccaagtcacctgttttaaagttgttccccttcccccaatattaaaagtatttcgcttcagttctacatgatgaagacaacttcttcagcaaaatagagaagtgattatccccaaatgactatttgcagtaaaaaaagtcatttgaattaatgtttttaagctctgtataatttctcaaagaaggaacctataccttccagagtagactctttaagctcaacttgttgtttgagtactgctacctgatctatctggtcacatcagaaagatagaaattagtacgcaaatgcagatatagaagttggttctaaaaccttgactcagcaacattaattaggtattgatcaaaacatccttagactcagaagatctacatctttcagtaagaacaatggtcattaacttttaccttcattatttccagctaatttaaacaaaccaagaaacaaaataaatagattatgtgatctttatacctgagtctcaagtttcttctgcccagcggcaagtgatcttgtaagttcagcgttttcagcctaaaacattcaatttttatgtttacatcaaaaaatcatatcatcttgctccaatgtaaggtaataataagagcaatttgaactgtcggcaaacaaattaaacggttaatacctctaatccggccaagcgtgtgagaacttccattcttgtattgatatgtttctgcttttcaaggtcagcagcttccagtgtttccatcatgtttgtttgcaactccgcagcctaaaggaatgaggacaaacccagattatatagttcatctagcttgagtaatacatatataaaatgatataataggtgtttgcaacagcttctacaacttggacata

SEQ ID NO: 47055 - DNA, 871 bp, Arabidopsis thaliana landsberg
acggccgatcccttgggaatatcatatgcctccgatcttgacatctgcgttgcttcggtgaggtagcattagaggcgttggagggggcagggtgaatgactctttcaccacgcattgcaagtaaggtaagcgggagaaatctgcctcggttaagatccggtcaagtccaaccactctgtcgaactcttcttgcactttttgttgcactcttggattcttgatcatttccgccatcgcccattccgctgttatcgctgtcgtgtccatccctgccgtgatcatatcctgcacacaccatttaccaaacgtgagaaacaagaaatctacacaaattaggtcaactgatttcataaaagcactaaaactcacccatagaagaccaatgatagtatcctcactaagatcatactgatccttcaacgttagcaacgcatcaacgaaatgctgtttcgctccactagacttttgacgggccaaagtatgctcctccatgatagctcgagtgaggcggtcacgacgagccccgtgctcagcaaacgccttctcatcagccggaaacatccacctgagccacgggatgtgttcagctattgacagtgaagcacctagcttcagaccgttggatactatggccttgaactcaagcccttgctcgtccacaacaccttcagcgttcataaaacgcttcccaaaggctagccgcgttatgttgttgaacgcaaccgctcctaagtacttcctcagttgtaaaccttttgctctgttttctgaaaagataaataaccaaattcagtgttaagaaaaacaattagggtttttgtactaatgaacataaacttttattgaactaggtaaataattatggacctta

SEQ ID NO: 47056 - DNA, 990 bp, Arabidopsis thaliana landsberg
attcacaagacctaacagccagagtctcaatgacaaacttatgttgacttttaaggagactgattcgcgaagggaagagaaagattgatcatcacatagaaacaaagctaatcgtgaagatattacgtgcatgcacaaccgatgaccaaaatcttttgcaacatccaaactactataaagttattgcatggacagaccctgtagaaccatacacaacacaggtatgggtttccaaaggcaactattggaagtataatacagaattggcgattcccttagattctcctgcaaaatatctttacctagaattgtttagaaaacattcttctagagatcctgcaacatcagatggagaagttgccataggtcgggctaagattcgattgccaaaggatggcaagttctctggtgcagctcgtctcgttgatttgaacagtgatcgttgtatcgtggataaaggaactcttgaattgtctttggaactaattcatacgattgtagtaacataaaagttatctttgtcatcactttttctttggacagtgacttgagttttattttctttttcttttttataaaaaaatttgggggattattgttaagatttacgatcagttgtagttgatttgatatgagtttatctttctatagcatctattcgctgtatatatctgtatatatttcttgttggacagatatattcgttaattatacgtaagcaattaagcataaatatctaatcgaattttgtaaactggtttgataagccatcaatgcatcagtcaagaatgaatcattgcacctaagctgatataattcaatttaccatacaactcagatgttgatatcttcttatggatattctgatcttttacattattagaaagaaacttgatttaccactaatgatgattcctatatccaatagaacgaaataagcccatctttataggttttgggtagtaaagttacaacaatcaaagacatgta

SEQ ID NO: 47057 - DNA, 480 bp, Arabidopsis thaliana landsberg
tatgtttttcctcggcacttatgctccatttttcctttttgtttttggaatatgaagaggttttggaccaaaacccgtaattttcaaggcccaagaccagcatgtaatattagatttgtctcatatctctctttcttttttacagaatatcttagtatttttacaataagttttaaaaggcgacaatattttttaacaaactatagttgtatcttctttttttggatcaaactatagttgtatcttaaccgtaagcaactacccgtctacacatccttatagttatatacatacatgtactcttatagtctcattgactcacacacttgcgctcgtattcatgtgtagataaataaatatcataattggttagacaaatcgagtggtgattaaaaacaaaaacagaacagtagatggtcggttttgtttagtgtataagtgaagaataattcttcttcagctgaaactgcgtttcagttt

SEQ ID NO: 47058 - DNA, 1099 bp, Arabidopsis thaliana landsberg
taaaaagtaacatctaagctctctagaataaagatagaatcaaacatagacttcaaaccctattaacacagatggtacagcaaggattcagaaacactctttagctacgaaccaatgaactagatataggcttcgaaaatcaagtgaaagattggctctctaaacctattcagctcaaagaaaaaacaactctaaaacacatatagattctgaaactgaaagatccgaaccaagaatcctgtagcaattggctattcaatataaaatttctcagagattctataatgtttttctccattgagaaccacaacattggaatcaaacataaacattgctagaaactctccaacttccttcctatatatctttagaaattccaccattacatatcaatccaaggaaatagagattaagttagatcaataaacccaaagcaaaacacagatgaattatgcgatcatatacagtaatggtaacacacggatcgagagacaaagacaaacgaaaataacaagaaatgcagaaatcaagcaagttcaagagctgagacataaacccaggtagagaagctgagattcaaacacaggaatccaacgaaagatcagagatttagaaacgagagattcagaaactaaccgacgagacttgcggcggcggcggcggcggcggcgacggaagaggatttgtctggctttggggatcctctgctcgctaaaacgtctgcaattgttatattactaagttacccttaatgttcctgacaacatcgataaagaaaaggttatttacggaaaacattgatttgccgagattttgggttggtatgcagctatattatttggtttgtggatttcataaaccgaaaaatctagtttttagatttttcggtttaacagtaaaccggattgaaccatcttcctatgaaattaaaccaaaagcctgagaataaaatgtgctactatgaaaactcgacgagagagggagaatcagtttcaagaagaaccaattccgaaacagagagaacaagtcgtgccattgtgtaaaagtaagctctgtaaaaagtatatgtattactgctggaagagaaaaaacacagact

SEQ ID NO: 47059 - DNA, 829 bp, Arabidopsis thaliana landsberg
ttggtcatttggaaaaagagcccctctcccccctctaatccaaatgtataaagaaaatttgtaagagaataattagtagccatagattctttttaaccactttcgcagcgtgaagtaaacaacaatggcctttgcattaatttattactttacgtatttctttggttcacccccacctagttttagacacaatcctcatttttcttaccttacttaatcgagccttaaaaataaaaattatatgcttgtatatactataacaaagcaaacaaaaataaagcaatcagaaatagtcaaaacttccttcattggtattttatcaaaattagatattgtacactagtttctaccaaaaaattagataatatagagagacaccccacacgctaaaaaccatgaagcatcacttttttgaaaaaagttttttctaaattggtcataatcctcttttgtttcttttattctctttttgtgaaattgcatcttcagctgtcaaatttacgtagtttcttgctccacacggctggagtcctggagatgccgcgttactgaatctggatggcatcgcagcactatcggcggcaaacgtgtgaaaaccacacacacacacctataaaacccatttttagtatccatcgattcacattaggcccatttatagggtcaggcccatgtaacattcatttcttgaaagaacaggcaagattctaaaacgtaccaaatagacagacaaaaatacatttatcttcgaagtgatacatctccacaaactcaggagtacaaacctttacaagtgaaaaaacgcatcatcatcatccattcacgtcgc

SEQ ID NO: 47060 - DNA, 104 bp, Arabidopsis thaliana landsberg
aggacggcggacgtctagaacagtggctcccccgggctgcagggggggggaaagacacttacttttcttataaccccttcaccacatggcaagggactcccttt

SEQ ID NO: 47061 - DNA, 2598 bp, Arabidopsis thaliana landsberg
aatgttatatgaagaaatcaagaaaactttaataagaaaatgctttgttatgtcatacgtgtaagcacatttatcacataaattttcactcgatttgttttgaaacaatgaaaaaaaagaaagaggaacttgtttctttttgttgacaacaaatcgtatgtcacaaaatccattaattcatggagatcggtgaagcacatcgcgctgtatgcataatggctttgtatatttgtattagaagtcaatgatttggaattaatatgtcaagtgattattaaaaaaaaaacgtaagattcaagtacatttcatattgtttggctataaattctaggcaatcaaattatttaaaacatgcttagaataaatatatttaactctaatatcagtcgagtgagatggcatagaaagacttcaaagttatcatgtgtttacttaatatcttatatatatttcttctctagtgagtgtttttaaagtggttaaaaatctggttgcaaaaataaaattgttgcatctaacaccaatttaatggtgcatatactgtatgtggaattaagttgttgggaatgtttttgagttttttccggccttgaggatgatgttgtccttaccgcctcatacaactaatgaatgagagaacatgtgagacaaaggataaacatattgatcagttttgtgcaactccatgtgatgtttgccaaaaataatttaatgctatttatatttgagaaaccatcacgagcacaagttaaataacttttgaaaagctatacatagcagaaaccaaaatataaagattttgagtttatttatataaaaattttaaaaaacgttttccaattcaccataaataatttgaattaattattattttaaacatgacttgaatttgtctactatttttgttgtatgtgagaccacactactagtaaccccacaaatcaacctaagattttatttttctcatacacctacttatgttagaaaatccacagaaattaaaatatatcaccagttcaaggcctacctttctttttttatagaagtttaggtaagaagcaaaattatggatcgatgcctaacataaggttcgtatccccttggaatcatctttgaagccatctaagactcgtttatgaagcatcatcccttttacatatgtgaaatgaaggaatatttttagatgcgataccgatagatatggtgtgttgattagcttctggagtccaatcacatacacactccattttttggcctagcaagaaaacccatgcttgcgaccgatcattttacatataatttttggcctacaatttgttgaagttttcttgagttgaattcaaaattaacggattttcatattttaatgatgtcaatatgaaaaccatatttgtaaatttctcgcgaatgattagcaaagttttaatatatctcaaacaccactccttttgtatgtgtatgaaacaattaacaaacatcaccatggttagtacttcctaaacaaatggaattcatgataatttctcttaagcaaaagtcctaaaactgtagttaagctttactgattcgctatattgattttaagttaagaagaaaaagaggtctcactaataaaagcaatcaacgtcaaattttcagaatcttctcgtgcgtcattaagaagaagagccttatctttttgggttaaaggagcaaaaaaatcgaaatttgtcgcttagaattcctcgtaaatttgacccatttgggggcatttctgttctttgttaaagatcaccgccttacgttaaaggggaaggaagacgaagaaaacaaaaaagaacggaactttctaaaaccccccacacaccaaaagcgctctctctctctgggtttttcgaggttgcgtttgctttcatctgcccaaccttctagggttttccttctcttaaagcttatcccttttttttgccttctctcgatatggctggagccgcttcttctgatcgtctcgtcactagcttccctcttctgggtacgttgcttttagctcaaagattaaaacttttttggcatcggaagttatcattttgtgctcgtcttataacttgcgattgatttctacccttgggtttagggtttagtgactagtgttatcagtatctgtcgtaggttttctgtttctgataggattgattggtgtctagagttctctacaaacctctttatgggatgctagatgaaattttgtgtttttctgcaagttagtgtttttttatctgcttatgggttgaatttcaccagtaatttgccttgtttagactgtgcaattggagtttgaggctttgtcattttaaaatattaactgggctcttgtatataatcgctgcagatacaacagatttgtttcaggacttgtctttaggttcagatgcaaatgaagttcctatgaactttactaaggtacttaattactacttctttttgaaaatttaaagtttttggaacttaaattgtgttgtgtcgaaggatctttaaatgcaaaccgttatgccagaggtcttgctgctcatttaatgtgaattaaatatactgtgagtatttttttgtcaactgactgtt

SEQ ID NO: 47062 - DNA, 744 bp, Arabidopsis thaliana landsberg
aaacagaaagcgggagttcaacctcgaggtttgttctaacatgcttatatgactcgagcaattgctaaggcgtgaagaggagaggctaaattgactgttaatatttgtagagatattgtgttcaaccgcaagaatttatggtattcactaaccagtgaaagaggttgcgtaattagtggtagtggcacacaaagacgacaatgaagccaaaaatacatgattgtatagtccttggcttttttttgaatattccttggctttgctattcgctgtataccaattatgatatatttaagtatgatggtatatatattcttctcagaattgggctataaggatccaaccttggctaccatgttatgctaacatcgcaattgagttacatattcttattgtgtggtttggctcaactaatgttgggggttatgtaccactttgtcattgcattttagataatttccgacctgttttttttttctgataaaaggttttcaattaaaagtaagcaaccataacaagctatgacaattaattcataaagtttgaaagtagtgagagagttacgcaaaaccttaatctagtcttcttataagctaacaaacatagtagaaaaggagaaaggagaaagagtcgaatgtctaggagctttacaaattgaaaagtccacggccaccacgaccccctcttccaaccgtaatccaattgtcttggatcttttgggttgtctttagaagccttcccaca

SEQ ID NO: 47063 - DNA, 616 bp, Arabidopsis thaliana landsberg
  unsure (1)..(616): unsure at all n locations
ttcataagagcgaatatataaaaacatgttaacctcctccaaatgcatcacagcttataatttttgttatcacttagtcacattaatacattatcatactttaaaatttttggataacagcacatcgacaagctagtttagtagaaatcacaaagcataatttcaactctgcaaagttctgattttaaaattcgtaaattttttacagttttaataccgagagcttatcatataaagtcatggctcattattaatgtcgttattttcggatttctctttaattggctaaaaagcaaataaattaggtaatttaaattcagcttaattagccaatgaaaacagagttaatgcaaaagttcatcaaacctccgaaaaagcgaaaattaaaaaagatgagctcatcagaataccccaaatccagaaaccccacccgtttcgtcacttctcacatctctctctcttcgctctgaagcaaagacaaatatgcaaaatgctctctgaacaaaattcactttggatttgcagaatttatttgctntaagttagagtgaggagagcaactgcatatctctgtaatgactgtgaagacttgaagacaccaagccgagaagaagcg

SEQ ID NO: 47064 - DNA, 600 bp, Arabidopsis thaliana landsberg
ttttttgttgagccattgaatccaacttggacttcttcagctttgcagattagtagatcgttttttttttactggcaatgtctttaatcagtctctcaccggtaattttgttcctgagaaaaaaagaaaaaaagaaaaaatattcctgagcatggctattttgttatgagttcctgaaatttgctgggatctcttgttttattgatgcaatgtatgcttttgcttgcttatatggctctgttattactcaaaaactttggtgcattgcgcaatgagtgcgtgatgataaccctttaatcaggatccaagtggggatattcactgattaataaccgtctagagagccatgctatacttcttgttcctttcgtattactatttttgaaactggctgttcaagaagaatcaaattcactccttaaactttcggggtgaaaaagacacttttgttataagtcattggtcttctggtggtctctcttttttttccctcacctttggcagcacagagaaaaaggtgagggaatcttgtgaagtgaatggattccttagctcgtgggttttaaaattccttggagcaaaacttcaaatggtagcatg

SEQ ID NO: 47065 - DNA, 1176 bp, Arabidopsis thaliana landsberg
tgtcgtgtagctggttgggaaaattctttatcaatttgtataatccttatccattcccaaagaaaatcaacacaaattgtgtgtcataattcaggtttattcgagttgttcaatatgtaaaaaccaacaaattacaagtaaattcatcgaaatttgtcacacaaccgttatatatgttcattaaatgaaagataatcgaactatatatacatgcatctatatatgcatatactaactaacacaacatatatatatatatacataaatatttctctcaaaacaaaagaaaacatatacatatgcaaaggtaaatagatataccggaggaggaaaaatggagtcgagtatagttgaacaagaagaagcagatgctgatcctttcggaccaaacagattatcaaatgaagaagaatgcgatgatgaagcagctttggttttcttgatgtccattttatgagtatatgtagtaactaaacttcacaatgtgaatttcttgtgagagagactagagaaggagaaagagagagagaaatgaatgttgatattttgttgagtgagaaatggataatgatagttttggtttttgccctaattaactccccaacggtccgttatataaccaacttcttctgatgagaaggagatgggttcacgtgatccccacgtggctctgccgccgtcttcgactctcttctcaccgccacgtgtgctttctcgtagatgctatggataaactttgcttttactacttttgtactctttcttctcttcttctattttgtcatttggataagttcttttaccttcttcttttcttcctttatacaatgaagatattaaactctcgtttttattattgatctttggcacattacactgacaacaatctctatcttcttcgttttctttaaattaaataattcgatcatgtgactcaatatcgacttattctcgaaaatgtcgctttgattttattctaagacttgtaagtttgacttccattattatggagtatggactaaaggtttattcattgacatcctcaaatctcgaatattaaactttcattttaaaatgttttatatatcggaggattttgtaggaggataatggttattcgacctttttttggttttgatgttataaataagaaaatgtctagtctatgggtattgg

SEQ ID NO: 47066 - DNA, 278 bp, Arabidopsis thaliana landsberg
aagcccgggcgcgctatccccaagctctctctcggattgtattctttctatcggcgacagcgcaccattggggggcgggtgggtgataaccaggtgtctgcggctcccgcaccgagctcaaaaaagaacttccagcaccaattgttatcggccactcgccatcttctgaggcgtctggtcgcggacgccagaattttcacaacgaagtgaccgctgcagtgaatagaatccgtgcgcatcgcatcagttgccgccttgctgctccagccggctgcaat

SEQ ID NO: 47067 - DNA, 343 bp, Arabidopsis thaliana landsberg
tactatcccttcccacatatctcgggaactgttttgtatttataattgtatgaataaatagcgttgaggacgtggagaaaaggaacctgatatatctagatctcatgaggtgatcagtgaattttcagcttaaaacttgaaggctcataaaaccatacttttggaagctttttctttggtttatgctattacatttgtcatgtaaaaatacctctttgctttcttcaaaggttcaaatgattagcttagagactaaagggcagcatgatcttactttagattaaaatagctatgcacttagaggctcttaatgcgactgattaggtgaagtaattactatgtt

SEQ ID NO: 47068 - DNA, 1049 bp, Arabidopsis thaliana landsberg
ggaatccagatgaaatatatatagtttaatataacataacaacatcatctttaatgtcgttgttgttagagtttgaatagccttcaaaaaaattctgtgacagtatgttatataccaatttaatttcaagttgtgttacatagactcaccactacaagtcatgggtcctttctaaatttatgtcatttagtgtatactgtaaactaaaaagttcatatacttaatccatttaaagttatggtcgtttagtgcagttctgttatttttgtaactcactaattactttgttttagtcgacctcaaaacaaaacaatagttatttgattcggcaattgtgttaaacaaatgggttaaagcctgtaaataaatgggctctcacatcttgagctaggtacaggtatggcagagatcggactgaagatctaacggaggagaaaaaatgttttttaggcacaactagttttgtttgtggtaaaaaaattgctaactacttagaagaactgttgcgaaagatactcagctacctcaccatttttctaagattaatactttactgtataattaccttaattatagtagtattttattaattaattgtataatttcttaaatctctttttaattttgaaggaaaaagtaatctttttaaacttaagtcagaataagtaaatgatataataatttctgtttttatataataaaatacagattgtttctttataattatccattttacattttttaaattgttttacgtatgatatataagtatagtttccttgtaaatatttgtttacattttaaaattgtttaaaattataaatttttataattatgttttatatttttaaaattaatagaaagatattttggtttatcaatgtcaaaattatatgagatcactaaagttgacatgtgacacaatcttataaattactaaactttaaaaaccaagctttatataataaaaaatttattgacttgacaaaaaaggccgattgtgcctattcaaatgtcataaaaattagaggtaacaggttatccctttg

SEQ ID NO: 47069 - DNA, 661 bp, Arabidopsis thaliana landsberg
  unsure (1)..(661): unsure at all n locations
tcatggttaagaacatggccagtttaagcccatttgactgtattctggcggggggaggcagtttcgccaacttttcagttattaaggtgttgggcagctggataccaacacgtttttaccagtctcttgaatcgttgagccacattgagtttgttaagctttcgcattttgcagtaaccctcctatcttattctgcttgttcaccatcaccttgaggacaccatttttcccctgcaccctgattggttcatcaaaattcatgtcacgcttgtacttcttctgcaacaacaacgcatgagtagttttagcttcgtttccactcaccttacacctgtttctataaccttgattaccaaaacctatgttccctgatccatctaaatacggttttcttctcttctcaatatctaaacctttacgactagaaccagttccatattccctatcattagcaaagtgagcagaccccaaataagctttcttaccaatatcaacaccacttccatcaaacgacctcctcatcctcattgccatcaattcatcttcactctcctcatcatcatcattgtcatcatcatcatctaatctatgtctcttactctccttccactctctactattccccacanaacaatcatcccctttcccttcaacacaatct

SEQ ID NO: 47070 - DNA, 553 bp, Arabidopsis thaliana landsberg
  unsure (1)..(553): unsure at all n locations
aaacttattgatattaattagagtatattaattaatattcaaaatgatatagtttgaaacctnncatgtaattgagctctcttttgggttannatccaacgaaaaacacacaaaatctatanagaannatctcattcannattagaccattnncaattagatattaannagttcaaaggtagggttaaaggttaaaaaacctggtaccaccaaannnnnnnnnnnnnnnnnnnnnnnnnnnnnnnnnnnnnnnnnnnnnnnnnnnnnnnnnnnnnnnnnnnnnnnnnnnnnnnnnnnnnnnnnnnnnnnnnnnnnnnnnnnnnnnnnnnnnnnnnnnnnnnnnnnnnnnnnnnnnnnnnnnnnnnnnnnnnnnnnnnnnnnnnnnnnnnnnnnnnnnnnnnnnnnnnnnnnnnnnnnnnnnnnnnnnnnnnnnnnnnnnnnnnnnnnnnnnnnnnnnnnnnnnnnnnnnnnnnnnnnnnnnnnnnnnnnnnnnnnnnnnnnnnnnnnnnnnnnnnnnnnnnnnnnnnnnnnnnnnnnnnnnnnnngtcctctc

SEQ ID NO: 47071 - DNA, 406 bp, Arabidopsis thaliana landsberg
tttcaataaaaatccgtaaattatgaacagaaaatcatgaaatacccatttgtttatttgtttttttttatttggttttactgaggtgttacttacactttttaaaaaaaaattgttgaaacggtgctcacatagtatattatatattttaattttcttctgacaaaagaaacatatataatcaaattatattgttttggtacgtttatagatacgtaaacgatgttgattaccaaggtggattcgaacaagaagacttaaaccaactattcgaagccatccgaagcaactacaaagcgtggtgcttaggtttcgctccactcgccgtcggaggcgacatggactccatcgccgttcaagaattcagcagaacactcttcaatatgcgtcccgacatagctctcta

SEQ ID NO: 47072 - DNA, 816 bp, Arabidopsis thaliana landsberg
tctcatgaattattattatatcatatatcacatgcgtttcgcaagagagttgacattgctattcatcgtctccaaagaacaacgccacctggttccatatttattgtccccaatttaaatttaatttaatcgtgatcattgtcttagttacataaatgttaaggttgatttcgagttatacgtcaattattcaatggaaacttgtttaattatataagttgagacgaactctcctttctctacctgtttaaagataactacgatacgaagacgcaaacaaaaaaatgcgtaagaaagtaattatggaagcatcatgatcagcatatacgtaccagtagatatatgtatatataaaaagataaaatactaaatactctcatgcaataaagccacatgcatgtagcgtaagggaaggaagacaaaatttaaatttttggaaataaacaccaaaagaacttgttgttataaattcattgccagttgcacatacagcgatttattacatatatatcccctctctctctctctatagtctctctataaacaagttttttatcacatttcttttctacagtattttctctattcacgcatatatatagatatccagctgcctccaacatatatagtcaactgatgaaattataagcatcatcattatagttttgtctcctttttttcttcttcttttctttttctttctagctactctcttcttcatagctagatcaagatgttagagatcattacggtaagaaaagtgttcttgatcggattcttgatcttgatactgaattgggtatggagagctgtgaa

SEQ ID NO: 47073 - DNA, 207 bp, Arabidopsis thaliana landsberg
cccttgacgctgatgtcgaagtacttgtcgaactgcgcctcggtgatcgcacccagcggcgcgaactcgccgccaccggtgttggcgaacaggatgttcagccggccgtggcgctcgccgatggtggtgaagatgcgatccacgttggtcgctaccgtgaggaccacggggacggtaatggccttgtcgcgcgcgtttgccaaggcc

SEQ ID NO: 47074 - DNA, 908 bp, Arabidopsis thaliana landsberg
tgcagggagatcagattcgtgtgctttggatggataacactgagcctgttcaagatattaatgatgtaactgttatagaccgtggtttcttacatggtgattatgttgcttctgcttctgagcctactggtcaggtgggagttgttgtggatgttaacatatcagttgatttgttggctcctgatggttctattcacaaggacatctctaccaagaatttgaaacgcgtcagggattttgctgttggtgattatgtggttcatggtccatggctaggtagaatcgatgatgtgttggacaatgtgactgtcttgtttgatgatggttccatgtgtaaagttctacgtgttgaaccccttcgacttaaacctattcccaagaataatcttgaagaagatgctaattttccttattacccagggcagcgggttaaagcaagctcctcttcggtttttaagaattcccggtggttatctggactggggaagcctaatcgtttagaaggtacggtgaccaaagttactgcgggatcgatttttgtctactggattgcctcagctggctttggtccagattcttctgtttccccacctgaggagcagaatccaagtaatttgactttgttgtcatgtttcactcatgccaattggcaagtgggtgactggtgccttcttccatctgtgaatcaatctgctacaatccccttacacaagcatgtatcgaaattaagactttatgattcccaagctgatcggcaacagaaaagtgggcgcgatttagaagatgtgcaagatgaagtacgtggaaaagttaaaccagctggtattactgctgaagctttgccaaaagtaactagtgaagatcctcctcaaagaaatccttctgtttcaaaggagcctgttcatgag

SEQ ID NO: 47075 - DNA, 868 bp, Arabidopsis thaliana landsberg
gcgaattcctctcttctcttggtttcttcctctgcaacgatcctcctcatcttcatcgtcactcttgagaattccacgcgaagatccggttctaaaaccgcttacccaattgctgagctcttcctcgtcttcgatcaagctctttgacgcgcgaatttctcctccgtctcgaatccgccgctcaaattctggttgatctctgttaggacgggttgagaattttatgcgagacccaaattcaaagtgattcaatccagaagagaatatccggaagagcaaagggacggagctagaggtattataagagagatgtgtacccggaagagagtgagcgaagaatcgtattcggagagggaaattcaaaggcatgactttagatacaataacggagtttcgccgttgccggtggccggaaaaactggaggcaagtaaagggttcagtgagagtgaggctttttcgagtttcagtggttttaattttaaggaacagaggaggaccgttaaacgacaacgtattatcttcgtatgctgaaaacggcatgtcgttttgtttgtttgaaatgttggaggaaaataatcagcaaacgacgacgtatcccctcgtgttctgaagtatggaaacggcaggtcgttaactcttgcttcaaaaagaagtttccctctttcaatttttttttacttattcattgacttcgcttcttcctctttgtcgttaactcttagataattaacacggaaaaaccataagtaaaaagcaaaacaaatagataaagaaaaagagcatatacttcaaaacaatggaagagatgatgatggggtcaatacgatgtgaggaatcagaagaaagattccagcgactgcgtaccct

SEQ ID NO: 47076 - DNA, 569 bp, Arabidopsis thaliana landsberg
actgctgacaacgtctcggagttcctcggcgtctttttccgttacgacaagatcctgcacggcgcgttgggaccggggctcgctaccgagactggaccgagcaccgtggtgatcgacttcaacatggcagaggccgccctcgtttcttcgcggcgatggcaccagacgcaacagatcgaactcctcgccgacggtcgcatcagattgagctttcaaacgccgagtctcgccccagtcgtatcgtgggtccttgaatgggggccgcatgcccgcgccatcgccccacaacgcttgctcgagcttgttaagggtgagctggatgaggcgcgcgcgcagtactgactcgcgctttactcgcgcggtttccagtcagtgactcgatagaactcatgcggagcttcacgacgctcgaatacggagccaatgggctcgtcgagaagctcgtcgacgcgtttgaccatctccgccaacgctcgaagcggcacgatggagatggtctcagcgagcgagctgtactcttcgttctcggtacccgagtacattcgccagccgctgtcctcattacgatc

SEQ ID NO: 47077 - DNA, 721 bp, Arabidopsis thaliana landsberg
acacattcgtctttttacgatcgaagtcaactatatcatctacaaaaatatcgttaattagttcgtacacaaattatatttcataaatatttcatcgttctaccattatactactcaccgttcattattattgttggtataatctgtttcgttaagttgtatgataaattaaaactagtaaagccgttttgtttttgtttatagttgaaaaagtaagcgtaatataatctgtaatttctagagaattaataagcaaacaaatggatttgactcttatggatttttttatttatttgcgagtggatgtacaatgtggactgaaattattgtgactccgaggagtactcagtggcacctgccccctcattgccgtcacaatatcccaatactaaacaaatgttacttttttaaaaaatattgttttttttggtaggaaaaaagatgtattgttttatgcgtcacagaaataaaaataataattaaccaactcaaaattactcattttaatgaaacgaagatatttttcattcaacggatcaaaaattcaaaatgagtcatttcttacgatcataggttttaatttatttttggtattaaatgagatgactcacacaaatatttcaatagttacacgagtattaattaaagtagtgacagtttcaacaaattttaatatttttgttcagttcaaaattcatagatttttaataaaatcagtact

SEQ ID NO: 47078 - DNA, 2076 bp, Arabidopsis thaliana landsberg
ttgtacagacctaggtttggagtcattttctgtttaagaaaactttacattctaagcaaggttctttttagagggaacatcaaactaattgggacaggtaaaaaggtttttttaccaaacatgagggacaagaagaacagaagctttgaatgagtggaaccacagacgtaggtgtcaaggttaccgagtttctcgacatgacccgacccgctagttggatccagatcaggcgggttctcggtgcactgatgacctgacattcttgttttcgccgaaccaaaaaacaagacgactcctctctcgcgctttgggacctctgttttaaaaagtaaagccaccaaaccacctttgacctttcacaccagttatctacactacgtgtgcgtatctactcttccacctaaaaaaactcacgtgcgttaaataaaaactaacttttgcaatgttaatttttcttagaataaatttgctaaatggggtaataccttaccttgaatgattgaatgattctatgcacttatgcagagtaaaaaacaaaacccaacaatcaaagattattctaattcaattatcaattttatcataacaaacaaaaactcttttgacaaattatttatgtggcttcctctaattatctttaacttttttttgtttaattcacaatttatgtggtcagatattttttcttccttccacaaggtgttgccttgaaaatcacgtcggaagatcacgaggaatcgttttgcgtgcgccacccaaacagacaaaacaaaaacacttcttttgttggttccttgtcggtttcctagggtttttgtttagggttttcattttctttttccttatctatctaatcctctgtttctctccacatcaaaaaaaacctcaaaattaagagacgaattcgagataatgggttcgcttaaggaaggtcaaggaagatacatggaagaaggtgaatcagaagagccgcttttgatggcacagaaccagagattcactatgttccccattaggtacaaatctatttgggagatgtataagaaggctgaagccagtttctggactggttagtcctctttctttccttgaaattttcttatgttctctgttcttcttgagtttgaactattctcggagttgtggtggatacagttttgattaagaaagtttgtgactttgtaaatgtaaagcttcttcttttcgttgtttaggattttaatgtaatatagatgttccattttgattgtggtttgtggaaaagaagatgtttttctacttgtaattctgattctggttcagagaatgtttcatgtgtgtgatagttctgtttctgtcttatattatcatcaattgtgtgttttgacttctttgaattaattgtagctgaagaggttgatctttccactgatgtgcaacagtgggaggccttgacggattcagagaaacactttatcagccatattctggcgtttttcgcagcgtcagatggtattgttttggagaatttggctgctagattcttgaatgatgtccaagttccagaggtgaggattttcactttgcggaatattgaaaaaactgtggctttaaatgattttttagtactgttgtctgacttgatatgctgtggcaatgtaatatcttgaagtcgacacttgctgtttgatttgagatagtcaattctctggatgtttcaggctcgtgctttctatgggtttcaaatagccatggagaacattcattcaggtaaggcttttgctagtggaaatattcattagggaaagatgaaaacgatcctcttaatggataatatgttgctgtttaccttccatgtagtcatagtgagaagaagaaaacaaaaaagtttaactttggtcatggtgaatgaacataaatatctgtagaccaaggtataagacttgtaaccagtaccctagaggagtttgatagggtttggttgtttaaagatttaacggaatatccttagataggaatatgacctgggtcattatcttgtaagaaactgatttatgacatattttcttatgacaaatatcagagatgtacagctta

SEQ ID NO: 47079 - DNA, 878 bp, Arabidopsis thaliana landsberg
ctttatcattactgcactttaaagtctgcgaagttggccacaacatccgtagtctaacgaaagaaacttgtgtggatcatttttaaatgagatgaaatccagttgtcagttattctcaattacacaattttgtgttgactttagattctgttagttctcaccgtctctttctcgattctacatgttaggccaaggaggtctctctagacaatgcatattcagaccaagaaatagaaaagaggtcatcagttgtattgttcaatgcctcaaagaaagaagtgaaacaagaatcaagcttcaagcaggaaccattattatgtgaaccacaaatagaagcaagggttaaccccagagttttcagatacaacccaaaattcaaatcaccttcgacgaacaacacttctctacatgagttgagaccaatacaaatccaagaatccatctccatgaactccaacagacaaaagtctccagtagaccaagaatcatatgacaaggaaaatgttgacggccatagtactgaaactggatttgtgacgctgaaaaaggcaagattcacagaagcaagagaccgatgttccatggcaaagccaaatgtgggagttctggtgaagtgttcgagtagtaaagaagacaaagaagaaagaaacaagaagagacgagttttggaggaaatgacgaatcaccagtcctctagagccgaggagatcgcaggaaaatggcgttgcccgcagaagaacaaaaggaatatagttccaccattgaagcagcttcgacttgacgcatggatacataaagtctgagtccttactacttaccaaacaatggtatcgcattctttcccctctctttttgattttctacatgtcaaataagct

SEQ ID NO: 47080 - DNA, 1031 bp, Arabidopsis thaliana landsberg
tgaattaatatagagctttgagttcttcttttgagtttcgttttctatcctcgtatcttccttgttatcggttattcttcgtgaatcaacgattttcaagaacgaacggctattctttggaatcaacgtcatcgagtctatcgtagctcaccctacactaccaatctaccatgcctgttaacaacttgccattctacttcaagaatagaaacagcacgtcgtttctaattgtaggatggttaacagttctgagtgccacaagccaaaaacattcaccatcttattaattaataaccaatccaatccatagatacaaagactaatccaaaaaatcgatgaataaaaaaattaaaaaacttttgtccaaaaaaaaaaaaatatatacaaaactatgatataattacacacccaccaaaaatgaaataatgaattaacaaatatgttgaacccatctgcacaaaaaaaataacatcacgctcatcttcttcacagcaatacccgccaagagattaaaaaaaatattgcttcaatgcttccataagctgagaaccaaaccaaaaatcgaagaaaacttgcgtataactcccaatgaatagtgaatactatacctgtaataacaattgctggaacagatcaagagattagtttttcatcaaacaccaacctgaaaaactccgaattttcagacaaacctttataaaaactgaaaactgatgccggctgatatgatgactgtttcgtcactgaggccctgaaaacacattctctaagatatcatgcagtttcggagctcgtctccggaacattggttctagccggaaagatgggacacccatctgccatctcttggcatcatacatctcattccatgcctgcactatttcatcaatcttgaatcccatacctgcgtttgttctaagattgttataaacagaaaaccattgggttgtaacttgtccagagtttggtattcttgccaagaattgattacaaacaaatgcactctcgcttgaacaatggttctttaccat

SEQ ID NO: 47081 - DNA, 583 bp, Arabidopsis thaliana landsberg
taagcggaacatgattaatgatgagaaagatttagatttgagtagtagtgtaagagttgtgacttcagagctaggtgttgctaaggaatcgattcatagagtagctgaagaggagagtgagctgtgtatgttaatggagtctcttaagctcgagcttcaaaacgtggagaaagcacattcagagcttaaagagattgagcaaagagagagggatcatcaagccattgaagatctgaagaaggaaacaaaagatgcaaaaacccaactctcgttgttagaagaagagctcaagattgctgtttttgaagctcaagaagcaaaagatgcagaggaacacgccagggaacggctaaatgttgcagttttagaatctgatttcagatcattagctgtggtgaaagaaagtgctgctgaagaattaactgagacagaagctttaagagcttgcagagatgaaacactcaagacattagagatgagtgagagagaaattgaagatatagaagctgcaacacaagatggtttgaagaaagctgagatggctcaagaagctacaattgtggtggatgttgagctgaacgac

SEQ ID NO: 47082 - DNA, 569 bp, Arabidopsis thaliana landsberg
  unsure (1)..(569): unsure at all n locations
ggatgcgttagacacaagaataccatttaaataaattaaataaatgtaaacaaactgtcaatatatgtgttgttaagataatgtagtttgttctattaggtgttaacactcagtgaaatatatagtacagttttgtttgaattcttaatatatacactacattttcctagtatctatatcattagatatgaattttacagatacattataagttagtatttggatatgcacatgatcgatacttagattagattggttttatttactgacagaaataacctgtataatctgtataatgctgtacactagtccactattgtaatctgtataagtttctttagagccaatttcctttcgtttaaaaaaaaaaaatcaagttcagttatgctcctatcctaatcatataagaataagatcaattatgtcaagattaagacggtcgaccaaatctgtcaaatccttcaatccatttttggcggttaattgcaaactaatctgcanaaccacatgtagtgatggatcanaatgtttataaagttgctttcatcaattcttggattattttctaa

SEQ ID NO: 47083 - DNA, 649 bp, Arabidopsis thaliana landsberg
cagttggtctcactaatggtcgtatggctagactccctggtcacctcattggttgtagtagttcctttacaggacagagcttccaaggagccgatggggttcttggtttagcctttagcgatttctccttcacttccacagccactagtctctatggtgccaaattttcatactgccttgttgaccatctttccaacaaaaacgtctccaactatctcatcttcggctcctccagatccaccaaaaccgccttccgacgaaccactccgcttgatctcactcgcatcccacccttctacgcaatcaacgtcattggaatctccctcggatacgacatgcttgatatcccctcgcaagtatgggacgcaacttccggtggtgggactatcttagactctggaaccagcctcacgttattggctgacgccgcgtacaaacaggtgattacagggctcgcacgctaccttgttgagttgaaaagagtcaaaccagaaggagtaccaatagagtactgttttagtttcacttccggattcaacgtgagcaagttaccgcagctgacatttcatttaaaaggcggtgcacgatttgagccacatcgtaaaagttaccctattgatgcagcgcctggaataagtgtttaggattt

SEQ ID NO: 47084 - DNA, 1295 bp, Arabidopsis thaliana landsberg
taaaccatcataatcggtcctatcatcgagcaaattcgttattccaattcttccatcatacatgaaacgagacatagtccagaaatgggccattcggtggtcaatagaccgattctttataagctatagcttccgcgtaaagaaatgtacgtagtataagaaattttaccctaggagggtaaagagcttcattccaacgatgagaaacttccaaaaaagtatatttccccaattgatatcgaaaattttagtttttcttataccacgtgttcaactatacaacatgcaaacactattttaaatcgtggatgcaagcttttacaaacttccgtccaaaaaaaaaaacttctgtcctcaagttggcaattatcatgcatgacatcatatataatatgttaaattgtgaattttagttattgaattcgtttatgtcataaaatagccaaaaaccatatatagacctaaattatagaattctagtatctcatgtgagtggagacgtaggaatcatatgaagaatgaagggttactgttagaagacgtcttcaatggatgaaaaagtaattaggcggtgaccttgagttcgttatgctccaaatctgacctttacgtcatcttctccaagtttgtgttccgttttggtattcctcaacttatcgaacccggttcttgcatgtgcctaattatttgtcaacatctttttatggcacatctccaatattttatgaagaagaacatattctatagtatttggtcaagttagttatatctcgatcgatagaatagttatttcctatacaactttatctacataaaaaaaaccacaaaaaaattgaatgatattccgataaacattcgaccctttctactaaaaccaaattgtgtgtagtatataactttacacatggtatcttgtcattttatgttttttttggtatgaagttatgtaacattttaaccagaaaataaataaagaaaggacaaacagatatgaaccaccaaaaaaccatgtaagcgccaattttagttgttatgctgttcactcatcactgaaacgtgggaaaatgattttccgtaataattcttcaaatttggtccaaactgtttttatttcataaaaaagaaatctcaattttggtgtattaaagtgaaaatatcaccttaaagttttggttatattttcaccctaatagaccttaaagttttggtgtattaaaatccttaaagttttggtttaataaattcgtttcgtgtggatagaagaaaataaaatggacttggccaaagttgaaaga

SEQ ID NO: 47085 - DNA, 685 bp, Arabidopsis thaliana landsberg
aggagctaagaatgtgcggatgtttttgccagaaacattggtcgataatgttagaatagtctacgaccacttctgcttccacttgctttcctgaaacttctccattctcctctgtaacaccttcctgcgtctaaattgaaaaactaattcagaccacttgtttaaaatctctgcacagacaccttaaaaggacccttttttgttcttcactataataagaatctgctatgaaacactagaaatgttggagtatgatgataaaactagcacctttaggcggaaaacggaagaacccatgcggaagattacaggtaatgaattatactcaattccaaattgctggcttagtaactcgtttttttctcgtgtctgggtaccctgaaacagagccaaatgtaagtgacaaaccatttagtcaatgaactaagagcgagcattggctactcgaacaaagcacctttaagtaatcctgggattgagttttgctttttccagacttaacaagcatccagaaacatgtattatactgattgtttatatggcctgcaagacaaaacaaaattgctgaaaggagcatccaactcaaactacgagtctatttgatatcaagcaacaatctcacaagacaagtgaatcatttataagacaagtatactcacagtcgacttgtctccaagctagataa

SEQ ID NO: 47086 - DNA, 708 bp, Arabidopsis thaliana landsberg
  unsure (1)..(708): unsure at all n locations
gaatttccaacagcacgtattacaatctaaagtgactgacacaatccaaactgactagttagatcactaaaatagcttctttcattctcttacaaaagctttacaatcaaataaaagttaaccaaagatataaaaatggaagtctcaatacatatactgcttcttcaccgatctgtgtcatacctacaaaacttaatagcagtaaaagttttgattgcaaagacctaatgaataaaaaagcaacactggtaatttcaatgcagtttgatcgaagatttcagtcgtcactaagagaattaccagtcaccatcttcatggattcttcatcttcttcttgtgcctctgcttcttcttctgcattggtgttttgactttcagcctctatgggctcacactgcttgttcaatgcattttcagattcttgctcctcttgtttctcatctgaatgaagcggggttcgttcagactcaactttctcatcagtttctggatctaagtctccatcttgattaatagtttctggttcagagctttggctctctagcgagattgactttgttgtaccagtgattccctctagactaggccctggtgcttcagatggcgctgctgctatcacagaatcttcttcaggtggtggaattatgattgcttcagaggacagnggttctgtgctatttatgttgtgaggaggtaatttgggttgag

SEQ ID NO: 47087 - DNA, 444 bp, Arabidopsis thaliana landsberg
tctgattcatgtgactctggtttcgtttctttctgtgtctctgctgtgtcgttttctcggcatatttctgatctttcgttctcagttggtttttggtttctgggtattgattgattgattcaaaagtcttcaactttcctggaaactggatctgggttcatccgtttttactcgtctgagaagagaaaaaaggatgaatccttatgatgcgaaagacagaagatggattctctctatgttcttcttcgtagttttgatctgcaccaacgtttcaactctcccttcttcatctgtgagttgggcaaaactaaattttctatctttccctgtttctctgggattagttttggttgaactcccgggaaaaggcaaaatatcaactcttcggcttaatcacactcttaactctcaaacatttactatttatatcacatgatgaaaatc

SEQ ID NO: 47088 - DNA, 981 bp, Arabidopsis thaliana landsberg
attgatcgtatcatataatcaatattatcaataccaacaaccactatagtcgtttagtctcaaagtggttaattgaaagaataatcgtatcatataatcaataccaacaaccactatagtcgtttagttcctaatataaaattgttctttgtttcataatatcactaagcgactactaaacgagtataagatcatttatacgactctaagatcattttcagctaaatgacactcggggtcatgatttgggccatgacttatatgatctcacacacaacaaagaaaaaaggtagtcttcgcaaatcgcaacaaactacacaaaaatggtaaagatggtgtctacaacagcgaattggccaactttctctacatatataaagtaatttgtcataattcaacatttgttttgtgttttctctttctttcatatctcgtaattacaatcataaaacaggtaagttagcagagtgtgctagggttatcttgatgatggtatttatgatatttttgttcataaccatttaaatttatatatttggacaaaataaaaaatatacataacctttttacctttttttagctaaagaaagaattcagtttcaagattgaaatgttaaattaatactaatttgcataccataactttgtaaattttatgattggaagttagattcaaaattttaaaattaatatagtttaaatttttgattaccaaaataaataaataaaatagtaaatccttaaaaagttaaagcagataaatcattttaaattacaactatgaaaatcttcaaattcatttcaaattttcattagttatcttggaaaaaagatttactaggtatagaaaagaaatatttttcacaattgttcaaaagttatcaatacattttataatcaaaggtaaccaaaatcatacatttaattactgtatttatatccgtaaaatatatgaatcatttcaacttaaaactattaaat

SEQ ID NO: 47089 - DNA, 939 bp, Arabidopsis thaliana landsberg
atgtccaaattttgtggaatttctgtgtctctttgttcttcaaattttaacaatactcaatgggtgaaaaagtgacctctaattgtttaaccacagttaagcctcaaaccaagtttctaggactcattattttcgtatcatgtgaatctgcgaataatgataaaacatgaaaataaatggtagtgatgtcatgtaaagttgcaaggagttttatcgcaacaaaatgacatgtcaatgaaatattttaatataaaattttgatttctttctctatttatatctaataatgccgaaaagtttgatataagaattgctgtttaaggttaaatcaaaatattggatttgtcactaacattgtggcatgaagtagtagaaagtacaagctgatgaagttataacttgaaattgattgtattgaaagcttgtgtagttagtattgtgcaatgaagttttcttgtcgtatcaatcaatctgcttatttccgctaaattcacatacttgctaagtcgaatcttaataaacataataagatttttaattataaaatagttaacacaatgagtttcatttggaatatttgttccaagaaaaagaaagagagaaagagttgaggcatatggtatgatagaagcttttgaccgtttactcaatcatttaggtaaatggaacctacatgatgtcgatttctttgtaatgtgtaggcttcactccctaaaggacccacgtgattattttagaaagatatctagtaaaaatacaaaaaatgagcagttcaaagtattttgatttatctttttattaagtttcttagtatgtcccctcaatgcacatgacaatgactacccaccttagttataaactagaaacccctatttttgagacacaataagagagataccaaaagctttcaagaagaaaataaacttattgcaaggagaa

SEQ ID NO: 47090 - DNA, 461 bp, Arabidopsis thaliana landsberg
tacgacttcagatgcaccgactaatcttcattttttcatataattaattgttgtcatgtgtaacacatgcaaaaatactctcattttttaagattccgcgtaattcaacttttaggaaaacaaatctcaacgcgaatctcaaacattcaagaataccatcacttttgtgttaaaaaatgtactaatcaccattttaattcttagatccaaaatgtattttacatctataaataacatacatcgtagtccatctccatcacaaacaatcacattcatcatttcatttaacaaaaaaaattataacctgaatataatagagatgggtagtagcctcacgcgcctactagtcttcctttccattttcgcagccatagctctgaaatcaaactctcaataccttcttccgatcaccaagcacgaacccaccaatctattctacaccactttcaacgtcggatccg

SEQ ID NO: 47091 - DNA, 1271 bp, Arabidopsis thaliana landsberg
aaaacgcctgatagataatagtaacaaggttaataaggaatggatggtttttggagaaaaagacatgatgagtttgaccggggtgacacagatccataaccagaattcaggattaaaatagtttaattataacatactcataaagtcgttccaagagaattaaaatagagacttctaagtgcgagaggctttagaacacttgaagcagtacgcaagtgcccccatgagtaggagagtgagatccaaacagtaaaaccgtgtaaatgtccgcgctacaaaaaaaacgtgtaactaaaagagttaggttcaacaaaacaaagtctaaaaacatatatacataaagcatatatcaaggaacttaccaagttgtgtctcggccatgtcctaaaaatgcataatgattttccgttcaaagaagaaacaacataatgttcgtaagcagagagttagaaaagatattaataactactcccttactaagaatattagagcatgttcaattgattaggaggtgaactgattaattaccatgtaatggcgtggattgaacataggattataaacgtcgacaaggccagtaatctcctcagccgcagattctgcaatgttcataggaggatgtaagcaaatcatcttttctccatcaagggggcatacacaaggttctctacgtttctggcgtccccagaggaataagatacatttcactgttgcattaagaaagaaaaaaaagacaattttgttagggtaataagttagtccagaatcaggggtttgtgttaaaataagacaaagctaaacaccctgattgttttcagtcacacacattagctagtgggttaaagaaagagtaaagaagaacctaaccgcagaatctgtgcatgcaagggtcggcaataactaccggagaagagactgataagcatctacggcattcaatagcaataataggtatctttctgcctgcgagagaaaatcacaactcttgagtaagaaaaaatcttggtctatagctacactaataattctaacaaatcagccatacataaccacgtaattctgattgatttagaaattcggagcaaaacgaaacacatatgattcaagtatgatcgagaattggagaaaagaaaagtaccactcttgtatcgacgctctgataacgaagaagatgatgaaattatcggcttcgacgcctgaagatccttcgatgccaattgtggttccaggcctttcggactttgccttgaaatgtattccatcacccttat

SEQ ID NO: 47092 - DNA, 1202 bp, Arabidopsis thaliana landsberg
agctctcattaaaaaaagttacgttatgcttactttattgaggaaactacaattttatatcaagatggtttctctcgataaaaattcgttacagtgatagttttagcataccatgcttcgagttgtcgttttctatatatgttgttttccttacaaccataaccaaataatgaactgatcatacaaatgaaaagatacttttatagatcggaatatatatcgacttagataacgtaaataaaggtacaccaatgtgatttatagattatatagtcatcaacaccatatatgaaactttaacaaaaaaacaccatatatgaaactttaacaaaaaaacaccatatatgaaactacaattttttacgaacatggtcttacctttattttatctttttttttcgtataaagaattcccaaactatgaaaaaatgtaagctaggtgaataatctaactttcatggactattactcagctaagttcaaaatatcccttcacttcaaaacttctaaaaacaactttcattgactatacgcattaattaattactattgtaattacgacgatttttttttcgttctcctctagctttttttagtttatttgttttggtcatggttgatggttgggaacgggacatcatcacatcacttatcaacattctatttggtccccaactctatgaagcattatttgaaatcattagcatgactatctaagttttttttctcctgatatttatccaaaattttatttcattcaaattgtttaacaatatgtacatatactatatgtattatataaaatacatatcaccactcaggcaattttttaaacttatatacagtatgtgataaaataaacatggtcatacgtttaagaattggaaattaatgaggttgcaagaaatcatttaacgagaacagaatgaagagaaagaaaaaaatagcaacttggtggcaaaaggaaaaagaaacagcttgagatcaaagctgatttgatgaatcgatactttggagatatatatgagcatcttcggcaaaagctttggcctttgagtgcagtgttacacacacgcattttccaaacgagatgatttaagttttgcagagctatcacaaatatattataataccaaactctcagacaatattatataaatcggaagtctaattttttttaataaaaaatgaaaatatagtat

SEQ ID NO: 47093 - DNA, 1346 bp, Arabidopsis thaliana landsberg
ttgagaaacgaacacaaatctccaccttatacaagaatcgtaaaagagaaaaaaattttagagagagatcttcaaaaagatggcgatcgttagccctaatttctgtgcaccgtaccctatcgagttgggaatcgtacggaaggtgatgactttaaccgatggtaacttcgccgtcacggacgttaacggcaatctccttttcaaagtcaaggaacctttgtttagcatcagcgacaaaaggattttattggacgcatacgatactccaatcttgactttgagagaaaatgtaagtatacgtctatcaactacaattctttataacttgcatggagaggcacaattttttcatggtgatacaaaaaaaaaatttcattatgcaaatcatatatacacaaacatgctcttataacttgcatggaggtacactttttcaatacgtctatcaactaattgtaaataatatcaaaatcatcatcactcattcgagtatgttaaatcgtcatagatcatccaataaaatctgatccacaacttttttttcttataacataaaaattgtagaaggtgagcttgcatgataggtggctagtatatagagggaagagtacagaccaaagtgatctattatacacattgaaacgatcttcaatgattcaaataatgaagccaaaactagacatctttttggctcataataaagaaatgaagatttgcgacttccatgttaaaggaagttggatcgaccggtcttgtgtcgtctacgccggcaaatctgatgccattgttgctcaggtaattacactgatcaaattgtctgtaaattgtataaaccggactagctagttatatgatcgtgttaattgagtcattgttgttgttttgttgtttttttcagatgcacaagaaacatacggcacaaagcatattaattgggaagagtaatttttcggttactgtctatccgaatgttgactttgcttttatagtttctctcattgtaatcctcgatgacattaaccgagaagattcagaagactagattaagttatcaactaatttctttttgtgcgttgcaaatcttaaataatactcgaaaacatagtacagtatatgttaattattacaatatttttagtgatttatttcaccaaggcctatcaatttatatcattataatagtgaaaccgtatttaagaaaatgtgcgaaagacaaatccaaacttttttgtggaggtagaccaacatcttcaggtatcaaaagtctcaaaacttaaatttaccatctttgaagtttcagcccttggagattcctttaatagaatctaaatgggggtggataaaga

SEQ ID NO: 47094 - DNA, 543 bp, Arabidopsis thaliana landsberg
  unsure (1)..(543): unsure at all n locations
tcaacagttttcgagaatgaagaacagaggaaaacgacgaatttagagataagactactgattgttgtttttctgggagtgattttggtgattgggttggttctgggtttggaattagggtttagttgggtgcttgaagaggtttttaaacctgaatttacagaggagattgtgaggaacgcttatgagagaactcaggctgatcttgatttgggggtgaagctgagactcttggaagatgaatttaagggttttgttacgagtagaaagttttcgagatgcacaggttctgattctaaatggaaaatcaatcaggtagttattaacttattattagcttaaattttcacaaagtttctatttttctttgactgattcgaagattacgtttctaggatggaccaatgttgaactcaaagtgtgttctgtacaaatctgccattgaagaggtgagtatatggggatggcctttgcagacatctggattgttccatanccgcttctcctcgagttcgatcaccgtgttatcaggccgagtaactg

SEQ ID NO: 47095 - DNA, 532 bp, Arabidopsis thaliana landsberg
aaagcccttcgacgacaccgtcgcgaccgagccaaaacattttttgactttcgcgaacgtgcgcttggtgaggacgggggcggggccgctcgtacgcgtcagatccgtggccactcgcaggacggtaaactctacgttgggcgtgtttatggtgccgacctgatcgacacgcgacgcgtacttctcggtgtaagcaacgatggcgccattggcgtaaccagacacggagctcgtcgtcatccacgtcgagccggcgctgaacgggacggccagaatgcgcgcgggcggttcgtattggaggtccgacatgagcgcaccgccctgcgggctcacgacagcgagcaacacgacgcccgtccagtctggccttgcacacgccgagcaaatccgagcccgccgagagcggtgcctgttacgtagccgacggatacgtatgtggtcaccaggttcgaacaggcgaggagagcgcgatggtctgatacgcatcggtcgcgagctgaccggtcaaatcccatgtgcgcgcgccagcggt

SEQ ID NO: 47096 - DNA, 733 bp, Arabidopsis thaliana landsberg
gataaattctgtttcttttaattattaatgaagaaatcatgagctatcgtattatacaatgtttgcggttgtatggccatttgtgttttgggccggtaaaatggaatttcaaagctagggtcggtgatttatttgcttttctgtgaccggtgaaatggaatttcaaaatttctctttaccttactttgagactaaaagtattttcttcttctatgcttacaaaaagtactttagtttgagagctgtataaaataatagcaatcatgttctaggaattagaggcgacggagaagtccaatccactaaaaagttaaagaagatagcacttgaagataatgcgttaaagtagttatttattttctaacaaataaatttcaattaaataggcgctatatttactagactgctttacattaatttacattaatataaagaacaatattaatttacattatgtattttttatattatttacattaatttattactaaaatgtttttattttcgtttctagaatcttttctacattcaaaatatacaacagaaattaaattaaaaagtctaattacagaagcatcaatgcataaaatctctagagctgattatgtatgaaataatcgacggtactaaaaaattgcaacaactgactttttcgagaaaaaaaattgactgctataaaattgaccatgtattcaattattcagagctggtcttgtcttgactccttcagcat

SEQ ID NO: 47097 - DNA, 1276 bp, Arabidopsis thaliana landsberg
  unsure (1)..(1276): unsure at all n locations
cgccacacaactcatctttttgacttttctttactcacattttcatttttttgggtcaaatttcttatttgtttttggttaaattctaaaaataatacactttctacattgttttgtacttaaaagtcaaagttgtagctagtaactaagccaataacatcgtgaaaagatgaaacaagcgccgagataagttcatctccattatatccacagggatcatgatgatcattacgattctgcttttgtttttttagtttaacacacaaattttttgaacaaaacaatatcatcaaggacggtgaagaagtagatgaacacaaggcatcgacctcgaggatggcttcataacaaaacaaaagattaggttctcgcctaaagcattaatgttctaattttcacatgggaacatacatcttttatcatttgtgtgtattaaaactaaatgaaaattgataattaagtgatcatcgtcttaagagtatttcagaatacatgtctagattcatgcggcttattaaatgtaactattttggtgttgtaaaaacaaatggtaacaactaacaaccaaaccatctaatatgagcttttaagtgaaaatagttgtaattagtcagtagtttcttcatatgtgtctagaacaaaactcttttttattgaatagacattttcggtcatcactgaaagggtaactttatagaaatgttttgtcttagatctagacgacattgttggggaaaaaaacaaaatgtacctctatgtttttctttgttgagggaagtgggcatttatgtatgtttcaataatgtccaaatattgtaacaaaatacacgtgtccgtatatgcaaaataaacacaatggttttgcgatatctgttttttgtcgagtcctccttatgtatgtatctcctcaagtacgtacttttgttacaacttacaaatctcttttacttcgtccgtaatctatgtacatacatatatgtatctaacgggccatggtctaatttatatgatattaaaggtaagagaagaaaaaatggacatttattttgtaaaattgtctaagtatgtaaaggcaaaagggagacattgtagggcaacgttataatccctaccaaaatttgttttgtatacattctttcacagttttaattgcatctctctcttgtccttgttggctctgtcctcattgtttatttgcccttgcctcctacatgccacatgattntgctttcacaagaacaaagaatctaggtgtcctaatgaatcanaacatgaa

SEQ ID NO: 47098 - DNA, 591 bp, Arabidopsis thaliana landsberg
cccggtacctgccaacgccgacggcgtcctggccgtcgcctcgcggctgctcgactaagcatttatttcctacgtctacggcggctagcaggtgggcgacggcgaggcctgcaagacctgcaacgcctgcctgaccgaacagaagccgacgcctgccaagcgcctcgcggcctgtccggcctgccgctcgtgcagcctcgactgcagccacttcaccgagctcgtcttccgcgaggcggggctgccgtacccctacctcgacaccgccacgatgttggcgctctcggccgagaagctccgccgaagctacggcctcgtcgacctcgaccgcgatctcgaccgtgcggctcctggcgacctgctggtctacgacggccatgtcgtcctgctcgagaagcgccacgatcgcgtcaaggggcagcctgcctaccggggcgacatcgtgcacgcgaccggcggccgggacatcaagacgccgggcgaagggatccagcgggaaagattcatagatctcgcgaattttcgcggaccgctccggcgcatcctgcgggcccagtccctttccgtaagcgtcgagcccatgcccaaaaa

SEQ ID NO: 47099 - DNA, 683 bp, Arabidopsis thaliana landsberg
  unsure (1)..(683): unsure at all n locations
ccccccccctccccccctcccccccaccccccccccccccccccccccccccccatccccccccgcccgccccccccccccttcccccccccccaccccccccccccccctcccgcccccccccccccccccccttttcccccccccgtggggttccgtggcccccccacccccaccccccncccctcccccccccccccccctcccccccccccccctcccccccccccccccccttccccccccccccctctccccccccccccccccctcccccccccccctcccccccccccccccccccccccccccccccccccctccccccccccccttcttttctccccccccctttgttgccgccccccccccccccgcgcccccccccccacaaaaaccccccccccctcctcccccccccccccccccccccccccctccccccccccgcccctcccctcccccccccccccccctcccccctcccctcctcccctccccccccccccccctccccccctcctcccccctccccccccccccccctctccccctcccccccgccgctcctctccctccccctcccccccccccctcctcctccccctcccctctcctcccccccctcccccccctccctctccctccccccccgcgccctccctcccccccccccccccctc

SEQ ID NO: 47100 - DNA, 1095 bp, Arabidopsis thaliana landsberg
ttcatacgccaaaattcggtcgagaattctaaattaattcaattaaactatgttaatggtttaattatgaaatctaaattaattcatttttataattatgaaagtcaaatctattgcaacggttggtgaaggacggtggggtcgtaagtcaacatacgtaatggtggtcggtcaagagattataaatataagcaagagaagttatcatatgaagcaagttctaatgtcaatttagaacgataatgatgtaaataatattttagatagatttgtttaattatatctagaatgaaacttactaattaaaatgaaacagaaggattttttctttccggcagtattactaaattactaattggtaaaaatgttccacactacctattgaataacaaatttttctatagtggaattgcgattggcagtttggcacttgcattaagttaataatttcacatatattttaagttcaaatgataaaataagctaataaattcacgtagatcgtacgcacacattttgtttacatgctttaacgtgttgcatgttatatatctagtttggtatgcaagattcgtgcctaccttggaacaaaagaggcaaatgctaagacaaaagaggcaaatgcctaatcatggccaaaattatatactttagaggatcccaattcaaatattactcgtagtattttgccgctactttgaaacaatctttcgtttttaaagactagttttgtcttcctgattattttattagtttaatatgtgaacttagcagtcctgtaaataaactgagaagttgccgacgtttgttcgatcgtttctgttttcctccgacacgaatccggatttctcatgttagaaacctatgcacgtgcgatatgttgcgtttgaacatttttcaaaagagatatatatgggcctatgtgtttcttttgcaactataaatgggcctttgaataagaacacaaaatattgatattatttcatgcccaaagttttattaaactctagctgccagctgaagtgaattaactaacaaaagaagaaaccgaggaaaacgaactaaagaatcatttatcttggattttgtcaacaa

SEQ ID NO: 47101 - DNA, 1153 bp, Arabidopsis thaliana landsberg
tcacaccaagttgccccacgctaagggtcctgaaaatgttcctgcaggtaaaaaatactttttattcttcacccgtcactaggattccatttctttccgtaactatttcatcaaaaaaaaacaatgtcgtttgtcaggaactgttgtggacaccaagatcgtacacccgacaaactacgatttttacatgtgtgctcatgcaggaaaaatagtaagtgtagacaaaagtttagcttcactcctcgcacctttattacaatcaacgctatataatgtttccctctatgatctctcagggaacttcaagaccggctcattatcatgtattacttgatgagattggtttctcccccgatgacttgcagaatctcatccattctctctcctatgtgtaagttcactccttaacgtcaattacaaaaaccaacttagctttaccatcactaagatctaattgtctcgaatcatcatcattccagcaaccaacgtagcacaactgcaacttcgatcggtaacactccttaatcaaaatctcttttataaataaaaatgcatcctcctcttttacactatacagaaactacacaactcaatattcaatgtgtcctctcttttgtgtgttttgtgatctcagtggctccagtgcgatatgctcatcttgcagcagctcaagttgcgcaattcacaaagtttgaaggtatatcggaggacgggaaagttccagagcttccacgtctgcacgagaatgtcgaaggcaacatgttcttctgctgagtacatataagtagttctgcttcctccctagtctaaacccaaaccctcctctttagaggaagtttatcattttgcatatatgcaatcatcaccgtacagtttcattagaagtaagaagaaagatcctcgcgtagattaagaggctcattggcttattgatagccctagtttgcttactaaacggcagcgatttttgcgtttagcttttggatttttcaatacgttaatattaaaatttcctttttgttttgtgaaaagtgagacaaactcgtgacgtaaaagtctttcaaacggtcaaaccggtctaacataccgcgtcaaacccacgtgcactactagaaaactctgtaatgaagtggacgttaccacagacaatcac

SEQ ID NO: 47102 - DNA, 639 bp, Arabidopsis thaliana landsberg
  unsure (1)..(639): unsure at all n locations
gatgctcacacctagctagttcaaactgcgtacgtcaaaatatgtggtatggacgtaaagtattttataacagttttgttagaaagttagatacttataaaataaaaaaattgatattttttttggtaaaaaatggaagtttggtattttttggcagttgaatacataaataaaaatctatattacggagttatatattcttgtttggtcaaatgtttcggaagcttttagattacgaaattacataatccatgatgaattaaatttggttagtggtagaagaataagacgccaaaagaaaaaagggaagaacattgggttacgtcgaaagtcctttgataagaatttgattttgcatagtcaaatttggaccaacaacaaaaatggagtccacgtgaaatagaagagagagacttaatagcttctcatgcataaagttatgaacaatcaatgataatcaatgataaataactaaacagtacaaaatctctgtatttttattggatttacaaaggtcatgaacaatcacttcaatatttacaatttttttaaaaagacgaggcaattcaagctgatttatacattatgattaatgatanatatattatggcatttgactttctcacgctaatgtaaatg

SEQ ID NO: 47103 - DNA, 555 bp, Arabidopsis thaliana landsberg
accgcgactgacgtctaatccctgagaacaggatgtgtgcatgtccataccagtgacaggcgacgtgcacaatccgcaaaggcatgggtcacgccggttaccgaagcgagaccattgactctgtgtcatgcatgggcggctctcataatgactcctattgtacccgctacagagacaagcgaaggagagaggcggaggagataggacgatgtcgtccatgtacctgcctacgcacgtcgacgtgctagtctacgccgcaacctacaccagagcctacgcccaccaagagaatatatctgtaacacctcttgtgtcaagcatgcttatacatctcatatgcatcatgaaagcatcctcataagaaatacatctcataacttgaatctaattcatgaaattgcttaactcttgatatgaattgtgaatgtgctcgaaatactagaagcttatgttctagaatcttatgctactaaggagtaattgtgtgtgtagctaaccgaacttaaagtgaattagatttgcttatgatgattgcttgctttacttgtgtgctat

SEQ ID NO: 47104 - DNA, 813 bp, Arabidopsis thaliana landsberg
  unsure (1)..(813): unsure at all n locations
tggagcgttgataagaaaaaatgtttgtaaaaccaggggaataacctttttaccacctaaggaggaaggtttcagaggccttggaacccaagaagacttaaaaatatcacaggacctatgatcacaccaggttttaaagcttccgagctctagatatggatggaataaaataaggttaggaagaacatgtatcttataatatcttagagaaggggtgatacatacctagctcgataacaactcatataatcacactccttattgtctccacgttgagaggactcttgatcatgtgtatggtggtcatgtttaatatagttatcgaaattttagataaaccgtcgaagaagagcgagaatcacaagcaagagcgggagaaacttggtttgggtgcaaaaggacgatcgagcagtcaaccagcattagatcaaccaacaaatgcgtcgcagaaagttgaggtttgtgttctttttacaagtttttgcatcttatatgctttctttattaagaatacgtattaaaaggtgtatgtttaatgcagcaagagaaggcaaagcaagacgatggactttcagatttaagtgacatattgggtgatcttaagagcatggccgttgatatgggatctgagatcgacaagtcagataacacaaatacatactttcatacattttatgcttatgtttgtagaatacttactattgttgggggcaaatccccagccccaacaaagctcttgatcatctcggcgaaaatgtataatgagcttaactctagtgttcaaggagantatcaacgggcgcgtcatgtgct

SEQ ID NO: 47105 - DNA, 759 bp, Arabidopsis thaliana landsberg
tttccgtttggttacaaattttttttaacactaaagcttcaacagagaaccatccgctattttcttcggaattgaatataattgtgaccttttggcatctttgtgaaataaatccgcggtatagttgtatttttgaaaaattggtaaacagaaattggccgaatcaaagcaaaccgaataaattagattatcaaataaatgtaacacacacatgtagataactactttatttccgtgcagcatatattgtgacacgtctatttacacgtcataatataatcagctaatcttaagtttctatgttcacattatcttcctctcatgctttataaaaaatggaagaaaatgacatgaaaaccaaaaccacacgggaatggaaaatgcctttgttttattttatttaaccaaattttgaaacattctctatctctatctctcttttgtctttatatgacttctgttttatttccctgttctttgatcgtgtgtttttaaaccgtcgatgagtgatcggagtctgaaaaagtctctccccggtaaaagcaatcgccaggcggatgagaatttggatctcttctcagtcaaccgtggaacttctttggatggtatcatcatctattatttggtccatttgacttatcttttgcttttctacaccgacacacattgttattgttcttccagtgtgtttagattgctatcacgttttgcattctaagatcggtttcatgctattctcatttcaatttgctagttttt

SEQ ID NO: 47106 - DNA, 743 bp, Arabidopsis thaliana landsberg
atggtacctgatctatagtttcaaatttggaaggtggagtgttatagactgcctttaatctctcagccggagagcaccatatattctactcatctttttctcaagaagtgtaataacagaatcttctactgcccaaatccccggcttttccccttcttccgacccgaaccaccccgaagattccgccttcattgcctcggaaggagacaagagctcaaaaggcgatgacaaaggcgggttgggacaataagagcatccctttagtccttgaattcctgccccactccgtttcttgaacctcaagtaactcataatccccgggtttaagggtaactggtttgcgaccattgttcttcaccaccagagctgtagccatgcttactgggtagagagagacgatatacgttatgtcgagaaccccggccgtacagctaagttcgatctgagaacgttcccaaagatttcatcattgtgtggacaaaatttgatatatattgaggtattgaatcaatcacctgaagagcatcaatggcgtctgaatcagtatccttgacactccattcacatcctgagattactgaagaccctcctttaggttcttccccgtttacgataacaacaccaaccccacctctgctctcatcaccatcaactgtgtaaagcccttcctcgaatccctcgtctttccagtaaacatttggcttatatgaaagaacatgagcatctgatagactcagttttaa

SEQ ID NO: 47107 - DNA, 705 bp, Arabidopsis thaliana landsberg
gtttccgactcaattcttcgtatgaaccaagaaccgataggtctaaggttcgacctacatcgtctgactccataaacactttacaatgccctgtttccaaacctgatgcatcatgaactttcttagagcaaggtgatccttcatctgacgaagataacttccttcccgcaacgccgttttggttcgacccgcctgatgaaatctgcgttttctctatgtttgcggtatccgttgagcctttttctgatagctgttcctcgggtagtataagcttgccgaacaatacaatatgggactttttagatttggtatcattgcatggtgttgttcccattgtcaaaaagcaaaatcctttttcgtttttggtatcgatgtttcggagaccgagagaaggagaaagttggagagaggatggaggaggacgacgtggtctattcaagtagtaatggtgaagatccgaagatgataacccgtagtactgatgagcattatgcctggctccctgtaaacccacgggaacattgtccagaacagagcttaacgggcttgatctaataaggggattgcttgggaatgaaggtactggaatcgaattgatcagattgttgtaatctggatgctgaggtagccgcatctttttcctcggtggcgaaaacgaagtaagcgggatcggatgtacgtttgataccaattccaccaaccacg

SEQ ID NO: 47108 - DNA, 884 bp, Arabidopsis thaliana landsberg
caaacgtagggttctaattagttgtttttataaaactccttgaaggtagatcatatagatatataaaaagtattagttcatatgagaaaaagtgaaccaaaaaaaaaaattgtataccctaggttataataggtagaggagtttgtaaacaccaatcaactaaactaacccaaagtcaaaatgaaactaacgcaaagtcaaaatgataattataagtacttcacttattgtctgataatataaatgcgcctgtcgcaatttaaatggtgaagtctacgacattcacaggttatcccctattaggttatatcatattcattaataatttaatatcccaagttcccaaccttcacaaatggatcttcttggtcataagattaataattctatatcaaatctaatgttaaatatagaattctacgatgtgttgcaaacttcgagtgtaacttttttcagaaatctcaacatattgttgatttgattgactatatccagatagaggataagtattcaaagaaaaaacgtaatatctccttttcaagctttattttatactagttgacttagacttagaaaactagcatagtcaacaaacgttttgtcataaatcggatagacaacattaatgtaaaaagacttggtaaacaggtaaataaagacgtcttaaatgtacatataacctgtcgtttctttttggggaggttttaaatgatacatagttatactgaaacggaagataaatatgattcatcgattaatctgtcatatctaaaatattgtaactattgacttacatagatatagagagacaactccaattacagtattccattcgttcaagccttgcagaaatggaactattataagatgatggttaaattagt

SEQ ID NO: 47109 - DNA, 1631 bp, Arabidopsis thaliana landsberg
aatctaaaaacaattgaaatatgaagaatgtaagatacatcaaatgtataaaataaaagaagaaagatatcatgattcttgtagacagtcaattttttaggttctactgtcatcaagtatccagatcaattttatcaagcaatcctgagacgaaattttcagttcaacctgtccattaatagttgcatggtaacaatttctgagtatgtaggtaaacaactaccagtcaccctcaaaagtcaaaagtgccgtatatgaattagttgcttacttacatagtccagaggagaagaaatattacctgcatcccattgctgtcaaagacggtaccttctggtgcataagttgtcccactaacagtgaattcattaatcataggaccatgctctgcagattggactacacatatctgacatacaagcagaagagtaagagaattcaaatattaccatcggagacaacacaatgagaaaaagtatatgcaagaatgcaatcactgcagttagttattcacaaaatcacaagatctgctaacaaaattgttaatccttcctaattagacctgaagatctatcttagctacttcccagcgtgcaacattgcaaacatatatggtcatgtgtacacatgaactacattaccaagatttgcccatacaatatattcctagaaacaattaaaatagaaaattgcaagtggcagataccagtaagagttaacagtcccgaggactggtgctaagaatgctaaccttagacaccgacatcatattggttgtcaatgttccagtcttgtcactgcaaattacagtagtgcacccaagcgtctcgacagatggcaatgaccgtacaatagcattcaaacgagccattttctttgttccaagagctaaacacctagatacccaaaacatcataatctatttaagcaacaatataataaccaggagtagcctcccgacatggaaatttactttttcatagcattttggactcaaccaacattagagtgagctgaatttgaaacaaaattgtcatttgacgatcacaagaaccatctactttctgggaaacttcttgtttccaaggtatcactaacgttccacagaaatcatcttaagtttcaacgatcattagcctttctcataatattgtatttgctatcaatggacttagtgaacacttacgttgtcacgacagcaggaagtccttcaggaatagctgcaacagcaagggcaactgcaatctgggaaaataaaaggaaagcaacaaccgtgtcaccaaactttaacttattagtcaacaatctcagaggacaatacatccatcttcagttatgtcaaataagcaaatgataaaaatccacccattgcagaatgaaaatttcttatttgtgactttcaatattcaaatgttgaatggcgatttagtgagttaacaattctttggtaatttctttgtacctgtatgcgatcacttctggggatgtcaccaaaacaatggagaagtaaaatctatcttttgatattacagcaagagtgggacacacaaaactgattatctactccctaactaagaattcaaagctgtcataagagaagatcaaatttctttaccttaaaatagtgcttg

SEQ ID NO: 47110 - DNA, 667 bp, Arabidopsis thaliana landsberg
  unsure (1)..(667): unsure at all n locations
taggaatcattaatttatgatatttttgagatcatatatacgtaggagtgaacttattatatctaactgtgttagcttgaacattaacgtaactcgaagctaaatatattcactactttattaggagggaagtctaatcccgattggatgtagatgatacatccatacctacagaattagactttgctggtttttgttgaatgaaggtatgcactggtatcgagcctaagaccattgggtcatagcacattcgtactgatataaaccggtctaaattattgttgtttctggctaagggttcctgacctcctgtttattaaaagccgagtccatatacttaacaaaccgcaccatctacatgtaacatgtctcagaattagtgagagtaagtttaaaaactcttcagtttggtttttgggttgattttcaaattacactgtttcagctcaacgcttatcagcttaactggtttggacactaaatcttccaatgatgaataccgaaccggtaacgtatcagccaattcctactcnnnnnnnnnnnnnnnnnnnnnngaaaaaagttttagtttattattaaagagcgagggaaagagaggaaaacctcgaaataacaaattcactagaaacgaagaaagacggtagaagaagaagaagaaggaatcacg

SEQ ID NO: 47111 - DNA, 962 bp, Arabidopsis thaliana landsberg
  unsure (1)..(962): unsure at all n locations
aattgacattcaattctagtttgcccaaaaaacaaattgacattcaattatctgcgttataacaattgtatctacttcaaatatattttacatagaataattagaagtaaaatttaaactcaagcatttacacattattcacacacaataaagataaaatgtatatatgtctgtggttctatttctcaatttctttatttgtctgactttaaatttggtgtcgaggtatatcgcatcgacagtttttaaattaactccatgtctttttccatatcattttctcttgaattagcgatcacaccaacaatttttaaattgacgtccatgtttttgttcatatcatttcctcttgaattagctttctacaaaaactattaatcggaggaagggatagttattatagaaaataatattatctgcagtaagaatataatgtgctaaaatttcatatattttataagaaatgtcacctattttctttttctccatcaaattctttgaatgataaatatataatttcagtggttaaaataaaagatgaacatatttttttgctggggaaatctctcgtctcacctatgtgtaccactatggtcaatcatacatcgctttaagataatggtaatcatacatttggttttacggtttgataatttaaaggaataagtcaagcaaatattcgattttatttgtttgcgatgggcaaaagttgcaaagtagctttagcttataccatattcttttgaaaaatgctagcttttatattatatcataagtttgtatcaagtccaatgtgaaagaaagtctccttagggctgacgttcacaaatacactcatatatctatttgtggatattggaatgatcaaataaattaatataatatttctatctacacttccagtttccaaattaatgtcaacctcagngaattaaaagtacttgctttttaaaatgaaccgc

SEQ ID NO: 47112 - DNA, 563 bp, Arabidopsis thaliana landsberg
ttatgcatcttgcggcctaaataaacctctataaaactctcgtgtgcagatagttaggcagcacctagggtctgtgtgcctctagccatgctccttgctctatccatcaactccccctctctcttaagtacctatggtaccttggtgtcattacaccaagacatttgacacgctagacaggggctctttttggctgaagcactttgtccgtgcctggtcagcatatgcaaatggcacaacgttgtcccggtccaacctcacttcagcgaccccctcgtgtactctcgtgcctgtgccgcaatgcgtggcattgcattgaacaacagctgcaaaacagatgttctcctttttctttttgatgccgaagtcgatactacggcagggggtacttgaccggagcaaacccgtttcttcgcgtttcattacgcacgcgaggggcggagtcctgatcctgactgcccatgcccctcatggcctcatctcatctcatctcatctcatccggtccgtcggcacacttggagcgcgccaggcggagcaaggacgcgcactgtgacattagct

SEQ ID NO: 47113 - DNA, 1140 bp, Arabidopsis thaliana landsberg
gtacattttctttgctgacaaggtagagatcaaggtcttcacctttcaaacttgcttatttgctttagctggacccagaggcaaccaagtaagattattctttaagcagactgactaatccttgtaaaattttctctgttttagtctttatgctagttcagttacattattcttatgctactgtaaaaaacatgaaacagatcatgtctaaactgaatctgggagatcttattgggcagccatatggcaggcatcagcattatagtgtaagtctttttttgtaatatcgaaacagatcttgtgaagcaacatgtaagtaacaagcccttttctttgtcagtttgatggaatgccaataacagttggggtcggaagtcttatttcagatgaaggctttaccatgttaatgtcgccagggggtgccgtttcagtctggaagacccttttagctgaaggtgccattccgatgggttctgtagcctgggagaaacttagaatcactcaaggttagtaaaaattattgtccaaatgcaggcgccataagtatttgtcgatttggttttgcactgatgacactactatcacccgttaacctccaaaatctaatatcatgaatttgtagccactagtccgatagtcctactaatggcatgattggtcgatatttacctaatataggcaagaagttcataagtatgctctcagatctttgccttgccattagcgaaatcagaattgttagatcttacagaactgttgatgtagtgaatacgcagagaaaataaaatgtttctcaggccaaaagcattgatgttttgcaggaagaccagcacctgagagagaactcagcaaggaatttaatgttctggaggcgggcctatggaactcgatttcattgaacaaaggtatttgagaagcttttgttcaatgaactaaaatgatacaataaacacctatcagtaaacaatcttcaaacatctcaggatgttataagggacaggagacaatagcaagactcatgacatatgatggaatcaagcaaagattatgtggacttaatctctctgcaccatcggaacccggcagcaccatcacagtcgacgggaaaaaggttttgagcgtttgtgtgcagaccttaga

SEQ ID NO: 47114 - DNA, 733 bp, Arabidopsis thaliana landsberg
gattataaaaagtcttacctttaggctatttgacataactcttcagtttgattatatcaattatacattcaaacaaaaaatatgtgctaggatcatgttttagaaaatgaaataattaagcatgtgaaatatacatgaattgggtgtttctttacaacaaacttatatgatttgttttcagaaaattaggtctaagataaatgttctaaaaacattgtagaaagtgttccacatcaaaacccaatttattatggttcattggttagataaaactattacatgattaggagatcaaaggttatgtctgaattactgattacacgctaacacaatgaatgcaaaaaatcaaattttgttagatagtactatcatcttgtttgatgggcttaggttattgtttgagctttcgatctcgtgtttgtttattctggccaatgcagcatcacttaacgtatcgaaatccattttcttcgtatttttgtcgctctatgtcactttcttttgtttgcagacctatgctttcacacacatcaatatcaattcttattcaaatgttttttttttttgtaggttcaaaagtagatgtttaacaatttttcaatacacaacaatttcgatatataaaatcgattggaatatgacggcattaaccaaaaacaaatattcataaaattacatgtagcacactgcacatatattaatctaggtaagaataacaagttgaagtcgatgt

SEQ ID NO: 47115 - DNA, 1168 bp, Arabidopsis thaliana landsberg
agaaccacaagcgaagttttgtggatttttctgacacaattgatgtgacttttattttttggtttcaagagtttcagatctcattgatttgttggtccaaaaagtttttaagttgaacaatagactgataactcaccaacgtatgactctctctactaaatccaaaagtttaagtaaataccaaatcttggtttagcatcacaaaatcaaaaccaagcctcacaagacttaatactaagtagttacaacaggcttaatggttagtttactcataacaaagaaaagctttagtatgagagatatagttctagctaattttgacagctacacaacatgagatatacacatgcatacacacagagacactcatatgtagtttatactaacactcaagactcaacaagtagacgtagagccataatttttgcttggattttagttgcattacattatcctctttatctttcttttttcaatattttaagttatacatatctttctgttatttatattaggtattaactatattaatacatttatattaggttctgattgatgtgtttcttatctttcaaggactatacaaattgattgatggcaaagtaactatcttactatttcaattatattattcaaaagaataatttagaacgtttttgaaaagactaagatgatatgatctagatgcttatccttcgagtagtggatcgtagatgattaactaactattcaaagataaaacattaaaatcgtaaactaatatgaacaatattcctactatcgataaaaacaactggtattgttttactatgatataacttttataaaactgaggtgttgaatcttgtttttctctactttttactcgatcaccagattgaagaatagttccagtttacaaaaaaaaaaaaaatacaaatcatattttaaattatatgatgctttccattaaacatgaataatgggtaatggcatgaataaagttgaaatacataaatgaaacagctagttaggaagagagaacaagtgtgtggtgaagtggagtgagtaagaagtaagagagtgaggtgttgttgtagtgttgaagtgtggtgaggtgttgtgttgtgtcaatccactccttatttgacaaaaacttcttttttatatataatgtggtaaagccccc

SEQ ID NO: 47116 - DNA, 1011 bp, Arabidopsis thaliana landsberg
accccatacatctaaactgaggggcgatggatactgaaattttttttatcatcaaaagcaacaaaactagaacgggcaggttataacagattctaaattataaccaaacatccccgatcgtttctattctcacacattttataatcccaaaattatatgcttttgtgaatcccattacgcgccttcaaaaacttttaaattttaccatatcgtaagtctaatttatattagtcttaaataattggcataactcttttttttgtcggattggcataactcttttacaattttggctttggatgaaaactttttttgtgctaaaataatattatattatatgaaataatccgcttagttgaaatatcaaaaaatattgagagagtaatctctatttaaaacgttaacaaaaaaataaacttttaagatgattgtgtaacttacattcgtaaaagggcccaatagttttgaatcattcaattcaaatccatttgggctaaagtattgattttataaatataggacaaataataaaactaaccaaactatacggtcaaaaacaaagatatagaaaaagataagggacctgatcgtaaaatacaaatcttaaagagtttccaatttcagaagccaactccgtctccttctccgtgtccttctctctctctctcgaagttcatcaatggctcttcatccacaccttcaagactccaagaatttcaggtaaacaatctcttctattgttatcatgtactctttctgtgataggaaagccctaatttttctttaagtttccaagaatcaaaaccctaatttctcgaacttgctctgtttccagagacttttgcggaatcgacggccagatttcgccggaattaggatttaaccgctcagagaatctccatgatcaatctcagcatcctccatatattcctccatgtaagttttatccgattggaattagccaattagggttttgaaatttgattggtgaatctgtattgcgaatttaaa

SEQ ID NO: 47117 - DNA, 1923 bp, Arabidopsis thaliana landsberg
aaaatgtcgtaggcaactcatattagaaaatagatataatctgtataatcgtaaatcgatctagtgcatgataaaaccatttttttgtttttcgttttatacatgcatggtaatgtaatcgttgtaatttatgcttggaaaacacactacaaacttcaataaaagaattcagtaaaagttctagggtcgatcgacattttaattgttttggtatatttctggtttttcacttttaaaaaggtaacgcttacaagagaaagaaaaaaggtaaggtgtctttagcaactgcatgtagggtcgatcgacatattacacactcaccgacgaaaatattacgaatgatagagtgagaagtgtaaatgagcaagttgtgagagtgtgaagaagtagataaggattggttaacaaagagtgatgagtacactcttgaggatattttagagtgaattttgaggatatttgaggatgaattaatgaaatcaaaccttatttcagtgatattctatagtttgttggttccacatgtattagggaatcgaaacatagttttactttctttctttttacaaattagtccattattggactatcttaattaatatttgattataacttattctatttacatctacacaagtcaaccgataataatcgtgttaagagaattgtgtacggactgtggagaagaagaaggaataggatgcatccaaaagcagaacgtgaccaaagttaatggcaagagtttgaagataatacataatcgtaaattcaatatatcattagaggagtacataacacagacgaccaattaaatggaccgtcatatacaaagaaagacatgaaaacacaaaatctagaaacacaacaataataacagtaaaaggatacactagtgtgtatatagtgtgacatcttaattatttttaatactctctcatcgattatatgaaaacccttcaacgtctatcttcttttgatcacctgacgctgcaaccaaccaaatacatcaatcatatggttactaccactccattaaatattaggacctcaagtaaaaatgtaataaatatagagtgagatagaagataacgtacgtgttacagttggttctggcactgatggggtacgagatcctaacacggcaagcaccagggagacgagcagcacgaccagcgttaagtcgagaacccaaggctctcgctgctccctggatacaacgacaagcttgttggcggtcacgggtggtacgagccaagctgttgagcctctgaacgccagagcaacaccctctaggaatgaaaccgcctcgggtcaagtagttatagcattgacctaagctgccggtgactgcgccgcacgagattgctgcctcggacgccattggagcggtcactaacatgcacacaatcaccaaagttgacaacttcaagagtccctccatatcttatttttttttttttctctttttacttagtaagtaatggattggattggataatgaagaatggtaatgaaggttgggtttatatagagagagcttatgagtgcaaatgcatgaaagtagaaggtgtgaggctagttggtggttggtttcatttattgcattgctttctcttctcttatctttcgcttttgtagttttaattactacgtactctccgttttgtcagatctatactatatactatataaaaatgtaattcactcttgtatgcacatcctttttttttttttttttttctgaaactgtgtctggcctcgctggtacaaaataagaaacgatttgtcttggatccctcaaactatagacaatttaagactagactaggtaattgatattgaaccaaaaccatggttgatggttcagtaacttttcagaaacgtgaatctattaaaccataatgttgcaaggacaaagttttt

SEQ ID NO: 47118 - DNA, 537 bp, Arabidopsis thaliana landsberg
ggtctatttattcgtttgtatatactatatactctcgaaattccatttttatatcaagttaacgtaagaataaatcctttttataattttttgtttacttaccaacaaaaagaaagaattattacataggagccatgtagtctagatttacgtgggctggaaattgaaacgtgttactactcttgtgagtagtcactcacttaacaacgcatgttaagtgagagttttcttatgaactttgacccaaaaagacatttctgcacaaggtataacaaattaacaacgttcaagttatgggctgatcataggatcggacacattttgaccacttaatcgcaaattaattggatattgttcaagaactttttctccatgttattgtttttgtttaattaatgtaaattttcaatttgaagaaatttctattaaaaacaaaaatggctgcatagacgttccccaaaaaaaaaacagccgatcatggaccaaaaaacagctgatcaacgtttttactgatctggctaaaatctggacttttgg

SEQ ID NO: 47119 - DNA, 905 bp, Arabidopsis thaliana landsberg
agattgtgtgtttgttggagtaacgaataatgattgaatttgttggtgtttcgatctgtctcaattgctacttagtaaaaggattacattgagatttctttttacctcattcgatatcacattaatttctgctagtacaagaattgaatggtcattgagagtttgttgatgaaagctttcttactaccatttcattgagatgttgtgtttgtctctgatcagtctagctttttggtagtttcttatgctcttgcttgtttttactgaatcattatgtcacttttaaactctattaacctctgttctgtattctacctataccaaaaatttaacaatcagagctaagctttgattctgttgtgacttacttaatatctaatgtcattgcaggtatcgaacgggagattacatctcttcaactagaggtaagtttaatcaacaatgtgagcttctctcttagttatattctttactaacattaagttgcatttaggagaagagactagttgcagaaattaagaaaacagctaagactggaaatgaggcaagttcttcatttcaatcactttcttgcggaaaaaaccattttccaaattctgagaacttcactaactgatttttggaatgttgattattcataggctgccacaaagattttagctcgtcaacttgttcgactgaggcaacagattaccaacttacaaggaagtcgtgctcagattaggggtgtaacaactcatacacaggtttgcttctgtagctcatcatcagctaaactaatagttcaactagaataatccgatgttaatacttaattactgttttcttccttccgacacggctctgtatgccagcacttcgatttaatcaggtatgaaaggtgctaccaaagctatggttgcaat

SEQ ID NO: 47120 - DNA, 836 bp, Arabidopsis thaliana landsberg
ggatctttttcatatcaacatattgtcacttggagatctgaatatgtttttgctctggttatcagatagatagtataatgtcaacaaggtcaaccagtgagaatgaagcaagcagaaggctgaaatcagaatttcttatccagtttgatggtgtgacttctaatcctgatgatttggtgattgtcattggtatgatttctgctaaatcagtccacatcaaactcaatcttcattctgtttaacatctcggagtatcagtttacatatagtctgttttcctttccttaaaaatttactttgatgtaatgttttgcaggagctactaacaagccacaggagttggatgatgcagtgcttaggagattggtaagaacattattgtcatcagaatttttcttgtccaccaattgctaggaaagtatctggttatatgatttgattttatcactttgttaggtgaagagaatatatgtaccattgccggattccaacgtcagaaaactactttttaaaactaaattaaagtgccagcctcactcgttatccgatggcgacattgataaaatcgtcaaagaaaccgaaggcaagctctatagactttgtataaaaaaacacagattcataagtcaagtaactgataagcgtaagctatccctatgttacaggatactcaggaagcgatctccaagcattgtgtgaagaagctgcaatgatgccaatcagagaactcggtgcaaatattctaacgatccaagcaaataaagtactaaatttctcagtctctcaaattaatgttgaagtgtgtttgagtttaaaaggtttgatcaacagatgtg

SEQ ID NO: 47121 - DNA, 691 bp, Arabidopsis thaliana landsberg
  unsure (1)..(691): unsure at all n locations
ccattcgtatttccaatgtgcttaggaaatttcagaatttcgtgctatatctctgtcgccaggggcaaatgtaacattatgaaatagaactagcaaatcttgaaatctaactcttaagactaattcaagcacatacgtannnnnnnnnnnnnnnnnnnnnnnnnnattttaacatggaccttatcaacattttaacaaagtccacaaacaaccagtcttacaatcgcattggtacaagataatcgaattcatcttccatataacaaaacctaaaccttggtgtgaaaaggagaagatatgtatgttaaaggccgcctatgcctctggtttggggtatatgattctaagattagggtttgaatattttcgttagcctgccatgagatatatttatgtgataatttagagcctcttatgcattaatgcataaccgactagatcatgtggtattcagctaatcagtacacacaagacaaagtagtaaatgagtttgatgaagactgtggtctgataattcctatcaacgttaaatctgtcggggccaggcagccagcaacattttgcctaccaacgctctgaattcaattgaacctatgctatataatagcaggctaacttaactaagagttttgtatctatactcataaatccttttgtctaaaaatggcgatgctaggtttttacgtaacgt

SEQ ID NO: 47122 - DNA, 230 bp, Arabidopsis thaliana landsberg
cgtcgatactgatgcataacatcggtggagatggaagcatatcaacactagcaacacatttctgaagtttccaggcccttcgattgccagcgttgttattaaatcaaaacacctctatctggatgtctcgttctggctgaggtgagccattaacagcgccctatactaatcggagtctctgatcgagacattatgacgcatcatggcatgcatgatggcctcattatgag

SEQ ID NO: 47123 - DNA, 430 bp, Arabidopsis thaliana landsberg
  unsure (1)..(430): unsure at all n locations
cnnnnnnnnnnnnnnnnnnnnnnnnnnnnnnnnnnnnnnnnnnnnnnnnnnnnnnnnnnnnnnnnnnnnnnnnnnnnnnnnnnnnnnnnnnnnnnnnnnnnnnnnnnnnnnnnnnnnnnnnnnnnnnnnnnnnnnnnnnnnnnnnnnnnnnnnnnnnnnnnnnnnnnnnnnnnnnnnnnnnnnnnnnnnnnnnnnnnnnnnnnnnnnnnnnnnnnnnnnnnnnnnnnnnnnnnnnnnnnnnnnnnnnnnnnnnnnnnnnnnnnnnnnnnnnnnnnnnnnnnnnnnnnnnnnnnnnnnnnnnnnnnnnnnnnnnnnnnnnnnnnnnnnnnnnnnnngctgtaatggtgcccataagaacttcttcgggcagtcgcgtgtttagctgtgcttgagggatcgctgtttacactctgatgcagggtgtacggat

SEQ ID NO: 47124 - DNA, 976 bp, Arabidopsis thaliana landsberg
  unsure (1)..(976): unsure at all n locations
tattcgatactatgttaaataaatttttttaatcgagtttgttttcatgcatgttctattaacaagtatgtagatcttggaaaaagaaaatattttgatcttgataanattctttttcaaatctcgattagtttattgtttttccgaattttgcatttatactatttatgtgatgttcgtttgctagtcgttggcgaccgcgaccaaatgttgttcgtatggaagtcgctggatatagcgacctgcgattataatttttggtcgctatttatctttacgactgattataaaacgcgatgtctgaattcagtaaactcggcgacggtattgttttacattcttttacattttaaaactctattatttacattctctattaattataatgatgctcactaatataaagttttaaaatgtgatcaattgtttcaaactgcatttgtcttaacaaaattcaaaaaaaaaaaataaattttttgaaataaatgttttataaatatcaaaaggtaaagctacactaatcttttgcattgtattcgagtaatataaatcgaaatgaccaaagtctctaaagaatgaataaggatcaaagttcaaagaaaagtgaagagtaatcgtcaactacaagaatcttatcctatgcgtactctttccttatgagtgacacaatagaaaacgaacccaactgattgatccttgtgaataagataaagtcccaaccaacctcttacttatcctgcgcatatgcactgtcctctatactatcatgcgcatatacaaatgtccattcttatcatgcgcatatacaaatgtccattcttatcatgcgcacctcaacttaataccaaacaaaaaaaaaagtttcacaaaactccaaaaggtaaagaatctgacccattcacatatgccgnttcaaaaacactatcatgtccaccacacgattaaaccaaagagaatagagagagagagagagaga

SEQ ID NO: 47125 - DNA, 877 bp, Arabidopsis thaliana landsberg
atgagtgagtctttgatcaaaaaaggtcattggtttttctccgagtgacggtacgtacagttttctcgggcagccactaaaaggcttccaatctgtggagtttttgaaagcacatcgttttcaagttgcacacatatccgctcttctctgcctcggggaatcatattctaggaacttcaagatcgtttatcacttcatctgacatcacgaggttcattgcttttatcgatggactgaattttagagttttactttgccatggaaccaaatccatattttacacaaattttgtaaaagattaaacgatttccttttcaatgaatatttacattcttagcaaaaagatggtcttccttcgtttttggttatttatttaagccttactttaagagatctatcatacatgcctagttgaaagttaaagcatcacattgcttataaagaagtgtacaatcaatatcaatgaaatcaatctcaacttgttatatatgtcaaaactaatcaagttatgtgttcacattaagaatataaattagtattcaaatttaactgataattgtgttaagtcttttataatttttcacagccacaaaagtaagaaaacataaagcactgaagttaaataccaaattcaaaagagcttcgtttacaagtacatacacataaaatcagaatgatcattagatacaatagtgttacacataactcatacggacatataaaataaaataacacttgtagaacatatcccattcataagaaacgtaattagcctcttaaacaaaaaacgtaagaagctaatcttcatttttttttttctcattccacacaaattgtcccattaaacacacaaaaacgaggtacaattacttaacac

SEQ ID NO: 47126 - DNA, 569 bp, Arabidopsis thaliana landsberg
gtcaagagttgtgtggaaaaattagtgagcatggaaatctgattttttttttctttttcttgggatgaatgaaacaggagatcatacaggagcaaataactagagtgctgttggaacggctaattgtgaacaggccacatccatggggacttctaatcacattcattgagctaataaagaacccaagatatagcttctggaaacaagccttcatcagatgtgcgcctgagattgagaagctgtttgaatcggtagccagatcctgtggtggcctgaagcctgtcgacgagggaatggtttcgggaggttgggtctcagacaattctcactagctctttagctttcaacttgtatatatgtatgcgtattttgatattatgttgtaacaattatacatacagtaggagagattttaggagtcttagtttatttatttaacttcaagattcacaaacatgttttctaattacaaaaaaaaaaaacactattattcctttatccttgctcttaagggtctgtttgagaattagttaggtgaaaacatgtttgagaaatcggcggggattgtg

SEQ ID NO: 47127 - DNA, 562 bp, Arabidopsis thaliana landsberg
gctgaccaaaggttttttttccaataggtttcattgtttttttacctcttttttttttttttgataatgtgaccttgttaataccaatttgaatttgttttccgattattttgctataaaagaacacatttatggactcaaatatatatccaacatttatggcagacatcgtccattttcggttctttggaccattaggcgcgaataggaactcaccactaaaaaagatttggtgacgtaattacgtcaatcatcgaagtttctaacttttacaaccccaaggctcaaacatgcttcaagcaaatcttgttgcatttgttgtgatagaagttgaaaaatttgtcacacgaccttatggctatttacagttttgatggtagtcatgatacacaaatttacaagtactgctcgtttactgtactgctcacttgctcagtcactagttaacaataagccaattcatcgttatctaacgaaattcattatagtaataatattaaaatactcaaaatacgatttgtcagtctattgatgtatttgatgtagaagtaagtggcattct

SEQ ID NO: 47128 - DNA, 1292 bp, Arabidopsis thaliana landsberg
gcagaaaacccaataaaaaaagtaagagtagaaaagtacttcttggagtttctaaaggtagatgacacatctagattatgactcataaataaattactagatgctctaaagtctcttactcttgatgtcgataatgtaaggtgtgcattgataatgctttaaaacaattggaaggtgtgcttttgtttttttgagaagtacagacatgagggtttagttctagtttgagtatagctcaaattatgctcgtgatatagacattgatcctatttttccaaaagagcatcgtatatttaggaaaaaaacaatttggtgaagctgattttggtgaagaagtacaatcaagtgaggatgcatttagagttgactatattttttagttgtggtggagatagcaataacttcggttaagaattgatttgatcaaatgaaaaattttgaaagtgtatttggattcttgtttggttcgataaaattgaaggcattagatgaaagtgaactacaagaacattgcactcattttcacaaaacgttttctcatggtagttcttcggatgttgactgtaatgatctttattcagaattgactttacccgatttacctatgggacctagtaaagttttcgactttgttgaaaatgtgggtttttatccgaatgtttccattgcgtatcggattcttttgactacaccgatgactgtggcctcagccgaaagaagcttttcaaagttaaagttattgaaaaattacttaagatcttctatgtctcaagaaatgttgaatggtttagatatttttttgtatcgaaaaaagtatattagagaacattgattttgcatctaccaaagttgaacgaaccgtttcttttcatcatttcttttaatcgttttactcttcttgaaatgactattgacttgtttttatttcagattcaagagaatatatactatgtacggtgtgaaggtcagtgaatgaagattgcaagaagagcgtgaaaagaaggagcgcaatgaagactttgattatgtgtggttgttgtttacattccgacgaataaatattgcaaactgaatctttgataaccatgtgtggtgtatgttcgcgacagttcaagttagttcttttgttaatcggaaatgtcaagaaaaaaaactgctttttaatgtctgagggacacatcttttcaattttgtaacgtggtattattgaatatacacctagatacgatcctgaagccgtataccttagatcaatggttggagagagacaacaaaagccgtctacctagacg

SEQ ID NO: 47129 - DNA, 609 bp, Arabidopsis thaliana landsberg
  unsure (1)..(609): unsure at all n locations
cccccccccccnattcncccccnccccccccccccccccccccccccccccttccccccgttagggcccaaacaccccccccccccccccccccccctcccccccccctccccccccccccccctctcccccctccccccccctccctcccccccccccccccccccccccccccccccccccctttcttccctcgttaccccccccncccccccccccccacaaaaaacaacacccnnctcccccccccccccctccccccccccctcttctccccnccccccccccccccccccctcccctccccccccccccccccccctccccccccccccccccccctccccccccccccccctcttctccccgccggtccccccccccccccccccctccctccccccccttcccccccccctccccccccccccccccccccctcccgcctcccctcccccccccccccacaacaaccccacttccccccccccaccccccccccccccttttccctccccccccccctccccccctccctccccccccccccctccccccccccccccccccctccccccccccccccccccccccccctcccccctcccc

SEQ ID NO: 47130 - DNA, 1009 bp, Arabidopsis thaliana landsberg
ggttcgtttttaactggtagagataaagaggagtgggattctactctgcttaaactcaatgcaaagcaaggtgaggacgtaaaggaagtttggaagattatggaagcattagaagataaagatatcgtggaagcatcccaaagataaaacacctgtattatattcccttacatcttgtttggtttcctcaatgataatgcatgtgcgtcaacgcttataaacgtaggtatcaacaaagcccatcttttatatttctttcgcacagttttggtcatggagtacacaatggtattgtgtgttatctcttatctacttataggtttatctctgtaagtctgtataatcatctcttctaaatatccaagatttatggaaaagggaaaattagtctagttataaacgaatagccatttaatcttactggccaacgaaaatagaagaagcagaaacaggggacacatacctgcttgaaaccgctgcagatacagagaaatggacaaatattaatgcattcacactgaaggtatattattatgtgttgaaaatgctatattttacattggctatgttttaaatttatcattttatttttctgactatcatttgttgaaacaatagtagactataaaagtactaaaaaaacaaaagtatatgatatatgagaatggattaaagaatacagactagatggaaaacaagctgatagagacgtggaagctgacgtggtaagctgtagatggtgatgcgacatgttaaagacacgggagccgagttggcaaaacgtttgaagatttgggtttttcacttcagcaacatgtggaatcactacaagtctacataagctaaatccgttatgacctcatgatgaaacattcaatccttggctaaagtcacttcgaattttttttaggtcctccacgttaccaatgacaactcataataaagaataaatagtaattaatatatttacgtaacactgaccaccgtttttccgtttgctcagcatcaa

SEQ ID NO: 47131 - DNA, 626 bp, Arabidopsis thaliana landsberg
tccatccttttggtttgaggatggtatcctgtatttggtctatgttagatctctttttttatataatgatgcacagctctcctgcgcgttcgaaaaaaaaagaaaaaaatgttcaactagtatgtcctggtcacgactagtctactagtcggcagctgcatgacttaactcgacttctcgactcgaaaacattggacacaagttgcaattttttaatcgaaacctaacaaaaacggttagaaacagatttgctaagccggatctgaagggggggctgaaggcgcgaccggaacacagtagcacacggacggtaagtgtgagtagaacttggcctcgcgcaagagagagtgcagacgtccttgtgtgagaccataacatgtgcaaatgtgacacgtgagaaaaaatcataaagaaccctaaccctaaaaattatatctttataccatattatgaattgcgctatattcaatatgagagcactaggcctgaatatatataatgatataggacaaagactcattatatgagatggaatacacaaggcacatgcattagcatcaacaaggtggtaagactccctactgcgaagattgtacgatagttggtgagatggattggagagatgc

SEQ ID NO: 47132 - DNA, 136 bp, Arabidopsis thaliana landsberg
gcagccaacaacagaagcggggacaaagaaacgggccgaaaaagaaaacagacaacacaacagcgaggagagagaagccaacaaccacacaggggcagaggggcgaggaagccaagaggaaaaagcacaccgacga

SEQ ID NO: 47133 - DNA, 637 bp, Arabidopsis thaliana landsberg
cggcggaagcgacaatggatgagattattcgagtggaaaaggaaggagatgagacgagagataacattttggagagaaacaaagcaatggtgatgacttattgatcttatttcttttgtttcacaaaaagcttaaagagagggttattaatactgaagattttaaagaaattgttttgtttataaacactaattctagagtaacatttgctatctaaaattatcagtttatatttcacaccgaagtagtgacatggatggtaacgttgcctgtgaatgctgacacttgttaaacattctaaatcactatcgtaattgattaactaaatatcgatcatatcactagataatgtactaatattactgccgtcttagaattatgccagaaatgagctacactggttaatatatagctgcacgcaacaaagaatcaagagctttgtaatggttaacaagctaatcgttatgcattgaaatcgtattcaaattaccaagtttggatatgattagccactaactttttatgcacgtaaccaaatctatagggggaattgattaacatatttaccttataactcttggacataattctaatttaacttccctttggtattaattaatgaaaaaagggaaaaaaa

SEQ ID NO: 47134 - DNA, 619 bp, Arabidopsis thaliana landsberg
tatgttcgaatgtggagagaaatacacttttagacaaaactgtctactgccgtcgcaaaatagaaataaaataaaagtgaggaaaaagaccagattatcacaggactaagatgtggaagttgtgctaaaagcatacaccaacgacttaatttagctaaaactaattaaaattagaaatataagaggatattgcgtgataagtaggcacctaatgttatagtggcattgtggggacgacgacgtggctaaatttcaaccttagaattcgccgtcgacactgagtttaaaagtcttgaaggtcattggattccaacttaaatcatatatattcacttttgagaacaagtactactatctaggcactttgttaaaaattccacctatgactactactaatataagatctaaatatctaaaataatatatagaaatatgatcgttaagatcaggcgcttttataatttaatatccttctacaagatcatatataatacaaagatgaaaaacactctttggaatttataatttaatctctctactttatatctttgattttagaattgattttctttgtcacctgaattaattgttctttttcgatttaaagacatgaatatat

SEQ ID NO: 47135 - DNA, 581 bp, Arabidopsis thaliana landsberg
tatccaaaggaaagatctgcagaatttggtaggtctgcatgtgttgatacttataggggtaaaattttgtccttacgttactttctttcatccaggtttccgatgtgcttggaaaattccctgatctcatggatgagttcaatcagttctttgagcgttgtgagagtattggtatataagattgcatactgtcgttttacttaataagttatctagctgtttctgatcatcatcctttttgtgcagatggtttccagcaccttgctggtgttatgagcaaaagtaggcagcagtctcctagcttcttgtctatgagtatacttttctcttttttttcgtacgttataggaatagaaataacactgcctggtacacttgctgcagaatcacttggtagtgaagaaaatttatctagatcagtgaagggggaggaaaaagatagagaacacaaacgtgacgttgaggctgctaatgaaaaagagcgatccaaggacaagtacatgggggaactctattcaagacccctgatctatcttattgtgagcgttgcactcccaggtcccggctttttacctccacat

SEQ ID NO: 47136 - DNA, 1032 bp, Arabidopsis thaliana landsberg
  unsure (1)..(1032): unsure at all n locations
caatgatggagttggaacctctgatgttgttcttgagtcttaccgtagcctggagagccttaaagtttttacgaaatctctttcgaataatacagtaagttacatgtgaccaccatctttcattaaatgacgtagacacgtagttgtaaacacacaaacgttgcattgactgatcctatactcgacacaaattttcaggctgattattgtggagagtcgatcgatcttccttttaactggaagatcatggagtgggctcacaaaaccaagcaagtattagcctctgccaagctgcctccgaaagttaaattctataacatatatgggaccaatctagaaacccctcatagtgtttggtaatatttctagttttgaggtctcagttactgagtgtttcttcgtacaacttgtttcgctttttctaaatttgatatatattctccgctgcagctatgggaatgagaagatgcccgttaaagatctaacgaatctaagatacttccaggtaacacaatttttatcctttttcaggtatcaactatcattgcaattggcaataagttatcttcttatcaatttatcatcttctaaccttagatcatatattcttgtaatctcagccgacatatatatgcgtggatggtgatggcacagtcccgatggaatctgccatggtatgttgcatgatcgtgtttcttatataaactcatcacaaggaaaggaaatcttgaattcgatcagttaggttgatcatttctctttgtaacggttcctttggttgtttcttttctaggcggatgggcttgaagcagtatcaagagttggagtccctggtgagcaccgaggaatcctcaacgatcaccgtgtcttccgaatgctcaaaaaatggctaaatgtaagcgaaccagacccgttctacaacccagtaaacgattatgtcatccttcccaccacatatgaatntgagaaattccatgagaatggactcgaggttgcttccgtgaaagaatcgtgggacatcatatcagatga

SEQ ID NO: 47137 - DNA, 882 bp, Arabidopsis thaliana landsberg
taagtctactttcttctgggatgtacttcaccctactcaggcaggatggagctcggtttacgcggttttaggcaaaaatctaactgcatctttgatgaaagcgtaaatccacttatcgtgatcaaagaaccgaaatgggttcgagattaacaaaattcttcttctgtagttcggtgtgtttttcttctcttatatctttgttatctctccctcttctttcgtttgtgcttgcaagtctttgtgcctctatctatgtattgtgtgttatagaataaaaatgtgaactttaagaaaagtaaaagattgaaataaaacactttttgtatcatgctctgtcacacactgtttctacttaacatttacatctatgatgttatcattaactcaaaaaaacgtaactaagaaaacagagatatgtggtgacaatacaatgtgttaaataacatataatgagaagttaacacattgtattgatttatatcattatatgtttaacaataaaataaagatataagtgtttatcaacttttcatgtctaaatttcttaaggttcatagcttgggttatttggttgtggagttgctgttcaacttttcttgttggatgatagtatataacttaatagtaatatattgaactgtatctagcatttagtcaaatcttttatgcaggggaagataaaattttaacaaaaacaaaggaaaatgtgataatttatcttttgccagaaaataattcatatcaattaaatttttgaaaaatcattgttagaaaataaaaatattattctctcctgtactatttccaattttgcggtttttccactatttcttccaggaaaaatcttttaaatttatcttctaaaaaaaaaaatatattttc

SEQ ID NO: 47138 - DNA, 808 bp, Arabidopsis thaliana landsberg
ttccaccatcatcatcagaatcatcggaattttcaggaacttctctgtcaactgccatagggacaacgccggttactgcttcggaatcatcagtctgctcatcgctctcaccagtttcacccatctcctcgttttcttcttctgcatcttcaatagcaagacaatcttcttcatcatcatcaagatcgtcagagtcttggtcctcctgatgtctagacggttttagatctttcttgatcacccgcaacattctcagcagtccatcgttggtgacatcttgacaaaagtacttaaaaacctacaagttacataatattgtggaactctattaaactttgagcttgagccaattggaaacaattgaaccaaaggattaaattgaatctcattttagcagccaaggatcagtaacttcaagaatagtaaaagaaatgaatttgtttgctagtggtgagcttattacctgctcaatagaagaccgcattggagctgaagaatgcggcaagagagaaagtaatgtgtccacgaggacatccatgactgctggttcttcttcatcgtctgcctcaccttgcccatcacttttcagaagatcaagagaactgaaagctttgtcacagcatactgaaagttcagtagcagcttctgagaattctcccggatggaggagtatttgaagcaacagctgaacaactaagtgcctcaatgcatgaaatttatttggatcagtagctagtccacaatttctttcctgccacataataaagatgtacaacttaaacacacaagcacatagacattattttgg

SEQ ID NO: 47139 - DNA, 900 bp, Arabidopsis thaliana landsberg
gcaagtgattgcatggatcataaaattcataattgagttttattgactggctctgttcgtttctctcgcagttttggaaccttgccaaaaatgaacttagttacttgctcactaaacaaacacgagttaagcattgacatttttattttgcctattcggtgaaacagagtaagtaaaaagattaataatctctctgttaagtagatgatgctcaatcaatgaactagtcagtatggttataaattgtgttatctaccattcaaactattttgtgttgattgagccagccgctaaaatctttaaatgcataaattttgttgtattatataaattggtaagagacgatctaattatgatagtttctatagtgaatttattgaaagtaaataaatagcatttttaaaacaaagacaacaatttaggtctcatgaaattaaacaaccgtatcactacgtactattgcatcaactatgagacatgcaaattctaagttttaaactcgtcgaccgaatcgcctctgcctttgctgataccaagtcaaggcctcaagatactcagcttcgccaaaatcaggccacaaaacagttggaaagtaaagctcagtgtaagcagattgccataaaaagaagttactgatcctttgctctccgcttgttctgatcaacaggtcagggtttgggaattcgctacactttgtcaacaactctttctccatcgccttttcgttaatgtcctccacttgaatcagcccgtctttcactttatttgcaaaacttttgcatgcttgtaaaaaatcatatcttccactatagcctattgttataatgaaatccttcctttcgaaactttttgtgctttcctttacctttctaataaaactaaaaaccaattcggggagtt

SEQ ID NO: 47140 - DNA, 869 bp, Arabidopsis thaliana landsberg
accctaatttccgtttgtacaaccgccattccgcccctatgagcaagaatctcggctctaccgttcgcacagcaacataaacgagataaaactcctaacataagttctgtgattcttttctcgccagtgtagcttatttcgagttcgatgagttcagaaaccgcaccgagatccacaaggagtgatcggtttcggctccacgaagaagtctctaaaagaatcatcagcgcggcagtcaccgcttgtttgatgaccaaactatgatcaagttttgatggttccgtttttcccaagctaggccttgatgatgactgtaccgtttctctcacggtagggctcgtccgattaacactatttacaacatccttgagaaaccctatgatccctttaaaaatctcgggattcaatctctctacgatatgagaggaagtgtattccgttagattcctcaatagcacaattgtataagccttactgagaaagtcttcttggtgtaaaacccaagtcaacgattccataactcgatcgttttccatcaagattgtttttgcgtcgtttgatggaataccgatcaagtgaagaagacgaagagactcatctagtcctttgatacgacgtcgtccgtcttcgtcttcactagtacacttgactacgaacaagatcaaagacttatgtacgccacattcacacatcaatcttctgttatttccgtccattgccaaaacttcaagcttctgcaacgtttcttctcttcctaagggctgcaaattcaatacccaaaccaaagttattaattaaccgatcggatcaaaacatttacccaagctgcactaaaattggtccaaccgaactaactaatcttaatattt

SEQ ID NO: 47141 - DNA, 576 bp, Arabidopsis thaliana landsberg
  unsure (1)..(576): unsure at all n locations
cgaatcgatcggcccctgcgcatcttgcctgcctgcagtctgcagatgcttttatatactgcgtgtgtgatcttggttgggctgggctgggcttttggttggtccgaacgatccatcggcatgtccccgcccgcgtgtcatcaacatcaacactaatctttatctttcttcttaaaaaaaacaaagagagcgattttaaagtctcggcaacgttaatgatgatgactgtagtgccggcaattgtaattagttgagtagaagcaaataaagaggcctggagcttgccgtgtcacggtgaacagagcacggatcgggaaaaaggcttgccgtggccgcgagtgcttgccagcggagatccaagcgaagacggccggcaaccgaaggcggccgtcggtgctcgctgcttccaactcgttccggggggtgcacgacccacgacgccttgtctttgcttggacgcggccgcacgaacaaacataacccgtccacgttgctgctctgctctgcactaaggcaacattctgctaacattctcttcagtgccagtgatgacggccnaccaaacgactggtaaat

SEQ ID NO: 47142 - DNA, 423 bp, Arabidopsis thaliana landsberg
agaacctccgaatcttagtgtagctttggttataaaattctccagtatatgcatatggtgataaatgttgtcgtgtagagcaacatcattcggagaacagtttactctgattgataatctgttaatttcatagtctaatcagaagattttatgtcgtaggctagtcaattattcggaagagagataatttgggtcataaactagcctagtatatgcaaatgagcctactacaacttcaaaacagactcttacgctccatagctgcaatgcttatgagcgcaggaggtatcggacaggtaaagcaagcacatagactactgatcatatgccctgaaaaaaaatcatacaaccccaaaatactggctagctcagaaaccacataggacacaagtaatcaagaaaagtcgtaacactaagaaatta

SEQ ID NO: 47143 - DNA, 1361 bp, Arabidopsis thaliana landsberg
  unsure (1)..(1361): unsure at all n locations
atcttttgggcgctcacactcagtttcagtgaagttttcactgttaactttgctaaaatggtgatgaatgttgctgctgagatttcgtattttgcttttggagattgaactttatgttgatgaggttgttgttgctatagttgtagcgttccgtgatgacaatactatttgtctgtctccaagcttgaagaataatgaactctcaagacagacaaattcatgggtttcaccattttgcttgcaacgcagagcgtgagttcttgatcatgctgaataatttgcagatacacaacctatcgagatttcaggatgttttattgggataaaaaaattttgggattgggtttgcaggtattcgacgggtttcaccagcgtacatggtggaatacctacggcagagtatgcaaagttgcggagagaatcccttgaaactgaatttggacatgctctaggagcatatagctcgaaaagtttttctgcagtgtatcgttttggaccctttttggctttgtatagagctgcaatcatttcgtatcatgtggtgaagcttgccttttggcagctgtttgttcaggatatgaggaaacgggctgtcaaggtcagtaaattcgcaatctatggtgatttgttgtttgccaatacttgtttaataagttaacatgaagagtactttttggatacaaggcctggacaaatttatttaatagtactttatcacattttggatgcagttccgtgagactcttatcagcttggggcctttctacattaaggcatgttacttatttgctaatccattactcccctaaatatactaatcttagtcttttcttttaattcctggttatatcatacatcatttgacttgcagctgggacaggcactgagcacgagaccagacatattaccatctatatactgtcaggaactttcaaaattgcaggtgggaaatctttctttctttctttcaagttaattatatggctatgctcgaattattagataaagtattttttcttgatgattataggaccagattcctccatttccaactactgttgccatgcgatgtattgaagagcaactgggtgctccagtgtcaaaactttttgcagatattagtcttaaacctgttgctgctgcatccctgggtcaggtatacaaaggttagataccttataaccgtggtctgctattttctatccgtttggtctcaaccgttgttctcctttctatttttctcaatntagagttattagaagctaaatgtttcattttttcccttaagtattgcagctcatctgcattctggacaatgggtagccgtaaggtcagagacctggaatgcactcattctacac

SEQ ID NO: 47144 - DNA, 279 bp, Arabidopsis thaliana landsberg
  unsure (1)..(279): unsure at all n locations
ccccccccccccccccccccccccctcccccccacccctcctccccctcctcccccccctccccctcctcccccctccccccccctccttctccctccccccccctcccgccccaccccnccccccccccnncccccccccccccccnccccccccccccccccccnncccccccccccccccccccccccccccccccccccccccccccccccccccccccccccccccccccccctccccccccccccccccccccccncccccccccccctcccc

SEQ ID NO: 47145 - DNA, 765 bp, Arabidopsis thaliana landsberg
gcgtatcaccagcaccgagcaacggttgggcggcatccacgagaggattgaggctatggccacgcagttggaactgcaggtcgtcatcctgatcgatacggaataccgaatcgtagagcatgctgcctttgtcgcggatgtctacggatggtccggtgcgcaggaagtcgtcctgcggcgtagccgccggcaactggcctggcagtacatcaggcttctgcggagagcggtcgacgcggtcgttgccgatttcgatggtcgtggtcatgtcattgactccgtatggcccagaactgcaactgcaactctgggaattcgccgctgatatggaaaccgaaactgttggcgcccttgggtatcagcttttcccagttggctgaggtgcgatcgagctggaaataggtgaagccagcgtggaacggcaggtgccgcggggccacaggcaatgggctgagcggtataccgggtagttgcaggcggataagatccagcagtgtttgctgggaggctaccttggcctgttgcagaaacagatggcgcatctgctccagtggcatgcgggcgcgcactgccagaataaagtcagcgctctgcatcagactggcatcgttgacctgcgcggtcaggatgccgtgcggctgcttgatcagcggcagcgacactgcacgtggctgcaatacagtgctgagcaagcggcgtagggtttgctcaagcatctggaaagaacccttcgggttatcgtgctggtaggccgggaactcggga

SEQ ID NO: 47146 - DNA, 822 bp, Arabidopsis thaliana landsberg
ccgaagatcttctgtccacccggcagtgtagacgcagtcagactgattaatgatttgaagagccagtcagtgaataattcatatattttctcaatccacatgcatcattcaatgaatcaacctcacaatattaaacttatgagaacaaaattaagcatatctacttaattggtttgataatattaagcatatgtcatggttcaaaatatcacctagatacaaaggatgaaacaaaatcaagaacacaaaacaaagaaactcacagttaaagatatccctccaagtccacggtggttttgcacaacaacattccatccttcctttgccagcctgaaggcaatatgtttaatatactgtgaaaaaggaataaaacaagagttcgagtaagcaaaagcaagagacaaatgagactatcccaacggaaacagaggaagaaagtagataggagtggtgaaatttactgcagcagaagaatcactagtgagccctggaactataatagcaattggagtcctatcagttcctggatttgaggcattgaccacttgagatataccttccacaactatagagaacaagaaaaagtttttaagtccatgaaatcaaaactgaaaacagcaaatgtgttaagttattattcttaataccaccaaccatcagaatgcattaaccaatccaaagcaattgtgccaccatctgttgcctgatagagaattctgacacacagaaagagatacaacactatttatacatctcaaagatcaagtctataggaaaaaccaagatgttatatcacatgaacacataacagttgtgcctaga

SEQ ID NO: 47147 - DNA, 1084 bp, Arabidopsis thaliana landsberg
tggcaagacaagttccatgatgagaggaacctaaggtttgggagagtgaagcataggtgcagtgcgtgccgttttggattcgggaacggcaaggagtgtagctgtaataatgtgaaatgtcaaacagaggacagtagtagcagcagttattcttcaaccgacattagtagtagcattggttatgacttcttgggtctaaacaacactagggttttggattttagcactttggaaatgaaatgaaatgaaatactatattaatcaatttatagctgtgaattgtgatataaaagctattaacagactcgttcatggttctcaacttttctaataactagtaattttattcatatcattgttgttaggatctgtcgtcaatatttgataatctactaaaaagatgcgaaaatgttcgccatttgtaagtgtcgcatgggtgtaatgctttgctgacaagacatatgcattcaaattcgatccttggtatatttctagaattttactcgataatccaaccaatgtttgacaaaatgtatgtcgatggttattcccaagagattggacatatcaatgaagtggataagctgtgtaaggatgagaagcgtgagaacgattgaaagtgtacatgttttctattcattgcaaccttttggcatagttcgtttgattatttttagtactaattcaaagcattcactgtgttggtaaaatgtctttatcacattaatgtgttgttcactatattaaacgaaagtcactcaccttatttccaaaactatacaaatatatacatataagaacttacctagtgtggtttggttttttccaaatgtttgtttatgtaaaacaacggacatcaacctaaaactttggagtttagtttagtatcaggctagtgggcataattaggttcttctacatgtgatagtgttaaagatacgaaatttcaagaaatgtatattgagacatatatcaaagattgaacgatatcaaaatagatatatgagttatattgctttgacctacttgatggatattttcatatataataaagtgcaaaatgtaaactcaagattaggataac

SEQ ID NO: 47148 - DNA, 549 bp, Arabidopsis thaliana landsberg
agatattggtggcctgcatttcggaggaggggagtctgagtcttgagaactctgcagataatggtatgggaatttaagtaacacttaccccaatcttgtatttgatctggatgatgtattgatattgtgtttcaaactctgaaattctgaatattgatgtgcttctaaacagttgttgttggactggatgttcttctcagtttaaaaactctaacagtcttaatattgcgtttcttgttttgtgaagtagcaggttgtagatgtgctagttcctacaactccgctagaagcatactcatgtgttggtgctggacgcctggagacctggactgctggtgctagtatggaggcatggagctaatgtgctagtgcctacaactctggatttgcgctgaactacaggctggaagcttgtgcgtgtgctcttgttgctgctagcctgcatgccatatgtacactgatttgatatttacccatttcattatgtgaactaaatgcgtgtgtacaatgaacttattatttatatgatgtatgacttattcctaatgt

SEQ ID NO: 47149 - DNA, 924 bp, Arabidopsis thaliana landsberg
  unsure (1)..(924): unsure at all n locations
caatgtcattgaacacaatctctgaattctccggaggctctccaaaaagaaggctatgccacatttctggatacatcttcaaagtcttgtcattagacaaagccacctcataaagcagtttgctccctcctttatctgtcactttatcatcttctccatgcaagactatgaatggcattgtcacctatatctcacatgaacatatccccaaattaacatttattttgcctagacatgtagattaattgtgtgtgtgtgtgtttgtgtaattttatttattaagtgactggaacaagccaatggaactttgcctcaatgcgtatataggatattacctcgttcaaacggttctctagatcgaggctgattctgaaaagctcgttcattgtcttcatacgaggccatccattgtagcaatttggattcgttcttatctgtgttttaaacggtcagtggatatcgactctggtccgagaaggtccagaatttattggttaccaaaaacaaaatctcttatcttatagccgaaagagagtaagagtacctcatgtctcttttcaggcagattaatcgcgctattaaggatatcgggtccatgaattatcgatttccatgatgggatcagatttgtcaccatatttatcatagatataaccattcgtgatggtttcatctcctcagcaatctgactctcatcaaattagtaattatacataattcttatataaaatgatatatatatctgaatatatatgttcaccttacacatgggtgcaataaggattcctccatcccagaactcgggtttcttgcggtgcaagagaaagactactgctcctcccatcgactctaccatcaaaaacctcttcttctgtggtgtatctnccatctctgactcgcacaacaaacacaatccaagtcaca

SEQ ID NO: 47150 - DNA, 714 bp, Arabidopsis thaliana landsberg
  unsure (1)..(714): unsure at all n locations
aagttctttctatctcacaacgacaacatatgctagttttgcttggtccatatcaaaaagatgaaatccaaatgtctgactcttcttatgtggttactatgatatctttcacagcatatgcaaaaggtattacagagacaagcaagtttgagcactggtaagataacgatataatttcactgaagttgcataattttaagatttgtctgttgtgtttatgcactgaatcttaagaaaatttctgttgcagataaagctctctccgaacgatgccacgatgcaccaacaaacaggtggagaagatacaagcgtgccgcttcatttgattcaaggaaaatcgtcatcctattctccatcttgtaagtatccttcctctacgtacttaattcgtataaatctatactaacgatgcattcagtattaactttaaaaagtcttggattgcagatcaagtgtgggaacattgatattgatctacctgacactgagagtgaagcaaaacggagacaacaacaacaacagcttcaatcacatgtaaactgtagcatctcttttggccttttctttccttcgttgtctcgctgtttagaatctcttccccacacttgtcttttgttccaagtttcaaaatgttgataaaataacacttgctattgcacatgccctattaacgtgtaactaaacangaggttaaaaaagtagaatcaagagtgc

SEQ ID NO: 47151 - DNA, 1234 bp, Arabidopsis thaliana landsberg
aaagcataagaccatgagccgattcctcttttatattttagtccacaaaatcatatcatgttcattggcagggagaatgtccatccaatatcctatttttgaaaaatgtttcccattttatgaaactaaatgacaaggttttcttgtaagtctactaaaaacattgaaatggggtttctccctcgtcttgtgttttagcggcgccggcatttaagcagcatcctcgcgatttttgtgtgacgtaaaagctgatttcttattttttttttattttgagttttgtatacctcgtttgtgcgatttttgtttgctctatttctgtattacgtctttagtttatgttcggtttcctttgaatttttttgtgtggttttttctttcgttggtattttcggggactatgttctttaggtttcccttatgtttatcaattgattattttgtttatttgggatagaaacattccaagtcatttttatttaaccactacaaaaaaaaatgattatgtactaacctgatgaaatcaaattatcatttttatttatagcttgtctttaaatgttcataagctacattattattcttatgggaatttatatattacaattcgttgctttttattcttatggaatttatatattacaattcgttgctttgtgttcttactcttatcaatttatcatggtattatagttttcataaaaatcatatggaattttgttagcttccttgatctaaagagaaataattaaaggataaatcaggttacaaaatgtatcgtttccgaaaccttttttgttattaagaattatacaatcatttttatgaaactctaattcaaaagattatctttcgtatatcagtttataataattaccatgagatacatgtgtttcgtgacatatcactgctttaatgaaattagttttctaaaactttattcgttgtgacgttcatcttacactctggaaagaaaattctatttaattgtttaatttgtttttgtttcctgtatatttgtttgttgtcttctcacttgtaaattataatcatcttttgtaacttttgtttgctccctttttaatttttatttgtttaatcatttggagatataatcaagaagacgaagtccaacacatagtgatctctaaaggaagaaaaagaggaaacagtatattcttcactcttttgtgacatatatatatcattatttttaatgggctctcaagatcca

SEQ ID NO: 47152 - DNA, 1224 bp, Arabidopsis thaliana landsberg
cttaacatatgatgttgttgacagatgaaaattataatatttcaggctctgttcaaaagaaaatataaaagacttgataatcaatgacgagatcatgaattgagctttacgaaacatttgtataggattcaatattttccataataaaaaaattcagtcagtaaatatactttaaaaaaatatgttttgaaagagatattgaataggatatataggaaattaggaaaaataatcatttaacatagagtaattcactaagcagttgtaataataaacgtaccaactattcgaacatgtgtaaagtaattaccaacagctaacttttgctaacattgtgtgtggagtagttgaattaatcatcccaacgaatttagttatttttaatataaataaatcctctgtcctctcaattatgtaattaaattttagcaacggctagttcattttgttgtttgtgcagattctttcaccgatccaagaattattttggacgtatcttcagttttacgataagcatacatttctaagtttactgatcaaaaagttatgtaaatttgctcaagtaaaaaacagtaaattaaaccatgaacattgaaatagagaacacatttttaacctaaagagaacattgaaatatttcactccatttattgttgtctaaatcttttctatcggcaaagtgtgatatagattatgcatacacgtataatggaccaagttgacaagtggggtggacacacgtggtccagtatgattcatggttttatctttaatcatgcatgtatcagaatgaattgctgaaaatgatccaaaataaagacatgtctttaacacaaacccaatatctttccttattcgtttaggtccagtccattgcagcagctttgttctggtttggagaattgggccgggtcagggtccactaagtgaaatagtagttgcaacaaataacttctccgatggaaagatttcgttactgataggtttcagaggcctaaagttcttcctcggcattcgaatcagcggctgaatatctaaatatgtctataatgacttcttattaacactctgatcgtatggttgaatatctaaatatgtctataataactctactttgcttgttgtcaacagcagcttcagaaatttcttctgaagtgatgggatcattcttaggcaggctatcaagcatttctttgtcttgatcaacaaagctcgttccccttg

SEQ ID NO: 47153 - DNA, 301 bp, Arabidopsis thaliana landsberg
aatatggtctatgagaatttggtaaaaaccggtcattcgagcttctaagtttttttgttccaaccatcctctaactcaaattcatgatcagatagcaattaaacataatccagaactaacgattgtattcggatgcaactgtgaagatgaagtgttacagactgctttcagagaattctcacctgagctgaatgaatactctgtctgaaaatggaaaagtgttgcggttgaaggaatctgtgaaaaaaaaaacagagtaaatgtgttgagcttgcggctggtgcttctacctttcgcttaa

SEQ ID NO: 47154 - DNA, 844 bp, Arabidopsis thaliana landsberg
tactaaattatcttatgtagatgatagctttcttttgcataataatatttcaagttttgcagaagtataaaaaagtttggtgataattgatgacaaaaaattgttggacatataaacatctacttagcatcattttgttggttagacttaaatctcaaaaatttattgcagttttaccttaaaacagccaacaaaattggaaatataaattaaaacattttgaaaagctaatgatgttaaatcgtatatataagacaaaacataatcgtcgtattatctcatttaaagactttattttttattcgctaaaaaaaagcatttaaaatcacctccaaattttattttagcgattttgttcttgatattgaattgtgtatatatatcaacaaaacgaattgaagtgttgttttggacgagtgtatatatatctactttattaaagaaaattgtttgtagaagacaacatcacctgcaatgctttataattctagtgttcttgtttttcttttacagggattaatttccaaaacttttctttcgttcgccagtttagtttcttttatttggaattttgtattttactttggttcctataggctacgcgtaacattggcacatactactttttcatgtatgtaagtaatttctgtaaaaggctacattaaagtcaatactctccgttttgggtttcagtgaaatctaaaaaatgtcaattttacttttgaagttgcaactttcagatagcaacaggagcgaacgagacaaatgccttaagtttcagtggacagctccactaaatggttttcgggtgctattattggtttaatattaaatacataaatac

SEQ ID NO: 47155 - DNA, 578 bp, Arabidopsis thaliana landsberg
gtcctctaatcaatataaacgagacaattttataattaataaatcgtaagtgtaagatttaaaatgtaaatgttgaatgtattgggtgagaatgtaagaccagaaatgatgagtaagcaaacatctcacctaacctaattttgcttacataggctaattataacacttgagagaatgtttttattataagatatctttgttggttggtagtttctttacacacagatcgattcatgtgtttatgtatatacaaacatgcattcacatatatatacacacctaaatgattgaataaatatgccagtaatatacttataatcgaagctaattaattaccccagcaagttaaacaatatacaatcggagcttgtagcatatttggcttatactaatgttgtcatggtatcgtaatttatatctttggaaagatatataataaaaataataatatttaagaataaactataacaacttaacaaggaacattcacattttatcaaaaaaaaaaaaaaaactacacgttatctggaacattaaagatattttatttcgtctagagagtccaatattgaatcttc

SEQ ID NO: 47156 - DNA, 535 bp, Arabidopsis thaliana landsberg
acacaaaaactttgattattttgtttgtatcactttaaattttgaatcgaataaagaagactggtgtgtttgggtgcttatggaatatataatagaaaatgataataatgcatggagataaaaaggaactccaattaaaaaagttaaaaacatttttaagttagctttgtggtggccggttagcaacacgtggggtgagaaactagtgtcctttatcaagaacttcgtttattataaacattttctcaacaaaaaaaaaatcttgtcaaaaaatgaggattatctattttaattataaatttacctctgagccacattatgcttgaaatgcacatccacttatgcttatggtttacttagttcactttccatctcttttgcattgtctcttccttatcaatgaatatctgatctcactctttgcaaatgaatatttactaacaattatgatgtgggagatatatattcatcatttatacctatgtgatctcaacatcaagacacttacattaatgaaaatatccccatttttata

SEQ ID NO: 47157 - DNA, 692 bp, Arabidopsis thaliana landsberg
ggaaaccatgcgactttcagaggtgatatagttgcagttgacgctgctaccatagcttcgttgatgtttcaagcagctattgcattaatgttctagtcaatcagcaaattgtgagtgcatattatactcttttctctctgctctgtattcttgcacctctgatctcctcaagaatttgtttcaggtgaagatatttggtccacttagaaggcattcatatctcactggatttggccctgggacgaatgcaacattctaccggattcttggaacggggtataatatttaaacaacaacttttgcttaattagcttgtcattaagtgacaaactcatcttcagtcccttgctttattgtttcttagagagcaaaatagctttgtgttgacatcagcatcgtttatcaaaataaactctcgaaaggcattggatagtccgcagttagagaaaccgactcaccgaggtgctttgtgtctgcccaaaattacacctcaggaatacgaaccttgcattcttgctggtcctgcttgtaattcgttctcaggaaacgaggataatcagcaaataaagtttgcctgcaaggtaatattatcgtggattttgcaaagctgttttattcttccatttatgtgtactgatttgttcaagcagcaagttctttcagtttatcttctggttcttcaaacaagatct

SEQ ID NO: 47158 - DNA, 449 bp, Arabidopsis thaliana landsberg
catacactgtatcactctcggtcgcagacttttacagatttgtctccttcttgtataatcgtggggactggtgtttttcattgggagagagcgcaataaaacactgtggagctgcttacgttagtctcctttgtggtggctgggttactcccgggaactcaggcataagattattgcgatgaaaatgtgactgcactgcctcgcttagcagagtgaaagaatggacattatccttatagctgcattccgaacccttcattggatcggccaacccttatcacacgagctagtatgctggagctggaactacctctatgctcttgtcactagactagatctctacatgtcgctctgacatattcgtatgtgagttattttgcactgtccaggatccttgcttgatggtacacatacggattgttttgcttgcattacatattagcattcac

SEQ ID NO: 47159 - DNA, 625 bp, Arabidopsis thaliana landsberg
ctaataaatcataaaatcattagaaagaagccattcattttcttttctcctctcaactaaagctaataaatgcatagttgtgttcttctagagggattaaaacaacatcgtttgagagatctaagtgaagcagagtacataagaaagtggaaacttttggaacaagatggaagaagcttacaccaatagctgcttgaccgttgccagtaccaacatcccaagctgatttgtgctgaccggttcgagcagcaagtttcgtgaaccaatcgatcggatatctcggccttgcgttctggtatgcatccgctaacttatccgacaaggcagccattgtttttttctctgttttcttgttcttgtgatcttgttcttgttgttctattgctttgtatctctgtattggtctatgagaattaagtcactcatgtgttgttgttatatactgattgtggtttttgcagtagatgagaagaatgagaccaagtcaagttttcaaagtcagctctggcgacgagtctactccttacccccaagaattggtcccctcttcaattttccaaatcatttgaatttatttcttttttgctactctcgttgtatatagttgacttttcttgaatctcac

SEQ ID NO: 47160 - DNA, 553 bp, Arabidopsis thaliana landsberg
  unsure (1)..(553): unsure at all n locations
ttgactttacgtgcaatctatccatggcccctttaagtacttcacaagttcattactaaaaaccctagtcacgcgcttaggtcatgaaatcttaacttttatttcaattttgtcggtttactataaacctattaatttttattataggcatgttatttaaaaatatcagttcgcgaggccttaaaatatgtcattttaaaaggttaagaaaattaggaaacaatcgaaattaaataataacataacaataatactatgatataacaaagttgatatagcatagaagagatcatcaattctctagcaattgtgtatatctaaagcggtcccttagggacatccgactaaaaaataatgcaaaacaaaaacaagtagagtaatcgatttctaatgtgcaatagccactagaaatagttataaaatctaaaaagtttgaagctaaaatttgagagacactgtacaattttttttcgcattaattacaaacttgcgttaaatatacttaaagagagaaaactctctaggtatatatatactgnatatgattttcttt

SEQ ID NO: 47161 - DNA, 1217 bp, Arabidopsis thaliana landsberg
ataactacatatgttcaagtatgaagaaatagatataaaatcatgcatgaaagacaacacaaatgttaaatgagcaaaaccaagaaggcaagaacaaatatagggccttcgtggaaaccttttgtgcgacatatggaaacccattaggctagcgatgtagttggcccaagaaaccggctttgactcagaagatatagttattgattttcggcttcgtcaatcaacaacactgtaattgtaatgacaatagttggtgccgacaaaaaataataatgacaatagttgggcttagttttataagttcatttttctaaaagttaattggtgaaaatcaattgcaaacaatatattactctcttttcttagtagtcttctatataagattctgtttgatcatgagataaaaataaaaataaatactctttttaatctgtgggtaaaaggtaaaagagacatgttatggttggatctgacggcccacgtgtcgctcgcactccgatctcttttcacttttggtcccagtaaggctgtccgtatggagacatcttcccatgcctttggacatttgtgaaaacaagatattattattagaacaactgaacaagatattgcaagtgttacttttatttaatttcactgtggtaagataaaatttgaaaatttacttgttgctctgatcttgatgcaagtaacctcaagttttgcccattcttggagaatgtaaatataacttcgatccccaaaatgtgcctcctgtcatgttggaataactggtcagattttcaaaaggtgaccatttgtctgtccataatcatcaatcccttatattctattccacttcttaaagtttttgttctattgttaaaacgagttggtttggtttggatcatttgaaatgaatgggtgaatgcatgaattctaagagtttgtcatgatacttaggcttcacataaaattctacatatggttaagaagaaattaggtattctgaatttgacgatatttcaataattaccaatttgttaccttgtgataatttcacgaagctcgaggctagaatactttattttataggtcccacttcaatgactcatcatccttatctagatttgtgtcacattccatctagcacttttttttatttgcacaccctccccactccttttcttttgtgaacctaaaattaaggttcaaaaattaattttaaatttttggga

SEQ ID NO: 47162 - DNA, 394 bp, Arabidopsis thaliana landsberg
tcccatgcacgcatcatcggaccggccgacgccttcatgatcgccttcgatgaaggtgccgactacgacagtcccaattgcgtctggttccgcgagcgatatccgcgcttcgcctatgtcgaccgcattgccgtcgctccccgcgcacgtggccggggtctggcacgaacgctgtacgaggacatgttcgcgcaggcgacaaaggccggacacacggtcgtggtgtgcgaggtcaattccgagccgccgaacccggcttcggacgccttccatgccgcgctcggctttcgcgaggtcgggcaggcgacgatccacgggggcgcgaaatccgtgcgctacttcgagcgtccactgacctgatcgcgggctgttactgccacctgcgcggcgagct

SEQ ID NO: 47163 - DNA, 531 bp, Arabidopsis thaliana landsberg
caatgttgctgtgttgtctaagattattacctgtgaactgttttttgctgctgggccagtgggcttcacctggcgtcacgggtctgctggtcacagacgcacacgcactagtgattactgattagtgaacatgtggaataaaaacggtgactatgtgaaacccgacggggaccccgaaacccacccgaaacccgacgggtgcgagtgcgggtgtgggatttcacccgcgggtgtggtcgcgggcgggtttgggcttattccgcaggtgcggtcgcgggtaggttttttctccacccgacccgaacccgacccgttgccatctctaaagataacatacatatgatgtaaaaaatttcgtattagatttatgatggtgatatagaatgaataaaaatggacagacaaactagaaattaaagtatagcaatggacgttacaggggccactataaattaaaagatggaagaaaagacttaggttgattattcggcgacgaaattcctcgaatacgtccagttaggctatctgcaa

SEQ ID NO: 47164 - DNA, 144 bp, Arabidopsis thaliana landsberg
taaaagttaagaagagagctaaggatgggggaaacagaaatagaccgaaatgtataaattttaatacaaggacagacgtaatggaccaggctcaaaggagcagataaggctgacctggaaattaaataggagaacaaaggatgt

SEQ ID NO: 47165 - DNA, 422 bp, Arabidopsis thaliana landsberg
  unsure (1)..(422): unsure at all n locations
nnnnnnnnnnnnnnnnnnnnnnnnnnnnnnnnnnnnnnnnnnnnnnnnnnnnnnnnnnnnnnnnnnnnnnnnnnnnnnnnnnnnnnnnnnnnnnnnnnnnnnnnnnnnnnnnnnnnnnnnnnnnnnnnnnnnnnnnnnnnnnnnnnnnnnnnnnnnnnnnnnnnnnnnnnnnnnnnnnnnnnnnnnnnnnnnnnnnnnnnnnnnnnnnnnnnnnnnnnnnnnnnnnnnnnnnnnnnnnnnnnnnnnnnnnnnnnnnnnnnnnnnnnnnnnnnnnnnnnnnnnnnnnnnnnnnnnngaactcacatcgcagaaactacataactgcgcgcgctactatcaaagctgatcgagtcctagtgatatacgcagactattgccgaactacgccgagatatacgcgaccaactactcgatgagcttga

SEQ ID NO: 47166 - DNA, 938 bp, Arabidopsis thaliana landsberg
cggcaactctacgatcaatccaaattcttattttctgacctctttgccttaattccacgtgactgtgttgattaaattgagtcttgagcccaaaccgcttcaacaccttgtgcagcatgtaagctcttgaggcgtaaatgcactcaagaatgtgtgtttgcgccgtattttccaccaactaatcctcaaaagtttatctttgttcatcgagtctttggagccagcaatgtaaccaagatcctcaacgatcttccacctgaccaacgcgaagacactgttaattccctcttttatgaagcggaagcgcgtatccgtgacccaatctatggatgtgttggtctcatttcctttttacaacaatacctcaagaaaattcaacaagatcttctcactgctaaagaagagcttgttggttacatgggacccgatgctgtgattccgccgccttatcttcctcctataggtaacaatcctcctcccaatttcatgatgtctatggaaggaatgccaccaggagtgatccctcaaggagaacctttgatgatacgcgaaccaaacatgtctcagcaacatcatcatcaacaaccgcaagatgagcagttgcaattcatagcttctgatgcacagagaatggctgcaatgatgttggagagaggagatcaacaagggatgttcaatggttacggaatagacaacaatggttcggttacagccacgggttttaaccaaatggatgtgaatgatcaaggtgctggtggttcgatgtctggaccatctcttgctttaggaagctttggtgatgcttatcagatgggtcaagagacagagcatggtcatatcaaccatgatcagcttcagacacagcttatgcttcagccttcattacaagaaaggtcaagaacaaacagaggaaggacagtttttgatgcaaccaatgg

SEQ ID NO: 47167 - DNA, 1247 bp, Arabidopsis thaliana landsberg
caaaaaagaaaggggagtttctaaattgtaatgtagtgggaatgttaaatcgcctggtgaagaaaagtgatatcattattgatattggttgccataataacgaactaaaagtgaacgaattgggcaaaggtcatatgttgtaatgatgttggtgagtgatatttcagttatgttcatcattggtaagggttattaggaggttaaaaagaccatacatatgtcaaaagattcggaaaagaattccattttttcggaaaaaggtacttccatgattttgtttttcaggttagttatgaaacaatctgactttttcccatttattagacataagtgaattactgatcttttcaacatacattatagaattaaatgtttttgaaaacctttataaaaaaacccaagatcatatagatatatattttgattaaattatggtttcaggatttttttttcatttgtaaaatacaaaattttaatcttgatttttcatttgcaaaatacaaaattttaatcttgatttttcatttgcaaaatacaaaattttaatcttgaattgtttgtataatattgaataaaaactaataaattgttattaaaagccaaaaagtatggaaataataacttaaaatttgaaaacaaaaaaaatagatgcaagtgtaaacacaacatttatatattttaaagaaatttaactatttaatcaatcctttgataatctggaaatcaaatagtaagataatattgacgaaaatagtgacaatattaaaactaactaacaccattttttctttaacttaagtagaaggagaaagaggtaaaagatggaacatggatgtaatgttttgaccatcactgctcgtgagaatttccaggctcgtaaacttcatctttgttcccgactggtgcactgctaccaaagattttaaaagtttgtgatgtaccgattctacaaattattataaaattttatttcatatttgtctttattcgtaaactactcgaaatgaaacaaaattttagttttgtttggttcatatgcaggttttatcatggctctgattcgtatgtcagaattatatatagcaaaataactaaataattgttaacaaaaaaaaaatatattaagtttcagttaaatacttataaaacgctaaaaaccgttatgttttttctaggcatatgtttaagatgtgagttgtataaaatggcctcacttttaaaaaatgtgaaaacataaaaacctgatg

SEQ ID NO: 47168 - DNA, 1241 bp, Arabidopsis thaliana landsberg
catcactgcctcctctttccctaactattgtctacacataaatttcacaccaattagctgaaagtttttgtctttttagaaaaaggtattgactagacatgtagaagcaaaccttagataaatagtgagccggaacagatggtgtcaccgaatccaaaaaccgttccacattacttgacgatgcctcagaaacatggtgtttcaacaatgcagagccgttctcacgatccttagtgtgactcgatctgcagccataagagacgtcaatttgagctctctgaagctgagtgaagttaaatccagctcccaacatctctttttctcaaaaggaatcaaacgacaacaaagaacttccgatttcgttttaccgaataaacaaaacagcaacaacactcctctcactactcgtaattttaaccacctatctaaattacacgccggaaaaagtttatattcagacaagagattaaggaagcagcttaatcggagattctgggaacaggggaaatcgaccaaaagacaaaaacccaaaaccgaaaatctaacaaagcaggcgaagattagcgtgcgagtgaaaaatgaaggcaacgaggatagaaggaaacgtcaatggaagatgaagagaaacaagattactggttcatgacaaagagaaagaagagagagagagagaggacagtcaataaaaggggactctttaataaaaagattgaagcacctcttatttttgttttcttttgcataatttgacccttgtatttcatgttttattacttattgctcaactttattttcgtttttaacattacacccaaataattagttgaaaattgaaatcacccccttattggtgattttaaaaacaaaaaaggaacaattgggaaattcccgcataataaaagggtctaaaactaacggcggatagtagatgctgcgtaagaattttttaagcatattggaatcttaaaattggacttttaaacattctctctcaatttgttatacttgccaaaaattaagaatggttgttaatatctcatccttttgagagttgataaacgaaaacaaaaaaaaaagcatacatgaacgtctatatagatcgaggcaggagttgagaaatgagaacactatactaaaatggttctgaatttttaatattcatctaaatcaggaaaccaaatatgtcagacgaatgcaaactatatcagaaaaatgaattcatgcacgtggactgtgttact

SEQ ID NO: 47169 - DNA, 540 bp, Arabidopsis thaliana landsberg
  unsure (1)..(540): unsure at all n locations
gagcccgagaacgtggagacatgggaagcttctaaaggtgatagatatggaatggaccgcagatctttcgcaggtatgtatcggaaacaaatttgcttccggagcacactctagaatatacagagggatctacaaacaaagagctgttgccgtgaagatggtgaggatcccaacacacaaggaagagacaagggctaagcttgaacaacagtttaagtccgaggttgctctgctttctcgtctctttcaccctaacatcgttcaggtctgtattgtttatcttcttatcaaaacatgtagctttcattatcaagaagtaatatcattgagggagaaaaaaaaacagagcaaagatcattggctttagtacatatgtgtctctacaagggtttaanaattcttggctaatttcatcttttattttgatatatagttcattgcgggcgtgcaagaaaccgccgggtgtactgcatttatacagagtacatgtcacaaggaaacctnnncgatgtacctaacaagaaagagccttactcgctt

SEQ ID NO: 47170 - DNA, 655 bp, Arabidopsis thaliana landsberg
aagtatcgactccattggcgatcctgtgtgattcgtatcacaaaagatggatcaacaacaccagctcatacgaagatcccagatccgagaaattgggtttctgtggaaaagcaaaaagacgtggaatcgagaatgtttgcgtcttcaggacattagaagagattttgtttgtgtgataataaattcagagaaagactgtaacttgaaaatgagtgagaacaaaaaaaaaaaaaaaaaaaagtatcattgttgtcatgtaattctggcacgtgcgacaatattcggttcccacgcttgaagatattgaccgacgacgagtcatattattgaacgagagaccttaaagaatgaagagtatttctctgtctcttctcttctatcatgtcggccattttttatcacgtccttagttatgtgtagggcatcaaagaaaattttctcctattgattcattgaaacaaagctaatgataaactttggttagttgcattgaatcctccatgaccaatgaacaaaatatattaaaccaatgttatccgaagaagaatggaaagagtccgaaataagactggcccaataacaagaatctttatcggagtaaaaacccagtagacagcaacttagggtacgtgtcggatactccacgtctgcactt

SEQ ID NO: 47171 - DNA, 628 bp, Arabidopsis thaliana landsberg
tttatgcaaaaatatcttgtagggattcttagcaaaataaataaatatcttgtaaaggttactattactttattcaatttttgcttttgtcaaccagatattttttcatctgtcgaccaatggatttttatttcccacagtctgtcgaccaatgattatgtgataagttatcagcatcacttatagtcatagtgataacttgtcagatcatcataggacaattgttttctcggcatgacgaccagttgaaaatagaagtattgagtgaaaaatagaggctccatagatactgaataaaaatacagtactaataatacgacctaactacgcgtacatgatatgggccacgtgtgaaaggtgagaagtgaatgtacgtgttgtggacgtgtaatatggacttgaccatgacgatgcaaaaatacgacgcggatttagaaattagacccatagtatccaaattccaaaaaataatattattatcatctggaatctactttgagtcgtccaattttctaaaggtttatttgagtgaaggtggtggtagttcaaaagcaccaacaaactattgctgctagatttgaaccaaaattatcaattgatccgtttaaatatccttttttattatttg

SEQ ID NO: 47172 - DNA, 910 bp, Arabidopsis thaliana landsberg
agctgacctttgcacattccaatgacttcaacagttaaacagtaatcaatcacaggactatcaaacatcaaaagagaaaaattccaagagaacaaacaaaaacctattctcttttcaatctaactaaacagagataaacatgaaaatagatctaactagagaacaagaaccaacgcatctaacctgtgaaagctaaacaaagatcgtgcaagcaaagtttcacaattttgcaattaaaaggatcaggttaaagcagaaatctatagagaaacggtgttcaaaaatacaaatcccaatatcataaatctcaacaatatctttgtctctttgacctatgaaacaatttcaaaacaatccattcataaaccaaaagattcaaagacaacaaaatgaagcaaaaaaaaaaattgaccttccgagaattatatttccccccccaaaaagcaagctagattcgtcgtcacacgataatccaacccgataataaatttcggaattaggtaattctggatcttttgttcccgatttcaaaataaaaaaccccaaattgaaaagaaagagaagaagttttctcttacccggaagaaattttccagactttgttatggattatgcgttgcttcggattcagattaagaggagaaaaggagggattaattgaaaaaattgggggattaaacgaaaagggaataagggagaagacggaggaggaggaggctgggattgagtttgttgtgtcctgtcttgttcgtatcggtgaagaaagccattaatggtggtggtctctgttttgtctttattccccactttttaaaaacaccgaatcacaattcacgaaggtggttttactttttttttagaaattgattttatctcatttaattacaattatttactatattttcatctg

SEQ ID NO: 47173 - DNA, 771 bp, Arabidopsis thaliana landsberg
aaaactaaaactaacaaaacatggaaatttaaagttgctgctgaatttgtagaaattaaagtttccttttgactgaaaaagacccttaaaagcaatgcacctgaccaacaattatcattacacaactttaaataagctttaatcttaaaccccaccttctgttgtttcgtacataaaacatattattaggtctttgtaaaaactaagatttttgttatgacatctgaacaacttgggatagattaactaactaatccaccttaattgtttcttagctttttaacttgtcggttgggtcttctctctttctctgttagacaggtgacaaagctaaatatgtcttttcttttctatctctcttttttgcaaacacaagaaaaaaaaaagattacttcccaattttggtaccattattctctctcttgctgtttttgcggttgtgtttttgcagcttcccttacctctctttcacaagaagattcaacacaagaaaaaaaaaatgtttccttttacttttagtcattttgtcatgtgaaccttttttttttggtttcctctttccctccttttttttcatcatcgtcttctttgtgtcttttatctgcaatcccatttaatcttttggcctaatgtggggctaattcccccatattagacccgtttccaaatccggaaacagtttttgtttatctataaacaaatgggttgcatcagctccaagagtgtttcatgtttaacggaccagggtgactcaccgctccctgaacctgg

SEQ ID NO: 47174 - DNA, 1375 bp, Arabidopsis thaliana landsberg
  unsure (1)..(1375): unsure at all n locations
ctgttcaagaaaacagaccaaaagtttgatcagtcttggtttcttgatcataatcaaagaaaaaaccaaagacttaagaattgaattgacctggattaagcaattgttcttgagaatgacaacttctccatgattaatttcctcatcgttcatccatatcgaaaacttcccaagattcttgatttcaaaactcccatcttgcttcaactttattagagcctagttccataaatttccaagaaaactcacacttataaactatgtataaaaatcaataagatgaatggcgttatcacctgtcgtcgagagaatcttgtttcagaccctgaccttcctaagtcgatatccaccggatattcacctgttgctcttccaagtaacacctgacaagttgaaagtgtttttagcttaactatatcacttaatcactataattaagcatcccaagaagattcaataacctctggtttattgatgtaatgcttagagcttccatatagaagagcgaaagctccatgagcagcgatgtcacggttcatgtaagattcagcactctgctctaatctcattatctttcgcgccatttcctcgtttcgatattttgaagctacatacacacacaaccatcagtatagccttttgatacattagaaggacaaatggtaaaactatagtttaagagagagctgattatttaccgtccaactcgtactggtcttgaccaatcggttcaaggtccatgtcaagaatctgattggttcaaaaagaaaacacagtttaagtaactttaaccaagaaaagacaaaaatttacactgacttgtaagagtttatataccatagcttctagatctgaaaaggaaggcaactcttcatcactctcaatttcaatattattctcctctggtacgtttatatccatctctgcactcaatgtctgttcacaaatttcattctctggaaagtgttgtagagttgatgaagttgttgcagcaacagtagatgtcgctttctcagtaaagctatcactgaatgcagaagaagaacttgctcgggttgtgacagcacaatctccaaaaccagaactgtcgataatgtctttgctcttgacttgtaaggatgatcttctaactggaggcagaggtggcttcatattattcctcactgatgaaggattaaccgagtttcgagctttaggattgtacagttgcacgttgatatcatcattatctggaatctcatcggactcacggtttataacacaattgataacaccgttaacgatttctggatgtggatcataaggcggtggaggaatccaaatctctgctcgatcagngattccttgctgctgtgaccgtgatgcttgctcattc

SEQ ID NO: 47175 - DNA, 505 bp, Arabidopsis thaliana landsberg
actcaacgttactccgcttcatgacagggtaattgttagacctgccgttgtctaagaaaagactgtttgcgggatcatcatccccgataccgcaaaagagaaaccccagcgcggcgtgatcgttgctgccggtgccggtaaaaaagacgaaccagtaaccgtaaaagtgggcgacaccgttctgtatggcaaatatgccggaacagagatccatatcgaaggtgaagacctgctgatcatgcgcgaaagcgatatactggcaattgtataatccccctcaggattcaatcaacattttacatttcaaaatctcaaaattgctactatggcaaagcagatatatttcgatatcgaagcaggatataaaatgaaaaaaggcgttgacacactggccaacgctgaaaaagtaaccctgggccccaaaggccgtaacgtggtgatcgaaatgaattcggtgcaccccaggtaaccaaggatggctgtaccgtagccaaagaaattgagc

SEQ ID NO: 47176 - DNA, 653 bp, Arabidopsis thaliana landsberg
tccattatgaaaatgtggtgatattcaaaacacgagatatagagaagatggtgcttatgaataaaccactggcttaaaagctttagagagttatctatttatatgcttttgaaagtctagctttttcttttatgttagtttcactcatgaaaccgatttgacatctgtttaccctttcttattaacttttatttttgagttttgaaaaaatatatcatagattatgagttgtggtttaaaagatgcttatcattaatttttatttagaaagaaagattgaaaatactattttaactgaatcaaatgacaatctacataatgcgcgcgctatttcaaatttttggtcactagtgatatacgcggacttttccaaactatcttttgaaatacgctactatcaattagttgagcttgaatatggttatctatatagtaaaaatctatctaaaattcttatttaaattaaaaactaattaatatatctaatcaaatccatttaagatgaaactttggttaactgaaattgtatgtgaataaaatatttcttctgtgttataacacacttgttaaagatagtagcactctgaagcgagtacttatacttttgttcctatatttttaaaagatcatttttaatttacaagtgttcgaaa

SEQ ID NO: 47177 - DNA, 725 bp, Arabidopsis thaliana landsberg
atttcttgatttccaaaactgctgatgaatctctcattcaaaatccaaaactcgtgtggatgcggtttatcttcctcgagttggtttcttggatggcgtgagctttctgaacccagcatgcaatatcataactacaacatagacacagaagtattagaggtcatgaaaggccatacaaagttatatcagacttgacaattgcttagtaagttacctgaataactgatcgcaagagcagagaaaagagccatttggacattcaaaaacgttagaagaaccgctgttgctgcaagtagaagaagcaaggaaacgatttaaggtccatcctactatataatccattgacaaatgtcagtttcttgctaataccatgtataatcaatcccataagaactttcaaaacattgtagcccggaacaaattgatccaaaacattacagaaactcaaaagtctctcttattgaatgcatatcaaaacgttttgcagcattctgtgactataaacaagttgcagaactacaaataccaccacggtcccatctttaattagcaaaagacaggaacaaaatgatcgaaaaactcaccgcattgtccaaataccaatcgagaggtttcctcatggcaaggggggacgaacaaaaaatcccactttatcaactgcaacaattttgaaaataagctccccaaaagaagccaaaagctttccctaaacaaatcgccaacca

SEQ ID NO: 47178 - DNA, 506 bp, Arabidopsis thaliana landsberg
tacgataaaaattggaccaaattccagctaaccgaaattgaaccggttactcaaacaatgttactatttcagtttaatagaatcgaaacaacggagtgagttcggtgatacaaaaagatctacggaaacgattggccaccttcagtcgcaagtctgattctctggtgatgttcttcgatcttataatccacaatttcttcaaaaagttgggaatccaagacacaatcctgtcgtccatataccgcagcttgaacaccggcgaccagcttagcgatttcacgaccagaaaagcctgctggcttttttgcagcttctttaatcacttggtcggttaggtctccttcaatggttatcttctgtgacttcttcttcttgaacaagttgctccatttaaggtttgagtctttctcacctttcttgacgtcacccattaggtacctgttgagatcgagcttgaggagcctgaagcgttcctcttcaccagggcgaggaaactcgataacttc

SEQ ID NO: 47179 - DNA, 531 bp, Arabidopsis thaliana landsberg
ctcaatccctgtacaagatttgtagagtatacatcaaggcacatatcctctgcagtgattcgggtccgattccaaacagaaaaggacaaaaatgaccgcccaatattggcactgtcacacctgccacctgctagtgcagcctaacatgttcagagcttggctctataaatggcagcgcctgccctctgcttctcccccccatgccatcctccctctccctcacggcaacatcaagccgagcacctctctagctccctgccacgggcgtgcgtccctctccctacagtgatggacgagctccatacagcagtggcatacctgctgtgcgtgcaattccagaggacagaagacagacgtcgcctgtccatgacgtgtgcggtcaaggccacgggtaatggtgcttcaaattccagattgtcatgatatcttggaaaaatctcgatatcttgactttggtagctgccaaaatccacgagacttgttttgttacatccagatgaaattctctgtctactagagttataggttcgt

SEQ ID NO: 47180 - DNA, 1013 bp, Arabidopsis thaliana landsberg
tcataagaaattgaaagagactttagttagtcctggattgtaaagtggttatgctgataagtttgtagaagcattggagaatgaagtcaacaacacaaaatcttcttgaactgaatactttgaatgttccaaaataatgtttacttcaattttatgaataaagagtatcgtcttacattttgatataaagtcttactaagaaatgattagagatctcacactccaatttttctctaataattttggaaagatcactacaattacaggtaaagaagtattcaaaaaattataaataaaggcaaaaagatttcagaacagtcccaaggcagaagcagcttgagacttccaatgtctagctttttcaaacccatttctaaaattctcaaagtcgtcaatggtctcatcaatctcttcttgtgtgttcataacaaaaggaccaaactgaaccattggttcacctataggctcaccagccacaaggataaaccgaagaggcaaaccggaatcagaaccgttccaagcctctaacatgtcaccacctaggcctagaaccagcaagtggtgcgcagcagcggctgaatgttgtaacttggaatccccaaagtgaccatggccttgaagaacatagacaaacgcgttccagtgaagtggaatgggttgagagattcgagaacccggcgagagagtgaagtctaaatacattgttggcgttcttgtgcagatctttgacttaactccattccattctcctgctatgactctaactctcacaccatctttctctgtttctgctatgtctttactctctatctcttgataactcggctccactctgagaattcacggactttcaagtaagaagagacctaatctagtatatacaatacatggatcactccactcattgtcaattggttaaccgcaaatgttcttatcgaagagcttcagtttttgcttgaggagagatgatcaaagctgcaagccttgttgtgagaatcccatggaattagaag

SEQ ID NO: 47181 - DNA, 852 bp, Arabidopsis thaliana landsberg
atcgggtgtcttctacctcgccatttcaatattgaccttgatgctactcccactcttttatcttctagtcttcttacatcaaaggtaccgtatggtgttacttgtttttattttccatcattgccttatcttcagaaatctttggtcacattgctgtttctactgtctttaacagagaaaagagaagcggaacacaagatttgcgtcgtattataaaatctggaaaaaaaacaaaaccgtcataagatggtaatcctctcaagcattggattattgaatgtgtacacaattcattctctagacattttatatcgaatcgttttcagctcctaaagtcactcttgtttaacattttatacaggtaagcttcaaactgctcttgagatacaggatgttcaaatccgatattggtttggtgaatcacaaatcttcctcattacttctccatctcagacctttcctcatttggtgtttctcaaaccagagacttatggattccaaacgagagtatttctatgtggttatgaagctagttgctatggatatcagatggattacatagacaaatgatttttctgtaagcttgtaaaaacagatgattccttccacaaaataggaatagtgattagatttttctctgtaattttatcgaatcttcatacatatcaatgataacatcaaggtttgaaacacaatctataacagtaagagtataaaacaatctttcttgttagtagctttaaggtttaaggagctaccacgccacacgatagagatatcaactcattagagaggagaaaaccatctggatctttcagtctagggtactcacatgatcctcaatcttcactt

SEQ ID NO: 47182 - DNA, 871 bp, Arabidopsis thaliana landsberg
  unsure (1)..(871): unsure at all n locations
agaagagattctgtcactgaaagatttagaggccatgaccaaagccgtggaaccgggtgaatcgtcatcagagccagccacggttgactctagtgctgtacctgttgaacacgagcgtaaatccacagagaagaagaccacaaagcctaagtggtttaaaatgtgatttcactttgtttctcacataacaagaaacatgttacctttgaaaagtgnnnnnnnnnnnnnnnnnnnnnnacttcacagtagcaatcttattgtgtcggtatgggcttttaatatcttggctcatttggatttcttgggcctaaaagttactttcattatagcgttttcttacctgtctcgttccaaagtagaagaaactaaatgaatgcattgcgctacgttatattagatgaatgaatttggtattataacaaacaatgacgatttattgcatgaattagtatataacactaattatgtcaattgggttaaagacattttgtgttaacactattttgtggtactcaccaaaaaaaaaaaaaaacactattttgtggtggctgataaaaaaaaaatgatagtagttgttgccttgttgggcaggtgaaatctaacggtcaaaaatgaatatgaaactcgtaaattattgggaaaaaaaacaacgtcgcatttattctttttgactttttcgtttccaaaaaatatctcagcatatctgatcattaccactttccattaaactaaccttacaataattcccttaatgatttcacgtaattataatattagtttcactactatccatttacaaacagtccctttatttttaatcatcagctttctaatttatcaaaataaaaaccacaaactatcaaactccacc

SEQ ID NO: 47183 - DNA, 541 bp, Arabidopsis thaliana landsberg
gtccagtatcgacgatatcacggttccaaaaaaaaaaaaagctcgtctccctgaccctgaccgcactaccgcagcccgcaggcagccgagaccgcccaggcgcccaccagccaacctagagcctctccactgctcggccgccgcctgccgcagcccgccatccactgctcccgcctcccggcgtccggcgttctgcttctgcgtaggcgcggctgcgtcctagctccaactccggcgtccggcctactgctactgctccagctccagctcccagcttcccccgcccgcctatgtccagctccaactccagcgtccgctctagcttcggtgtaccgctccaactcccccgctgcagctccggccacaacgcaaggtacgcccatcggaaattgccgtgtcctgatcgtggatctaattgttttatcggaaatgattggaattcacatgagttaatgatatatatctaaattttcaatcttttaatagtatagatactattattctgaaaaacagaaaaaaaattaagtctgaactgtttgtg

SEQ ID NO: 47184 - DNA, 542 bp, Arabidopsis thaliana landsberg
gttaattagtacattgtaagtcactgtatcaggtttgcatcctttttcactcatttcttccaaaatcatcgatacctcattcgaccttccagcttttataagtgagctaatcaacgtagagtatatagctgcgtctactttaatctttccttcgtacgcctcatccttaagcttaaacgcaaaactcaattcaccaatttgacaaagcgctttaatcaacgacgcataaatgtgtaccgtgggacgcactccatacacttttaacatatcgtgcttcatcttcagtgcttccttcaccctcgaatccttgcacaacccgtgaatcaacgtccccaaggtaacaccagtgggcttcacttttttcttgaccatttcatcgaatagcttcaaggcatcatcgaaacacccgctctgagaacatccatggatcagtatattgtaagtacaagcgtcaggcttatcaaactcatcaatactcgaaagacgttccttcattttctcaactcaccgcactttaaaagcgcctcacagagagttaaaga

SEQ ID NO: 47185 - DNA, 776 bp, Arabidopsis thaliana landsberg
ggagaagtgttaaaagcggcccgaaaattggtagtcccgtgtgggaaaggctgctttggttatccatcatgtctcctcgagaaatatcaaaccaaagaatggagtatatcatattggtggcaagtcagtccaatggggtttgatcaggacggcttgggaggattttgatgctggaatcagagatatgcacaatctttttttgattctcgaaaagggaacctgggcagatggccgagtgtatacctctagtgctgaagaagttaggtggcaagttgaggtgtgccaaggatgtttctgacgatatataaataaatgttacaaggaagaagtacacaagacaagataggccaaagtaactgtagtctctaatccataaataaaatataaaaagttttgtaagatagaagcaaagcatgaaaggttttttttagttgggggagagaaaatgaacacgagcaagagtgtactcttttccagcaatccaaacaccagtttgtgaccactgtacatcttcccaatcaagattctcctccaacacctactccattccaaaatccacaacacatcatcagcatttgttttataaagaattttcaaaacaagaagagtcaaattggagaaaaatgttaacctcgatatgatctgctgggagtggaaacccgatagaccgcataagcttctgtgggagaggtttcttacatcgtgaccagcggaaaacatcaattaaactgttgtctgaatctgatttgacaccgtttgtcagatggttctgtgac

SEQ ID NO: 47186 - DNA, 566 bp, Arabidopsis thaliana landsberg
caggtcgactctagaggatcccccttaacgcgtataattacatttaaaaaaagagagttgtaggataattaattaaaaaattaagaaattagagtaatctgggaattggataggtttcgtgctaggtaattaatttttttatattttttttaaataataattttaataaaattcgacccaaatgggcttgggcttaaagcgtacaacgcaagtgacccagttacaaaaagagaaatcggaaaaaagttcaccggaaaagaaaagcggctcgactcttgttgatcaccgttcgcagagtgaccaaatcttagatctggcaaaatcaagactcacaactttgcgaccccatcagaagattgaaacaaccggtgaaagatttcagtttccgaccaaccatctctttctcccgatgcaccaacccgccacaagtctcccagaaaattagtcaccccgacgaagcggttcgacggtgagaaatccgacctagcaaccctcacacttagagatatctcgctctcgtttccggaaactctgaaatccagaacgccgtgttcgatcggacagtg

SEQ ID NO: 47187 - DNA, 1109 bp, Arabidopsis thaliana landsberg
tccaagatgagcttaaattctctattttgagtactgtctatactctgcacaagagagtgcagaaatgaagaatagctcagaaaaagtcatgtccaaactagacagtatcacagatttgcatatgtgacagagttagcaaataagatttataataaacacctgaaggaattctagaggcaaaccagcaagctcatcctcagtaaaaaagacacaagaactatcttcatttaaattgtgaatgtatcgcaagctaagctcatcaatttcatattttagtctctcaacttcctctctttttattgcagtaaggttcagaccgttgtcctcaaagtctctaacctgtcactgataaaacagaaatcaataattcggttcaattcacactgcttagtaaagtgaacagaagtctgcaaaaccactctttcaaatgagctacgaaaaagaagctcattatcccaactgctttcttctagagtaactgaatgaagctaataaagcaaaattatctggtccaactcttataagagtgctaattgatagtccatgaggatacctttaaagacttgttatatacgtagaaaaaaaagtaatgatctcattcgcaagtggacatgttattaaagaatttgaggctggtaaatcactttccattgcacaagtaaagaaaatcaatagtacaaagccatggacctaacaaaatctagaattgtggtggagaaattagaaatgataacaaatatgctaaggaagatagatgaactaaataatctcagttgttagaatgtgtttatggttaaggcactagattgcataagcagaaagaatgtgatatagtaatgtctgagacagtgaaaaaccttaagagcataagagaagcacatgattcaattttccttaccagacactgtaggtaacatttagcttctggagaaatcgattctccctttgcagcataaattttgataatccggtaaacatcttcacgttttctgataagcttgcacaaagacatgatcatcaatttcataataaagtgaatcagagaaattcaaaaacagcaattcatgctcatcagaatccaatttcacctgcaagaaagaatatgagcg

SEQ ID NO: 47188 - DNA, 599 bp, Arabidopsis thaliana landsberg
agaggcggcggagggagcgacgacgcgaggagaagcccccaactggggccaaagcgagctgacgtgagggagagtgccaccaaagtatccagaggcatagtgagctaggattacaaagctaggattacaagaagctaagagacggtatgacctttgattaggaatcgaacgtcctgaaaaatttgcgccgacgtggacaacgtatccggcctcatttcttacaggctttcatataatagaaactagttcactgtattgtacaacctaatgctgatacatggaacatacatagcagtggggaacttgtttgttttttaaaaaaaggaaagctaagggcaggaccttcggatttgaaggtgttgaagaacagcgaaacattgttatttcctatactttaaagccagttcaaaaggtcttctctccgatgtccatgtcactttgtttttcctttgccgttcgatccaggatcagtggccgatggaaccacctcctccttcggtcgacgctgttgtgtgctgcaacacgtgccttttgtggcctgctgcttctcgaaacatcgctctgtaacaatggacacgtgacacgtcgtcgactttgag

SEQ ID NO: 47189 - DNA, 1137 bp, Arabidopsis thaliana landsberg
cttctttttctgtaaccaaaataatatttatcataaccaaatgagaatttagtttcattttccattatgtgggttcaaattgtttgaagctacatttttttttaattaagtaattaagttacctggataatgaaccaagcggcccaagaaacggcagcagccataataagaaaaggtcccaagaagaaattagaatggccagaactggaaccatgtttcgtgatgttttcagcgtaggcccaatggatcttggattctccaatgccgatggtgtgaccatggtagaaggagagaaccatggctccgatcacacatactagcgtccctatcactttggcttgtcctgatgccttcttgatccccacggtttcttgtctgaaaagaaaaaagtcttgtgttaagcaataatcataaacgagtattgtctgaaggaaactttaattaagattaatttcatataacctgaatattgcggcgaggaggaaagtgaccgctggtaagagattagttaaggcacaagcaatggtcggagatgaattctgaagtcctacgaagtatagcacttggtttccagtcgcactgcaaagaaatcaatgtaaatcgctttataacaaagtaagattgcaattagtaggtaaagtgtatgtaagatacccagtaatggagcataagaagacttggacaagaatcctaagtgtgatcttcggtcttgtcttcctgcacaagaaaccgtgtatgacaaatttatgttttcattagtccactaatcattactaatcaattaaagcatttaacattgaacgtaatcatgaaactaatcctaaaaccacccggttaagttaaaccgagactcaagaaaacaatcaaattcacctcacatatcatatgaagagattagagtggagaaacagagtaaaaaacgtaattgaagaagcacgtgtcttggcaaatgaagatggcacggcacctgacgacgcttaactcacctggcatcatgatttgtttgtcatcatgtgcttcgggttaagaaagaaacgtgacccgtggattgtgtgagactgcgtcacattactcatttgtttctttctcggaaaacggaattaatgataatgtaactacttaggtttccacatacca

SEQ ID NO: 47190 - DNA, 593 bp, Arabidopsis thaliana landsberg
tgagattgtcaactgaacgactaaattgagacttacgcagaagcaatgacatctgattgaatagctgcattagaccataacgaagatagaaaatcttgagtactagctgggagatgatttcttcatgtacctgaaggcaaacaccacaaaaagaaacaacttaattatgcaaaaatccatctcataatctcattgtacacactcaaaacttaaactgtgataaccaaccttatcctacttcgatttcttgtttgctattgcatagcaagccacagtatatattggtatagaggaaaatcccaccattgattaaacctagatatcctgtaaaaattgtcacattcccaaaatctatcaaatttttcaaaaaagggtacattcttttatctaggaagtaactagtgcacacctggaatgggctttgaatggtgataacagtcccaagttgagcaaccagcatagaaaaagtggagcttgatggtttgtcctgcattcttgctccctcctttccttgtcattctttgcaatttatacaccaacaaagatgaattcatcaacaacatgcagagcgatgtgcagaaccacttagatta

SEQ ID NO: 47191 - DNA, 961 bp, Arabidopsis thaliana landsberg
tggaatttctctccttgacgtacgaagtgaaagatctagttttttttgtccatatcaaacatcctctcattggggttggtattgccttcagatttagatgagctgatttagatgtcgtagtcccttgttgagtagtcttacttttccagtctgctagacgatttagtctcattcgtaagagattttctaatttctctcttttttttctaaactccacaatacttttattgtagggcgaattgtttagcggtataactcgttcaagatttgttgttgtattttctttttggtacacacttttcctccgtatgtatttaccaatcatcaaggtctatatgtttgtaatattctaaaggatttattacaccatgccaaatatgcaaattgactagtaaattttccttcattatggtgcagattgcaaggcaaaatatatatgttattgtaatgaattatcgtaactatagatcaagcttatgatgttatatatttacacaaatcatctacgtacccgaaaccgaatcattgtttactaatggaaaagtattacatatgtagaagatatatatgcttagaaaaaaagatcgaaagtataaaagagaggaggaaacaaaaaaccacatttctttccaaaaaaaaaccttactcataattccacaaaaagctttctttgagacatgggtccaacagtcccgaatcatctccatacctaaaatcattttcggtagcatctaaccatgggggcatcgacaccagcccctccaacgagtcatacagggcacaatcgtattttacattgttttcaagactcggcaactccacaatatctcctagctcccccgaaagtatagatgatgaggacgaggacgaacatgaggatgaagatgaagctgacgacgatgaggatgaccacttttcgatcttctcagtatcacacctagtttggcacggcgttgagtca

SEQ ID NO: 47192 - DNA, 1462 bp, Arabidopsis thaliana landsberg
taggcctatgcggctatgctataagtttcgtgtatatagttaaaagttgaaagaaaccctaaatgccttaactgctacgtatcgaagattattgagattatatgtccaattttgataatgctgccgaagaaggcgctaagcaaggaggaggcggaggctaaaacgtcggtatggtgggacatggacagctttccggttcctagtgggtatgatgctggattgctggtcagatccgtgagtgtatagaacggaagttgcggaatttaggttacactggtcctgtcaccatctctgcatgtggcgagctacaaaaaacccaagagcacgtactgcgagcactctcttccactggaatcattcttaaccaatcctatcgtcgttaatcttcttcttcttcttctaatcttttttttatactacatattactagtttttagatatattcaatctggcttgagttgctgtcttttactgaaacagctatggcacacatataagaggataataaagtgaagaagaagaagttgatgaagaacgtatgagcatctagaggacgactaagaagaagaagaagagtatacatggcccatggagccttgtttttctccaaggaatttcatttggtgaatggttatgttttatacttttatttgtagccggaaatgttgggttaactttatactacttatgcttatatacaaatacaagtctcatcttttattcttatttttaagttaggatagtatgtttggttaatgtttttttaataagttaactcgttatcgtatatttacatatttcttttatggagataggatagtatgttcatacttcatgcataatactaagttggatgaataaaagctaaacattcattttctcatacaattaacaaatgaaaactgacttgtgtatgtacaatgcgatactaaaggtctacgtgtatgtagaaaaaggtcaaagcttgacaaaagaacaaaaaaaaagaatgaaaaatctggcttttgctctaattaaaccctaacaaaaattcggatgtgttcatagagttggttggcctagaagcagagtatgccaccaaccgcatgcaatgtttttggggaaacaatctttgattctaacctctgcaggtgcattcctgtcaatcacatctcctatacccaactgtttcagacaagacacaaactacgtcattcaatggaacgacaataacaattcagaaactccatatggtctttctctttttacctgtccgtatttgttccatccccagcagaatactctcccttcatctacaacaaacaaaaacacagagcagtttttttaagttttaagatgaatcactttcctagctaacatgaaactgaatctagtctttggttaaatgggttacctgtgattacagctgtgtggcgagccccgcaggagatggttttgacgtttacgttttccaatttggagc

SEQ ID NO: 47193 - DNA, 491 bp, Arabidopsis thaliana landsberg
gacagttgttttgggggttccacgattgagcctcatctactcagctccgtttcggccgcgggccgatcccggtgtcgcggtaccgcccggaagaattctgttgcatcgtgtacttgcgcggcggaagttgaggcaagagattgaagagaggttccctgcgctatcggggcactgtgatccgccacgtccgtgatgcggtcgttctcggcgcatggcggatacagagggaacagagactgtacagggcaagaggttagtaatggacagtcacttgcaacagcgcatgatagccaggactaggcacgcaaagccttgtcagcacacggcgcaacttactaaaacgaagcagcaattcgtgtccgtggcttggacgggtgggatgttgcatgttatggcagaaagtgcggcgactggttgatgtaatcgggctttgagagacccactaaaacggtcactctggcgttataggtgaggcaggcatgacgcttagc

SEQ ID NO: 47194 - DNA, 550 bp, Arabidopsis thaliana landsberg
gcatagaagtctactactacataaaatattttccaaattattaattttatgaactcttaaatgctttaatattttgttaataaaggattattgaataaatggatctaaataatagaaacgactccatcagacaaataattgccttaaaagtatcttaaactctcaaccagatataagatagatccacaataaattactactagaattagatcaatttaccatagttatttcgaaatgtaaaagcataatttacatacacactcctaaagtctaaaatgaaggtgttattttttttttgacagcctatgatgaaggtgtttaatcacagaaaaccttaattaaaaaggctattagggaatctttttggcggattacgaggtaaattagagcttatcaaaagcagttgatgtgtattttaattatttctactttcagaagaacgaatatgatgacgtaaacacgtatcggcatgaaccaatcatattccctggtggtttttaaaaatgattacatatagaaacattacataaagattttgaaaaatcacgat

SEQ ID NO: 47195 - DNA, 850 bp, Arabidopsis thaliana landsberg
gtaaagtgtcatgtaaccgagaacgtaatataaaaatgatatgggtcaatctatttattgctaggagttccatgacaagactcttacgttcatgaaatcaatatcttgatgcaaaactgaacttgaacatggactgaagcgaggctagattcatttaacaagactctcacgttcgtgaaaccaatttactggtgcaaaactggacttgaacatggactgatgcgcggctggattcatttgacaagactcttacgtccatgaaaccaatatactatattggtgcaaaactggacttgaacatggacttctgcgaggctggattcacctcattgtataactgattttgcaagtccatacatttttgtttcttggattgatgttgatttaatttaactttttgttaatcttcaatattatgtatgacgtgtcgttgcttccacgtgttttctgccataacaattacctactcaccttgactcttatgagcatctcttgtcggagaaagtattcaaatttgctttttgacttctttaattctttgagtatatcctttcaagatactctctctttggttcattatttgttttttggccacgtaaagttgtattatagactttatagtatagaagttttaagcttgaaccaatcaactttggtcactctttaattcatctattatataccagatcattttttaactgagatatattttcaaactttcttacactctaatatcatatgaaagactataatgtactttcaatataaattacaatcaactgaaggttattgcacaaacacacacaaaaaaagaagcaatcaaaatcccccaaaagtttgttgtcttttt

SEQ ID NO: 47196 - DNA, 381 bp, Arabidopsis thaliana landsberg
tcccctaaaacccccctcagcaagaaccctgccatttcgcgtgctgcccccctcgccgcccgccgccgtcgccgcctcctatgcccttccgcccctccctaccttgccgctgtccctttgaccgcaagctcacgtccttcctgtcggcggtcgctccctcgccgactcccgctcccgctcgcccttcccccctgccggcgctgtgcctgcaactctcagtcccactgcctacaacgcccttatgatcgcctactcccgcgccggccgccacgacgaggttcttcgtctcttcttctcccttcctttcgcgcctactgcgccagtcttcaccatcctgattttctctctcgccgcctccggagcaaaagcgacgcattggac

SEQ ID NO: 47197 - DNA, 543 bp, Arabidopsis thaliana landsberg
  unsure (1)..(543): unsure at all n locations
gaagcttttccttcgagctgctggtattcgagggttattttgtatgatttgttcttttctgttttcagccggtaagtgcgtgcgccccagcggttgcgggtccaggcattgatgatctccctgttgtcgaccaggaaacgataaccatcatcgccttccacttcaaannnnnnnnnnnnnnnnnnnnnnnnnnnnnnnnnnnnnnnnnnnnnnnnnnaaaaattatatgcgcgtatgtttcctgccactgattctccttcctgccagttatggtcgatagttggttctgtgcgggtgatatcgggattgccctgcaggtctttattggaaaaatattctgccctgaaaccctgtttcccttcgtaggaatagctgctgcgcatgtcggcataggcaagcagcgtatcattggtatggttcaccattttttcatacaccacttccacaccgggcagcttattcctgatgccctgtaatgcagtaatgatctcggagggtatgccgttgtagnnnnnnnnnnnnnnnnnnnnnnnnnnnnnnnna

SEQ ID NO: 47198 - DNA, 866 bp, Arabidopsis thaliana landsberg
tgggttgttccattccattggctgactttgatggaagtttccttcttaattgttaaagatttatcaagcaaagtctagcagatattgacgtcagggcctaggtttgtatgattctatcaatgagctccttagctttatacttatttccatgcattaaccaatcatggagttgaacacttaagcccagtgccgcttagactaacaacttgtagaggaccttaagttttactaagtatatgtcttggagtatataaaactgtgtattaacaaaattaactattcgtagtataacgaagtagtgaataggaaaatatgtgtggaatgtagtaaaatgacaaaggtataaggattcttttttccatgggttaattgacatctgaccaatattagtccataccctaccctaatcccaatccacttaccaagatgcattgtggattccaacatcacttatctgatcccaacaacatcacttacagtcgtcttacgatttgtgtcattttttgtttttttttgttttaatcgtgaccccaacttcttctttcttgcacttatagctagccacaaacaatcatgatgacccaagctatccagccttctgcaacgtcccaagcaaagcataatcagcattttgtggttcttaaaacactaaacgtaactcgctatggcgaagaaacaaatgcactattaagttcttttctatgatatggtgcttctgcattgctttagtttcgtcactaacgtttaatcccgaatgtggccgacacatatatatatcgccatggctataaaatataacttaacccatacctgatgtttcagaaccaattagagaagaagaaaaaaaagagaacccaggctaggat

SEQ ID NO: 47199 - DNA, 564 bp, Arabidopsis thaliana landsberg
atggaatataaataccttttgatacagggtatcgattacacaagtcactgtatatagtttaaagaaaagtttcttcaaagactttgatgctttacttcatcttggcttttttaacaatgttatgtatgtcattgcatattatcatttacatcaacattgacaaagatattttaatttcttctcaaagttttcattcaactttcatattataaaacttagaatactttctatgttacatatacacattcctccagttttcatcctttacagcttgagtgtaggttacaggctctggctcgattttgtaattgagagcaacggtcaggctgagcttttttatttggtttgctgatttgatttttggaaccagtgatcatttgatggtgatttacttgtggatttatctaaactcgtcggctttgttcccgggagggtttttaaggttcaacccttaccggatttgccttttgcatgctctgtgtgattattggttccaattccaacaaaatatccttgcctccagaaaagacaaaacgcattcaactaacgagaaaaacatacgta

SEQ ID NO: 47200 - DNA, 1046 bp, Arabidopsis thaliana landsberg
tgagacaggtttatgtcgaactatgggttcgaggtcgatgactgagtagagttgaaccataggttcgagggttacgataacatatgatatggttcaaattgtctaaaaaacactattttaaataagagatcattatagtaatttaaggtcgaattctacaaatcgctctagttcattcaataaactttatggttatcaaagttaacccaaacaagaaaatatgaaaattaaagattgcaaataaagtaaatttgttgtagattcaattgacggagaagctagacttagttttagtaaatcagaattataaatcaaacaatagctaagagtttatttaagacccgttcttgaactcaaatcacgaaattataataaattaactctcaattgtattgattaactatttataatagtgagaatcccaacgcttgtctttgaattcttaaaactaaaccagcattaaagttcaggtttgattgttcacaaaatccatatttctccgagaatagtaagtttgctcacctaagattatttcaggaaatttagtgcactctcgtgtcaactaatgatcatatgaactagattctaggttatcaatctatatctagtgagtaaacaaaatctaggtaaagaactataagattatcctaccaaatgtttaatttagaaattcattcaaactataaaatttcctaaatctaacaagtaaattacttagacatgatcaaggagaaacaaaatcataattcgaataaattacattaaaagagtaagagatagagtaagggaattgtgaatcgtctctgaaagagtctgatttttctctccaatctagtaccaaaataaagcatagatctaaacaaggaccttaaaaatcctaaatatattcaacaaaaacgtcagagacttggtttgccaataataaaaacattttggaaagtttgaaattcttcaaaactttgtaaaaacgtgggagacttgtgttggcgacgagtattgagcgtgaccaatgcaatcttgatcgacaccaacacatcttggacact

SEQ ID NO: 47201 - DNA, 761 bp, Arabidopsis thaliana landsberg
gtagtccaattgtttgaagaccaagaaacttagaattcaaggctaaaagttcaatttttcggtaagggtaagaaaaacatgtactgggcaatagaactagtataaattcttagattacaggcatctaacatatacacgaaacaaaacaatgtagttttatgattttttggtaaactattgttttcagtttattgtattaatatctatgaacgttgttaacatgtccgatccattgaaaagaaaagaaaaactagagagtttttcaaagctattgggaggcttaactggttggtcaaatgtgaatgaaccaatcccatggtacatggatattgaaacattaacagcagattagttatagtagtgggtcaaacatgtgaccctttagtttggcattttgaatgcctcgtggtctgcttttgtgtctctccgatctacattattattatctatttacttttcttttaagacgccacacatgttacatgtatatgacaaataactataatacatgtataaataagtgttgacaattggaaatatttcagcctcatactcatacagtgaaaagtaacgaatctatagtttagctacttggattatttagttttgttttcttaagaaagaaagaagaaagaaaaggaatgtagaaaaagaagtaacgaatgatgatagattgatagtgtaagacacattaatgacttccacattatggccggtcaaaagtatcttttgattttcaattttagctgttacacaacaac

SEQ ID NO: 47202 - DNA, 481 bp, Arabidopsis thaliana landsberg
aaccaatgggaaaagtttagagtgcacatagagtcgcgatctatgagcaatatacaacttaagacggtatctgcatacatttacattgaaacaagaaagcgcaatagaaattaccaaccttagcctctgtctgacctacgttaacctgaaatacaagatcgctggtatgaataattgtaccacaagttcccttacaatccgagaaggtacaagaagaactaaaaacatacaacgcaaaatgttctggatggaatgattgttgatttatatatggttcctgaaacattaagtgaaaaagggttactaaagagactccagtcatggtaaactaattctgtaacctgttacttgtaactgaatcagctctgttacacacaagaggcatagctgattctgctacatgttttgcaaaagagtacgagaaccatttttggagtttcaatgggagaaatcgaaaattcaaaagcataaagagttaagc

SEQ ID NO: 47203 - DNA, 933 bp, Arabidopsis thaliana landsberg
atattaatcacatcgtgtagaccatttctaactcatcttcatttcatctccaaaataaaatttggagtaaaatttcttccaactcatttttattttcaatttcaaaataaaaatctccatatacggatatttttcatttttaatttacagtaaaatttacaaaatctctatttttgactctaaaatagagtagaattagagaaaacctcaactccaaattaaaattactatattttgaagaaaaaaatagaaaaataagttggaaatgctcctaataataattagcttttaacctttatctttctagttttaaatgtttttccaaattatttttggttgggttgagatctttcatccaaacagtaaatttttttatctttgctagatgtctttttcactttgatttctaagatcatctctagctatttcaacaaccaaatattcccgatgagctaatgtacttgcatgcactatttggaaatacaacatacaatttcacaaacaacatcacgtggaattgtatcacattcctgttgctgtggaagagaagtgcaaattctcttcaatctctctgtggaattgtatcacattcataacaaacattgatttttcaaagatcaggattccacagggaaattgcacttcgctttaagaagactaaaactcgtcccaatcccattaatttgcataagtcgcctccaaaaaatcaaactttgatcaaatcaagagtaaaatcattaaaaaaaacaattggtcaaccaataagattcaactgattaaggttacgtatatgtgtaatcaaattttctcgtctatgctaagtataataacaacatgtacaattttttatgtatctaaaatatcttagtaataaccatatgatagttgactatactaaaaccaaataatttgttgaaagccaatattaattaa

SEQ ID NO: 47204 - DNA, 591 bp, Arabidopsis thaliana landsberg
gtaagaatcgttaagattaatttttgtgtgttgtgcgaaagaacttccgtatttgtggattagtgggtaattaaagaaaaaaaatgaaacacaatgtagtataggtaaaactacaacatgagatttctatatattcaagtttggtcgcagatgataaattgataactgtggtttagtgaaacaaaaagagtttagggtttgtatataatagaaactaaaacccatatatccaacaaagacattgaccaaagatcaatgaaatcgctgtttattctccttaattttcaaaaagagatatggagaggcagatgaaggatacatatcacttaaggcattaaagagaaatagtaccttggagatgaaactctggaagaaggaagatgaatactggtgatagtcgtcttccccaacaaaaaagctctttacattctcattaatgatgaggatggtgctcgctgattacacatgcagctcttatatgatgatattatattcatatgtgactatgtgagttctttatatctttgcaggaatgaaaatgaataggtttcttatatggcatttcttataaaaaataataatataagctta

SEQ ID NO: 47205 - DNA, 1148 bp, Arabidopsis thaliana landsberg
tcgggcgctatccctacttgagaacaggcgcatgtcttcatttcaaacgctctatgacgcatccaatatcatgggcacagcttttctcctagctctcctcggtggtttcctctccgacgctttcttctccacttttcaaatcttcctcatctcagcttccatcgagtttttggtaaacctctcttaatcattcttataatcacttcatttttttacattttgttaatctttaaaatttctaaacttaacaaggaacaacaaatcaaactccacttataaaaatattcagaaactttgttatccattagattactttagttttcttttctctatcgcttaagttttaagttactaccgttgacttttgtttttaatggctaagccaccacaatcataaatccgttcacattaaaatagatcccacatgtatatctatacaattattagcataaaagaaaattatcacacatgaaaatatggttgtagcaaaaaaaaatccaacgaaccatgcgtgcattaggatgctgataaaaaggacaaaagcaaagaggagcgtgactttgatacggtaccgtatccgtatctataagcaatgctttgttttgatcctaacacgacacatacgtgataacatctataaaaaatccgtatgttaaggtcgggacccaaacgtatttttatcagttttaactgtcactgtctcagggttaaaagaggaaatttaaaaactctttcttgggtttcagtaacacagcaagctttttattttattttgttatcttgtctttacgtatgatagggtatgaaactataatgtccacttatataacatctgccactcgtaccctcgtgactctgcaacttaatgttacaaaagacaaaacaaacttgtagttctaaagtacagttggggctcttaatgctttgtgggtagcgtttggccggacgcaaacgcaaacgctcactcttctacttcccattatggatagagatattgatggttcatgtatacctatacactatcataacttcattagaaaacttataacagattacaagaaaatatatatagctgacttaacttataatctccttgtcactctttatagatttgaatcatttacttgtatgatatgaagtatttatat

SEQ ID NO: 47206 - DNA, 601 bp, Arabidopsis thaliana landsberg
tagtgaagttaacaatgataaaataaagcaaacaaataaaacaatatttgttgtcattgatgacattccaatgggaactataccctatttttttggggtcaaatatacagtcagagttaaaaaccagacaacggcttttcgttttgggctttttgactgttgatggttgaaggatgtgtcacatgaccccgactaacaatcttaaactacacgtattcatggcactccatcgagagatcgagtggtcctttgcttttatctttttttttttctttcacccattctgtaaaaatacaatacaattttactgttgttagttattttaattggttgggaagtacagagaagtgggacctatgaccaaaaacgatcacctgagtggaaaggtgccgtggccgtgactcaaccggcgacactcggtcaaaaccggagcttttgctcatcttacgtgtcagtttacttttcaaaaaaacaattttaaaatagcattagcagatcatagatactaggtttttgtagtaaaataaacttaattactttttgtaacataactaacagataggatgttatatatggtcaaagaaaaagcaacctgggagaa

SEQ ID NO: 47207 - DNA, 292 bp, Arabidopsis thaliana landsberg
catatgaacacctggtagaatgtagtcacgaactaccagctctaattcttcccaagaggaatatcaggaggttgtcgatctgagctagcttactactaagtcgcaaaccacagactgtaatattagtgacgtcggtgcgtctctcgtaacggtgttctctcaactgtgctataggtctggcaccatttgaggtagtgacacttggcaattactcctgaattctgtgtgaagtctggtatactcgtgccaagtagtgatggcacgaggtataatctgtgcctatgccggcttc

SEQ ID NO: 47208 - DNA, 1047 bp, Arabidopsis thaliana landsberg
tgctctacgatgtatactcttcacatgacaatatgtacactaatctacattgataatacatatatttgttaagttcaaatagcattatcacaaatgattaagctatatgtatgttgtggtgaattttccataaataatttgtcatctgtcaataaaattttaatgtatattctataacggaattacggtcagatacatgtgtaggtaatgaattaagtaagatattaatatctgtcgacaaataaaagcatcaatatgtatgtacattctcttaaaactgattcgatttcattgtgtcactgtgtatattgtatagaaacatatccaaatacgtatctcatgcctgtcctctaacttaaaaacaaaagaaaaaattatcataccagccaatttaatgcacaagattaactaattgatcaataattggatacgttacaactctataaaatcatatccattacgctttgggcaatggcaaattggcaatggaagtaaaatcaaaagttaaacaaatgaattaccatttgaaacactccaaattggtattcgtgtccaaaataatttttccaaatgtcccatcattctaaagtttttcaccttatgcatggaaccttcctagtatatatacagttctaaaacgaattttatttgcaatggtctatcagagattataatgtcaagatcttgactttttgctgatgtgtagtgtaatgtgctgttttaccaacatgttatatatataatcgaattttttcttgaaatgcctaacgttggttgacaattttatattacgaaaacctttccctgattatgcatattcaaattgcggtaacagaagtttggtcaaaatttgactttcatgtaaaaaaaaaaaaactcaattgaccttaaacttaaattaaacacccatttatatataattatcacggatggaatttactccttaattacagtgattatttatctaatttttggtgacagacagatctatgcgtgtgaatatatacaaaatatggtatatatgttgaattttttgacaccgccccc

SEQ ID NO: 47209 - DNA, 666 bp, Arabidopsis thaliana landsberg
gtatataaccaagaggtttttcaacttaccgtttcattcttcatgcaaacttccataggggcaggcacgtggagctgtaatattctttcaaaatcagatggtgttttggtgacagccccaaagatgcatctaaacagatgcaaaactagtttagttgcatctgaatctggattcttcagaacatcaagtttgctgctaactagtaaattaatcaaaacatctgcaaatggcttgtaaactttgggagcttgcaggagtgcggcaaatatctgaaccagttggttattgttaatcatgctctcaaaaagctctggcatgcataacgagaacatgtccattagatctggaggttccataatagcaagaatctgggagaaaagattcagcatttccttttcctcatccttttctttgaagagagctaagcagtggacaccactctttaaaacaccagaagctttccacacctacttcaaggcagagattactaaggtttatagccatgcactattaatgactaaagtaaataatcttacaagcagtacctcatcttctctcattcctttaaaaccctgcggagcagatgattgtgaaacaagagcttgagggttcatcccctggccagcaggagaaaccgtcacaattaatatacttgcatgacaaaac

SEQ ID NO: 47210 - DNA, 343 bp, Arabidopsis thaliana landsberg
taagctagcacgaaaaaatttaacagatagagacaagacaagcaaagcaacactttcactaatcctctaatggcagaagacaagatcttaaagaagactccggcggcgaagaagccgcgaaaaccgaaaaccaccactcatcctccatactttcaggtgaggttctaactttttcttttgagttcctatctattaaacttagttttttcgttttggtttttgatgaagatgataaaagaggctttgatggtcctgaaagagaagaacggatcaagcccttatgctatagctaagaagatagaggagaaacacaagtctttacttccagagagtttccgtaaaa

SEQ ID NO: 47211 - DNA, 646 bp, Arabidopsis thaliana landsberg
gttatgatattgatattatcaatggagatatgggtacgcgtgtgactttgtctccaaattctttcttatggcagacttacaaattattagacggtttctcccaactttattggtggtacaaaacaacccatgagaaatatatataaaaaagtggcatatgagaaaaacattaatgattgctacagattacggaaatcgttttaagacttatagattttaaaaaaacactcattagttaaagaactcaaaacaggagaaaaaccaagttgaacacacattagtcgtctactgattgaaacttggttaattttaaaggttgaaagatgtttcaatatttctagaattttgtagttgttagagcaagtttttaacttaagtggatatctggtgtacaataagaacttagagacatagtatcccaatagtacttgtaaaagagttaaaacaaataaatggtaacaaaacttgttgaatattattttaatctagcttctcaaaaaagaaagtatacaatttcaatgtcgtcttaccaatcacgcaaaaaagaaagaatacaatttcaatttcaatgttacaatgtgaaacagttttcttcaatcatattagtcatttgtaaagataggtagacccacgaccaattaaaccc

SEQ ID NO: 47212 - DNA, 488 bp, Arabidopsis thaliana landsberg
  unsure (1)..(488): unsure at all n locations
atacgaattcgaagaagttttttttttttgtaattgttttgtataatttgataattgtttttaatttttaaaaggattgtttgtctataagggtgaacattggactgaacattttttttttgaaaagaaaaggacttgactgaacatgaaaactcatttttttttttttttgcatattacgcatcatagactttctgttatgtgttgtacaaaaagaaataaacttgattttcttctatatgaatattttgtatctatcacaaattttgaccttttgaaccagatagattaaatgaattttaacaatttaagcgtaaactacacgatccatgcaaagtttttcttcgcaannnnttttttttttttttttttttttttttttgggatacttcttaaattggttagcgtaacttataaatcttgatctttaaagtcaaacctagcttaatttatcgaaaaacgatctaaattttgagcagttatgcatt

SEQ ID NO: 47213 - DNA, 887 bp, Arabidopsis thaliana landsberg
aaaatcataccaatattctccatacatcaaaattaaaacttttattcttcttcttaatcctagtaattcaccatttggttctctggaggctcttgactccaggaatctccttaagatcaacaataaaacctctatagccactcgtataagaaacaccagaaacttccttcgatgtaagcagcttaactttatcattctccatagcttttctaaaatcttccaaactcatctttggtaaatctttcacatttttctcaaactcctcttcttcagataactctggcccaaaaacttgctccggaacataaagctttcctttgtactccctcaaaatatcactcaaataaacagactcttcgcttttgtctgtctctgttttcttcttcgaatcaaacttccttttgataaattcaaacgcacccgtcgccgcattggtgcctttgcttaaatcttctctctccttcagattatacagcttatcaccaactcggtaacgaggttccacttggctaggattctccttcaaaaccctagttacgaaatcgtcagcagcaggggaattgttcgtctcgccggagctagatgacccagttttcaattcgcacaaaactgtaaacgaccgacgcagaattggagctctccatcgagtttgagttctcgcggagaaactcgatgtaatcgcgtgtttcaatatcgatctcttggggttttctgggattgagaaccgagtaccgagtgagaaaacattgtctatagacgccattttacgacgataaccatgtacagaagacaaagaagcttcactagaatcgcattgcgaaatttgaatctctcctcgttctggataagaatatagagcaatcggaggtttattcaatctcaggagg

SEQ ID NO: 47214 - DNA, 766 bp, Arabidopsis thaliana landsberg
actcaagcactcggacatttttcttctggtgtcttctctccatcgaaaaaacaggatttttcttaaaagatttggaagccctagtcagacagggggagccagcttccacattttctgaaggttcaatctccaccactctatagcttagtggaagataggaatcgtttgtaatccagtatgggacaaagaaccttatagtctttggtgcagcccctgtttctcccacatcacgttctatacttacacgcaatctcctgaaactccaaaaaatagagttggaaaaaaatcatttcatggaatatgatattaggtttatgtaaaagaaagaaaaaatcttcatttgataactctcaacatagtaggttccatcaataaagaatgttcagctagacaagattttccgagggatactgcttagtttgaaaagagatactgatatagccataaccttaaccccacttcttaacaatcatatattcaatttaaacaacaaatatgcatataatcaaatacctgggtaataagcagataaaagactaaccttttgctctgttgatggacgaaccaaaatgatgacacgctgtcgtttgaagatatatctaaaacaggaataggatcctacaaaagcaaactgaaattcagtaatgttctcaagtgtaggtagtttcttgtgcagaatataaaagccaaccttttccaaagcccaaccgccatggacagctaacgtaagatatacaggtctctgaatatctgctgaatatacatg

SEQ ID NO: 47215 - DNA, 467 bp, Arabidopsis thaliana landsberg
aatccacagtaaggaaggaaataatgattccaagtatccaacttgttgtaccatgaatagaagtgtgcacataatatttctttttaccaaatcatggggtagaaaaagaaaaggcacatgaaagcgaaagaaaaagaagaagaagaaagctggtccattgaatgttggaaaaaatggacaaaggcatgttacgattattcctctcttagaaacctttgaaaatattttatgatttcagcgaatctttagcaagaacaacaagaaaacaaagagtaatatatatactcaacccatagtttttttaaagttgcaaaaagtaggaaacggacacaaaatgaccatgtctgattatatgatcaaagaatccaatctgaaaccattttttgttatttccagcatgctccatattccactaatcttatatatatatatatatataaatatcttatagaattagtttgtgtttc

SEQ ID NO: 47216 - DNA, 940 bp, Arabidopsis thaliana landsberg
  unsure (1)..(940): unsure at all n locations
tgtgtaaatatctttttccaaaatctatataaaaaaaaaaataccttgagatattatcacccccaatttttttaattataaatctcacaattgtgaaatggtttcaaaatatcgcaaactaaagtntgagagaagttcacaaatctgaatcttgaattttatgattttggtagtagttttggaacatggaatgtggtagtttaaaaattatattaatttatgaaaacataatattaaaatcctataccaactaaaatcttaagaaatattttaagttattgtttttatagctaccaatgtttatgattttctgtatggnnnnatttatttttaactgttttcccaggttttcttgaattggccgaatatgtcatgtattaatacactccaaagattttggatgattagactttagtggaatccaaccaaagcggcaaaacaaagaacatgaacatttatgcagttaacaaggaccagaatctaagggaaaatgtttcacatgtcacgtttaatttttcatcaattatggtgaactttccctatctttttaccaacaagtctatatattattgtcaagtcgttaactcttaaacttttaaccatgtgttattctgtgtacatgtagaagttgtcagtacacaacagttaacgtggatagattaatcgatacaaaaataactatttcagtattttctaaaaatgtcaacgagtaatatttatacactcaggggtgagtatgataagagtaagatattcgtatagtaattaagttatcaaaagcaacgagattaaagtgaaaatttgcatgtaaaaggaatttggataacagagattgatatataagagaatccgccgtacacatatcccgtcggcatgcttgtgataaaacagagtttaatataggattaacatcacaagaactctggaagagcttgaatat

SEQ ID NO: 47217 - DNA, 938 bp, Arabidopsis thaliana landsberg
caactctcttcttacttctctagttaactcagccacatactcttcctacaacaacttcaccatcatgggctcttcatcctccgacacagcacgtggcctcttccaatgccgcggtgacctctccatgccgaactgcgccacgtgtgtggcacgtgccgtctctcaagtaggtcctctttgccctttcacttgtggtggagccctccagctagctggctgctacatcaaatacgataacatcagcttccttggccaagaagacaagaccgttgtcctaaagaagtgtggatcctctgagggttataataccgacggtatcagccggagagacgcagttctcacggagctagtcaatggcggagggtattttcgagccggagggtccggtgatgttcaaggtatgggacaatgtgtaggagatctaacggtgtcagagtgccaagattgtttaggaacggccattggacggcttaagaatgattgtggcacggccgtcttcggagacatgttcttggctaagtgttacgctagatattcaactgatggtgcacaacattacgccaagtctcataattgtgagttctctctacttactattattagtaggaaaactttcaaaaataaaatgttttgttttccataattcaaaatccaatttgttttttaaaaatagacctgcaaatatagatttagataagtttcctcaatatttaggaatagtgtagtacatgtatattagaaattaaaatttaacaaaattttatttattttagtgaatcctacctataacaaaagttcgtatatatttgtaaaatctcaaagttgtgatatttttggaattaacaaaaattctgttacaaatttatatatatctgcaagaaaatgacaattagaactcaaattatacgtttcataatttgatgattttttttttttta

SEQ ID NO: 47218 - DNA, 618 bp, Arabidopsis thaliana landsberg
  unsure (1)..(618): unsure at all n locations
tgtaggaatagctaatcattggagacgcctttagaaaatcaaacttgtgtcacatgacgttatcgtcataatatcgaatgcatgcggaagtttccgtcacactcactaaataaagaagtttgtttcacagttctatattacaaaatctcatatattcaacacaaatcacgtatatctatattacataccactacactgctccctcacatgcttctctgctcccatttttttatataaaaagcacgcccaaacgtgtcaaaaaaattttccaacaaaaacaaaaatcaatggatgatgcaaacttctgtgttcatgtaaaatctgaggtgcaacaacaaaaaactgcgcaaaaaccatacaaatatgaaaccaacaattgaatagttgcgggttttaaatgacgcataaacaatacaaccgtaactatattcgaggtgctggtttcgtccttatatatatttttagttcttacacacactcacacaggttatacaagaaagcaacganatagtacaacataaagaatctagaaccntcagactcacgtatacttgaaccacggtccgactaacagaaatggatgacacggantctacgagacgaagcaagttgatgtga

SEQ ID NO: 47219 - DNA, 528 bp, Arabidopsis thaliana landsberg
agtcgctttcacattgtttgctctatatatacatatatatcacacaaaaatattctattggttgagactttagagaatttaaagttttattatcgctagagacaaacactagtgttagatatgatctatgttttagttattcgttgttgagtatacttaaaaattagatactttacaaaagtttcacaaacctttatctcgatatcaattttacaaataaagagctcagtgaaccgtattgacgattatggattttttcattgaaaatgaaagattttacatacatataataatgcaccataaaattgcataaacataatgtatcaagcattgcaaaattccatcaagtaaaggtaattttgaccaaaatattttgagcttatttgtattatcaaacaggacattgaatatagatgacggtttcattttgaagaaaatatagctagcaaatagtgacagtaggcccgaagttagctaaaaatataaatatttacaataatgtaaacgtgggtgtctctattaatttgt

SEQ ID NO: 47220 - DNA, 722 bp, Arabidopsis thaliana landsberg
gactggtaatctgagcgcactgcactcccaatgagttatccagtccttttcctgagtcatggttagtattcttctttatttgatacccatctcgaactaagattatatgttcttatagagatgatgaatctaccgccatagctagaggttcagtttggttgatttttattatgcttgagactaattgacatttttgtcatacgatttcagaataagcatgttttcagagctgttcaagattgcagaaagaactatttggagaacttgagtggacatgataaaggttccagggatgaatcaagaaagcctagtcaagaaaagcagccactatttgcttcagatcaaaataatatgatgatcaaagagaagaaagaactattcactagagtcttgtaatcgattggtaaattgtaactgaaaagtatcatatatatataaacaaaacatcattgttgttggaattaccctagcatgctgaagaagaacacacataacaaacatatctggtttttggaacacaaggtttaaccattacaatttgaaagtgtctgaatcgttgaagcttttcaactgttttcctctgcaaaatcaattcattcacataagaacaaatttctgtttgtatctcataggaggaagcaagaacaaagaaagacagtgatctagaaacataccatttattgctcccatgttgtggtcttctttgtctaaagctctaaagc

SEQ ID NO: 47221 - DNA, 637 bp, Arabidopsis thaliana landsberg
atgttaccaaatgaactaacatcattggaggaaacatgcatatcttattggtccccatggaactttgttcttacgttaacttcttctatcgccttcctttcgttgatctcctttgattgaattagttatcaacagtatctatggcaaaatcgagattaattagttttaagcattaatatatcagagtgttcgtggcgacttgactctaagacgcatgctttcagcgtaattaagatatacataaatggttggtataaaaagggaggaaaataaggacaagagatggattatggaccacttaaccagtcattattgaaaagaatgtgtggtttatatggttgatacgttgccttaaacattcgctaatcgtgattaacaacaaaaaagcaaggttttgagatgtctttgtgaacttaaacagaacacgtgtaaggcatctgaattttataaatgcaactgatcaaactactaagagtactaatgtactgtaatctagcaacacgaaaaaaccttaaaacctcccaaacgggagcctaatgcactttactcatgaattgaacgtcatgcaactcgtcatcatgccattcgtttaggaagattttttttttttcaaaatccaaaccctaaaggctgtgga

SEQ ID NO: 47222 - DNA, 1620 bp, Arabidopsis thaliana landsberg
ttgttctgcattacatatattcactaacaaacatcaatttgttttaaaatacattcgaagaagtaaacggaggggttagtttcatatttcagcatcatacttgttatagaccaaaacctgcttctcttcccaccatctttgtgcttccttctctgaaaacctcttccgactgcaaccaaagttagaaaccaatcatataaatacttaagcgtacttcaaactatataaacacttaaaagcacattaacatttttttacctaaaccgtacgcgtttaagcgtcttctgaccgcaaggcaaggccgtgaaagttatatatacaccgggctcgtattgctcaacttgttctgctgacgagtcttgtgtttcgttttggagataccctgttcttgtgatggctggcgatgcatctactaatagcttaatgttgctgtcacggttcgaggatttcgtgacacatttctctacatgttgtttggtttcgtgttgtgaacgagctgtggtgattggtgtgaggtatggaatggacattgagtcatcaaagattggtgagacttgagaaggattgcatgcaatgccggtcttcagaggattactcggtttctctttattcgcttggagctgcaagcaaagataccgtgaaaatgtcggtcacataacaaaccaaaaacagaaagattaaaaaaaactatgtatcttttaccttcgatgccaaggcttttattatctctttagcagctttcgatttctctgcttcttctttagcaacttcccatgtcttgtcgagctcttgttgacattcttccatcttctcattgccaagttcacactgcctctggagattttttatctacatgttcataaaaatgtatctttagtgtctaatgtgttactattgttacaggtaagaaaacaaaaagaagtagtttaattaccacggcttttagcctttcgatttcttcggttaagatcttattcgactcagacgaggttgaaatcttcgttgaagatgttcgccttgctgagactgaaagattcaaagaagaacttgtcgaaatcttatcgaaacgaaacagagaaggaccagagacttgtccccatcgaggctgtccatccgaagatcgattagcttgtggaagattctgcatctcattctctgattgattttctgtcaaatcctcagatactcttcgtgtaaccatctgcatcctcggagtgtgattatccatcttaacatttcttgaaaactctgttatactccatagatgatcaaagcaagaatcgcaaacccgagaaagcttgcttttattcggtgctaacgaagcatttaccgctttcttgctactacatgcattgcaaaacaatagaccacaagggtaacagttatgctttctccttgtgaatccaaaagctgatttgcaagaactacaagcggtttgatcattcaaagagatctctttgtgtaaacagatcgcagacgttaaattcaacccgcaagctatactttctaccaacctatcacctaaaggctcaacacgaacaggagagtttctatctctaacgtcacctaaaccaagttgtccattcatgccttttccccaagtataaacattttcaaatg

SEQ ID NO: 47223 - DNA, 984 bp, Arabidopsis thaliana landsberg
  unsure (1)..(984): unsure at all n locations
cgttaaaagtacgccgataaataaaatgacatcgggtaaaaatattttttcaacatgacattaattttggaatttaatgacaaaaaaacattgttgatattaatacatgcctaaaagcattacaataagtaactaggcttgagcaagtcacacaagatagggtatgacccataggatgtgtttagttactggtcatcacctctacgggacaaccgagcagaaccagctttagccaaacccgaatagtagtctccgacgtttgcaacaaatagaggatctctctctgcaatctttagagagtcgtaacgttttgaaccatgatcgttcccttcatcagattgctccaagtcttctgttaaatcttccattgttttcttgagattagccttactcatctgtgcagcttctcctgttgaaatccctaccattgttatctttggtaagaatggacttcgcagcatttctctttctctagattccatatccctgaaaccgaaaatttgtgcattttaagatttttacactctttcaacaaccttttgttttcaattggtacctttgatctgatgaacccttgtgatgtgtgtgttcttttcttgatacagagtgactgatccaatctccaaaaggaaaccagagatgttgctgtctcttttcagcttcacttggactatcatcttctactctaagtagtgatgcggaagtatctgcttctactgaatcaccaagacatcttgttgctgaccctgacgctctttggatagaaaatgcactcctaagagaagcgagagagaaaatattagctatctaatgaggcatttaataagtgctttaatgttggtctgtgtacatcacatcaatatgattttgcttgcacggatctgtagcanaattcgaaaatctaaatcctcctatataactcaactagaagaaattgaaaccctttttagtttggatatatacagaacttgattaatgtccaac

SEQ ID NO: 47224 - DNA, 717 bp, Arabidopsis thaliana landsberg
tcagggtaaagtaagatcttttctttatcaatccaataaagtttcgaacttaccaagtactagtagaaaatatacctcgtgataacaaaatttcagcttatcgagatgtgaaaaaggatgaaactttagaatatactactaactcaattttttttgtttccgattaccaagattagtgctgatttttaatcaaaatcttcaatataaacagtatcagtagtgcttggagcttgattagctctacaaaaccaatgttcaattctcgaaaaaatccaaacaagcagatctcgatttcttagtaaaatcaaagtttcctaaagaaactttatggggaaactaacaagagataataaaacagatggttatacctcttttcgatcgtcttccatatgatttgattcaacagatagacagaaacacagagctttgtgttatttttttgttctgaatttcttttcttagctgatatgagagactagcaaaagagaagaagatggagagacaaaattatttaaaagcgaaaaaaaaagagaattgtgaaattattacagcaaaaaaacagctcgaattatacccaatcagcaatcactattcatttttatttcatttttttctttatggagcaatgatgctaccagaaaaatttactgaaagtcccgaagaaagtgttctaataaatccaccgattaaatggcccatttttaccgaaactttttt

SEQ ID NO: 47225 - DNA, 644 bp, Arabidopsis thaliana landsberg
tttaattctaaactatcaaattcatgctcttagtcatacacaaatcgagtgaatgaaacttttacaaaaaaaaaagaaatcgaagtaatgggtcaattaagcataaagaaaaacgaaaaaaataaactttcatgatacgtatgcttaggctcttagcacttgatttggtactataatgtcaaaagaatacatcaataatcgagaaaacttaatctgaagggtccgggccaactcaggagtatgacccggtttacgtctataaccaacaaaaaacaattgaatagaagaacatgaaaaactataatgtggttttatgttacaaagttcttgaactcctaacaaacgggcaaatcatgaggaggctgttctattgtctgcaaaactccatttccattctcaaccaaaaaagccatggctagtccccacgatatgtgtgcatctagatgacaatgcattatccagacccctgttttcaatcatttttacacgtatttagtttagggactagtctcgatatatatataataaattaacgaatcatgtaaattttatagctaaactgaaaagcgaagaaatttggataaaaataagtaacacttgtaatgaatgataactagtagtatttttatactaatagtttagct

SEQ ID NO: 47226 - DNA, 1274 bp, Arabidopsis thaliana landsberg
atactcgaatagatgtaactatttttatgttttctttattttattaacatttcaaataaagatgaaagtaaagtgtataatttaatattaacaaaaagttatatgttgtcaatatataatttaatattaaaaaaatatataatttaatattaaaaaaaaacaagttccactttctttttctagtttctttttgccaactctacatcttggtgttttacctttcatagaatgtattatgtttgatcaagtcttattctcatgattcttttttcttttttttcaatcgtgttttaacctcttattagcctccacaacaaacttatacttatctccacgtattcgtctctactattgttgtaatcattatacctcactccggtcaagatatagctttgatcctttgaacaccatgtgttcaagaaaatgtgtcaaacctcgagcatctgaaggatctcgaaaagttccaaaacacattttagatgtacacttaatgctgtcattatttcaagtctcgatcaccaagatttttgagttgttctcaatggcatcgaagtatccatatctcccatttcatatgtacatataattcgaactcatcattgatggcatatagtactgaacaaccttggctttgggaatcatggactagccgatcactcaggaagaccatacttactaattcttagtaaatttgtggctttattgttgtctttggtaatgaaaaaatggatttggactttcaaaataacaaaattgctcaatcaaatgaactatattcaaatcgattcgtttagtatgaagtatgggaaatgagttaaaaagtcattcatctcaaccttaataaaacaagtatagacacattccccaaaaggcaaaaatgggaggctaaaatgttatcattatgatgatctctcaaagagacctttgacataaaccatgcctttctcattaagctgaagctctttcctcatttcttcgacctgaacatcatctccttgaaccacaatctcatccaatctcccttttgatcccaccatcatcttcacttttatctcctctttcctcgacgcctttttccagtaatacactcctctgcaacacacacacacatacaaaataatcaccatttcattgacaaaaaaacagtctcagagaccttaaagagagagagcttacgcgagtggactaaggagaatgatgaagaaccaattgtttccaaaatcaggaactgtaatggttaagacaagaccaacacttgctaagcttatacatga

SEQ ID NO: 47227 - DNA, 1335 bp, Arabidopsis thaliana landsberg
ggcgtggttaacggattcttgaagtttgttatccacttgagcttttggtattccttgctgaaatatgcttctcaacagaatcaagaacactcttgcattcatgagcagcctctacaagaccaaaacccagcaagggaagatttagatttaaagactgtaccaagatcaatgcctcatattcacattttcaaaggtgaaagggaatgataccagttattctcccaagcttttgaagggatttgggtttcaagtagatagcttcaaggaccaagttagcagcatgctgagaaactgattgctgcggttcacggggacggtttttcttagtagccggtttctcaagaggcacggaaacctgtaaccgctggatagctgcttgaaggtcgataccttcaaagacacgaagtgcgccttctaaattccctctttggtattccaatcttccaagaagtgctcttgcttcctgtaaccacaaaaacaaataaaatctaatcatttacttataaaagttggtttaatggagtttggaaaaccacaaaaacaaacctcgaaattgagagataatccttctctcaaagaagattcagcttcttgaatatttccttcatcaagctttgcttcaacttcagttgttttcatgcaaatcccattagcacaaagctgtctgacgatctcatcttcccccttctcactaaaatccgcggattgattcccgagcattgttcttcaccttttagactaaacccacatcaaaatttctgcgtccatccaaacatcaatccaccgtaactagcagcaactgcatcacttggcacaataaataaaaccgtgagaaaccaaaatatatgacatgatttaagtcaacgcaagctcacaatcaaaaacattgtaaagagaagaacagcaacatttttcttcagacaaaatccaagaattgaaatcattgtcttaaaaaggacccaccaaaaaaatagaagcttcaaagacaaaaagaaatcttcaactttgtcatctttctaacttttttttctgcttttttttttttttcacttagaggaatcattataaccttaaacaattcgagactacattcctttgatctgttcatcgtcacatcagctaaatagattacatgataaatgaattttctaattcttgttttgaaatcaaagaagaacaatgtttgttccaaaattcagcaaaaatgtgggtccttattaagaacaaatctgtcaacgccattacttttgtaagtcatagatttcaaaacaatgatgaaattgaacctcgcatcgtttcgatcagaaaaatcaaaaagccaatttcggaaaaatg

SEQ ID NO: 47228 - DNA, 516 bp, Arabidopsis thaliana landsberg
tgctctcagtagtagttgcaggcctgcgatcaataaaggtccatacttttcttctcttctagatgcaacaagatcatttaatgtactgctaaacctgagttgtagagatcaccttaaggtttccattatgacatcatttagatcatatcattttgtgtgtcacatttattagcaattttgtttgcatatgggaaccctttagaagaattaatgttgtatggtttacattgaagttcttcccctgcctcccaattttgtatatgttagtatttctatttgagattttgtgctgataggaaaaccatatcgtttgtgttcttcaaaattttcaccatctttttggcgtttgcagctaggagactaagttaaagtgtttcgtttgtaggtccattctgctgataggattcttgagctgctgaacttggggaacagtagacgaaaaactgagagcacagagatgaatggaacatcatcaaggtgagcattactaccttcgaaacaagctgttaatgttgg

SEQ ID NO: 47229 - DNA, 594 bp, Arabidopsis thaliana landsberg
tcacaaagcaaagtcactaatttgttagaaattgaggacggtatggatccggctcgggcatccatctcaactccaaagagtctatctgtcttccgacccaaacagtcaaaatagcaccaaattaaaaacacagacgcgccgccgtacgagaaaatctccggctatggattccgtttacaaaaccgacgaaaacttcgccgcggatgtcgccgctcttcttgctccgcttccaactccccaacttcaggtaaaatccctctccctctctctctctctctatacgcatgtttgaggctaatctccatagaatgttatagtgactgagctcgattctggtttctcaatttgtgtcttcttcaggagtatttcaacaagcttataactagtagaagatgcaatggaattgaagtgaaaaacaatggaaccattggaaaaggtttaagttcttactttagtttttgtttagattcttaaatttctcagtggttctaatgtagtttattcaaatttgatttcttccaaatgtttaggtgtttatgcaaattcagagtttgacgaagatgaactcattttgaaagatgagattcttggggg

SEQ ID NO: 47230 - DNA, 128 bp, Arabidopsis thaliana landsberg
  unsure (1)..(128): unsure at all n locations
cccccccccccccccccttccccnnccaccccccctccccccnccctccccccccctttcccccgctcccctcccaatcacccccccccccccctccccccctccccttctcccccctctccctcccc

SEQ ID NO: 47231 - DNA, 629 bp, Arabidopsis thaliana landsberg
gaaaacacgctaaagttacatacgtgtggacacacatatgttgctgaaacatttaccaaattaagcatttacacactcttaccgcgagtctcaactacggtaacaaaaaaaggaaggaaaagttgaaggaaacgaaatcaagcttatagcagtgtcactaaagaaactcatgaaactaatttaacattattgatatgtaaaattctaaaatacataactttaaattggaggaactgattattaattttttggcataaagggggaactgattattaataatactgaaacatcagtgacaaaaaaaaaagattattaagttggaaatccatgtacatccgacataactatattattattattagtaatcatcatcgcgattacgaataaaattttcaaaagggcacccattgagtatttttgttgttttaatttgaaatcttatctgtaaagcataataataatgataatataagtatggaagaggcgacaaagttgtgaattcgcaaatagatacaccaaagatgtcaaaccttatctctttcgtttcacgacataacacatccagtgaatattattagaaggtacctaaccttgtcgtatcgtactctttacttcttcttttcttttac

SEQ ID NO: 47232 - DNA, 980 bp, Arabidopsis thaliana landsberg
gacaagtgcaagagcaatattgatccagtctactgataagtctgtcttgatgaagttcatggagaagaacaaaatgaatcatgacgagctggtctatagagtcgacgacaacatccgtgatgtagcagattcggcgatcaaagacatcaagaatttcgcaggctcgattgtcatcagtaagaaatcagtctttccctacaaagggtttatcatccttgaaaaggagacaaatattgcttcaaagctaaaatcaagcgggcttcgtgtttacgttgaaagatttagcaacgagtgtgtaactcatgcgtttgacttttacgatgatccaacgttagagatagactcttttgtccgcgatgtccaaattgatggcatcatcactgacttcccagcaaccactgcaagatacagaagtaagaaagtagtctcatcttctctttatatcttctttaactttccttgagccaattgagattatgtttgattgcagagaacacgtgttacggcgaatttggtctgactacaactggtgagctcataactttcgcgaatccaatgcttcttccaccagctgaagctccatatccagcactacttgactcagatgtgacggaaccaccattgcctgaagcaagaagtcagcctcctgcttcttctccatcaaaggcagaggaaaaagcaatagaagttccctttgcatttatagccatggctattcttgtgtgcttctttatttcagtttagtgttaagtgtgtttgtaaccgacttcaactgcagtatctgcaagtgaacctatgaataacaatgtctagtactatatcattcttctttttaaggtttcaataagatatctagaattacaaatttagaagagatattaataggaatatggaaatggataaacttaactttaaatccaacaaaaccaaaattagcttatttgatcttttaactctcttccaatggattcttcacccaa

SEQ ID NO: 47233 - DNA, 738 bp, Arabidopsis thaliana landsberg
gttgttttgtttgtcccaagcaaaagtaccaaatttgaaacggatctcgataaaggagtagttacgccggctttattctctatatttggtttcagtttgtgattctttagcatttttataatattctattagaggggtgtacattcttgtttacggtttggtttttgtttttcaacttcaaaacaaaaatagaaaatagtttcttcatttcttcggcatctaagtttcagtgttagccattcttaataaagtgaatttgcaccgtttagtatattttggtttgtgagattctatttagtgatatagttcatggaattgtccgataaaccgtgttcacatgacttgggaatagtatgtgatccggggcttatcggtctttgctgcggacggccaatctcgggcctcatgttaaaagcttcaactactctatgtgttggtagctcggcttttataatttgcaatcgcctttggactcaaaacaaaaaaaaacttttgtttctattgtttaccctaatataatatactaattagagccaataaaatgcaaaattaagagttaatattagggaatgttgttgaaatgattactgagaattagttcaactagaatgggcaaactatgatgtcgcaaattaagaaaaatgaaaattctatatacaataaaattggagtgccatatcttttgataaaagatgacttcataaagagacgattgaattgaaacttcagataaatagg

SEQ ID NO: 47234 - DNA, 409 bp, Arabidopsis thaliana landsberg
tgcgatgttaaattacttaatacgttgattttgcacttctcattttcattgattaagattcattttttatcaaaaaaaactactattaactatttgttattctcaatgacacgaatgaataaaacttaaatcattaacaggaaaacagaaagcgtaagaaatttatttgatcagttattattgacctataaaatttgatttgatttatgtaagggtagtttcgtaaatatccaataaaccatcatcatcttcttattcctggctttcgtctccacccgccgtatatataaaacctgagacgaagcttgatgagaacaatcgggcaaggcattatagagattacacaacacagatagattactcactgcgaaacagagaatggtagctgaggccttgcccaaatgccctg

SEQ ID NO: 47235 - DNA, 949 bp, Arabidopsis thaliana landsberg
aattaaaattgagatatacctactcccccacagattcatattggagagagaagtgttattaaccttcagattttgattttcagccaagacatctgttgttgcaacacataggctagaggccacagctggtatatcgaagacatgtaacccttgcttcacgtgagacctaaaaacaacagaaaattcttgagcattgctgcaactctaatacttctacagaatcgcttgaccagaaaagctggagaaaatgaatatacacttacttcttcaaaattgctgcaactatggcacttcgtgcaacaagagtgtttggagaagactgcacatatagcataacaatgttctgagcatcagaggtctggagcatacaccattaaaaaataatgggccttttcactaaacaggaaattattcagctacagcttttttaatccctaccttgtggaaattcaaagtgcaacatatgttgagttgcggaagcatacctaggtattgcactcccccagctccaaatgtgtcaaaatcgtttgcataacctgccagatccacagagaaaaattagaatattgtctataacaacgttttttcccgcccactatctcacaagatcagacacttgatcatataaatgttagaacaacgggtttcaagatttggcattaacgcttttttaaatacctcttccttcatgtcaaatttttgagaggcagattcaatgactagcgagcatatcttctcgtgttgctttgtctcagtggaaaatacatgggtgagaaattttccaactgcatattcatcgacaccatcactgaacaagaagggggaaaacaaaggtaagcttaaaatcctcttaattcaatgccatgacaggtgatagttcccacacgaatcacctgtgtgcaagactccgaagcttagatatgtgtcattatcataaaagagatgacaa

SEQ ID NO: 47236 - DNA, 992 bp, Arabidopsis thaliana landsberg
gtatactataacaaattatgtctaattatttaagatttatatttagtgattacttctataagaatttatagcgtgaaaaataatgtgcaaggtattatattaagtagataaataagtaatttcgtatgtaaggaaagttctagccaacactttttgtcgtgatcttacttttctttggttttgtatgttgtgtttagtagataaattaatcttctatgtcttaattactattacaatgtttttccgcacagaatataaaagattttctctttctttctctatcttttttttaattttgtaggtagatagtaattttcatgtcttaatactagtacaatgtttttcttctctctctatctctcgctttctaggtgaatctttcataagtcataataattattatgatagtttgataatgatttttgctattataaatgtagggtagacttttttgtcaaaagaatttgataatcatacatgaaatcgtggggacgaagtcttaaactacatgccaaacaatcaggtttgcaatttaaattaaattaccataaattattgtgtaacacatgttgttaagtccattgcaatactctttgtgaacaaacaaataaaaagaattttaaatttgtgaatacaaaaaaatcttatagaaaatttggtgcttaattatttgatatctatgattaaagattactttgatagtgaaaaaaaattatttagtgtcgaaagtgaaaggtcctcggtatgcatggagttgaccctagtaaatgtaaaagtaaaaaatactaacatacgtatatgttttggattttgattaaacacacatgtttatgaaacacaattggtattaatgccaactacataaattaatgatttcttctgcaagatacactttacgtccgggtcttgctttccttcaatgcaaggagaaatatttccttcaaccaaatctcttatacttaaaaacttcttctctcgacatatcctgcttt

SEQ ID NO: 47237 - DNA, 1024 bp, Arabidopsis thaliana landsberg
agtgggaacagaatactattatttagagggaaagagtaagaataaacacaattcatgctctttatagatgatgcaatgtggatcctccttttagtttatgtaaaaatgtgaaagggtgatgtgaatttgacagtacctggaaggacctaaagcatttaagagaagagaaaggggcaagacttacaccaaagcgctcaagtcagcaagaccatcaataaaattgtaaaggtcagcaatgtcatagctaatatttctgagagaagggttaatttccttcaacttcctttcatataagccgcaaatacctgtttacgaccagaaaaaaatcagcgttgcaagctaaaaacttattgcttctacaaaaccaaaaacaaaaaaacagcttccttaattcacttaaacactcggaagagaggtaatgaacttaagaaacctacatttcttctacattgctaattcctccactttattgagcaaacaagttagtaatcaaaatacaaaccactttattaccactttattaccgagcagactcatcacacactatatatcaatcagcttatagcactggtactaaaatctgaacttcctaataagtcacagaaatagctacagaattatataatatacatgtcgtaattcaaaatcatccatcttgttgccacaaagataaacctcaacataatcataaccaaagtcaacaatgagtagactagttagagaatgatgattcgaaattaataattaccatccatagcttggcctatagagtcatagtccatgaaagtcctcgtagctctgctcggagaattctgcaacaagatgattgtgtgcctactactgttgtgattagcctacacaacaaagaagaaagttgataatagtcagcttataagaactgagacaatcaaaacatgtttgaatttccttctctatgttccgtaaactaacgagaaatcatcagaaactgagattcacactgcgtaaggaacgatattcgaaaacctaacacgatctaaccaaa

SEQ ID NO: 47238 - DNA, 1220 bp, Arabidopsis thaliana landsberg
gaattaacagttttccccagacagagttttaagattatttgtaccatttcattgcagctatgcctttcctgtcctctagtggtacatgtctacgttcttttagcattttattccgatagccttgatcttgtttaacttgtggaaatgtcagtcttaagcctttggttagaaagatttagatacatttaagatgggtttggtgtaaccttacttaagcgttcctcatggactttggttaattttctttattcttaactacgtttactttgggcctttgcagtgggaaaatcaatgatattgtgaaaatatttaaagaccctcgttgtccggtatccataagtattgcagcttttgcaaagaaggtaacttttatatctggtctgtttaagatttacttgttcatctattgttgaatgttgaaaatgactcaaactgttgtgctcggatctaattggtgaagaactctttgatacgttcatatattggcctaccctctggactctatgattaggaaactgtgaaccgatgacattaacgttttgctgattctttcagatggtcaccactaaggaaaaaccaaacccttttgcatgcagctatgtcattgtttacatcaactcacaggtacaaaattacttttgatttgtacagtgcatttttgttcttgttactgttattgaatataatctaccatttatgcctacagtttccccaagttatggatattcttctcgcggaattccacaaagcttgcatttacactgtcccaaagcatattgtaaactcacaggtaaataaacttcttaagaaatctattttgacagaattgtgaaaaaatagtgtctttcttattaatgatctcctaatgaattcagtcagcttgggattcagacgcatatgaacgcctagattctataatgaggctctacggtgcacttgttcaagtttttgcctcttttatgcaactatctcttatgcattgttatttccataatccgctaatgcgagtctttttctaatggtaattacagaccgatatctgcgttggcaatgctactaacgttcatgggatagaacatggatgggcttggttagcccggttccttaacaaaatcccagccaacagagccactgcgacagccttgaactcctttctccaggtttgcattgattgggggttacccgattcttaaatataaaaatcgtcttttaaaaaccca

SEQ ID NO: 47239 - DNA, 925 bp, Arabidopsis thaliana landsberg
  unsure (1)..(925): unsure at all n locations
gaggcaaaatgttggtatggtattccaggcagtgcggttagtgcttttgagaaggttagtatttgtgtgctttaagcctctaaagggcttatctttggttttaaaattggcatactacaatacttattttcaaaaagaaaagttaagtggcttgatttttctgtaggtcatgcgaaaaaccctacccgatctcttnnnnnnnnnnnnnnnnnnnntctttcaactagtgaccatgttgagtcagactgttttacaagaaaataaagtcccggtctacacagtattacaggtttgatatacaaggatatagttcattgatgagattatttcattgtnnnnnnnnnnnnnnnnnnnnnnnnnnnnnnnngtgattaatagttagtaactttcctcctaaaatcacagagattttttagttttccaacataatcattctactttttctcactgctaggagccaggaaacttcgtgatcacatttccaaaatcctttcatgctggattcaattttggtatgccaactctaattcaagttatagcactatagcagtcatgaatcatgtgagtgttcaatcaattgcgttagggagtttggttaccaatgtctttgtgcatattttgtcttccaggtctaaattgtgcagaggccgtcaactttgctactgctgattggctaccttatggtggttctggggcggagctgtatcggctgtaccggaaaccttcagtcatatctcatgaagagcttctctgcgtggtagctaaggtatatagacaatctgagaaaagcgttaaaaacttgatatgcaagacttgcaagatgagttgtatctatgcccattttcacaaaagaagatttagtcctagaattactaaatattgctacccttgatcaattggttagtgactactggagatatcaaca

SEQ ID NO: 47240 - DNA, 1456 bp, Arabidopsis thaliana landsberg
tagagtagttaaataacttgtgaagagatggttgattctggtagtatgaatttagatgcaccaaactttttttttcaatttagtctttgatttgattattacgccctatgatgaggagctcgacacatatcatctttcatcaacattgacatcgccatcgtaaatggaaataacgaaatgaaaacaattcaaccgaaatgaaaaaaaaaaaatcgggtcatatttttccttctcttccctctccaccaatagaagtttgccatgtagggccccttcgctgtctgaaaaataccgcaagagagaaacaaccctctcaattaaactgatttctaatttattttgggctatataattcaagggaccaaccctcaaaagcccctcagaggctgccgttggagttggtctcagatacaaggcttaattagttttaacttgctctaaagcctctctactataactttattacattttgtttagtaacaaatgacattccctctttttctccctttttgaaataaatattctttagatttacacaattttgttgttttttagaactgttcatcaaaaaatttcgtcatattgtcactaaacttttgtaactgctaagaaatttccaatatgttttcaaaattttaccatataaatactaattttaagagaaaatttgtatcaataatatggattaaaacatgaagttagattttttaaaaaaagcttaaagcccaatttttttaaaaaaattgcaaataatcagtcttgagaattgagcatgttaccgattcatgttatacggaattaacactgaactatatttcgtttaaccgttaaattattcatggtacaaaaaaattgatgtcgtttactactatataaatattgttgatgccttttatttgcttgagcccaagatcaactctaccttctatttccgtaatgaatgacaacatataatcttataactgtattaatttataatttttttatatgactcggttaatttccgcgcgatgcatattttgttttgaaaaaatatttttgatttgtacttatggttttattttcttatattaaataaatatcagaaatagtgaacacactattttcttatagtaggtttgtattttagtttatgagattagtgtcattttgatacgatgagtttttctttgtttgcactttgcacaggtaaatatgcttcataggatcggctgacctgacccactcaaaattgactcgatgcgaagccacgtaaccggcaggggcataactgtaaataaccatggaatgtatttctcagactctttcgtgctatcactcgctcatcgtcaccttcaccttcacctaccatttttgccaacaaacgccagcaagagttttgagctccaatggcgaccttgtcgatgactctggtgcgtttaatttttcccttttgtccttttgattttggtttacc

SEQ ID NO: 47241 - DNA, 694 bp, Arabidopsis thaliana landsberg
  unsure (1)..(694): unsure at all n locations
atcatatcaatcagggtgtctatacataagggtaaacaatagtagtatgcatttagtcagcatgaaccaagaccatccagcacactatgccataatactagggtgcacacagctatgatgttaacacatactaggaaagatctaattaaataaaagcaaccttttctctagaatcaaagagggcctccatacgctgacaaagactcatctggtttggaggcatcttctttgtagagttagaaatattgattgaaccattcttcttcgtcatcatataccctaatacccatttcaaaaacaagaaattcattaagaacacaatgtccataagtagaagcattacccaaaatcttaaaacttgtctaggtaagaaggacttaagagacttgtcaaatcagaaactagtatatcttataacactttcatatctgcaattccaagccattatcataggaaaagttatctcaattcctcatttgaacaagcagagagactggaatcgatnnnnnnnnnnnnnnnnnnnnnnnnnnnnnnaaccaaaatctgctagtctacaccagattttaatcgaaaaatggagcttagcaagtgagagctataatatatacccagactccagagcgaacacaatacctggtatagaaattggcggataggatgatgaatgtctgaagaccaagcttgtctaacagat

SEQ ID NO: 47242 - DNA, 841 bp, Arabidopsis thaliana landsberg
gctcctctagattcggtaaacctgagaaaacttcaattagcgtccccgccgtgacagctgaatctccagctttcgtacctggaatagctctaggattcgccaacgaagctgtgtccaccatgtgtagaagcgttaacttagggcaactggtagctacggcggagagagtctcgtctccgacgaattcaaagtatctcggatcaaacgtacaagctacacgaaaagtcttcaaattagggcaagatttggtgatactaacgatttcgcttgatttgtatccctcggtgaacgacgccgtcaagagatctaaccgtgtaagcctcgccgccacgtcagcatagcggagaagcacaggaggtaagtcttcagtccagtgatagaagttggagagatctaaagactcaaggaaaccaccacagtgttcaaaaataggaacaaaatcgccaccggtagggatctgagaagctcgttgatgccatcggaggagcttgatgtggcgaattctcggccattgaggaagtagaagctcgagagagctcggagatcgtgtgtagacgtttagagactcgacgaaagggaaacagaatttgagacggagagcgagaaggttctggtgatcgattgggagagaagcgagaagagtgtgaccccatggggagaggaaagagagatcgagatgtgagattgatcggaaacagtcggggacgagggagagatcacgagcgttgccacggataatgaggtgagagcgagtggatcgttcgagagcgaggaatttgtgagagacgagggagagagagttgcgagctcgggaatcggatacgagagaggaaatggtgga

SEQ ID NO: 47243 - DNA, 2125 bp, Arabidopsis thaliana landsberg
gaatagattcatccagattgtgtggtctgggcagaggtcttctccgccgaaacccaagaattgttataggattctctttttgtttacttttcgttatgatcaatcaattcacgcaactcagatttttcatggaaacatctggtttttttgtgcaagttgaacgcttgacattccgagagttcttcaatcacatgttccttcgagagccaaggtaaagtctgtagattttgactaaaacaaccttcatcatccaaaagctataatttttctccccttaattatgtcatactaaatgttgttagacaaattccggatgttgagcattctggttttagtacctgtacggggaaatcactgttgccctccgcacaaccgagtactagtacaaaccgttttaaatcaagtgcagagaatgttcacaaacatgggagttcctctagtgcctcaaattctcaaatttcaatgccacatacctcttttgagaagactagaaaagatactgagggacaatgctcatcaaaccaatctggcggtttgttattcgcaattttatgtctgatctctgttgctctgtataagatcgtattactcacatactcttgctatgtcattcgtgcagttgttgattcactcgagctcatagagagagagtatgttcttgtaaaccgtccttctgcctcgctggaaggttcatcagattgtttcgacacatcattgcaagattccggttttcctaatatcttaccaaggaatgaaaaagtttcatcgagttcacttgaagcacagaaaccattatctgatgtgtcaggtccacgaccagcaagcgtttcatatctgctaacagaagtacaacgcttaacgattgtccatcctccaactaaactccaacttttgcatcagtatgcacaagcacttacagaactagctagcgagatggtaacttgaactcctgaactctgggttcttaaatgataacattagagcttgtaacacctttgcatacagggcaatacagggcaggtaaaggaatcttttgctgttacgctcgtcgttttagctgtctggagaaaagccttagagatatgtgattcttggatgatgtccgttggagagaatgaagtgaacccagatccaaccacggctcctgagacttcgattccagatttgaattcacctgcaccagctaaaacgtgggtgacacaagagtttgttaccgcgtttaaccaagccgagaatttatcaactcaactaaacgaaacaagtggttagtacctaaccgagcaattctctgttatgcttctttgtaattatctgaaggcatctcctgcgtttcattacagctgccactcatatgcctgacgccatggaaacaatatacgagagggcactagcatatggcaagagtggtggggtaagtacaaagtttccatctttttcgcttatgtttttaccatttggttctaaagtctgaaagttttatgaaaagcttctttctacctttctatctactgatttgtcctaaaagtctgaaacatagtgggttgatccatttgtatttgtttttcaggctgaagaatatttgagtaacaaagaaagtgcagcaacattatacaagaaagcaattcttctactctcctttataatcgaggaagcagtgactctatctctaaacccacctttctcattaacccctgacgacaagaagcggattctctactacatctctaacttacagcatcgtcggtctcatctttagcgaaaatagaccgcgggcattgtatataagaaactttcctggctctgcttgggtcaagtctataacatttgtggcttttccttatattctcttgaaactacgaaatggttactctatatagttgatgctgtgaccaaaaagtatttgcctccctcattgcttagggccaatatcaataatagcttaaaacaccaaagatgcaaactttgatggtgcacaaactctcccgggtgaagctcgaggaggatcactccaaaggcgaaagctctaaacgtcccatttggaaacgagaagtctggtacacgacatcccattgacaatgatcgcaaagtccacacttaaaataggggacagagtcaaaccatgatt

SEQ ID NO: 47244 - DNA, 2085 bp, Arabidopsis thaliana landsberg
tgtaaaacgaaattgagtctctgtgataacattggaatcgtaattcattaggaattaggattgttgatccttcaatttagaaccaatatgattacgttatggcttttgggacgaattcatttgcttgatacgaacttttacttcagatttattcttattttttaagatctgtttatctttatcttttgatgtcatatttaggatatgttcttatcttctgtgttgaaggatttggcttaattttactttctagatgccttcttgtatgattggagaagcgtaagattgtgtatttttaggatgcctaattgaaaatggataaagttgtgttacttatacctctctcatatatatctcaacagaggaacgtattgggtttgagtctattttgttaatgatcagaggagaattcatcagtcatatagaatcgtccctgcaagttttgtgttaacatgtatcacaataagcaaattaaactgctttgaatatgtcattgcagattttaacggtggaattggggagtcttgaagcttatttttcctcctggtctcttttttcttatgtggtggtgcttgagagggtttttgtatgatataaatgctctagatcagagaaaaggtctaacatgaagttatcaaatattccgcaacgctatgtgatagtcttcttaactttcctcagcacatgtgtgtgttacatagagcgtgttggcttctctattgcatataccgttgctgctgatgctgctgggatcaatcaatcgagtaaaggaaccatactttctacattctttgttggctatgcatgttctcaagtccctggaggttgggcagctcagaaaattgggggaaggaaagttcttcttctgtcgtttgttttatggtcatcgacgtgtttcttggttccacttgatccaaacagagtcgggcttttggttgttgcccgtttacttgttggtgttgctcaaggtttcatctttccctctatccacacagttttggctcagtgggttcctcctcatgaaaggtctagattggtttcgataacgacatcaggaatgtatttaggtgcagctttaggaatgtggcttctccctgctttagttgagcttagaggtccggaatcagttttcttagcagaggcattagcaggtgttatatggtcattgctttggattaggtacgctactgacccacctcgatctgagcatccaaaagctgctgctgctggattcggaggtgctctgttaccgactaatgtaaaccaccataaagttactcatatcccgtggaagaaaatcatgctcagtttacccgtttgggcgattgtggttaacaatttcacattccattacgctttatatgtgttgatgaactggcttccaacgtatttcgagcttggactccagatcagtcttcaggggatggattcatcaaagatggtgccatacctcaacatgtttgtattctccattgttggtgggttcatcgcagactatttgatcaccaagagaatactctcggtaaccagaacccgcaagttcttgaacacagttgggttcctaattgcttcagcggcattgatggtcttacccatgtttagaacagaaaatggtgtgatcttatgttcctcagtggctcttgggtttttggcattaggaagagccggttttgcggtgaaccatatggatattgctccaagatatgcaggaatagtgatgggagtttcaaatactgctgggacattagctggaatcattggtgttgatttgactggaaagcttcttgaagcttctaaattggtttactcagatttgtcacatccagagagctggagagttgtgttcttcatcccgggtttgctctgtatctttagctctgttgtgtttctgctgttttctactggagaaaggatctttgattgaggaaagaaaaaaagatcaaaacttttagagaaacccttatcaagattagttagtaaaagcctgaatcgaagatcgattgattcggtaattgcggaattttgtgggaaatgtcgtttcggtgtgtgtagtaaagatcttttgagtgatggttttgaaatatt

SEQ ID NO: 47245 - DNA, 598 bp, Arabidopsis thaliana landsberg
tgcagatatcaaaggagaccagtatttctgactaacttgttctgtggacccaagcgtgtatattggattagtccggtctttgtgactgattagatgaatttatttaaggactcaaataaaatgaggattatttttttgtgtgaaagagaaacaaattgagaactgaaaaagaaaattgtattattatgatcttgtatgtgagatatatcaaattttcaatttattgttaagttaacctaattgttcaaacaattcaataaccttaaatattcatgactacaacttgtattatctcctttacttaatcagctcgattaaaatcaagtatggtccaccaaccacatctcattatgaggtttgacaatctaaatttattttctcgactattcaaaaatatacaaaaaaaaaaaacatgtccaaattggtactctcttatccgcaggtaatttgattacatatacaaattgatgtccttgccatgccaacatgtggcaaccacgtcataacattttaggtaaactatttataacaaaaattatgtaaagaaaaaatccgaattagtagcacagaaacaactacattattttagtttattgaa

SEQ ID NO: 47246 - DNA, 604 bp, Arabidopsis thaliana landsberg
  unsure (1)..(604): unsure at all n locations
gnnnnnnnnnnnnnnnnnnnnnnnnnnnnnnnnnnnnnnnnnnnnnnnnnnnnnnnnnnnnnnnnnnnnnnnnnnnnnnnnnnnnnnnnnnnnnnnnnnnnnnnnnnnnnnnnnnnnnnnnnnnnnnnnnnnnnnnnnnnnnnnnnnnnnnnnnnnnnnnnnnnnnnnnnnnnnnnnnnnnnnnnnnnnnnnnnnnnnnnnnnnnnnnnnnnnnnnnnnnnnnnnnnnnnnnnnnnnnnnnnnnnnnnnnnnnnnnnnnnnnnnnnnnnnnnnnnnnnnnnnnnnnnnnnnnnnnnnnnnnnnnnnnnnnnnnnnnnnnnnnnnnnnnnnnnnnnnnnnnnnnnnnnnnnnnnnnnnnnnnnnnnnnccccttaaaaaaactcccccgggggggggaaaaaaaaaaaaaaaatttttttttcaacacaaaacgcgaggtggttttggaaaaaaaaaaaaaaccccccccccccccccatttttgtggcgcggcttttttttttttgtaagacaaaaacactgtgggggtttgttttttttttttcccccccccccaaaagagaggagagttttttttttttttttgcgcccgcccccaaaaaaa

SEQ ID NO: 47247 - DNA, 710 bp, Arabidopsis thaliana landsberg
accaaaaagcattaacattacaaaagagcaaatctggttttgggatgaatatgatgatatttttttggaccttgttgtaaggtctctcactctcttcttccattaaagaattctcagagcttttcttacttcaactgttttcttggcccatctcactgaaataagtgtgataaactctgcctgttacattattttgattttaataggtgaagtaacggaatatgtaatctacatcaaaataatattcacttctatctctctaccttatggcattagaaaaatccaattattacatgaaaggaaactatagtaattagatgaagcatagaagcgacaattaaaagacataaagagagacaagtcttggcaagttttctctgtttcacactttggagacgaaaccttaaaggcttaaaactgagaaaaacaaagccgttggcttttgtaagccgctcgttcttcgagacaaaacacactacactctttctctctcactcactcttcatctcttttcttctttctctctctcctaaaaatccgacgaaattatgattcactttaccttttaatcaggaatatccctgtttcacccttcttcttcttcttcctagcgttttttttccataacattccctctgaatctttcgtttttattggaaagaaacaatctaatccaagttcaagggttttctcatcttcagtggcttgag

SEQ ID NO: 47248 - DNA, 538 bp, Arabidopsis thaliana landsberg
aaaccaatacgactgacaatgccttgccagggacctattcctagcggacctgccaggaattagagtgctgttcatcatgctcgcatagtgcacacaatgaagcaccagatctgatgctgaccaccgccatattagatgcttgtcttgcatccccggacattttgtgccaaagaggtaaagaatcgaatatcaaaggattgaaaaaatctctgtggtgtatacatgaaaactggtatctagtggacctaggcctcatagctgaaacctagcatgaacttcatatatagatatacattgaccgcgatttgcgggagcaccgcgaggaccacgaaagctgattgccgacagagccacaatgcgttgatcaaacctgccagtagaaactaaagattctgaactgtgtgagcctacttggatccatcgaggccacgggttgacgccacctctgctgatagccgaggctctctggttccagtcacttaatttggatagtcggaccagccagcttccatgtgaaccagttgaataaaacacatgc

SEQ ID NO: 47249 - DNA, 998 bp, Arabidopsis thaliana landsberg
atagaagataaagaagaagaagaagctcatgttttttctttttgtggatactcaagaatagatagcctcaggttctcgttctcttttgtttctgaggaacaaatcgaaccccttgcttcccgagctcgaccgtcttcacttttccattctctagcgtcaccatcaacttcgaggtgcctccagctcctcctacttcacttacaactcctttctccctgtttttttggttcctcatttgttagagacttggaataattaaagaagttcaatagcaaaaaacaatataatctcatataccatgaatcatccgaggcctcgtgtatttgaactttttttcctttcggatctttccccaacttcttcagaatccaactagcgtgaagcatttcgtctaacaaactgtcttctcgtgacagcgatacatcttcatcttcattgaacgctgacttctcagctgaaggtgatgctcttttcctcaatgtcgtatgtccttgaccagattaacttcgttcatatgcaatgctaagggcttcactatcttggccctcgggaggatgtttgtttattttcaatttcgtcaatcgccttgaatctttctgcgatgaatcatgcgagccactatttaaatctcctttaccatctgagtgtctccctatgaatccgccctcagcctttaaagtagttacttcacctcgagaccctctcttttcgtcactattctttcccagcaagctgcgacgctcttcccgggaaaacgtttcctctgcttgcaatttttcttgctttcctgtaattaccaaagctctttataagtatgtctatgtataccaattttaaagaaagaacaaaccgaaaataatcagagtgtatctttctcatataagtttactgaacatgcaaaaatgacactacacataccatttgatttggaggcagtctttgatacatcgcagctcgtagagtttgtaaacccctgtcttttcgaggacctatactta

SEQ ID NO: 47250 - DNA, 1149 bp, Arabidopsis thaliana landsberg
catcacagggaagctcctccgcaaattgactccacaccaactatcaattttgtggtcactaactttgtagaaacaagacttttaaattacaggaaataatttttttgtaattgttttaccaaaaataagttgcataaaattggtatctatatatatgaaaaagttatacgtctacggattagaccaagtaaaattttagaacttttgtatgcgtgttatggatatggtatagaaatatattttacaaataatcaaagtggttaactttatcttttgtaacttagatataatttgaaaaaatttcagttatcttaccaggttgtattccaataagcagggataatctatattttaaaaaaaaatgtaactaaatattttacttagtatttgtggctaaagaaaaaaggttgacgagtaatgttgtatagtggaaatcaaacataggaggagatccaccaatatcacttatcaaagtgcgttgttgccacttttcccaatactattggacgcgttacaaagacatatgtgaatcatatgaatgtgtctctaaggtttattgtttccattattataaggtttcgaccaggcaagtggcaatgcaattgtgcacttctttttgtttcgtttcctttttcttttcctttgtcttatgcttgcttaataagaaaaagttaaaaatgaaaatagggtgatgttcgataaatgaccactaaacatttggtattgtcaaacacaacaaattgttttacactttaattagtttcagggccgaatctggtgtaatctctaaatgttatcagaacaatcatcgaggggaagagttgctgacattatatgactttactcgtgaagtcttttaggaggcgtttgtagcgatcttgatccaaagtcacttaagttaaggaattgactttcacctaaatgttagtatttttcttcaatttaaatggggcaagttttgtgatcggtttaaagaacttaccaagctggagttagtaaacgatctacaattgatccaactaaaggaagtaattgttaatggctatgaacatatgaaagaaaggtcgaaacccgtaaatcaaggttcgagtacggattaacaaacgagtggctcggatttacgaggagtgactcggatttaagacaagc

SEQ ID NO: 47251 - DNA, 526 bp, Arabidopsis thaliana landsberg
  unsure (1)..(526): unsure at all n locations
ttattttacttcttcttcttcttccactggaaactgttctctcacaacaacagctgcggttttttgatttggtggaaggtcattatccagtaaacttatgggttcaagatcgctgtcatgttcttgaaatggctcccaagatcaaaaatccggtatggagctcgctctactgaatcttgagatacttctttgccttgaagtgcgtttggtgcttttgagagcatcaacgactttcttaggcaatcctatgtttttcctaatatctttgtgacnnnnnnnnnnnnnnnnnnnnnnnnngctgaatagaacaaactgtctctctacagttttttcattcgtggacgagacagataacaaagttgatacctttagtttaccaaccaaatgctgtggctcagatccgctacctttcttcaaatggatcaaatgcgaatagtctagagaactacggtcgcaacctgaccccacactagtagtgcttaagctagctacatagagctgtctctgatcatgcagtgagaaaaca

SEQ ID NO: 47252 - DNA, 478 bp, Arabidopsis thaliana landsberg
  unsure (1)..(478): unsure at all n locations
gtcggagctgaccaatagatcggcacacagtgacaacgtaaannnnnnnnnnnnnnnnnnnnnnnnnnnnnnnnnnnnnnnnnnnnnnnnnnnnnnnnnnnnnnnnnnnnnnnnnnnnnnnnnnnnnnnnnnnnnnnnnnnnnnnnnnnnnnnnnnnnnnnnnnnnnnnnnnnnnnnnnnnnnnnnnnnnnnnnnnnnnnnnnnnnnnnnnnnnnnnnnnnnnnnnnnnnnnnnnnnnnnnnnnnnnnnnnnnnnnnnnnnnnnnnnnnnnnnnnnnnnnnnnnnnnnnnnnnnnnnnnnnnnnnnnnnnnnnnnnnnnnnnnnnnnnnnnnnnnnnnnnnnnnnnnnnnnnnnnnnnnnnnnnnnnnnnnnnnnnnnnnnnnnnnnnnnnnnnnnnnnnnnnnnnnnnnnnnnnnnnagtacgatggcctctttattgagaataaaaagcgcatttgactttaataatttaatttac

SEQ ID NO: 47253 - DNA, 745 bp, Arabidopsis thaliana landsberg
aagacgggtacttctagcgaattccaatgatacatcactaaagcaattctctgcaaattcgttgtaatgggagagaactgcattgctatcctgtagcctccccaatctaagacagaggcgcaacatatcaagttcttcacataaaccaagtcaccaagatataaaaagatgaaaaagattcaaacaaaagacttgtcaccacctataaacaccgtaaccattaaccgcaaccgcatataacgaactcacatcggtggagtctagtgtgatcaatgttaagatgctagattagattccaccagtttttcatcaattgttatcactttatctaactagattaagcttgagagagtcttagaccaagattactaattgataccaattttaggacaaaaatgagaaacttcaaaagcttacatacatgagatgctgcaaatgtctaagagaattcaaatcttctactttaacaagagttttgaattcattagacacttcttgtgaagctgctcttatggtttcttccatctgacacttcttatgaacctgctctaatggggttcttcaacctaaatgacaaagagcataacagccaaagtaatgtcttaaatcagacagaaccaaaactcgttctcaaagactcgaactttctcatacatatcaacctaaacttgaacattccacattagccagaaagcattagagtcagagattcaaaatatatggcaaagaacataaaagcgaaagt

SEQ ID NO: 47254 - DNA, 772 bp, Arabidopsis thaliana landsberg
cgattggatcagcagctaaagccaaagctgctggaaacgcgatgcctagaatctctcgcccagttgtgtccctactgaatacatgtctgcaattttacataaataaactaatgttatgcatcacttctttcaaaaatttcatcaccatttcatgaatacataaacacacaccttaaatctttgaagataacgagaaatgggattggcttcttcaccgtagcaagatcatcaccagtttccgtcatagatctttttcctctgtaactgtctctgtaattaatttgttgtgtctgaagatatcaataagtgtttcgaagaatcggggaagcaaaaggaacgtttatagtagatgctatgtacaaacgtgtttttatttatagacacgtaatgagcatgcatatctttgcttatttaatatctaaataaaaataaattaaattattttctataattattgaagaaaacaaaggtttccttccctaacttttttgctgctcgttatttccgtccaaacttaagacaccaatattatggaatttctcttctcattgagggaaaataggtacgcataaacatcgtaatatatatacttctattaagtaaatcccactagaagttttcggcttgcccttgttaattattttaacttctatgatttctttaatcaataggattatatggttttcgtgaacttttactcgtgaaagaaaaagagtcttctatttttatattgagtaaataagttttcttttcatgaaagtttttttacatg

SEQ ID NO: 47255 - DNA, 388 bp, Arabidopsis thaliana landsberg
tgaatatttaatcccgatgtaatctcttttactaattaccgtacggtgaaaatcatgagtaataaacttttggtgtctgttcacaaaaaaaaaaataaaaaactttaggtgcctcaatgaattggtaggcttgaagcccattgttaaggtaacgcaagaaggcattgatccccatctattgatgcatagaaggctttgatccgtaagattacgatcaatgcatatgaaggtaggttgctcaacgtcgatgaggattcgacgccatggggggatatacggcgacgtgaaaatgtcgcccgcattagagcctctccgtcatcttcagagctcgaacacctactccccatatggccaattagactaccccacgtgccaattcaaatagccg

SEQ ID NO: 47256 - DNA, 273 bp, Arabidopsis thaliana landsberg
  unsure (1)..(273): unsure at all n locations
cctctgatgacttatgttatgtaccgttgttgagtataacttaatttctgttttgaagctcattgaggtggggttgtgcatgtttcgtgttgatgacatggtatatttgtttcagccatattacggttnnnnnnnnnnnnnnnnnnnnnnnnnnnnnnnnnnnnnngaggatgagaaattaacttctatcttttcatcacgtagactcgtagtgacaacaaaccatatactactaataacagtaacaactaaagaaagtcacaaaatttaaag

SEQ ID NO: 47257 - DNA, 1018 bp, Arabidopsis thaliana landsberg
cattcaagtagaattcgtgttttcatgtgattttggaaaggcatttagccaaggccccacacaaatttgtaaaattagaatttagcgagggagtgaagcccatcagtccgtgaaatgggatctcagcccatttagaaaatattttatttcttttgtttatatatattttctggtgttttgtatgaaatttggacgatgtcttattcacgacacatcataagctttctttatcgacatgtttggttttgaaatggaatcattttcttcattcttctttttggcactaccataaaaagaaggctttttatgcattaaattttaaaagtaaaaacgataaaattggcttcacattgaatcttttgaagccatgcgtagtgtataccgagactacattatgaaaacgacacacctcttagcaatgcggtaacggattgtaaattttaaaatcaaaccctttgtataatttcaatatatataactgtagatttaataattcctataaacagacgaaaaagtgtcacggttcattgttattttgttttccgtaatgaaaatctgtttattttatttatataaaggagataactaaattgtttcaggagattggcatatactatagcatataattcagtgtgatttcatgattcaaagagtgtttgtttattgacatacatacatacagaaagctttcctctttttcagagtttgtttctttgtttgttaaatctgttatcttatgttacatatggatctctatgttagtatgtttgttgggttgctgaatttttttttttttgacctctctttcttctcttgctcgactagaaagaagtctacaactttacaaaagagactatgtgaaagtgatacaaaaagagaaaatgtattcattttgtctaacataattgctttgtatctaaggtccctctaagcagtttaatcggtgcataaagattcatgctaacaatattacttgtcaccgtttcttgagacattctattatttattttttttcttg

SEQ ID NO: 47258 - DNA, 1031 bp, Arabidopsis thaliana landsberg
taaattcagaggtccccaaaaatacaggcacatgcatagcgaacctgtattgatgttgtgtcaacaaattggtagtgatatgatgatgactaattgacgactagtactcaaaagactatcctttttgttaagattatatcttattgcttgctattatatatagtcacttttaaaatttggatttcgacataaaaaaacaaagttttggatctttcgatatatgttattgcaaatgatctttaattctttatctaattgattacgctaccaccgtgtccttagaaaaccaaaacgggaaaagaaaaagataaaagagacaaaatgaaataaaaaggaaaaccaaaaacggcatagttttgcgtgtaaaagagagacagatctggcatccaaagttgcattggaccatcattttcttacatacctcaaatcctttatatccatttttttgaatagtaaccaactaattatatattcattaaagtcatcgatttatatactccataataccatacatttagtagccaattttcagcttttaaggtataaaaaggcccttccctacatacatacatttacctctttgcaagctccatttttttgttttttggtttcttttaaagcaagagagatggtaccaaacctttatttgttcttcaaatacactctcaatttctcgcctttagaaaagataatggctttagaagccatcaggcccaatttgttatctctaatgggccaataaaatattcatcagaaacaaacaacaatgtactccgtaaccggaaaagccaaatcgaatccaactgttttaccagaacaaaaacaccggtatggctgtccgactcgtccgcgttgatgtcttgcttatgcatcgtgattgaaatttcttcatcatgtgatttagttccttctgagaaagctcagggtctgcttgtgagaatctgaaagctgttatagtttattttttctcccatagatagatgcttagttgagggttcgtcttttagatgggagtttatagagatgattaa

SEQ ID NO: 47259 - DNA, 559 bp, Arabidopsis thaliana landsberg
gggaagtaaatactatggagaaaattttataataattgaaatttggttaatttagagtttataatatggtttgatttggtttggttaggacttatgacttatgtgtgtgtgtgtgatcgcttgttcttattacagtacttcgccatgaatggaaattcgggaaaacaaaatgaaggaagagaaaatgagtcgagggaaaggaaccactacgaagaggcaatgcttgattacataccaagagacgaagaggaagcttccattgcaatgctcatcggaaatctaaacgatcactatcccatccctaacgatctcatggacctcaccactgaccttcagcaccatcaagccacgtcctcaatgccacctgaggatcacgcgtacgtgggttcatccgatgatcaggtgagctttaacgactttgagtggtggtgatatggtggaggttgttttcaagtgcataacccccttatgaaaatggaggttaagatatacaaatgagattaaaagaaaaaaaagttagtatatttcatcatatctctcattgaagatgtgttttatt

SEQ ID NO: 47260 - DNA, 588 bp, Arabidopsis thaliana landsberg
ccaaacaaaaaacatggttaacgtgtaacaacacagagccacacacaggtgcgagtgaattccacgctctttccatcaacgcgtagagataccttcgtcttaccattttaacttttttttttttcttgtttcttacaatcattttcacaaatctcttcgatgaagcttcattctcctcttgatttgatctctttgaaaaacgacgaatcaaacaaaccctagagtcaagtcaatcatgatgataaatacaaacctggaagataaagaatcaaccttgtgaaaaaaaaaaaacttttgattccctcttcttctaaaagccatgaaaccgattcaatctccttctggagtagcttcacctatgaagaaccgtttacgcaaacgtcctgacctaagcttaccactcccacaccgcgacgtcgttctcgccgtacctctccctctcccacctccttcttcctcttcatccgctccggcgtcttcctccgcgatctcaaccaacatctccgccgctaaaagcttatccgagctagaacgagtgaaccgaatcggaagcggagccggaggaacggtttacaaagtaatccacac

SEQ ID NO: 47261 - DNA, 992 bp, Arabidopsis thaliana landsberg
ccgaagtctctagttcagcagaccatggtcctcccgcttctgaagctaggaaccctagctcttcgaactatctgcaaacccatcgctaaccagcttaagaaagaagctggtgttaatcccaaattccgtcaattcatcatcaacattgcacaggtatacaaaaaagactccttttaacactcaaatttcccatctttcggtttgattacaatctttgtgtatgatcatcgatcgaaaggagtaatctcgtgtctgttgtatctgattgtataagtttctgatttacgaagaataatcaagggtttatgaaagatttgaaattgatataacttttatggttcttggacaggcgaatcacatatttactacaaagctacatagacgtgcttctggtcgtataactgatgcagttattcgccctttgaacgaagagagagctgttcaagcacgctgcagatcttcttggggaactctttgccttcacggtaccttatatctcatgtcttctatagattttgatagcttaagcactcgaaaggagatttttttatagccattgatgttctagttctgatccaaaaaaggcatcaaccaccactgctacccccccccggataattttatatgcatcaacagatcgtattatttcatcaattcaattggttcttaaatagataaacatgccttcatcttcttttccttctttaaggttgcaggagctgctcttgtctatgaagtgcagagaaatgccagaggagaagcgaaaaaagaagagaaacgacaacaagaactagcggtgagctcttctgttcacacatgtttactatgtctctagttgcatctctttgggaattccacatatcttgtttacaaactcttgaaagatctttctctatgctttatatttgcttaccaggaattcagacgtaaacatgagaagatggagaacgaaatcgtagagatgaaacacagatgctgtttgcttcatgaag

SEQ ID NO: 47262 - DNA, 228 bp, Arabidopsis thaliana landsberg
agaaagagctgaagaactcgatgagttgtgaccgcagctttttgacttttcgtgaggggccattgtgggaagatgtgttggtactttgcgtagcgtagcatgcatggattcctgtacactcctattattgactgcaatgacacgactataacaaaaaacaatgaaacccattacatatacacagcactagtgcatggactatcgtgcgaaacatgaaaagggagtata

SEQ ID NO: 47263 - DNA, 435 bp, Arabidopsis thaliana landsberg
tcacaagagctaatctgctgttgattccttcatgggacttcttcgccttcttctccgcaaccatttttcaccgccgggaagattcagatcgcaggtttacaagagagagttcttcttcgggttcgggcggcgcaaaatgatagtttatatagcgagtgccttagaacccttagggtttttttgttttcttgtcaggagacaggaggatataagaagcccaaaataaactcgacccaaggcccaaactaaaaggcctataacttcaggatttagggtatgaaaatttctaatttacccttgaattttggcgggatagtttgggatgggaccaaaaatttggcgactggagaaaatgagaaaatcaaaatcactgagaaagaaatttcgagaaatctgaaaatcggaaggaagaaaccaaaaacctttcaattgaag

SEQ ID NO: 47264 - DNA, 879 bp, Arabidopsis thaliana landsberg
tttatgatctgattctaatgacacttgtcaacttgcgccatcaccccatatgggttcattatctatatcattagattttttttttttttttgtaaaaagaaatatgacatatgggagtcaataatagcataaattacacacatggagaagtaatataaatctagtatcaataatttgatcaagagtaatcattcttttctgactttccatcacattttctccatcaaatcacataaattcaaaaactaacgaatcacaaaactttgggagaataacacttgaggacgaatctagctaaaaggaggtgtaagacacgtgagaagcacgtgatcacatggcagcaacaacaatattcagtaaaattggccattcttcctctgcaaaaacttggccttagcctgtaactccacccaccatcaaccaatcacacaacgaccaacatgctagtgcaaacgtttgtagtataaattattagggacttaccatatccaaaatgatctttattaaaacttaaaatgaatatgattatgtttaaaagctgataagatttattaatctgtaggcataaaactttatccaaaagttatgcttcaagtaaagcctccatcaaaggcttttaaatctctctctctctcatatgaattcattttctccaagaaaggcacattggtttcttagatatgacttatggagttgtaacattccccaaaacaaagacaaaaatttctctaaatgtgcatttgaatgctatatattattctcctcgatcaaaataaaaatactaatataaagtcttcaataagcttatagtatattataataaaatatttgaagtacagaaaatttttttgtaaattttgatagaatcccaaactagac

SEQ ID NO: 47265 - DNA, 254 bp, Arabidopsis thaliana landsberg
acagtgtagctcagcttctgaatggttctattctgcagatcatttttccttttgagtttcagccaatcaagtgaggagggtatactcgatcgagtagtaactcgacatgccttccaaggttgagatcaatcttaccctattttccttttttttttctaattatctattttcctttttcttctcttttcttacatttatttctctctctttttctcttatcttaattatatattttttctttttctttttttctt

SEQ ID NO: 47266 - DNA, 1357 bp, Arabidopsis thaliana landsberg
gcccatgtaaatagtttaaccttttcacaaggacgacttttttttttggtctaccaaccatacgttggagcatgggttgcattataagataagtagtttaatgtcaaattttggtttggagctggagatggtttagctgaaaaccaactcttgaattgtaaatcggactaaaggcgtttttgaattttagcgatatgataaccacattaactaacgatcatatttgtaatagtaaacggaataaaaaggataaagttgaaggatcacttgatagttactcaacttattaaaatagatagagtgatttttcaacgttacctacggaggctcccaaattacttttaaacaaagcaactcgttttcaaatatcgtagagaaatcaatggcgccgcgcgccgtttgcttaatactttgattcttaaaccacaaagaaaccctcttctctttatccaagatcctaactaacttatatatatacacacgtgcatacttctatctttcattgaaaaatacaataatcttaaactttaaatccttccaattaaaaaaaacacacaaaaaatggcattgtttctaagctttgttcaggtatttagcatcgttataacaatcattatgtcccactttggtcagtttgacgcaagaacaagtcttaacgttctgagttacggtgcaaacccaaacgggatcgtagagtcggcaaaagtcttttcggatgcatgggatgctgcgtgtagagtggaagactcagttgttatttacgtcccaaaaggaaggtatttggttagtggggaggttaggttcgaaggagaaagttgcaaaagccgtgagataaccctaaggattgacggaactttaattggtcctcaagactacagtttgcttgggaaaaaagacgaccggtttagtgttagtggtgttcacaatgttacagttcttggaggttcttttgatgctaggggatctaccttgtggagctgcaaggccaacggttacaactgccctgagggtgcaacggtatgtgtttaagtcttgaattaccaatttatgcatttgtgtttttcttttttgtcaacaacatgaacacaactacacttacatgttctaaactcctaataatttatgcgattgcgtttggttgcaataacagaaaaaaaaatgcgattgcgtttggttgcaataacagaaaaacaaaatgtaacttcagaatatatattttattatggaccgcatttgtttcgtaacatatattacgtagtaattacttggaaaagaatactatatcgtaaatttacaatatgaatccaaaagaataaaacgcaaataacagtcaagatttaacaaaggtttttaatgt

SEQ ID NO: 47267 - DNA, 561 bp, Arabidopsis thaliana landsberg
cagacgtcaagaggtatcaccaaacaggtttgaattagtgactcatttaaatttaaaatagttaaaacaaatagaaatttaaattagaaaaggaaaagagaagacctaccagccgcgcttgggcccaaccctagtgattcggcccagcctggaattgcctccgcgcggcccatcatcgtgccttcgcgctgacagctggggccgcctcgtcagccgctcagggacttgttccactgacgactcgggcccccacacatcagaaacgctacgtgcacggcccacccaagcccagctgtgtccgtggcggctgtgtcgtaactctgacatgcggacccggggaagtcggcgcctcccaaccactgcatgcacgacgctgtgaatgacgtgtggccccgcaggtgagtttaatcttccctttctcgcggatgttctgttgcgacacgtccgcgcggagctctggggaagctagagacggagctgccgcgccttgaggatacagccgtggccatgggttttcgcttgagctcctagattaacgcactcggattagccgcaccagtc

SEQ ID NO: 47268 - DNA, 879 bp, Arabidopsis thaliana landsberg
ctttggatactataaaggaatatagattcttttttttttaaaagctgacgcatttcttgggatcgacaaaaatagaaggcacagctcacatagtaagagaaagatctgcggttaaaagttgaaagatctaacccactaacggagtattccatgctagcatatcccttggttctcgacttcaattggtcaaagaaatcacccaccatctgcaaaatggcagggagcgattaacaagaagatcattttacataatcaagagagacatggctcaactttcattggggttatcttaactctgcacaagcagagatctcacctctgcaagaggtaactcatagaggattgaagctctgttctcagctatatatttcatttctttgaactcccctctcctctcttgagcgagctccataagcgcaccaatatagtcttttggtgtgagcagttcaatctgtataaaatggttttgcagtaaggaaatgtaattctacgaaatgtggtgtgtgaacttatcagcaatatctccagtagaaaaggcaaccttaacgtatggctcctcgaccgatttcctttgcccaggatctggaaggcgtgatggatttgagcacaaagtctgcagtaaaattgatttcacaggtaataaggctctagatcaagaaagaaagacaaaaggatgcgattttcagggaacaaagaagaatatttaaaagtttgggatcaagaggaaattacagtatcaccatttacagagttcaccctataaacaacacttggagctgtggtaataagatttaagttgtactccctctctagcctttcctgtgaagaagagtgaactggagcgtaagaacaaagaatgatataattcactttgttgag

SEQ ID NO: 47269 - DNA, 464 bp, Arabidopsis thaliana landsberg
ggttgctgtgaatccttacttatctaaaaaaaagaagttgttttataaacatataaaacagaaaatgagttattatcttgtaatttcattggatctgaaaatatctagtgttcaacaaacttcagattcttcgatctacatatcaatctggaacgttttgttctttatcactgcaaccacttcatttttgtacctacctctaggtataagagctttatttaagtgtctgcgtatccttgatgaacgtttaacaaacggaatcaaatataggaaactcaatcggcctatacagaaaaatagtatttaaatacaatacttttttttcctacttagcacttggatggctttattggcttcatgatctagtggagcaagatcagtagagatttgatatggttcaagtttgttctggtctagtttttacgtcatttttatgtactctcgtgaactttcaagtttaataa

SEQ ID NO: 47270 - DNA, 585 bp, Arabidopsis thaliana landsberg
ggaatgcggcttcgacttcgttccacaactcaacgtttctagagaacttctctttcacttgcccaataagctcctttgcttcttcgactttcgaatccttagctagtccgttaacaagcgacttcatgatactaaaactcggaacccaattcttctccatactctctttacaaagactcaaagccgtctcaaagtctcctcctttgcataagtaatatataagagtgaagtaacactcactatcaggcttacatcctctgttcaccataatcttaaacaacttcttcgcttcctcgaaatcatcttcattacaaaacccgtgaatcaaatggctatacgtgaccgtattgggtttcatccctgctgataacatcccattgggcaaagccttagcttccttagatttctttctttgaggggaactcctaatccttatgtatacgtgtatcacccttattatcacgcccatcttttactatttgccacttttttctttctttaatactgttattctatgatttaacctcaaatttatcatacattgtttgatccttcttgcattacccttcatcctctatttatata

SEQ ID NO: 47271 - DNA, 1247 bp, Arabidopsis thaliana landsberg
atacaaagggtcaaaggatcgttacgttaattggtacgatgctatgtattttgtggggaaaaattttcattttagttcgggcacgttgaaagtcattcacctgttttcctacccaacatcactctgttcttttcctctgttctttctttcgtttatctataattacatttccttcttgagacaagttgcagttggaattttctctagttatcttgtgaaactcctaacctcccttcatagtctgaaacagtgaacttcgtgacctttaatctggccatctcggctcagctatctttcaaagagtgaaagcgggattttttcaacgtaatcatacctaaaagccttctcatattccagttagtcatgaatcgatttatcaatctataaaaagacagaatcaaccatatatgctgacatagtgaaatctcagaaagagacaccgaatctatcaatcatgtgatctgactctaagaactaacggtcctcagaggctcagagctagtaaacacttcaaagtcaaattcatgttacaagtagatatcttccctgtaataagttgcttgtcaaagtgaagaaaaaaaaatgagaggaggaagaagcgaagataaattaaggcttttattgccaagtaatccgtaaatggagtaacaaatccgaaccatttcgttaatttagagatcagctaatcaaagaaacgtacaaaaagaagcagatctataaaaacgaagttgcaaaggtttgagggtagaggcgtgagattagtagatcttgcacctaaaagcaagttcaagttgtggcagagcaactttgaattttgatggttgttgcacttggcacaagaaaagtattgcatgcacttgctcgaccaaaaaacaaaccaaattagtttgtacatcagtgaactaaatgtaaagtaccatataattatgcaattaaattttaaaaagaatagaatgcatccttacttccttatcaacccgcacaccccaaaataaaaacataaaaaaccatcttcttggttcgaggaaatgggaaggatgaaaacttgttgaagttgatttccttggttaaacctgcacaaagaaaaggaagcttcagtgataagagatgaagaaaagagaagaagctccaagaagaagaagaagaagtcgcagaagatgtgtcgtgtacaaagatcaacgacacataaagaagaaggacacaagtcaacatgaagaaagagttgggctttgtgtgttttgtaatag

SEQ ID NO: 47272 - DNA, 939 bp, Arabidopsis thaliana landsberg
cactttggtttaacatcaaacgcataataagttttaggagtagataatattacaaaggatatgattaattttttttagagaaccacacttcaaagcaattgtctaacttcgtgtctctttttcatgatactgtaaattattttttataacatcagctttcttattaagcatagactgtgactcagtcataatgtaaagagtttagaattacaaaaggaacatagatatgaaagacgaattgagaatcatttggtactcgttccttggcaagggtatccgccgaattggaatctcggcttgtccaaaggaattgacattcggcaaatctttttctcctagcacttgttctcttatccaggtgaaagcttcaaagttgaatttattcccattctgcaagctgtttgtgatgtttctatttttcatcatcactattcgtttaaatggttatgaattttttttctctctctccctcaacggttatgtatgcctaagattttatgtcttttagttctacttaaaagttttcctatttttacataactagcacttaggtattatttctaatgaattttagttttagaataaatctcattaaaacattggaatatcaattctccctattatctctttttcttttcgatttaagaaactatttttaatgtatgtttgttagaaatagttaaggctaaatatactatagtttgtagaatagaattcctgttgacaacgtaaatatagtgtatatactaaaaatataaaatatctactaataataaccatctcaatatatacttccaaaaattacacatttctcttttatcatctgtctttgaatatattttatatcaataatcattcaaaaacatattttaaaagactacttctaatcactataactctgtgtttggtacctttttcacttttcgagtctctttactc

SEQ ID NO: 47273 - DNA, 420 bp, Arabidopsis thaliana landsberg
tctgcgagacgagatagcgacgatcgccgtgcttgacattctgatcggcctccttggtaagcgcgtcaacgacgtcacgctcatccgtcgccgtgcactagaggcagctcgacgcctggaggaaaccctccgcgctagggatggtcataccgacgccgatacgacaccaacaccgcccgatcatatccaagcagcactgcgcaactcggatctgaggcctatggtccagtctggcttggcagttcgatcgcattaattcggctcagacttagaacgacagatagaggagaacacaaggaaagaatggagatggcatcagactataaaaataccgtaatctatttgcatatcgtcaggttatgcatattttgatcggtaattcgatagctgcgaccaccggtagcaccgacactcgcatcg

SEQ ID NO: 47274 - DNA, 776 bp, Arabidopsis thaliana landsberg
ctaggtgggagtagactgcaatctacaataattaatttatagtacaaaaccaattgattagtgaattggtttaagttattaaactaaaagaagtaattattcaaggttgagccctagctatagtgccagatatttttaattaaatcctaattaagcatttaattaagaccccaatagacgaaacgaaagcaagtaccatcatcatatataatcatgcatatttatcaaagttttatattttataataagagagggaatcccaaagctatcatcatcatccacatttactctaccatactttcgattctttatgctctttttataatcttaattgttgttgaaacttttgcttctttattttaaatatacgtttatggtgcttatttaaacaacaaatatgtaatacgtcgaaacagtttgtaatatgtgtacgtaatattaaactatatcatttcttcgaataataacacatattacatatcatatgttatttacaaaaattcttcatcaaatacattcattaacatatatatatatatatatatgacatctatgatcatatatttttatttttatcaaaatagtcatagtttccatatgtattattaatagagtttagtttacaatatttcaaagccttaataagtagttcttttactttgaaaaatcaaaaatagacatttataatagaaaaacagagaggttggttaaaatgctaaaagtctcattttattcatacttttagttttttttttttttttgaaaaaccctattta

SEQ ID NO: 47275 - DNA, 460 bp, Arabidopsis thaliana landsberg
  unsure (1)..(460): unsure at all n locations
gttttcttggagacggggccaatcgccgagtgtgacggtgggaatatatttccgagtgggagaatcccatatgtccgcatggcagaggcacagacgcagggcggggccgctgggtgcatgggatttttccgtaattccacaatttttatagcccnnnnnnnnnnnnnnnnnnnnnnnnnnnnacccgctaaataaaatgtatgagcaactaaacaagctataaaaaagacagactccttttaactcatatatttttaagcctcttgattaaaataaagtgtaatatttatttatgtgtgacatcacaacgcgcgaacattatattaatatttccaattacttagtttaggagcacattgttcttttaataatctgtgtttgttataacgcaaggtaggatgcaatagctccgacaatgtgttctaggcatgagatgccttcatttatgtttttttataag

SEQ ID NO: 47276 - DNA, 810 bp, Arabidopsis thaliana landsberg
atagattgcactgacgtgggaacaaacgatatgagggagcagaacgtgtttgaaacattgatcgggaaacagcagcagattttgctagctacgcaagtcgttaagatgattctaaagatcgacgatgtcatctccaattctgaatactgatgtgttgctaccattgtactaccctttggcttcttgggtgttttttgtttgctttctattagcttttgatactcttcgacatcgttttccttaacaaattcccttcgttttgcaaccttttctataagaacatcgtcaggtcttatttttgtgtgtacttgtccacaaaacgaagcactcctttgtattttcttttcactttataactgatgcaggtctcatactgtagactaaactattatcgtattagtgtaacaccagtgaacgaggacaaaagtaattgtttgcttctacataagaacataaggaatatgaaaccaagcttctaaggcttcaaatacccatccgctatggtctttgtacacaaattctaaaccctgaagactaatgtttcccactcttaagatctgtaaacttcgaaatctgttgcagagggactacaaggcccgagtactaagattactcctcgtcttattcaaatctcaattcctctttgtttgtttggcttcgccttaagacatgaaaacatgagtctttacctcttctccgtttcatgagaatgctgttgttctgcatcatggccaatgccaaatgtcccatttgtagtctcgtcctttggaatgtatggcttcccattcacagctactgtgtcatcggatg

SEQ ID NO: 47277 - DNA, 886 bp, Arabidopsis thaliana landsberg
ctttcatcctaaatataacttaatttattggaaattaccaaaatgcactgaaataaatggaagaatgcaacacaattcgcgatattattggaaaagtagaaaacatacagaaattttgttgcacacaacgtagatcatcatcatccgttgtatcttataagtttaacacccttaaaataaataatcaaaattcaccttactcacgaacgtaatataattggttagaagtacattaatcgtatgtcaacgtacatataccaataccatcaccacaggtccacatgtctccccatgtgcgatgcatgcatgagatttacctacttactcgtccgcttgttaaactaactcaaaattcaaatcccattttcattgagttcataaatccatttatatattggttgcttaagtcaatgaacaatgaatcaaggaattaaacagattgaatgcttgaaagttagacaaacaaaaaaaaaaatcagaaaatatatatcgtaaatgtcactaacacaattggtcaattggcccattgtccactgcatgcccttttttaaagttaactatcgaataaaactagtcgattttaattagattcatattaattgctaaccaaacttcacacatatacacaaatgtggaccgtataataagaattggagttccccatatgtattttttttcattgacgaaaacctttgcttacggagcaattaaaatcaacacggattcgttattaataccatgacataacgataattataattttgttttccaaattcaccgggatcattcgtttaatagatgaataaaaaactagctagggtcaacgttcacgcaagtgtaatacggcttatatgctgtggaagagtcttgatatttcagctttcac

SEQ ID NO: 47278 - DNA, 1028 bp, Arabidopsis thaliana landsberg
ttgcattgctactaaatgctaagaaagaaagaaaaacaactctatattttttgtgtggaaatctcgaattttttgtttctaaagctgtgagttcttttttaaatgcataaaatatcatatctttattaaaaataacgttgtttaatattaaatatgaatgttttacgtgttgatcaattgttaatcaggtggcataaatcattttacaccgagtcatggacacagcattttttctcttgttctatctagctcatatccatgtgggttcacatgcacttgtatatgttaagagtatttattctattttattgttatcaaatgtgcccaagacaatgccacatatcttatctaccctgtcaaatccatataaaactattgaagcctttacaacttgtgattcattttcctaaagtcttaaattttaacctttgccagctcataatttattccttatattgtttagtgcaaagtttgtttgaagatggttgccgaatatcataataatcttctaattttatcgtatgtgacaatcataactataatttattaaaaaataaaagcatatataaataacatattctaaaaattatgcatgctaattagacatgagctggaaaatgaattaattgaggtgccatcaaatgttcggtcacgaaataaagaagataaacacataatccaaatagaaatttagttctaacagaatatgataaaactagtcttagttttttgcatcaacatataaataagatgcatacttatgtggacataaatagttatacatactcgtgatgtttgagattcataaattatactccagaagtttgtttgggaccgatagggatatagaacatggccaccgcatcaaggcagtattggacgcggtttctcctccagtgccaatgattatgccaacaatacaaagtgaataaatatttttgacaaccacaaaaaggcgtaccagaaacaatatggcaaagtaaatagaaaaaatggtatttttttcatatgcctaagaaattactgat

SEQ ID NO: 47279 - DNA, 2049 bp, Arabidopsis thaliana landsberg
gcttttttttactactatacttttggcttctagtggtttctattagtattaattataataccatgcatggtgggggcatagattaagggatattattaggattgtgtgattaatatataattaatatgaatgagagaaaataaaacgcgtgaatgagatggaatggaatagaaagcgtaggcgtggcacatgatcatgcaactatcttaattttgtgtctccacaaagctaccgtttttctcgggactttgctttgttgatgttgcgaactctcttcctttttcttttctttttttatataattgatttaactttttggatcggccattcactgataaattttatcattataattaatttgctaatgcaaggaaattccgttatcgattgatgtttattgttcgcagttcaagattgcttttcaatcaccagtatgaatttgtcatctgagcgatgtagcaaacaaacattaggtgagtttgatcttatagacgtatttaccatttgaaaatgatactatataagtgttctaattattaatgttaaatacttatttccatttcttccatacagatatatgtgtgtattgttaattttgtatgattaattagttaagagttcaacttccaacaaccacaaaaaaaacaaaaaaaaacaaaaagtaacaaatgaagaaaaaacaaaaaaaaaaactctaatcaattatgtgatttgatagttttcgttttcccccctgtatagcaaaaaaagaagcagagagggaaagaatttgttttttgttgtaatccgttaaatacttatccgaaacagtatttgaatattccatcaattttgtaagaatctggatcaaaatgtggtattacgtttagttttttttaaaacatatttaacgtttgtgtaattgatatcgtgacttcaccaacttttagagaagcatgagagagatccaaaattccacgtttaaaaataaaagcaaaaataattaatttgttttagagtatagtatatttcttatggacattggtgatttgagacttcgatatttatatattctattaattatagaaaacacacctcgatgactatacaacagtaacaatacaatagtgttagggggggatcaatgatccctacgttcctaagtctagatcgtagatggctattctaaaactcacaatttttatatcgattacagctacccccaaaaaaaaaaaaaaaaaacgactacagctataatatattacaaacattactactttattagtgaatgcgcgtgatgcatgacatttaaatgaattctaaataattttcttttgggtttggttcacaattcacatcacgcttctatggtccatatatttttttcctaaaatgccatttaaaagaaacaaaacagtattaattaaaagaaattaatacaagattgttaatggcttatttgccaaaaaataatataaggattattaatgaccttataatacagacaaattaagttccgagtagcctttgttttacggatgatgattattttacaaaatgaatacttattgttttatgttttctacatgtacaattaaaaagagtttaatgttgtactgatataatattggtttccagttgaaattcagtaactattctagttgataaattttatgatgaacacaaaatttgaattcatatataaaaaaatacttatacattgtagaacgtaaccaactaagttggacgttaggtgtttggtattcgtcacatattatattaaaatttgaaactctcagcaaagctacaagtctcttataaaaatgtcattttttggataaagtagtaaatgtagttttacaaaagggatggtgtcctactggtaatatatacagtataaggggagaaaacaaactgttatcaaagatggatgcagtcaaacttccagcttatattttcggttaactgaaagatctaagaccgattcatctagttctgtctctaaaagtgtgctgccagtagtgctttcgtgtctattctcaactttacatgagttgaacacttcatagc

SEQ ID NO: 47280 - DNA, 653 bp, Arabidopsis thaliana landsberg
gctctcttttcctccaccgtacacgtgttaccatcgtatctcttatgtttggatatttaccgactactgttgcagtgaagttaggtcactttgtctctcacacactctactctctccagtgaacgatgacaagctttaatgtgtctctcaagtctcaactgtaaaaaaaagaagctaattggtgttgcaaatgtaaacattgcataagataacgtttcgcttataaatgaataactgcaagtctgcaaaatcatttacttttgtaataataatacatactactcacgggggcgatcgatttatagtttgtgtttctacgttttgatcaacaacaaaaaatttgatcatcaaattccgtactttaaacaaaaacattttatcatgctcatgtcatgtataggcagtactcttctattggttgttttcaagatctcaagctctcatttggcttgtcttcttcatggaaaatcagtacttcattaattacatccaccctattaaaagcaaacattaattgatgtaccacctacaatttttttttcatctttaatttggtttcgcaacacttaagtgctactacaatcatgaatcaatagttttgctcatgatctagcaataaggaaaaaaatgagtttggaaaaaagtaaatagca

SEQ ID NO: 47281 - DNA, 642 bp, Arabidopsis thaliana landsberg
tttgtaagtaaagattaaaatacgaaaaaatgttgacaatccttgcaatttgcatgattgatcctatctttccaaaactcaaaagaattatataatatcaccaagtgggtttataaattatacatgtattttaaattgtttgttttcattggtcaaaacttatattcgattttgatagatgcatagattttttgaaagatcatggttaacaaaaaaaaaaaaaagagactcaatagctcttttgtgagcctgttctaattaaatattatgaaaacgggaaaatagattatactcaatcgcatgattgcatatctcttgcgcatgggggatgtgaaatgaaataaatttgaaccgatcgttagcaataacataagaaatgagaaagaaaggcaaaatcaaatctatttcgaatataattttttgtcagaaacatcaaacatgatcagatcccaccgttggtcctttgttcaaattgacaacaaaaagtatgacttttataaaccaaaaagagagagatcttcatggcaaaacatatcttgcccccagcacgattgattagttccaaatttagcagcccactcgagaaaattaaataaaaaaggagagaaacacttgcttaatatagaagtttctttttggaag

SEQ ID NO: 47282 - DNA, 754 bp, Arabidopsis thaliana landsberg
tagaacattgtagttaactgtttagcagcgatcttctgtttatcactatactaaagtaacatattggtttagcgatgtagttctagaaaaataagtatgaacgcattgaatttgtattcaatcttgttctctattgttcacaaaccatataattgaatcgaatcaagattaaaaatacaaaatcctaaatgtatgttcttctcacattcaatacatattttcacttatttgatcgtatatatccaaattgtcgtatcaccattatacgtgtacaatggcacatgtggaattaacaataaaaataattgatatatgacattttttttttcggaaaaataattgatgtatatgtgacaatatgaaccagttttaccaccatattatatatatgaaaagggcaaaaagtatgtattctaacggattgatgcaaatgaaagtcgttatatgattcaaatattcaatgctaaattcagtatatactcaatctagtaaaaaatccaaattgtgatctgtaaagaagcttcttttggcatatatcttattctcataattagttacatgttaagatggataagataagaccgtaacaaatacaagcaaaatagttaacaaaaaaaaaaaaaaaagaagacaaagaccaagcaagatatttgaaaactcaaagcttaggtaaaatgtaaaaatttgataattatgctcgcatctagatcctaatacacagagtaccttgaaactaaaataaagagcgtccata

SEQ ID NO: 47283 - DNA, 1081 bp, Arabidopsis thaliana landsberg
ttaagtgtttggcagatagtttaattatatggtatgcatgtgatccgtctcgttccatttttatagatcatctatatgatgttttactttttaatgatattgttaagtatatcaacgtgccaaatttggtgatttaaattattgacgaggttgtaatgagtagtaggtagcactcgccactcggtttctaaaggtaaagtggtttggtcaagctccctggaaatttcgtttactattatataattatacactttttgaaagtaaaatctaggatatattataatgtttcttattgataattgatgattgtgaaagggcatttggtcattggtaggtagtttttatgtgaggtttaaagattttagcagtataaacttttataagtagtttaaatgttaaatttccgcaatatggagtatggtgcatgttaagcaattcattgtcatgattgtgtagataattattattttcgttgtcgtaaacgtaaaattcgccttgttcactctcccaaatttcactctcaccattctaagatttttaaataaaacttttgtaatgaaatggccggagacatggcaaggttcaaaagtagttaaatggttcgggtgtttgggtctccgcacttgagacaccatctagctgccaagtggggtatgcaatggctgaataacgacgatacacacatacaaggaaagttttgaggttctcttatcatttaaaattgtctaaaagtttgtgatgtttttgatatcttttgaatttaatgtgatttttaaaattaaaacgttttgatatatatatatatatatactgtttttcaaagacaaaaaactgtatttaaaattaccgagaaaaacaaaaaaaaaatgattcaaatcaattaattaactcgttatgattaaaaataaacgtccatactccttagtccatttagattgaatctgaatagtgtaacggttaagacttgaatagtaataaaatgtcaagattcggccgtgcggcactgtacaatgtccaatctaatcctgccccgatggcaatctaaagtcttcttcaacggtaacttttcggacatgaagta

SEQ ID NO: 47284 - DNA, 574 bp, Arabidopsis thaliana landsberg
  unsure (1)..(574): unsure at all n locations
accttataactatacaacttatattgaaatatgtgagaaataatgttcatgtattgttcattaattatatattctggcattgatgctaaattctatgccgcacatgacatgcaaaggctatgtaagctatgaaacctatacgtgttgacaaaaatataaaatacgcattagcataaaacaaaaatcaaataatagaaaacttatgtgaaaaaattaatgaaaaatattttacactactaatcgatgtggtttatacacagacgcctttttctcgcgggggggccaggcaagaaatttattgttgtggtccccgcccggggccagctttttgggacttcttgaacactaatgggaaggnngattttatatatttatatatatatattatataaaaaataataataaaccccccccccacatacaagaagaggggttgggcttgggttgtaaaacccctcacataaatttttttttataaaagtccacattttaaggatttaatgactttttttaattttgcagcttaaacttcaagttttagaattgagagtttatatctttacaagtttagagt

SEQ ID NO: 47285 - DNA, 554 bp, Arabidopsis thaliana landsberg
agcatcagccgctctcgagacgatgctggccgaaggagaggagagggagaagagcaatcctcggaaaagatataggatagtgaatagatccgcggtaatattcttcatcattgttagttcgttgttaatttcttaaaaagcgattcacatatatgtctttcatcgtcacacatcctaaccctctgtcgcttctagagttcctttataaagagagtaccacgctttggtggaaatgaaacaatctgtaacgatgagtcttctccatgtcctgccttggttatcctttatgccaggctcggccttcatcgttacaatttgctccaggtttgattataaatgcatgctcttcttgtttccttgtctatgtatttttacactacaattctttcttgttcaatattaggaggaaaacttacagctcagtagcgtaaagaaatacaaccagtccacgcattctgctgcttgctcttaccacattactttggacaccattggtctcaccgctcttcaaccttttgagacttcactttatgaaatatcctctggcaattagc

SEQ ID NO: 47286 - DNA, 833 bp, Arabidopsis thaliana landsberg
tagtgttgccatactcaaaactatatcgtcattttccttatggacacaaatagatacccagtacagtacaaacgagtacttgactggatccaaatgcaacaatctcacaagctttgttgccaccacatttgggatcatataatttaacattcactcggtgtatcttagctggagtgatttcttagtcgattcgatgtacctgtcattggcacccaaacaaccttttgctgtttccagcagtctcaagcaaagttctttgactttctcattcatctgcacatcatcaaacatgtcaccaccccaagttaataaaacttttcaagaatgagaaaatatgcaaaacttggcagaaaacagtaccactagtgctgatgatatgcaattgcaagcttcaagcgccatgttcccccgagaaatctgcaataataaaacctcgggttagttagagaaacaaaaaagttagaatgtttcttattagtggtagtaatttgacctgtgaagactcttgctcaatagcatctaatagttcacttagaactaactgagtacacgagacaagttcctgcttgtatgatgaatcaccaaagaacagcaattcatttccaattatctgcacaaaaataagtataacccaaattttacgttataaaaccagccatcagaaaacagactacgcagaccaaggaatttcgacaatggaactaatgttttgcttcaaataagatgatgagaggcatataaatacctctggattggcagaatggtaaggcagattgtcctgagaaagtgtcgacaacagtgacattatagcacagaaaatcttcacctttact

SEQ ID NO: 47287 - DNA, 1138 bp, Arabidopsis thaliana landsberg
ctttggctctttcttatagtgcagcaggtcaaaacagtgctgcagttaaccttcttagaaagtctctgcataaacacgaacaacccgatgatcttgtggcgcttttgttagctgctaagctttgcagtgaagagccttctttagctgctgaaggtacgggttatgcgcagagagcgataaacaatgctcaaggtatggatgagcatttgaaaggcgttggtttgaggatgttaggactttgtttagggaaacaagcgaaggttccgacatcggattttgaaagatgtcggctgcaatcagaatcattgaaagcattagatggagctatagcttttgagcacaataatcctgatttgatctttgagttaggtgttcaatacgctgagcaacggaacttaaaagctgcttcccgttacgccaaagagttcatcgatgcaacgggagggtcagtgttaaaaggatggagatttctcgcgcttgttttgtcagctcaacaacggttttcagaagcagaagttgtgactgatgctgctttagatgaaactgcaaagtgggatcagggacctctcttgagactcaaagcaaagctgaaaatctctcagtcaaatccaacagaagccgttgagacttatcgttaccttcttgcattggttcaagcgcaaaggaaatctttcggacctctcagaactctttctcaggtttcaaaatctcttttgttctctaatctattgagatcatcaatcaaaacctttttttttttttattgaagaacttgtacaataacacagatggaggaagacaaagtgaatgagtttgaagtgtggcatggcttggcttatctttactcaagcctttcgcattggaacgacgtaaaagtctgtctgaaaaaagccggagagctgaaacaatactctgcttcaatgttgcatacagaaggcaagaacaagaagccatttaactaatctcttagaatcatccattacttgatttactcaaatttggtttgaatctttgggaatgatcaggtcgaatgtgggaaggacgaaaggagttcaaacccgcgctagcagctttcttggacggtttattactagacggatcatcggctccttgcaaagtagcgggtggagcgttattg

SEQ ID NO: 47288 - DNA, 1029 bp, Arabidopsis thaliana landsberg
ataactcatccacagaccatagtactaaacgtgttaaataaataaagatctctctttttccaaatttcagagcataatcttggtttggtctaagagtcttttttgattatgaaaagaaagtatataaataagaaataatgtgtctctctttgcttatgagacacaaaagtacaaatgtgagaaaaagtattactatctccctgttctctgtgctgtattgaattgtacttatttatacacaactttaaattgatgataagtgtaacgatattaacataattatgttttagatttccagtccaaggtttctattttgttttaaaatcagcctaacaaaacaaaaatataatcgaattattgtagtcctgaccaaaactttgtttatttctttgaattggttgaactgttaccaaacgttatcttgatgatttataatttctaaaaatacactgtccttttctcgttttcatgtaaccaaaatacatacaagtttgacatgaatgaatattagccaaaatctgaaacttaaatttctttaaaaaccgaaaccatacctaatcatccattttataataagttttatttactttggatgctattacaatgttcaacactctacctacatgataccatgaaaaaaaaaaaagttgtgaatctgtgtcaccagatactaatttaatccaatacttatatattaatactaagtattaagtccgaaactaaattcacagaaaacattttggttgagatcaagttgatgtcaatttataaagatatttaaaaaatgaagatccaaacaaaagagacagccatgtgaagatggatccaatgccaacctctctacctcactgtcatttaccatttcccacaaacttgaagtacacacgtcaacttttctaaatcaacaaaccaacaaataaaacactcaacatcaaaataatattaagacacccaaattaagccctaaatgttacttgcatcacaagaaacatgaaagaattgtgaggggaagaagaggagaggaaacac

SEQ ID NO: 47289 - DNA, 1007 bp, Arabidopsis thaliana landsberg
atctgctttggtatcattttttttctttgtttcaactttcaatgctaagttgattgttgtcatgtagtatgtttttaatagttgaaaactaattgttactttcaatatattttaatgtcaacaaccttttttttgggtcaacaatcttttattttttaccttttttgcttaaatattaagaggaaaggatgtaaacccatactagaaaatattatctatcaaggtatatttttcttccgaattcaataagaaaactgaaataataaggaaatttttcaaaaaatcttgcaaaaagatagtatgccaattttcttattaattttgaaatattatagttttttttttagtgttgctaaacattttattggtttcgtacatcatataattctcttatagaacattatatttagtaaagaataagatttcattactcagtgcactttattggccgtaacaattttagccaaaaatttgtgtatatggaaaaaaatcatatgataatattaatggatagtccatttatatccttgtaacatttcaagttcgttgactgtgagtcctcgacttgcttttaaatagactaactaaatgccacaataacataaaaaccattaccttagagaaaagtttagaagaaaacgtgaaagtatggagaggataccttcacttgcatcccttattagcttgcttatcatatttgccacaggtattataaatttttgtacacctttcaattttcatgttaaatatattttgttaaaaggttattttcttctattatgtgaacaaaaactaaacaaaaaatctcaaagtctaaccttagttttaagaatttagacgtccacatagaagattaatgttatgagaattaagaaatacatattacatatattttttttttttcttaagtcttcttgtagctattttcttgaattccttgtacttaatttctatagagtgaatatattcttatatatctggtaagtgtaataaagtatatatacaat

SEQ ID NO: 47290 - DNA, 524 bp, Arabidopsis thaliana landsberg
aaaaaaaaacagaaaggatttaaataaaaaaaaaaaaaaaaaccaacccctaaaaaaaaaataaaaaaaaaaaaacaccaaaaaaaaaaaacaaaaaaaaaaaaaacaactacaaaacccaacaaaaaaaaaaacataaaaacgcaaccaaaaaaaacaacaaaaaaaaaaaaaaaaaaaaccaccaaaaaaaacaagcaaaaaaaaaataaaaaaaaaaaaaaataaaatacaacaaaacaaaaacttaaaaaaaaaaaaaaaaaaaaagaactaaaaaaataaagaaaaaaaaaaaaaaaaaaagcacacaaaaaaaaaaaaaaccaaaaaaaaaccaacaacaaaaaaaaaacaaaaaaaaaaaaaacacaaaaaaaaaatcaaaaactaaacaaacaaaaaaaaccaaaaaaaaaaactcacaattaaaaaataaaaaaataaaaataaaaaaaaacaaaatagattaaccataaaaaactaaaaaaataacaaacaaaaaaaaaaaaaaatcataaaca

SEQ ID NO: 47291 - DNA, 829 bp, Arabidopsis thaliana landsberg
tgacaaaataaaattgaaacactacaaattgaaatataggatactattttcattcataactttaggcatcattaacacagaaattatgaaggcaaacgattattattttacatgattgattactaaccaaccacgactcgtctatagctttttcattatgaatatagaaattatacaagtctagccggatttgggggttttgacgacgatacggtttccatcaacaaaaactctgacccggtcgcacctgaagtctgcggtcaccggactcccatccaaaatcacggcagcattgacggtggggttctctctctctatcaccacggccgcatagtcaccatttgttcccgtaagctccggccacgagttcttccctgcgatcacgttacgttagatcggtcaatcgtttacgtttgggattttggagatcaagaagctcatatttgagtaaatgaaaacaaaagaactagaaacatcaccatggattgaccatgtataacataattaaccttctaacagactttagaaaatgtaatcatatatgatatagctattgaattacagttttaaatgccttgaatccatatctaattgaacattagctaactatttacaaacatataaaactttaattatgaactatacaatacaaatacaaaaacttactaggacattcggtcgacatttttcttcactcttgtatatatttatgtagtcttctgatgtatttgtatgctcacctttagagatttgagtcccatttatagaatcggatacgtacgttacgtcttggtgtcggtgtcgtcggtgaggttgcagattcaaaagt

SEQ ID NO: 47292 - DNA, 851 bp, Arabidopsis thaliana landsberg
gactgaaagtacattgacatgatcaatctatgatctaaatcttagctttgatttaatgttctgccttatattcagagaagccgagaattctgttcagctcctgcatctgataatcacatcttcctgaattcaagcttttccgatggactcaatcattggtctggaagaggatgcaatcttatgttacatgagtctctagctgatgggaagatactaccggattcggaaacttgttttgcttctgcatcagagcgcacacataagtggagcggaatcgagcaggatataacagaaagagtccagcgaaaactcatttatgaagcatcttctgttgttcgactatcacatagccatcacaccgtgcaggccactttgtatgttcaataccttgaccaacgcgaagagtatataggcatttccaggttaggctctccatatgacgattttttctttttcttcccacatgttactgtaaatgtgaatcttggcccaaatatattgtctgatacaaagaatttgaagaaagtttgttcccttttccaagtgttcagggaacacacgacgattgggtagagttaaaaggaaagttcctcttgaatggatctccagctagagcagttgtttacattgaaggaccaccaccagggattgatgtttttgtcgaccattttgctgtaaagcctgcagagaaagagactccttcaggacgaccatatattgaggttacattaaaagttttgtggtttttaacatttaccttctctttgtgtttaatgtattatatgttgtttccatttttctacagagtcatgcttttgggatgaacattgtttcgaatagccacctaagtg

SEQ ID NO: 47293 - DNA, 1038 bp, Arabidopsis thaliana landsberg
agtttatttctatatccggagaacactaacttgaagatggtctaaactaaaccaaatcatagatattatttgcaacaaataattcagcaatgagtagagattttgagcatgcatgcacatgttttttaatgacatgtgtgggtgagattttcacaattgttttctaaaatcaacactgtttctacaagagaaaatcacgcatcaccatcaccccatcaataaataataaccaatattcacagccatataaatactacttcacacggtagggaaaaagaatctcaaagaaaaatttgacagaatcttccatccgatttttacgctacttaagaaaaacgcgaatcacatggtagatcttgaaacaaacgtgtacaactacaaatctaatttatcaaatcaataaaatagaaaaacatcaaacaattataaatatacatctttaaatattcattaaatttacaggataacaatatatctctatcttttatagctaaaatcatatttaagaaacactatcttatcaaagtacaatttagtaatcaaattacttaattttatatttttatagtgctatactgctatagtttatttttaattaatgattttttttttgttattctacagtgggcaacaacaagaatcttctcacaccacccacgttttctttatggaccgctatttcttctcttggccaagagcaaattcttataaattggtaaaatatttttttagataaatccatatacttatataatcacgtgcattaattacataaatacacttgtttacaacaaactattaactttttttcttcttaagaaaataaatatctcaagagtatatatataaaaacagaggtagagttggagaagaagaaagtgtagagaaactggttcataagacttttttttcttcttcttcttctctgataaactaatggagtggattcgtagagacacgattggtcacggaagcttcttcaccgttagtttagcaacaacctttggaagttcttctaaaagcgtttccatcgttaat

SEQ ID NO: 47294 - DNA, 1128 bp, Arabidopsis thaliana landsberg
tttttggtcaatgttacaaacttatttttcatttttcatgtcatgccccccatatgcatattataatcataataagtattcaataatactaaaacttatttaaattttcggtggtcaaaagtcactgtttactgagaatttccgttaccttatacgatgttattgtgatacttttgtcaaattcaatagaccatgttcaatcctgtatactttggtatacgtaattcatagcttaaaaaatttcgttcacagtataataaatttggacgtacgtacgtgtagataaatgtgtttaattatatacgtacgtgtataatagtttatacggtctaattttttcgaatcctagactagtagataaatgtgtttgatgagcaaactgcacactattccgtcccatgcgatcggaacccaccatcacttgggtcatattggtaatgtgtcatttaggttaaccaaagaaacaaaaaagattagctagtcatctcgattctcaacttcgtgccgacaaataacgaactaacgatgcagataatattccttagcttgtaatgaaggtcacgtgggatgcacatgatgtcggtaaaattgtgtaacatagcttttggaccactattgattttgttctttggttgaatgttaattagaccattcatataaatagtatcgagtcaacatggtcatattgtgaaatatgtcggtaaacacatttttttggttatatgctaattaatttactagaaaattcttaagttttggatatcttttgtcttttatggcttagggatatgtattatattaaaagtttcgagaatcatatccctatgtataacatatctaatggtcttaattaaaaatctagagataaattttgggagacaattcaagttgttagatcttcaataggaacacaatgattaaggtcaatatttcctaataatatttacccttgaaaacaccatcattaaagttgttagattttctttttaacatcgaggttgttagttaattccatcagtaacattattgataatttagatgtccacacataataacatgagtgcgtatacgtagatcatacacacatttgtatacatgtggtcacatggaccaaaacgcgtaatctat

SEQ ID NO: 47295 - DNA, 639 bp, Arabidopsis thaliana landsberg
aaaatcgcaaacatttcagcaaaatagaactttcttctgcatcataatgttttacggagagaaaatcaattggtcacattcatgcccatcagtctaacataattgtccacaaaatcagcgcacttccctttaacgagtcaatcaaccataaatcatcaaccaaagcaaaaataaaggcaattagaaacctaactctacatctatacatccaaagctaacatcttttaaacgcaggctactgttactcaaccaaagttctcaaaaccagatcaaaatgtcaaaatgaaaggagagcagaaaatatcaatcaaaaattggttctttaagcaaattactccaaagtccacaaaattaaaatggaatcgaaaggaacctggtgatgaaggtttgatgatcactcgaaaatccgaaagatacaacaaagctgatatttttttcttctacagagaatcgtgcctaaatgcgacagaagcctaaagtttccctatttagttgacaactggttcggtgacgcttagtgtcgtggccacttaccaatctatcgaaaaccctaaacccagtaagagctctcgtgtgaaagagggatagaggcagaaagcaagccgtctcgagttcgaacccaactgtataacacaagag

SEQ ID NO: 47296 - DNA, 1383 bp, Arabidopsis thaliana landsberg
atatagacttaaacttaaaaacccactaaaaacaacttaattaccatgctaaaaaatctaaaatagttttattttttttaaattcatcttaagtagttaattactagtatagtcttgaatttttagtatgtcaacaacttaataagcataatgacattttttggtcaacagcataatgacatatgtatcaatgtattgatatttttctgattacccattccatctttataagaaatttgatatagctacaaaatcaatttttatggaattaaatatctaattcctctcataagctaattttagaatagaaaatgatattctcttgtaatattttttttttttgttaaataagattattattgtaacattctcttttaatagaaacacataattaattttagtgctctcttatttaattattcattgactgtatcacacggtaattaagttgtccatcattataaaggtatttactactaaatactcctaaatcaataggatcttttggaacgactaacgatagacagtgatcaaatacagtctcacatatttctatatacagagtattttaatgggatatttttgtataaatttacttgataatattctatttttatataggtctgattatttagacaatgattattattatgaaattattttcctacttattagatgtatatatataaatatttgattattcatatttcaaaatcattagaaaatcagattcatatgcatctttcatttatttgatccatgagttataaacatcggatccaaatttccaaaatttgtagcttcaagtcgacgttaatagtatttaattctaagattgcaacaaaacagaattttcaaaacaatagtgaggaataaatgaggggacagaaattgggagcggctattgcgccacgcttaggccgttttgtctcgtctcatttttagatattagatagctacttctcacccccaaccaatttttatttattaatttattttctatttattattggtttatccatttatagaagaaaaaaatgagtataatttcggtatacattgacagattaaatgagttacttaacaccaataacgaataattattatacttgcgcatgcctcaatatgtttaaatctcaataataggatccacttacatgaacaaacattgcttattggcaaagcatatgattaaaaacaatgtaaaacccaagattgatactataggtcgaattaaatatcatcaagcgcattgaaaaatataaatatatatcgcgatctgctattagactttgacacaatgatgaacataagttcactgattagatacatgatcttattatactgaacatgtctgtaacatgactaatgatgatcaatgta

SEQ ID NO: 47297 - DNA, 813 bp, Arabidopsis thaliana landsberg
tttgcttaattataatgatatgaggttcatcaaatttatataccactaaaatattcctacactcatccaaatattattctcgcttatgcagttttaatctaatgtacaaatcatatccataagcgcattggccgatgctaaaattttggcattagttgttgatttgtttttcttgagtcctatgttcaaaaattatatttgataatttaatgtataaattatacccataattacattgatcaatgcttaaagttttgtattagttgttgattttttgtttgtttgcgtgtgttgaattttcataaatgaaaagtaaatacgataatcatatttcaaaacgtaaaggtgttaattagtagtctaaatggtaaaatataaacagtatattataaaaattactaaaatggttttgtaaaaaaacatatgctatttgtattataatgaaattcaaaatttttaaatagaccgtataatttctgcacaaagaggttttgaggtgttataattcatgaagtaaattttatttactgacgggtaagttgtgaaaaagtttgaagactattttttttgcttttcacagagaaaactactttcctttttaattgtatgatgagaaggcaaaagtgcagacatgtgctctcttttctcccattttcaacaatgtcactcgttgtattattcatatttttagcaaaacgggttataatctaatatctatcaaatcaatttcaagaacattcatattccatccagtttttttggaacaattggttaacataacgttaagtaattggatggtacccagtttacccc

SEQ ID NO: 47298 - DNA, 825 bp, Arabidopsis thaliana landsberg
ccgcacaaaggagatcgaaaagaacacctgttggtatatacctgcaaccaaagaagattcacactctcacatttcatatcacaaaaaacaaacactttctcccattatactaagagatgaaacaatggcgtaccattttagaggaaatcctttgtaatcaaaccaaattgaatcttcaccaggaggaagtgaatccttgaaataaggctttataagaggaatcaacagaggcaaatatcctattcttggtgctaacacctgataatgcgtgccaaacaaatagcaaattcagaagtatgatcttatctcgacccagttacacaaatttcgtctaaattcttcctcgtttcaatcaatttgatggtcaaaaatcgtatgattcaatacgaaatggaaacgaaacccctaaaacccgaaatcgatcatgatccaacaccaaagaccacagatttgcaccaccgatttgaaaaccagacatgagaaaaaaagcttggagaagaaaggtgatttacaagagcaggaggaggagcagggtgagaagcgacgtcggatttgtggagatgaatctgcagaggaattgctccttcccatacatacttgaccgcttccttcgccattctcttccccgtcacaccttctcacgctcgctcgcttcacaaaaaaaactcagctttcaaaacgacgctgtttctgtatgacgtcatcttctcttgcgtctttatgtggtattaataaggcgtacgttagacactgcttaatctgttggtggctaacgtgaaagggtgttaaccggtctaatttggtctggtcaaattctatcaaaat

SEQ ID NO: 47299 - DNA, 719 bp, Arabidopsis thaliana landsberg
caagcttatgaacaaaagtaaaagccgagacaatgctttcctcgcagaaggaaaaggttatcacccatactgtagcctccacagaccttgtaccagcgagatagagcgaagtcaaagtagcagtggagtcttgaaacttggaagcgtaaagagcttcactgtcaccgggaacatagagaccgttggcaattttcgtaaatctcagcatcagtagtcttgatcaagctcccgatcaaaacaaggaaaattgcagaagaccctaaacactggtaagagctcactcactgccactggtaagcttacttcactcgcttagagaagaagaagaaggctcgtgtctactgtgtgtggttgacccgggtccagtactattcaaaaagttcacacgtgtgtagagttaggggtattatagacatttcatcgttttatttatttttacaatctagtagactgattcataagtcaaactgacaaatcgacaaagatgtaggtaattgtgtaagtaacctactaatataagagagatcatatcctgattttaacaaggcaacttgattgttttatatattagagaattagggttatcaaaattagggtttggaaaatgttggccttgcgccgaatggtatcatcaggttctcttcatctatggaaaagagaaatgaagatctctacgcttacgagaacaatggctccgttttcttcttcttctgctgagc

SEQ ID NO: 47300 - DNA, 818 bp, Arabidopsis thaliana landsberg
tacttttttcttcctactaaaatctctccggtttcattcatatctctctctctctctgggccttactcaatcaccaccaaataacagacaaaaaaacgccttcatcgccggcgaaagtgagtcggagaatggcgtatatgtgcaccgacagcggaaacttaatggctatagcacaacaactcatcaaacagaagcagcaacaacaatcacaacatcaacaacaagaagaacaagaacaagaacccaacccctggcccaatccatccttcgggtttactcttcccggttcgggtttctccgacccgtttcaagtaaccaacgacccgggttttcactttccacacctggagcatcatcaaaacgcagccgtcgctttcgaggagtttgactccgacgagtggatggagagtttgatcaacggtggagatgcgtcacaaaccaatccagacttcccaatctacggccatgatccattcgtctcattcccgagtcgactcagtgctccttcatatctcaaccgagtcaacaaagatgactcagcgagtcaacaactccctccgccaccagcttccaccgctatatggtctccatctccgccatcaccacaacatcctcctcctcccccgccgcagccggattttgatctaaaccagccgatttttaaagctatccacgattatgcacgtaaaccggaaactaaaccggacacactaattcggatcaaagaatccgtgtccgaatcaggcgacccgatacaacgagtcgggtattacttcgcagaagctctgtctcataaagaaacagagtctccgtcgtca

SEQ ID NO: 47301 - DNA, 441 bp, Arabidopsis thaliana landsberg
  unsure (1)..(441): unsure at all n locations
taaggttatgggcgtagtacgtctancatgcaacaaactataagtgatttcatgagggattcgcagtttaacagtgtgaatcggttgatagttagagatgcacgggtcaatctttgacacaaggactatgcctagtggtaggatgaacgaggtaggattcctcgatgatgggaattganggcccaatggtctgaaatggcatggaaagagagaaaggangaggtcgttgacggtgatctttgcgcgacggacggatgacgcttggcgggactcgaattactcggagtaagcgcaganaanttctgggcactggagattntaaagggtaattcattnangactgggagnaaggtaagccatgcgatgangagaggtgcataagcgcagctgtttgtggctaggacttcagcaagaaggacgcagacgcgggaaaggcgtaaa

SEQ ID NO: 47302 - DNA, 569 bp, Arabidopsis thaliana landsberg
  unsure (1)..(569): unsure at all n locations
agcccttgtcgaagcgcatgccctcggtgagctccagctgcaggccgaaggtgttggactccttgacggtgttgacaccctcgttgccgaccttatccatcgcctcggcgatcaggtcgccgatggactggtcgccggcggagatcccggcggtggccgcgatctgctccttggtctcgacctccttggcgcccttgagcagggtctcggagaccttctcgacggccttctcgatgccgcgcttcagacccagcgggttggcgccggcggccacgttgcgcaggccttccttgaccagggcctgggccagcacggtggcggtggtggtgccgtcaccggcgacgtcgtcggtcttcttggcnnnnnnnnnnnnnnnnnnnnnnnnnnnnttctcgtaggggtcctccaactcgatctccttggcgatggacacaccatcgttggtgatcgtgggagcgccccacttcttctccaggacgacgttgcggcccttggggcccagcgtcaccttgaccgcgtcggcgagggcgttcaggccccgctcgaggccgcgacgggcctcttcgtca

SEQ ID NO: 47303 - DNA, 407 bp, Arabidopsis thaliana landsberg
  unsure (1)..(407): unsure at all n locations
aatagttgggcttcaacattggtcgcaattttgcttcgtttttcatgttgacgttgacattctgaggaacaatttctgtgtaagtgcccccggtcgagttcactcgnacgaggngctatcattcgtttcaacgacttttttggacgtnggtgtcatactttngtgcaccatcggatgtggcatgatngcantcatcttctgttgcattcgcctccaattcggctcatgancnaanttgatgtcgngtcgacgnnaacaggaccancngctnattcgcctnntgcaaagttatcatngcctnaactggaacactntctgtgccacatcttcgaacgantgtctgcgatttntagaacctggactacagcatagtgtcgcgcganacgactatgnctgtagctaacaag

SEQ ID NO: 47304 - DNA, 1712 bp, Arabidopsis thaliana landsberg
tttttaaaagtaaaaattctgtcttctttgtctatgagataataggacattaaaatccaaagattccaaaattatcttttctgctgccaaggattccattcactttccaactggtatctaccatcgatttttatctatttgtacctcagcctgcccgaatggtcatttgatgattcaataatatacaatgtcctgacctatacatatcacttagggcatcacttattcactttaatcgagagtgtttatattggaaacgtacatgacatcgcaatgtcagcattaattatttaaatattttaatatattcctatcgcaagataatgtctaagttagattataggttcaacattctgcaactttcatatatattttttttaagctggttaacaggttagtttaagtgtttgacgtaaccataagagaattgattcattttagcttgtgtgtaatagttggcgggaagggtaattttgttggcatactcttctctgctatttaaccagggcttgaataacaaatatggatgtgacactgacacagttcataagcaaatatacaaaattgagggagcaaatttacgtaacattttgtaaaatttacgtgtatatataatttatcattagcttacaatttttatactcgtagaattgcacaacaccataattaatgcataaaatctccatttataattcaaaccatcatttagaaattaagagatgaccatatgtaacatgttagggtagatgtgattatggtgctaaactaaagaagaagactagattgttggaacgaaattagaactcacggaacacgttggcatgtccaggagaatagttatttacatgacatcattgatagcataaaaaacatggataaagttaataacgttcaaatggtcaccataattacgacaatttcctttaaagcattcacaacaatttctgatctagaatggttatatctactcgaatttgaatggaaaaaaaataaaaaaaaaaataagataaaagagtcaaccttatgtccaattcaagataattgttaaaaaaacaatccaaaattcgatttcagtcgttcataatttatattcaattgggatttgggatcaaggtaaaagagtcaaccttatgtttttatgagaggctagagaaaaaatagattatgattaataaatttgatagaagaaacagagtaaaacgttatccataggccacagcttgcacgtaagtaatacctatacattatcgtttattcgttatcctattttctcttactaaaccgtatctcttcgcttatctacaagcatttgtgtaatcctctacctccctctatatatatacaaaacacaacttttatcaaaaaaaaaaaaaaaactagaacagaacacaaacatctcgacaagaactctctgttctttcttatcaaaaaaaaaaaaagaactctctgttctgttcttattgatcaagaaaccttttcttgtccttttggttaagacttcaaaagaaagatcaaatcagaatctaaacataattgacaaaagaagaagagatgaacattcgcgatggtaatcttatttcgactacaaaagaagaagagggtgttattggagtttcaggatcctctgcaaaagtttcatcttcatcttctatctctatgtgttcatctgatttaacagaggatgctgactcgactgcttcttcttcttcttc

SEQ ID NO: 47305 - DNA, 2317 bp, Arabidopsis thaliana landsberg
gttagaaaaaagcacaagtgtagcttagcatgagtattgactagctttatccaccaatgtaaggttagtcattttgtgtgtgtttgaacctttccgcacccatattttctcatatcctttacattcatatgaaatcaaaagaaatggatattaaggtacatacctctgctcgaaacccttttgggtaatgatccttggcctcccaaagaatatccaagttgtcagagttcaacattagtatgttggacctgataaatgcagtattaaacatcacacgaaacatcataacctctcgttctggatccaaatccatatgcacacactccagtacaacatctccttgaacccagcactggatatcaattttgattacgtcacattctgcctggagccatatggtacagatttacgttactcagaagagtgatactttatagaaggtgtcaaacaaatcataaaacataagatcaaacccacctgtctgtaatggcgaaggggttttttcttatcagacatagaatacaccatctccgttgaaagaccagatttactactatagtttcttccaaaaatacgtataatcggtctgcagccatgttgagagtcaaagtttgggatacctcgaattatcacacaatccaaagaaagagctctttcaggaggtggccactcagaattaatgttcctcctcgctacatactgaagataacgaagttgagaaggaaacggatttaacggtgaaagcagctgcaagagacccttgggagcctctcgatgcacaatctcaagagttctacgctcaccactatgaactttcctgaaaatcagaaaactagctagaataaaagccaaaagtggccatcctcctctttcacagtgaagaagaataacatcctgacggttcccacgagcaagccaactctcacaaacacggagaaaatgttgaatcaatgataaaggaagcataggacagccttcatactgcctcggatactcaagaacagtaacatcatattcacagagagtttcagcaaacacgctttttttctccccttctcggaaattaaacgctaaaaacgacgattccgggaattcttcgtgtaaatcattgataacttcatgcaagaagatctgatacaagctatcagccaacacctgcgtgcaaaaacatgaatcaaaaactgtacatttacacacagattttgaatattagatgtctattaagctaaattgttaaatcactaatacatgattaagaaaagaaatggtgatgattaccataaactctatcagcaaattcaagtaatccatctggtggtctcttgtaaaagaatctacttaacaaagacattggaagaacctgagacgacaacaacaacaaatcagctaaatcgaagctatacgactaatcaaaaaacgaaatgcacaaaatacttagtctgattattgtggtttatcaaagtcaaaagctaaatcgaatcaaacaaaatgggggaaaattccagaaattaaaatcaaattggaggtgaatctaacatgagcatcaaattgaggatttgtaaacactgcgactgtattaaaacccttcgaaattagggtttataagaggaggaagaagaagacgaaaaagtagatgatgaagataccgatgacttaccttgttagaataagaagacggctatttacaatcaccgatgcagctgaagcggcggaggcggcggtattgcggcgcaaaggcttccggtggagaagacaaaaggatgaaaatcgggaacgtttggttttcaaattttgaataatgtttaggagagtcagatacaaaaccagagacggattgctttttcggtttatttaaaataacatttcccagttcttttatgttttttgcatctttgataaaagtactcatcaatcgaataaaaattattcaaactgttaaattttctgatatattttgtggaattataattatgataatactataatatatcctatttttaataatatctattttggtttgggggtagccgaacagtagtatataacaagcttgttcatgcatttgtgacaattgtaaaatacgtaaaatggtcgttagaatattaagaaatttggttttaaaattataaaaatatcctttttagttaacaaaataaaattaaagtagatgaaatagattttcttgtcgtgatttaaaagaaatttgtagtgaatgagactcgttttattttctatgtaaacaccaattaataattatcttcgtatttttgtcaaattgtttttggtaacgattgatcctctatatattaaaatagaa

SEQ ID NO: 47306 - DNA, 625 bp, Arabidopsis thaliana landsberg
  unsure (1)..(625): unsure at all n locations
aaaaactgacgattgtagcctaggatgagtgattttgagtccagcacatctctatatagaaaaccatcgtattaaaccggtgatattgaaagaaccggatgaagaagaccaacgtcttcagttattgaactggtttggatgtcgacagcaggaacaataataatctttaattaaaccagaattatttggtggtaatttacttgctttccataacacatgcgtgattgacgttttttgacggacggtgtatagaaaacacacgttaaaataatcaacctaatattgcggaccaaaagaaattcatgttatcgataaaatctccaaaatacccctaacttccgcgtttccttactgactttccccaaagtaccctccgcttctcctttcccaaatttccattttttatacatcgaatcgaacgcgttatttataataataaaataaaatggagccttttaattcgctaccttgtccgaaaacctcaacacaaaaaggatttcaaaaggttaaaaagaaaaagaaatcttcgccggtttcttctttcgncggcgttttgacaagccgtcgtcactgttaccgtctcaaaagcttactatttcagttaaaaaaaaacaatcaaagagct

SEQ ID NO: 47307 - DNA, 574 bp, Arabidopsis thaliana landsberg
atcaaatttattagaacaggtcattactgatgttagccattcatatgttagaacattaatgttcattttgttttctgtaaatgtaacagaaaatttatgataaccatatcaagatattctgtaatattatcaagaaaagacaaaatttacataggaaaagataaaagagcataatgctatgttacaaaacaaaaaacgaaaaacaaaagggaccatttgtgttgtatttagtcacacagcctaatttagctgcctccacggccaatattatgtccgcacccactaaccgacattttggttaccccataccatttcctttgtctctcacgagcactctttggccatcatttactatttatccatctctacattataccatcacaaatgcacatgttccatatatccatccatacatagtcatgcatgcatgcatatatatattttatgggattactttcatttgaaattgacgactaatgttgttttctgtaaccatgaactccagtttttctctttgcatgttataaattgaacttctagagcatcaaaaacattaggtaaccaataatagtat

SEQ ID NO: 47308 - DNA, 959 bp, Arabidopsis thaliana landsberg
ttagatcaatctctctatcataatcaagaataaacaaattgcaaatatcaattagtgatataattcaactgatgtaggaaagactaagaaagtttaatttaagtttataggttctagtgttctactaatgtggtataattttacacatcctgaaatgaaaattaatatatttgaaaacatattttatattgaaatacatatttctaataaggaatagagaaattttataggcgaatttttctatgtaactagacaattattttagttaaaaatttaaactaaaaatatttacaccaaatacatgtggttatcattcaatttttcaaataaagaaaaatttaagcgtattcaacgtcatttaattctttgttttgaaaagtaaaaaaattgcaagacgcgttgaactcgtgaatacacattatgtatatacgacaaattcattaatttgccttatttttgtcaacaattaacattttcaattagtagaactgtaatgaaaaaagttagggaatcttttaagaggagtgtcctaatacaatttgacactttggagcaattttgctcgctaaaagaagtaattgcttataaggctcaaactcttatgataaaaatgttgcccatatgaaaagtgatcatgccaacgtaattttgcatgaaatatcgcatacaatgacttctgatttatctttctttccctctacccttgaatatagaataaagaaaatcattacattatatattttctagatttaaaataaatgtttctttaaaaaaagagcaagaagaaagacataacaggcgtgtgggtaaaagaaaaggagtaagacaagtaaataagagaaaaacgcgtctttgaagagaacgtccacattgcattatgcatgctatgcgcggccgagaaagaagctcactcctctacatatgcttttctaattctttaatttacaattttaaatctc

SEQ ID NO: 47309 - DNA, 403 bp, Arabidopsis thaliana landsberg
acgtcggtcgatgatggtaattatgcgggaacagattttccatgaatttaacagtcaatccttgtactagtctcgtaaaaattgtctttttggttgtctttcagcgttggaacttctggttgagaagaaagtcacgggattgcctgtaattgacgataattggacactggtaaaactaagaaactatatcttttgtcattgtgttcctctgtttagagtcttgaacaacaagctcgtgattaaacttagtcatgaataacaagcaacgtcggtttagttactgatttattggatttagaagttaacaagatatgctttgtcttacttactcctctgctgtaatttctcctgcaggttggtgttgttcctgattacgagctgctatgcttggactccatctctg

SEQ ID NO: 47310 - DNA, 453 bp, Arabidopsis thaliana landsberg
  unsure (1)..(453): unsure at all n locations
tgcctatcttctcaagaacgggtaacagataagtggcctaggtacatggcatggcaaaatgtataagggttcaagtgattcatcgacgtgagcagaagttgaaacgtggtttctcacgtgttcctagggcaacgttttgtaaatacgcgaaggtttttggtcagcagatttggacatattagaagtgagaatggtgacctgagtcaagacaaatagtgtgacaacgatgactcgatgctagtggaaggctttgtgacttaagttaatctangtcgcgtgactaggtccctaaggactatgcgcaaaggtttgcatgtgtgatgggcagaagaaagtgatgacgtctggcttgattagaaaacgatgagcatttactggagngaatcggacgcttggctcgcggcgagtgtagcctgcttaatttgagcatggtttcctactatgaaagttgag

SEQ ID NO: 47311 - DNA, 569 bp, Arabidopsis thaliana landsberg
  unsure (1)..(569): unsure at all n locations
tcaattaggtgcgtccgaaataaaccacatcatccatgggaagtatctaacagagtgctcacctccacgtacccgattcgctcgccaacagagatcatcaagattcgcaaaacatcgaccacgtaggaaacgagatcatccataacagggctacgggagagccacaaacntgcacagcggggcgagccccaaacagcagacggtcaatacactggtnagacattagggaacggggcgcagacattgtatgttactaaacgacgctgaacaactcgctggcacgttcccgatatacgtcgacgctttgcacagaaagtgtttaattttttttcgacgattcgcttttcnacgactgcgagtgacagtggcttcgcantagactgccgaaaacgcaggcagcaatatcgtagctcgcgaagttttgctgtccagtacccgcatntgcaaactaattgccacantaccgcttgcaatgttacaagacttatctgtacaactttataagatgcgccaaaagtgctatacacgagacgatcttgatgtaattactgtaaaaagatggattatag

SEQ ID NO: 47312 - DNA, 599 bp, Arabidopsis thaliana landsberg
tgatttatttggtgcacacaaaaaaaaaaaaaaattgtatttatttatacccactaaagatggtgaataatactcgccaaccatgatgaaaaggccctcggttggtagcaactagcaaatgtggggatggaacaatcctccacgttcgaaattgttcttctttagcacaatcaagatactgcaaagtaaactacctctaatgtaattaattaacctcacaaattgttatgttaattaatggtattgaattatactcgtcgatcttttgtaagatatttttgttgaatgccgaaaaaattatcagaatctataattgatgtcaagttttttttttaagtgtcaatttggggaaatgagttaaattactatagaatacaagtaaacatcacatcaaataatatgaataattcactaaacatcttatcccaaagaaacaatgaaggagaagttactagtcactctcttttatttatttttaattaaaaaacgaatagatatgttattggagtttaatactattaataaaataaaattctattacttcacttagctaaaagacccacagtgcagtaacagtgagaagtaaatttcatgaataa

SEQ ID NO: 47313 - DNA, 141 bp, Arabidopsis thaliana landsberg
ggaccgaaaccaaatagaatcgagcaaaaaatgtttgaaatttttattttattttgtgttctttaggttaacgaaatgttcgttcatggtataacatatcaaataatggatgagcttaacctctaaaatacaagtttaaat

SEQ ID NO: 47314 - DNA, 610 bp, Arabidopsis thaliana landsberg
ccaacgcaaacaaccttttcctccctcgcgaatatcggtattcgcataagccgtgcaagagcagttacttgaacacttgatcttacaatcctcaagtgtcatttcattttttgcatcataccaagaccatgaagtatctggtaatttcagacctggaaacttcacaaatgcatctttcttttcacagttggttggaatctcatggacacacccgtatgctcctcttgaaatattccactttcgacctgatttaggcttgaacccttgtaaacatgaacaagaaggtgtgtttttgctattaatcccacaaactgcgtaagctccacatatagagtagtagtcacactcatcttctggtgcagtgtttgctaagatccactggttttgcttcgactggataaacctatggagtttccctgtgttgtttaataccaatcttgagacaattctgtgccgtggagtccacgagtagtttacttcttgcgcactcgacgtgaatttgtagtcgaataagctattctcacgtcccatagctggagcgccggtgaaggataagccgttccaagatcctaagcgataggaataactcgaatctccattcttccttaag

SEQ ID NO: 47315 - DNA, 330 bp, Arabidopsis thaliana landsberg
cctactaagggtcataatctggttccggtccctccctcgaggttggcggtctctaaaatctttttcttgagtgcctgcaagctgtgggatccactagttatactgcggacgccaccgggggggagcttcaacttggcctatagtgaggagtgttgccattcactggccggtgtttaacaacggttccactgggagcacctaagcggtggccaacttaattaaattgcttgacatcccgctttacgcaagtggcgtaatagcgaggacgcccgccccgatctcccttgccatcaggtggaccatctgcattgagaatgtgactcgccttgt

SEQ ID NO: 47316 - DNA, 712 bp, Arabidopsis thaliana landsberg
ttgataggtaggttttctggtcaccttgatagttttgtgaagcttgagtggaagattgtggggggggtgcgcactgccatcaaataatagttattttctaaagtttcacttttttgtaatcaaaatctacaagtactgacacagcttaattattgctagtaaggaaatttaaacattgtccaacttcttatgtgaaagtgttaacctaatccaccaatctttatagctataagggaccagaaactacttgttagcttacgatcaacattgtccaacttcttatgtgaaagtgttaacctaatccaccaatctttatagctacaagggaccagaaactagttgttatcttgcaaaaaggaaaggcatatcagaagttacacaacttttgaagaagactaaagcaaatacaacaaaggtagaataattgtgttatagaagaacctgtccggtctaatttgatccaaaaaaaaaaagagaagaacctgtccgttcttcattactgctgaatgtaaagtgaaaacatccttcaatcagaagtgttctctttagcaccaaaaacaacaatgcagtccatagagttcaacatattggtcaatttgtatcaaaattttcaagcaaacataaacctgaataacaaaagaataccagttagccgatggccatagttagtttttttctacagtactagtagtagcacaaaggttaacaaaac

SEQ ID NO: 47317 - DNA, 495 bp, Arabidopsis thaliana landsberg
aatggcactgtgagccagttgctcacacgatcgtgatatagttgattttctggtttctgtttttcttttgagtaaagcaaaatgtttgaacgagagcttcgctgtgtactttttccccgaacacctgccccgatggctatcgagctctttgttagttcctgtatagtttcgttgtataatagcggcaaactgtcctacccaagttatagtataacacgcatgctggtggatgtctgcacgagcaagggggcactgcaaatgagaagttgaaaagctaggtatctttagttgcatttaatccttctgttccatctcgtagtcccaacatatttcagcgaccagtcaaagttgctgtcagacggcgtcccttttcgccacccagatacaagtcgtcgtctgtagattcccttgtcaagttcacgggctcgcttgagccccttgtcaccatgtcctcatcaaccttaagcccgttctcgacaagagcgaggatgacac

SEQ ID NO: 47318 - DNA, 602 bp, Arabidopsis thaliana landsberg
acaataaaaccattgaagatcctaaaagacacctttaaaacttcaaaatgtaaacaacaacaacaaaaaagttctacactacatacatactgtgtcggtagaaagcaatagactgatagtttttgatgattcatggtttgaagagtcgcagctgttttcggttatgtgtctctatctaaatctaagatcttaattttctatgttcggagatatcaaagtcgcacttttctgtgaatctagaaacacataacatttccaataagaatattctattgagattcgtagtcaactattaagtgtttattacgattaaaaaattactataatcaatgattaatgtaatttattatcttacgatctcaattatacaattcttctgacggtttgggccgtcgtaaggccgaagtcatgcttttccttaaataacactacgagttaccaaattacccctcagctaatttgctgagaatccacgctattaaggggtagaactaagattagccaacactgccaatcagagatccaacggctgaaaaagcaatttcttggggaacatgcaaagatctgacccttaattaatattttcaccaaccaatagactc

SEQ ID NO: 47319 - DNA, 974 bp, Arabidopsis thaliana landsberg
acatcaaagcaatggaccggtttccattccagacggaatcttcaaggatcttggaaaggtaaggagagatatcggttgttgattcaacatcaatggctttggtctggacccaagaattatcaaccatcataaacccttgcccatcgaatgaggccattgtggtctgaaatcactggaaacatattcacattacacattagacacaacatcatatagatccattagcttggagagacactcagaatcaatacaattctaataatcagtgatctgtttttgttgtgaatgtgctcagcgatgaatcgaatgaaaaactgataaagcagcaaagattttcaatatgttttccaattcacaaagacattgaaatatcgattttgagtgtgtagcagcaatagaatgaccgattcaagaaatgtgtagacgcattcagagctaattgggttttttgccagaacaacaaatttactctaatcagcgtttgggttctatgaacacaatacaaaggtacgatttttataaagtgtggattagacagaggaaagtccccaaataagttcatcggatggaacatgcttttgttgatttggattgaagatttatatataaacatgagaaaaatctttcaatccaaaaagacagaaaagaggaacacgaaccttgagatttcggtgcgagaaggctgatctagtaaacggagtcggaagagagaaagactgtttctgggtttgttgtcggaagaagaaggaaaagtacgcaagtgaaagtacggtcctgcccattgaaggaatgacacgtgtctttacctacgggtatcgcacgtgcgaatgtcgccatacgtgttccgtagtagaaggattttagaagagtcaatagaacattatttttttcttcactttggttgattttggtttaacattttggaaaactcactcaactccttgagtattgttttcgaaaattttccttgtata

SEQ ID NO: 47320 - DNA, 509 bp, Arabidopsis thaliana landsberg
tctacagtttttatttattttaaatccatatatgcttaaagtagtcctacaatgatctgaattaaaacaaatagaaatgacccaaatttatacttaattattacaaattttggtaagacaagatggtgtgaactctgaagtggtcgccacaaaataaaataaaataaaaaacataaaatggcgtgtgaataaaagaaagactcgtagacgattgaaacatgtcaaatttattcacacggacgttatataaactttgacgtaaccaattgaaatttccaccataaggagtagtgaagtatggtcaatgattaaacgataacaacaattgcatggcgacttctctctctcttttattacttaaaaattgaccgtttaccattattagatgcaccaaccttcattttcattatgattagtatgagttgtttatatgcacaaaaacttataaatgaaggataattgacatatagtcatatagattaatagaggaatgtaaaaagcacaataaa

SEQ ID NO: 47321 - DNA, 377 bp, Arabidopsis thaliana landsberg
  unsure (1)..(377): unsure at all n locations
nnnnnnnnnnnnnnnnnnnnnnnnnnaggaaaaaaatcgatagacagactgcgcttttcacggcctgagcggacgattgaaaatgggcttcaacacggtgcaggcaaacagagttggaccattctctcctctaagtgtgcgtgacctgaaaagggcaattgttntaggtnctgtcggttagatacntgtctatttggataatcaaaccgaattctgtaccacgaatccccccatgttcttcgctgtcaaagtaaaacgagggngnaaaagtttcgatttgcagacgttntggagctcgaaacggctcnnccatcggataaaacgacttagancggaggccacttcgtntcgatcattggtatnaaattgcaggtacc

SEQ ID NO: 47322 - DNA, 347 bp, Arabidopsis thaliana landsberg
  unsure (1)..(347): unsure at all n locations
gtgtnnnnnnnnnnnnnnnnnnntgtacaagattccgaccccttgtgttggactgatgcccttccgtggcactaggaggggtggcgtacagggcatgccaaccttaatttctatagagcctccctgtatcagagtgccccacactgtctgtagaacgatactatctattcccgtcttttacagaatctgaatcacttaccgcagagaccttggtggtacagtacatatcttcaccagacacagcagcttctctaccggtggatcactgatgtgtccacataccagaatacgagtcataccgctgttagacccgctcgagtgcttaacaccaatccacatctctgacc

SEQ ID NO: 47323 - DNA, 698 bp, Arabidopsis thaliana landsberg
gtacataaagatgtgattaccttatatggtcgatctgtttttggaatcataggctctctcgcaagtatcagaaggcgagtcacattgttaacatcatcctgaaaaccgtcgaaagaacaaaatatcaacttaaagataacggatattgatatgtatcattacattccttctatgtcataaatcattccaccttacccaatgatgtgcattacaatatgttaatatatttccgtaggagacaacattattagtaaagaagaggatggagactaattacttgtatgttctcagcaagaatatctagaccatagatatttgcagcccgtacactcgcgattgctcctacgtcgatcttaccacttgaagaaacagtctgaagaaacgtgtaatgtttagtcaaatccatatgtgaactgaactaaaaaaacactctttctttcgagctatcacctgagcagcagtggcagtatcttttgcagaaattctctgtatgcctaaattgttaagtgaattcacacattgatcaagcgcctggagagaaggaaaaaattaaacgaaatgtactcaaaacaagtgaacttagcagcgcctgaagaagaagggagcaggagaacctgaggatggcttagaacacatttaatatcttcctttttaacaccaggcactcctaaagacaatgattcaaggcaagtggactt

SEQ ID NO: 47324 - DNA, 510 bp, Arabidopsis thaliana landsberg
tatctttcctttcatttttattgatataaccataatatataatggatagtgtaggagggaagaaatgataaggctgaaattatattgttttgagccatggaaactcttttccacactcttcttagattattactatacgtcgccatctctcatactctgtcccctctcgccggttctttccggatttctaatgactttccggcggttttcaacttcggagactctaactctgacaccggagaacttagctcgggtcttggattccttccacaaccttcctatgaaataaccttctttagatctccaacttccggaagattctgcaatggacgtcttatcgtcgattttctaagtaatcattcttcatttctaataattcctttattctttaaaatctttcctctattttttcagttttcatgactttttttgtagcaaaataataataggataaaataaattttcgattgttcaacggcaagtgtcatgttttccgtttttacggaagcg

SEQ ID NO: 47325 - DNA, 1241 bp, Arabidopsis thaliana landsberg
aaaagaatagccattaaattttctatatatagtttacaagtcccatgtacatacatacacacattcacatacatggtacatgggacgtcactcattgtatgaagtttagaaaacgacaaatagacagatttagagaatcattcatatatgtttttaaaacacattacccctctacatttttatttttgttaaacgtgagatatctccaccatattataatggaaagggttgtcaaaaagaataatgatacaaaaaagaacggcaaaggggggttgggttgtggggtcatagtgacacaacattcacttacaaaagagagtaaattttatttttattattttaactgctttgcaagatttagttaacacctttttagtttggaatctggattttcttattaacttttttttaattatatgtaaaattctgaaccaaaactcgtacatctcaacgtctagaataaaataaatgtagtttcttcaccaaagtattatattagtatgacttatgacacacaatcttttggatggatcctaggctcaatcactatatcattataagcttttggttatcaaaagtattttagcttcagatttatttttgtactataagaactgtcacaagttatatgaagttcaagatacaatccatggcagtttaaatttgaccattttttttggttttttgctatttttttttaatggaacaatccaaatgtttccaaactatggataaaataggttatgttcgatgattaaaatggtatagtaaaattagaaagaaaacaaaaactgacattttatcataagaaataagtttctgttttcgttattttctacaaaatcaaattacttcggaatttccacagtcgtgtggcatgaaatcacatcatgtgaattcagcattgtactcttcgttctctacccggtcaacattctttgactttgattttctttggtggtccttcttctctccctatatctactaaaagccaattagttttctttttcgtgtatacatatataattttctaaatacattatattaaaactgaattatttgattagatgtttagaacatttactcaaatagttggtggctttgtgttatcaatatttatgcaaactttgtttttggtgacaaaaaacacttattaaattactctgtactataaacttaagttatggcagaccagtggctctggtttgattatgtttagggtaaaaaatcaattatttctc

SEQ ID NO: 47326 - DNA, 383 bp, Arabidopsis thaliana landsberg
  unsure (1)..(383): unsure at all n locations
ctgcagatatctcccggcctgaatcggctaccttactacaagttcaaccatgatttctacagnaatcgaacccataccgacgttacgaattgaagtcgacaantttctggaaatggcagatttggtttctctcgtcgccgagatcgagctgcttcgccgcagaatgcgtggaatcactcgtgatgccgatcgnctngatttngngctctttgcctattcagnccgcgaagacttcacngntcgggtctttcgcgangggcattgattcaccgctgagtgacgattgacngattctgagaggattgccgtngagtaaangctgctcggcgggaatgatatcgccgagntcgacgncgattacacctnnggggacgagcatcgat

SEQ ID NO: 47327 - DNA, 1063 bp, Arabidopsis thaliana landsberg
gcacgaaagattaaatattatggaacactttattgttcagtaagaacttcattagcgaggtttgggctcgtttaactaaacccaatctaagggagttattacaaacaaacaatgcccacgtctatcagcttttttgggcctaaaaaataaaaatgcatggagattttatataaactccgaacaagaagatgatttcaatcgaatgtacctagaaaccgtctaaatcgaatctgtaagagaagaataaaattcagtacggaccagatggttttgtataccaaattcaatccataaagaagcaaattcccaacactacttaaaaagaggtatcattattcaaacattggcgctccctcttctttggacaggcttgtatatcaccacagtgacaaacttagtcctgaaccgatgcgagaaaccgagtgctacaacagatcttggggcgtctctgttttcgatatagaggtggttcaggacaacattctgtggcgcataatccagttccatgctaccctgattgcctaatatagagtgttgaaggtgtggcggtactgctggaggatctcttgtctcatctttagttgaggaatacacattgttgtaacttgaaaccggcgatacaggtacttcaaatcccacaaccgctgtgtacttctatgtttaagaaaacgataaaagattgataaatcgagcgcgagactggaaattagttggttcaaggcaaagaggtgttttagctggcttacatgatcattaggattttagactgctcatcttggataaggattgccacctagtgcctgaaacacaatataatcatagactaaaccgcaatagcatgcaaagtaaacaatcaaaatgaatgtaggtcacaccatctcaagtgccattcaaactaatctaagagaaagaggtgtttacatttcaactcaaaaacactgaagcagaaatgaaaacaatgttgttctctacaatgatgcaaactcttatttgtgtgaaatgtaagacttttgtctaatcggtatcaaaagtcaaataattcataatcccgtagacaaatcta

SEQ ID NO: 47328 - DNA, 745 bp, Arabidopsis thaliana landsberg
gcgcatacacagtttggaaacggaacaatttttatcagttttgagtcgaaacttgtactagtaagaaaaatgggtattcgcctcatatattataataataaattttgattgcgacaatgattaaattttaaacggaacaattctaacagttttgagccaaaacttgtactcgtaagaaaaatgtgtattcgcgtatatatataaattttgctttcgacaaagattaaatttagagtttatataaagtatcttaggatttagttgtactcttttttatttaacgataaacaattatacacacaaacaaaaatgtattcgtctcaattatttattttctactctttaagaatctatcggatttcacttgaattcacaacaaattagatgtagactattggttaccgattttaaacccagtggttgtcgtttgtgccacaatcactgttacgttttcgatatgtcaaggagttgtgatactggttttgtctctttatgttataccgtatgctttattgctttgacgtcgtcctacctcatatatttgtacatgtgctttaagctatacgaaggataagaactaaaagtgggtcgagccaccatattgattattcatggtttgttttttttcttgttccatgggttggctttagcctttgtgtttttatcctaaccaacccggagttctccttctcggatagtttgtacttaacacttttctgccgagatatatcttcatctaagtggt

SEQ ID NO: 47329 - DNA, 610 bp, Arabidopsis thaliana landsberg
ataatatcttttagaatgtggagggcgagttaaatattacagggttcgtgaaaactcaaagattgaattcaagacatgaatattgttagccaaaaatacaaatgaaaaaagaagagtgacgacaccaactcttagtggcaaaccacttttttttaataagatagcacttgggaagaattccacaaataggtaaaagcaaagagtttgtgcgtcatgtctcattaatatcttttcgaatttatttattttcattgttaatgttttttgtattctaatactgttaatacattattcatattttgaaaaaattgcgtcgacataggactcttccctcaatgacgtcttcattcatagccttctttcttttgtttgctaaatgacttcactcacagcccttaatcatatggaaaagaaaaaattatgtgtgaatatgtcaggaaactaattactgccaggcaaacaatgtaatacgtgaacaagaataatatacgtatgaatgtatgataacatactaaaggaaaagggaaagttggttagatactgtttacacggaaaaatgcaccaaatcacataaattagttagtattccgtgtgttaaaataattagtaa

SEQ ID NO: 47330 - DNA, 289 bp, Arabidopsis thaliana landsberg
  unsure (1)..(289): unsure at all n locations
acacaganngaaaaaaacgaaacaaaccagagaaaaaacgcagatttttaacttttttaaanaaacgaagacnaaagaacaagagggaagagaaagaagaggaacagagacaaagaagaaccaaccggagacgaagaaaaaaaagcaagacagaagcgcagagacccaagagagagagaaccaaaaaccggaacggagaacagagaacgacaaagganccaacaacgaagaaggaacaggaaaaaccagaaaaggaggggaaaaacaccaggaacccgaacccgaaacg

SEQ ID NO: 47331 - DNA, 329 bp, Arabidopsis thaliana landsberg
  unsure (1)..(329): unsure at all n locations
tgcgagatctgacgaaaggccttaggagatagaaattggaccatcgtttcactgcttgcgagattcaaacagacgatccctgagctttcgttgagatatagcgctgaagagtttgtcacaaatgctgtccaggtgaccgaacatgctctcaggttagcaantngccntngagttnaccctgcanaaactggcanagcggatccgatngatanttnttcatttgcttcgnnancttaaatctantgttgtcgtactctgtnctgactcgccnnanctntttagggccgagaaatctcagntnggnntcgaangntngcatttttcgaaaa

SEQ ID NO: 47332 - DNA, 667 bp, Arabidopsis thaliana landsberg
gaaattatttatgaggtaatattttgtctctaaaatattttaatatgctttacttaaagttgtttaactcattttttttatttgacttgtaggaaccccataaatccaagggacgtattttgggttaggaaatttttcctaaatatcatcttcttcacattcatcgggtttctcatatgccctatctttcgattatcatcaagctatggaagaaaagaatgaacggattgcggctttagagaaagaaatggaagaacagaaagcagcaatggaagaacagaaagaggagaacatgagcgggatgcatagtacaagaagagagacgagtagttggcaacgttcatgaatgagatgcgcttaaacttgccattatttaaagattttccctctttgttatttatggatttaaaatgtttttactaataattatattgttctgaatttaaatatttatgaaattactaaattttaaagttttaaatatatattattttgaaaatttaatcaattttaattatgtaaaattttatatagaaaaaataataagacccattggtaataacgaactttttacgtaacttccattagtaatctgtcggtaatgaaaaaatgtttttttcgtatattccctcagtaatccgtcggtaatacagagatttttcgtata

SEQ ID NO: 47333 - DNA, 1064 bp, Arabidopsis thaliana landsberg
aactttgataagcagagccagagagattagagattgagcacaactagtgaatctctatatcatagacgtttaagacaatcaataaggtaaaaagaagaagaaacccttttggaaattttggtcttgtcgatttgttttgtcatgtacagaaggaaagtgaaatagaaacaaacagaggaagactttaacacacactaagggttggtgaaacacattgacagaatgctgcctgtaatgggttccacgagaccaatgcttactgagtttatagaagccaaatatttaagtgaatttgttgaaagaggccccttaacttccgcttttttccatatttaaaacctttaagaatgctgttcttacatttaaacccatcaactttagtccgcctgctacacaacacctgataaacggaaaatgatgccttttgggttgatgatatttcttctgatttcttctttttagattgatgatatgcatgcaagtttatacagaggaaatgaccatatcgctttatttccaaaacgatattacactccatgtctccatgtcaaacctcagagactagaatatcaaactcaacatgaaatgctttactttttcagtattttaggtaagaaaatcaaagaaccaacaaagagtttgatatagctttcctctacaatctttagttcaccaaacagatgatatgaaatatcggtttctcataagagatggcaagaatatcaaaaagaattatggccagaacatcatccaactcaacaagcaagtaatgtattaagttgcctgaatgatatacctaaagtatgagacctcactgttcttttggatctaaagagcaagatgtacataagcatctagaccatgtgcacagggattctgattcaaatccattattaaattaaaccaagtattcgacttatgaactttatgtaaaccaactaaagatacatcttgagacgatcaagaaaaacctgcaacagaaaatcctcaaaaccacattttccaagtctttctaagcatgatttttcacctcattacacatattctcatcaactagttgatcc

SEQ ID NO: 47334 - DNA, 528 bp, Arabidopsis thaliana landsberg
  unsure (1)..(528): unsure at all n locations
nnnnnnnnnnnnnnnnnnnnnnnnnnnnnnnnnnnnnnnnnnnnnnnnnnnnnnnnnnnnnnnnnncaaacactccagcacttataatctacacaccacttacgcgtgcctccctgctcatctacatcgtctcctaatcacaaacacacccacacctctgacgtaaaatgacgtcccgttctctttgcgtgtcatttatcttgcttgtctccacattcgttacgcccgnactccaactcagcaccatccaggttcttcttgttcctcactttctggcccaccaagtaacgagaactgcttctatcccttgtacatttgtttttctcagacactcatgtagatgcaacaggcaacactgtccctacacggtgcttgtcatgaccaggtgtacctgtccggactcgccaagagatcagatcagcatcctttttcgcgatgcgccggccaacaacgttaagctcctagatttttttgtacacacttncacttaagccgacatctttattcgcttccaagtggtttagatac

SEQ ID NO: 47335 - DNA, 883 bp, Arabidopsis thaliana landsberg
ttggtattcattttaatccaatctgaaagcagaaataaaaaggaaattttttatcttatgttcattcttttactctttccttcctaatgtatcatatttttttcttagtctcaaaaaatcaaataaaacataaataaattgaaaactcatttggagtggggccgcatcaatgataaatacaaggaatgatgaagtgagagttaaagaaaatcaagatattaaaaaaaaaacagagaaaaatggtgataaaaaggatagagctgtgtatagagctaatgaagataggtatggagtttgtagtggtggtggctgaagccgtccagatagttatgcggcaacacctcaaccaccgtgctccacctcctccgcctgtcctccgccagggtcttctcccttataccgcttcttacccttctccattcctatttggatttctcccttgaatacctttttcttgttatgaaattattctgcttcttttcttcttcttttttttttgttctctgtgtagatatttagatcttattcttcttaattcttgtaactctgtatattgcttaatttcttcaaccagatttgcagctctctttgatttttttttaaaaaatttcttgatgtttgtttctttggattttcttctaagaaaacaatttttaataatcaagtgaacaatttggttgaagaatacgacgtgtagcggaaataatctgcccctaagtccaggttcaactaaaaaaattgttggttttgccatgtttcttcatgatgatattttagtacttcacgtcaagttgttcaattaattctttatacaaaaaagatgatttaattaattattatatcataatcttgattagtcttggagagatgccttggtgtgcta

SEQ ID NO: 47336 - DNA, 1335 bp, Arabidopsis thaliana landsberg
tctcatttactacagattattaagcgaggtaattaactaaagtaataaccaaaacagaaacttgtgtctaaacatattgtagatgacctaatttgaccagtgatgagaaaacggcatgtttatatattgcccctttctatttatatactcttgtttaagttttttatacatattaacaaaaaacacaaaactttattttatctctaactagtagactacattattttatttacaaaaacactcgaatgatacagttaatactacgattttgtctaaaattcttcatgtgatatttttgttttgtttgtcaaagttcttcctttggtattggtgagagttaaaacgtaacgatactattattatgaacaagtagaatggctaagttctagcagtaattaagatcataaaggttacattcaaatgatactctcaggtactaaaacgtcaacatcataaaaatactaaagctagattaataatgcactacaacgatgctatgaagaagaagagctggtaaataaaatacggaaatgtgttaaataatgatataaaaatgtggtaaatgaacattaaatatcgaatgtatggaagaatgatgataagaaaaatgaaaattagaggagattaaaaagaaggcatgtgggaagggtgttgacaactgtcagaaatgccatgctcagatgggggcaaacagccttcactccttgtgggtctctcttaattatctcttttcctcttcccttcctctcaattctcatcatttctaaccccaaaacaagtaagtaaatcatactctatgatctgtttatttgcatttttattaacgtaaacccgactttctagactagagagagctcatattttttgtactagaaaggtgtaagcaactaatatctatgcatcaaagatgaatgaaaaagaccaaagttttggccaaaaaaatgaaaattaaagagaccaaacatgttatactaatatattatgtgtagtatttcataatttcttgattcgaactttgatctagttggggaactcggcttccatcgaaagacattcatttcctactaaattgtataattttttatttttcgaaagatacaagacgacaaacaaacacacacacacatatatatatatatatatgcgagtgtatttctccattttagctatatattgtataagtaaacactagtcgacaaaaaaaaaaaacacaatctcgaattatagacaatttatattgatcgtaaaaggatattctattaatgaattgaccgagtcaccaacaagacctaaaaaaacattgcttcaaaaaaacataatctagttgtttgggcg

SEQ ID NO: 47337 - DNA, 756 bp, Arabidopsis thaliana landsberg
aagcggttcgtgagtagcgtctgttggaggcaatcaggtgtgtgtccagtgtaccctagtggctggaggatctgatggagtatgacaggtttacgtgggcaaaagaaaaccatagtgttcttcttaatttatcattactatattttatgaattatgatgatgatgatgatgatgatgcttcttaatttcttttccttttttcaaatttaatttcctatttgagatgatttttgattgagttgtgagagcatacgatctgtttgttttttttaaattataaaggattttttacttgttcaatatctttgttgttacgcagaaatttgagtttttaatccataaattttcattacctatttattatacgatatttgggaatgactttcttcaagtgtttgatcacaaaagtagctagtagctacaagtttgttggtagatataaaataaatttatattgcattcgtttaccttatctagtgtatacatcacgagattagttatttttgcttttttggggcttcacaatagaaatattaaaaaaaaaaaaactataatggttgatgaaatgagaaaagcctaatcaatctagctatgtggtaaacttgtttttttaatcacaattaattctatgtttttttagtaagaaaaaaggccaggtttaatcgtcctgaaactcaaagagtaaagtcgttttaaacaacagaatttgtgcaccacatttcttaaagaatcatatttttgtgggtgcttcgtatc

SEQ ID NO: 47338 - DNA, 377 bp, Arabidopsis thaliana landsberg
  unsure (1)..(377): unsure at all n locations
aacaagaagacagaaacgaaaacacgcaacaacaccaagcgaagcccaagcacacacacgaggaccagaggcaggggaagccccggcgaaaggagaaacccccagacccaagcgggacccccagaaacgaaggcggcccaaccaccnccaaccagaggggaggagccccggagagaaaacgaccccaaagcacgccggcgcggngnaaccgggaccaaccggaacagccgcaagagcacaaacaaaaaaaaaaaagagaaaacgcccaaaaagcaaaacacccaacccaaacaccnanggaaacagcaaaagnaaaaacacgaaacccaaacaccgacggaaacagcaagagaaagcccaacagaagaaccagccag

SEQ ID NO: 47339 - DNA, 584 bp, Arabidopsis thaliana landsberg
tgaatttcaacctgatatggctttttgacaatttcattttcatcgcctttctcatcagattcggctggggtgttctttggtttgccttcgcaatttgaagcaaaatggcccatttgaccacacaagaagcacctctcctgctgtccaggagtgtagaccacctaaatcgtgggatgaaattcagaattcagcttagttattcatgaagaaaatagaaattgaagattttacactagttatctccattttttctacccattttttgttattctttcaaggaaatatatatatataaaaaaacctcaaaattgaatacaaaaaaacatgcggaagagtaaataaagaacctctcgaagaattgaaaaatgaacttcatgggtcgccaagcccaacataatcaggtcagcatcctgtcaaagaaagcaggacaaaatgagcctcataagttaataatgagcctcataagttaataacacactagaaaatgaaggccaaaaaattaacaagtgattaagacctcaggataatttttggtgcaagtacaaattgaaaaatgaagaatcataccagtccatacaagccat

SEQ ID NO: 47340 - DNA, 504 bp, Arabidopsis thaliana landsberg
gacgcggtcgccgctgtcctccagcggcccgccgctcgcgctcacggtgcgcagcccgatcgccacttttacggcctcggtgtcgtctagctgcagcgggggcagtctcgcgccgggcccgagccggtagtgcccggcgccgccccggacggagtgcaccgggtagtcgagtccgaggagccgggcgacttcgttgcggatggtgcgggtgctgacaccgagctgatccgccagatacggcgctgtccactccggactgctctgcatcagtccgagcagcgcgagcatgctacatgaaagtgtcggccacgggaatctccggatccggtcgcgaacaggttgggaacttgcttgatcaaccggcaccgtagtacccatgacgccgttcaccgtgcagatcccgcagtcctacctcgacgacctcgtcgaccgtttgttccgcacccggctgccttgttccgcgccgggcgactactggacctacggcaccttgaacgcctggct

SEQ ID NO: 47341 - DNA, 648 bp, Arabidopsis thaliana landsberg
  unsure (1)..(648): unsure at all n locations
ctaaaacaaacgcaaattccagaggaagaagaagaaaatgatcgaagcgtaagaatgttaggaattgagaattcacctgctatgagaagtacaacggattcgaataatggcgccaggtaagagaaccttattcctgaaaggaagaatcgctaacctactcgggagctccacggtttccgccattaacgtcttcttcttcgagaaacaaattctcttgtaaataagatcgattttgatcgtcttttatattataataccgacgcatttcttcgtcgacattattatatacctttatctgttttttcttttgtttaatacatattgtaatgaaatttgtatttagtccttatattagtattttcattgaaacaattacccctactatttatatatttaaaataaaaccgcattcttgaaattaattgttacttcaatagttcggatttgattagttaattaaacaaaaatgtaaaattattttacttttaacaaagcaaacttactatnttttgtataaaaaatgtattttaggttcgatatctttatcaaatttgtaaatatttttaattaatcggcataaacaacagttagacaaattgttatattcggtttatttacacacatgtaatattattttctatatgtttt

SEQ ID NO: 47342 - DNA, 1433 bp, Arabidopsis thaliana landsberg
agcttttttttttttctttttttcttttggtgttaaaggtaatcactaagttgtggcatcatcatccatcgttagcctgattaatagttgacacataaatcatctatcgcagtcaaacatatgcataaagcaactcacatttgcaatactggagctgctactccgatcggtattccccgagctgcaagatcttctaagagacataagggagaatccgcaaggtcggtcagagtaataacacatgtttatatggaggaggtagcctatgattggattgaaccagtttttatctttctctatgttaatttttgatctttcgtttcttggggattttttggggtccttcttaatattcttcatgtgtataaaaacaagtgctagtatcaatattgagggttttgaatacaacaatgatgacaaaagggttctgtatataaaacctcttgtgtgtggaaaatagtcattcaaatgtagtttttgtttgtaaacttggaaaaaaattacttggaggttccatttatttgcttcatcattgtaactcgttgcgaaaacatggaagttcaaaacctatctaggaacctcgattacatagtacctgcgttacactttttctctcttacagcagcccaccactcagagagtctacagcgtttgcgtagaggtcagtaagcgagtactgcctcagattgtttacctcgtaccaagtgttcaatgactcgaggtttctgtctgttcccgaaaacgcgacctgaattccaatgttgcagttagcttgacctccattagccttacactttgaagttggaaccgcgcaatccgtcccattcaggcacacagaagaagaagatcctgttcctttgcacaaatcgcatccgaagctcttccagaacagattctgcaacactcccttctgaaattccagtacctgcaatgcagttgccaattcagcgatgcagtgctctattgtatgtttaccaaggggcttagggttaatttcattacaagtgtgaaagctgtgattgtgttgcttccatctgcaaccttcacaggatatgatcttgctgcatattttgagcccgcgaatcccaccatgaatccacctgcttcactcttctcacaagacacatcccaatgaaaaaatggcattcataagctttacttgtttattctttgtgattatgtcccaatgagattttataacatagtgtaagacttaccgggttaaacttacttgtgtcgatggagagaagagagatctcgtcaaccttaggtctaaaaagcgcaagctgcgccattttcgcagctaaaccgagacgagtatcacagggagagagctggacttggtcaagaaaaaaagcttctttgctagagatggcaataccaatggtgaaaccatctcctttgcttatttgtgtatctgaacatggactgta

SEQ ID NO: 47343 - DNA, 654 bp, Arabidopsis thaliana landsberg
  unsure (1)..(654): unsure at all n locations
aaggatgctaacgttgtccatgagttgaagaactatctcaaaagtaagcctggtcccttttcttcactctcctattatctttggggaaatggctgtgaaactaatagaagatttccaaaaacatttatagcctgcagtgcagacatatcggtgattgtgaaaattgaaagtgcagactctataaagaatcttccttctatcatatctgcttgtgatggggttggtttcaaagtcttttctgtcagagtttatatgttgatacttagcgcagagccttagcttatataattatcaatgctttttcaggcaatggttgctcgtggagatcttggagcnnnnnnnnnnnnnnnnnaggtcccgttgttacaggtaaatccaagacttggtttctgaaacattactttagactctgttggtatttatgcatttgctattgtgtcttaattttaggaagaaataatcagaaggtgtagaagcattcataaaccagtgattgttgccacaaacatgctagagagtatgattaatcatccaacgcctacaagagctgaagtctctgacattgcaattgcagtacgtgaaggcgcagatgccatcatgctttctggtgaaacagcacatggaaaattcgtatttccattaaagccttccttt

SEQ ID NO: 47344 - DNA, 801 bp, Arabidopsis thaliana landsberg
ccaattctatatgctgaatgttgtttgattgtttgttttatggatgaacctagatatttataatctagttggggtaaaactgagtccatctgattgatgtaacattctaatttgtgtaatgtggtggtacatacgagaataaaaataatttatccactatctattaaagatgatgtgtgaactactgaataagtgattttcaagatcatgggattgatgataaaacatagataaagttctcgtggtaatttagaaaataattaattaaacttctgacgattattttgacgataattaaatcttcaaaccaaaataggtttgaggacatacaaatgcatggtgacggtcggatcacacacctcgaatttaggtttgatattaatcagacgtggttagttacactaaagcatcgaatatttgatatactcacactagctaatgcctaatctggagagaactaatagaaagttaataggtaagaatataaatggtgtttccaaatgctggatagcattagggttatggataaaagggaatagaattaataacagaggagagaattgttggtactgtatatgtcgtcacgttatcgatcttggtctcacttttattgggaatatatttaaatcccattgcaagtagtgtagaaatacccataacgtatttatttactttcaaaaatgtgctattgataagccaacacaagagtattgattctttgacattttccctaactagaaataattaggtagcgaacataaaatgaaatttatgctaaaacctgaattacgtaacactaga

SEQ ID NO: 47345 - DNA, 567 bp, Arabidopsis thaliana landsberg
ttgtatatttttcttataaggaagacctcaacgaaagaaagacaaagacaaacttagaaaagtcacgctttcataacgttaattactccatgctacatatgatctacgtctaatacaattttaaataaatatatcaatttgttgacaaaaaacagaattttcaatttgctggtcgccgactgatgggaatggtttgttatcaatctaactaaaatagggaaaaaaatccactagtaggaggtttacaaaataagtataggaagtcaaccacaaattagttataacttagtcaccaattcggatgatgttgttttaattagttggtttatcaaatattcttaattagctgataaatatagaatatgaattgtatttttcagtgcgattcaattcattacctgctttgttatattaaatatttaatcgtggtgagtatgtgaaacacaaacaaacaaaaaatattaactaattatgtgtagcatatagtacatgacatatgtaaatactatcacttaacaaacaaatttatataaagttaattttcatttagtacatggttgaaaaact

SEQ ID NO: 47346 - DNA, 1018 bp, Arabidopsis thaliana landsberg
taaacttatatagttttatacatgtgatctgatcatatcagagcggccatgttcaattttattggaggacatgaggttctccaattccacggataattcttaattggcattcttatctatcgacatgacacgatggcggcgcacggagacattaagcaacatggcatgataaacggtagccggacgcaattggataagcatgagccacaattggggagcctcttaccaagctttttcctctctctatggtcaatctctctctttccgggtcacttcttacaccaccggtgaaaccatctatgcttggaacgttgctccggctaactggagcggcggtaagacttacaagagcaccgctaattttcgttgaaactaggcttttgccctaccaaacgaaaacggagttttctcttcttcttttttgttaagagtttcggtggccttttgttgtggtggcccggctttatgttatacatcgacatgtatgtataatgtatgtatgtatctaattgtgatataactcttcttataaatatcatgaagtcaacacttcttgatcaagagaattcgttttgtttctgaaaattttgttatttgtaaattttctaccaataaatcgcttgcttttgtttagaagacaaattaaaggtcttgaaccagaatttggaacagagttttgaaaattgggaatgagtctatacatatatttccgtatacatgtcagtttggtctaataataagtaccaaacagaaattaccaagaacaatacatattcagctattaataacatcgattagtaatatcttgattcatttcatttttaatataacgttttcccaaaacccctgatccgattaaaaaccttacttattggtgagtctctctctcaagatcttcacacccatatacctgccaaaatcattagcctttagtaaaaaaaaagaataagcatcaacataattaatatatatgattgattgtacctgccaagcatcataaccgtggcttgaggatttg

SEQ ID NO: 47347 - DNA, 1210 bp, Arabidopsis thaliana landsberg
  unsure (1)..(1210): unsure at all n locations
ttatttaaaaaatgtgttatcatttgtaattaatcactagcgtaattttatggcttttctatatattttattctgaaaataataataaaattagctaacaagtaattttttcttgttacttctgtttggtataaatcgttttaaaaaattcattaaaaaaaagttacgttccaccagaactctagagttaaagaaccaaaaataaaagaactcttaatcaagcaagaaaacgaatgtataagaattctaagtacgtaagcgtatcaattgagcgtatctacaaaatattattatagatgaatagttaaataattgtgtctcctgggctgctgttgcacttgtattactcgttttagcttaatcagttgtataaacaaacttataataatagtctaaagatgcttattagcatttgtattgagatcgcccaacacatctggccttgtttggcggaccgaaacattacaaggatctgcttttattaatttttatgatttgctgaagtaatcactgctcatagtttattacatgcattgccaacaaacaaaagattattacatgccacgtgggtagatctcctgataatccgtttttctcatccgttttgtcgtcgagacatgtgcaatgtaaatatgattattgctaatcatctgtatttagtctttgaccatgaattaatatttggatgatcaatttatggactccggacacctgtcggttcgcaaaacttatttttggtttccaacttcgtttagcggacaagaaaaattagatcatgttagtatgtttacttacgtctcttttagttttatttagtttagaatccatctagaaaatccaatgctcttttaatacgaacaatacgtgatatgttttagttctaaggactaatttgtttctgtaacttttctgattacgatgatgaatcaatcgtatgagaatgattagtttagttgatttatacatacattattttcaggtttaatagatgaattaacccaccaagaaaaagatatttaccttttgtgttggcatcatatggaccacttaaggttaataattgtgtcttcaactcaaaacgggaaatcaagataattttttcttaatcgaacattgacttcaactcttagaatacccactgttaataattagtgtagaaatccagantattcaaaattctgaatgcaaatactaatgtggttaaaagttt

SEQ ID NO: 47348 - DNA, 503 bp, Arabidopsis thaliana landsberg
caaacaaatttttcaggaactatttaatattttcgtaccaaccaactgagaatcaatctttaattccataccaagaacatacacaaaattattgtagtattaaaagatcacagtttgcaaagtgaaacgttgattttttttttttttaaaacctacaaattttactatcaatccgataggataaaaaaaaaaaaaattccactgtggtctttatttggccacatctccatatacagatttgtgacagaagcatctccgaaattttcatgaaccatcattatttcgggtgatatatagtactataacattaataagccttcaattcttattcaaaccttaatatagctagctagggtgttatatatagaaactatagacctatttctcaggttttctcattctatgaatcacctagaatgaaaaagaatccgttttgatgaaaaaagaatctaagatgtgaaaaagtgtaataaatggtgaaaaatatatagatcaagaaagaa

SEQ ID NO: 47349 - DNA, 616 bp, Arabidopsis thaliana landsberg
  unsure (1)..(616): unsure at all n locations
ggcgatgaaataggcgacggcggcggccgtgtcgccgaacatctccttcagcgcccgcgccccttcgcgcttcatgtcttccttttcctgccacgcgcgccgggcggcctcgaactcggcgtcgctcatcatttcgctgcggtaatggcccatcccggtcctcctgtcattttgcagatattttccaaaactgcacggttcggccgcgcctgtcaaacccatcctgtcaaacggctttcgttccggctacaatcgccgccatgagcaaagcaaggaacgtcggactgacctttttcaccaccctcgccgccgccgccgggttctatgccggctcgcttttcgaggggatgggcgagatcaagcagcagaagcttttcatcgaaagcgcctgcccgcgcaacgtcgcggtgcagatgcagctcgacgggatggacagcgcgccgcaattccatttccgcgggccgaaaaccttcgtctggaccttctcgctgccggggcggatgctcagctacgggctntatatcgacggcagcctcgccgaaaacaaaagccagcagattgccattccaacgcagcacaccatccacatcacgctcgacaaggactgcaaccatcg

SEQ ID NO: 47350 - DNA, 541 bp, Arabidopsis thaliana landsberg
attacttgctctggtgtcaacacatcaagcactcctgtaggtagctccctgaaccacgcctaatttaatccgaaattcaacaacagcaaacatcaaaccttttgaacttaaaatgttatagaaactaatttaaatctttcctttttcaacctttattaaacccgccaagcaatgaacatcaattccacgtggtaccacaccacagttcaactgtctacggacatgctcttctttgccgttgtctggatttattcggaaaattccttctgccttaaggtaaataaacaatcacacattatatcaaactcttttccaaactaatccgaaattttcacggaacagaagagggtagagacttactttaagacctccttcagtgtatagacgtttttgcatcctgagaaggattgttgggacactatttcctctgtcgtcgtaagagcattgcattgacttcgccgatactccaaatacacttacactgaattaaaataacaaaatctttactcatagaaaaaccaatatgttcgatcatataaaa

SEQ ID NO: 47351 - DNA, 871 bp, Arabidopsis thaliana landsberg
gcgctacgaaaacataacaaatatagggagaatttttattttttaccgaatctaatttaaactggcgataggtatctataaaacattaaagggtctgggagtaagcattttcatttaccttttcaatgtaggaccgaaccatgttttcaatgtccttcactatactatcagattgtccatctgcatcaaccaaaagaaatttgtcgtgtcatgccaaattatgtatggtagagaataaagtctattgcctcatgcttcatcgctagaaaaaatagaccaaaacttcttgctctactgtaacttaccaacagcaacttttgtaagccctggaagatctatcagtgtcaagttgacaactgcacacatagtaaagaggataaaaaattagagaatgaacaaaaagcacatacaactggaaagagattttgggttgtccttaccattgggagagtatatgctaaggtgaatgggaacactagaaatagccttgctgcgtccagtctctctgtcagtctcatcttgaatctccttcctcacagcagctatagaggtgattaaattaatcaaatatcaatggaatacaggagaaggtgaaacttgaactgcaaattgagatagccgaaacccaccaaaatcagtaaactttttcctcgggaggtgaagaaactctgcatactcccgggttccatcatcgatcttttgcaactgtaagacaaggggccttcgagtaacaatgcctacaaatagttaccgcaaatgcatattgtcattactcaaggaaataagcaatttcataattaaaactaagtaagaagtgttacactgtatttccagatcacggggtaaaaagtccttcccacgatgctctcag

SEQ ID NO: 47352 - DNA, 560 bp, Arabidopsis thaliana landsberg
actttattagattaacttaaaaagattaaatatgactattaataactatacaagatttcttttcaatttatatatatttttttaaaaaattctaacttactataagtcttccaatattattacatatatgtagataatttgtatacattaactacataagaattctcatcaaaattcagttttatttaatattattttcattttattctgtttttaatacaaataaatgatgatgcatttcttattttttataatttatgatgcaatactttgtgtaacatataaccaagaaaaccccgtgtagaagtcattttaacacgacgctaaggcaaaaatgataattagtacgtagaccacaacggaaaagcaaatcagtctcttgaggcaacattgccattaattcgactaaaaatataattaatgttttacatagctaatttacatactacaagtaaatatttttagaacgagaatcagtgaaacttttttttttttttggtagaaacaagaatcaatgaaggtagagcgtgccaaatagagcattagtcactgtacgcgtc

SEQ ID NO: 47353 - DNA, 1231 bp, Arabidopsis thaliana landsberg
ccatctgcggatagcaatcaacttcgggtcgctctcgatccaagtgaatggaacagccacatctttatccgtatacgccaatacatcaaacacacctaatacaaagaatgaaacagacacaatcaaaaacgagaatccaaagcaaactagtttcgaaatgatcactcaaagttcctatgaattggttcttacatgtttcatcaagacaaggcaagtaagtaacgcttgaagcaacctgtctcataatagcttgaatctccctcatgatctccttatcacttttctccctcgacacactaaaaagttccataaagataacataatgaaacaaagaatcaaagaaaacaaacaaacttgagaaaaaaaactgaccctttctcaacaacttgattatcagtctcaatacgaaaattccacctctccaagacttcaccagtagctttactcattataactaacactactctctgcaatttcccagcttcaagccattctttagaccaaaaacaaaatcaagtctcagattctctcacaagaggaatctttcaataaaattcatggaaatggaaaaatacattaccggagatctgagaagtgagattagacatgaaagatttgacggattcatcttcaataagcaacatcggaagtccatatttcttcactttcacaaaactttcctctggataaactgcacgattatacagaatactataccccagaaaaagcgaatcaatttcactgtaaaaaaaaaaaaacacaatcggagaattccagaaactaaaattgaaaattcggattcaattctcacctgttcgcagcgtaacctgttagaagaagaagaagaagaaaatcatcaaatcggggaaaatggaatgagaattttgaggaagttgagtatgagaaatacccacagaagaattcactgaccatggcagcaaatccgtgtaaagtgatgatatctttagcatccgctgatttggaggccatggaagcgattttttcagatgaagaagaattcggaaggatcggtgattttgaaaattgaattcgcaacatgtgagtgttaatgcgtcccttaaggttttgatgattctgaagatttttgtgggaaggattaaaaagaaaaaaggcaaaaaaaataggagtaagagcgtaacggctagtcttcctcggaaattcgcttgcaacgggtaatatgtgtaattagtatagtttaaaatggaaagaa

SEQ ID NO: 47354 - DNA, 461 bp, Arabidopsis thaliana landsberg
  unsure (1)..(461): unsure at all n locations
ttgctgctgatggtcttgtattgtcagttgctagggctctttaacaggatagttgcgtacgcgattgtcaggatacacacatcgagtcactcaaattaggaaacaactagtatagtacctaagagaatacctaaaccgaatctgtacagaatatcacatatgataatgaactctattcggttagaaagaaccgagggaaggttttgcagggcgttaaggcttatggtccagctgaattacgggctacaaccaataagtagatgccacgtcgtttagttcaacttgcttctcagaaaagcactagctacatctactaatgtaaacgtgccnagttttagtagactacgcttgaatgagctagatgattagctatactaatcacctaaggtaacgacctcgtaacttgagancaggtatttcttaatatgaacaacgggattagcctgtacagcgtatggggg

SEQ ID NO: 47355 - DNA, 831 bp, Arabidopsis thaliana landsberg
cattattctacttcgcttgttcaaaactaatcacaccctattatttaatccgcttattctacaattcgcttcgctatcactagatcaaatgtattttaggttttaaagaaaataaatgttttcgatgttttgtaacgatcacttaggttcaaccaaatacataccacatttttaattggtcacaaagatacatattatagaactcttagcatattatccttgattaagcaaattgcatgaaaaacattgttggtgtccatggaaattcataaaatcaaagcattcatgcagactaagacagtaagaccacaatcgcaatccgtcaaggtgacccaattatcatcgtggacgaggacactgaagtgtggaaaaacctagatacgagaaacccatctcttcaagtcttcaactcataagctcatctccttaccttttaagatcaaaagcccatattttcagttcacaagtccattttcttcgttcataagcccatctccacaatttaagtctacgagtccgacttctcagctctaacttcaagtttataatgatttcaaagattttctgtttgatattatgttaatcttagacatataatttcgacactcgtctcaaaattttggctgcaagacatagtatcatattatacatatacaaacaccataattcctatgagcaaatttgcaagcaactcagcttaattatgaatgttagtgtgtattcgatataagtgggccgtagagtataatgactttaccaagtctttatctgtcggacggacacaccactggcaaggaaccataatgattagaataaagagaattaaagact

SEQ ID NO: 47356 - DNA, 1041 bp, Arabidopsis thaliana landsberg
  unsure (1)..(1041): unsure at all n locations
gttccttttgcagaacgcaaaagagagatagattaggatcttgagttagtcgttaatgaaaaatcttaagatgcttgcagatcgaaaggagagcttacttgggagagctttacatagtatccgtctttttcattgattggtacgttattttcatggattnnnnnnnnnnnnnnnnnnnnnnnttccatgatcctatcgaccaggccatggataagctgaatcaagaattatacagagaaagcatatcaattgatgaagttgcgcaaacttgagaaaataagttacataacgacgatatcatagttagcaaatgaaatccatacctcaaatccagaagtagcaccacagtatagtgcagcgagatggcgacgattggatgcaccaacgtctttgctctcatccaacatgaccacatcactgatttcaaaaatctttaacagaaagaaaaagatttatcattcacgggacactaaaatctcaaatctagctaacggcaccagagatatgggtttaccttaattggtttagggtatttattgttgtgaccaactgtcttcaataatccgggcatgagagccctcctcatggcctatttcaacatataatgaaacaattagcaaagcattaccattggaaaagtttacaaagagatgaccaaattatttgaaaggaacctcaaaatcagcagaccgcgggttcccaactatgacggctgaattaacatcctctctatttagcatcgcaaagttttccttatgtgagcatagtagccacgttaccacctccgtgtacacacacatcgcaatctaaattcaaaatataaaatagataatttccctgagaaacaaatgcttaaaagtaatttaacaagaaacacagacacagatctctgtgagctgatgcaacagttaaatggaagtgcaaatacctctattcttagaagatcagtgagctcattcaagtcagtggttttattcgagcaggctttcttgttggaatgttatttgaaccataggcaatggcaacatcctggtgaaatac

SEQ ID NO: 47357 - DNA, 353 bp, Arabidopsis thaliana landsberg
  unsure (1)..(353): unsure at all n locations
tgaattatattgtgaggggtatcagctagggtaacattaaggctgctcatgacggtgtaacacgcagctcacgtcgctctctggtgggtgcaanaacngaacacttggtcaactntgctccacaatgataggaacagccgccacttgaaggatcaacaaccaacgtngctacgacngcttggntgctcnaagntagttatggacgtggtaacctttgtgctagctctaccttgccattcggaaggtgcaaaggatncacagccnatggtcttnaccctcggtattcgtantgacactcacactgaaanccgntcctagggtcttgtcgccgaggccattcntgttcccctcga

SEQ ID NO: 47358 - DNA, 890 bp, Arabidopsis thaliana landsberg
agagtagggccataaaatgaaaaattccttgcacatgctattattgtccgtattgtctaaaccacgcgtttggattctgcaggaattttcgagttataagggactatgtttcaaatcctacaacactgaagaaacgactatttgaggttgggctcgatatgcttcagctgacaccgattctagacatctttatgttggtgtatttattcctaaggcatgctgaacagttctacaatcatccaagtactgcatcttctcgaagatggtccaatttgtcaaagtggctcttcagggaattcaatgaggtagttgccttcatctggcgtccatgcccacaaaagtcgtgtgaacggagtttaattctgatttcttagtaaacctttgaaattttccgactctctccattcaaaataaatgtgatgccttttctaaacttcttgtttctacaacaggttgaccatttattcaagcatcggattaatagcagtgtagtacatgcatccgaatatctaaagcaatttccctcgcctatcatctccattattgcaaagtttgtctcgtttgtttctggcggctttgctgctgtcttaatcatcattgcgtttcttgaagaatctctacttgagggacatgtaagaaatactaacaacgcaaaaagcatttgatagataaattatttgggtattgaagtttcttttaccacctgtgtagatattcggccgcaatctgttctggtatgccgctgtttttggaacaattacagctattagcagagctgccatatcggatgaacttttggtcctcgacccagtaggaactatgtctttggtggtccaaaacactcattatatgcctaagaaatggcgtggaaaggagaacaaggatgatgt

SEQ ID NO: 47359 - DNA, 538 bp, Arabidopsis thaliana landsberg
  unsure (1)..(538): unsure at all n locations
gcagaagtctcaataaacagtctgtcctgtcaacgaatcaggatcaagctgtagtgtcaggaacctatctccgcagacttgacgtacagctttgacatacactgtaagtgacacagcggccacggtnttgntancaagtggcgtctcttcaggactcgacatgatcaaggaccnattgncagaaaacctgaaactcaagtcttttagcttactcactaccttactactggttctcgtaaaaccagntattcttgttgtctgggatacatctcttttcttcaaggaggtcgtttggctgtacgtatacaacgatgatgagctcccgcgtaaacaagagggcttaattttgggctctctagttganatacgnaccatcattgactttctacnctccaggatgctaataccttttncttttctaatgtcaacctggccaacattaacattgaatcacccgtgtgacccattcgagaactgcgcaaantactatgaccagccttgagatcagtccttctatttgaatgggaaaatgctttgt

SEQ ID NO: 47360 - DNA, 433 bp, Arabidopsis thaliana landsberg
  unsure (1)..(433): unsure at all n locations
tggcggcactaagtatgagtgtcttaagctagngaaatgcgtagttatttaattagtgacgtgcactgactggattaacgagcttactactctcantgtctactatcaagngaacgtanagctaagggaacgggncttggagaattagcggcgcaagcacannctgctgacnctcantgtagtnngactttgcgaaatgagttgagaggtgtagcgataagtgcggagcttnggagnaagtgccatcngattaattttaangttattttcgttacttggtcaattggaggcggggtacacncangctctttggttncaaggntagnttcgggcgcttgatgtgggccgagganatcgctcacgtggggcgcttggntggcgcggcacacatgttaccagataacgcacgtgtcctaagacgagntcaacgaga

SEQ ID NO: 47361 - DNA, 475 bp, Arabidopsis thaliana landsberg
cgtcgaagccggtctccgccatgggattgggcaggccggcgttggggtagacgcagacgtaggtgtcgcagatcttgtacagttcagcgacgtagggccgcatgagggcggccccgagggcgcagttcaggccgatggtgacggggcgcgcgtggcgcacggaattccagaaggcttcgacggtctggcccgagaggatgcggcccgaggcgtcggtcacggtgccggagatcatcacgggcaggcggatggcgcgctcttcgaagacggattctatggcgaagatggccgtcttggcgttcagggtgtcgaaaatggtctcgatcagcaggaggtccgcgccgccgtcgatgaggccgatgatctgctcggtataggcgacgcgcagttcttaaaaagtgacgttgcgggcgccggtgtcgttgacgtccggggagagggacgcggtcttgggctgggggcctagggatccggc

SEQ ID NO: 47362 - DNA, 471 bp, Arabidopsis thaliana landsberg
cccccaaaattaaactttgtttgaatcacacaaaagtttaatttcaatttaaaatatataatccaaaccgtaaacttaaggttatataccacacagatataatttgagctcttaaactttgtgtagttaaagattgtaatttaaaactttctttaattcattaaaaaaaactatacaaatcctgtatggttagatttttttttcttctacaagtatggttagattctgatttcaaaattttgtggagctatgtctataaggcatgtgcataaatacacacatgatacatgcataacgcataaaggctaaagctataagaaaatactataaacgtatgtgtcctgaattcaaagatcttatctgaatcttcttacaacatactatcaaatataataaaagattacaaaagttgccaaacatttgaatacgatggcctcatacttagaaatcaaacagatggctgttagaagc

SEQ ID NO: 47363 - DNA, 815 bp, Arabidopsis thaliana landsberg
  unsure (1)..(815): unsure at all n locations
aaaagcagatagagagcacttctcgttactactatctctccaagcctttttgcctaattttgtttctgatgaatctctaacttcataaagcttaggcctttggttgaatcgtttgtacatttctaagaaaaaagagctgattttagcgatttcgatttgagtttgttaagtgataagagtctgaagaaatgggttgtgctgcttcaagaattgataatgaagaaaaggttttagtgtgtaggcagagaaagaggctaatgaaaaagttattagggttcaggggagaatttgcagatgcacagttggcttatcttagagctttgaggaacactggtgttactcttaggcaattcactgagtctgagaccttggagcttgaaaacactagttatggtttaagtttgcctttgcctccttcgcctcctcctacattgcctccttcacctccaccacctcctccatttagcccggatttgagaaatcctgagactagtcatgacttggctgatgaggaggaagagggtgaaaatgatggtggtaatgatggaagtggtgcagctcctccgcctccattgccgaattcttggaacatttggaacccttttgagtcacttgagctgcatagtcatccaaatggtgacaatgtagttacacaagttgaactgaagaagaaacaacaaattcagcaagctgaagaggaagattgggcggagacgaagtctcaatttgaggaagaagatgagcaacangaagcaggaggtacttgccttgattaagtgttcatcaaatagaggctgttagtggctgtaacatga

SEQ ID NO: 47364 - DNA, 805 bp, Arabidopsis thaliana landsberg
aaagttagattttgtttacgtacgctacaatgttgcatatattaaattagtttgaatttgttgagtttactttggccgagagatttgattccacttactgctgaaagtactggaccaaataaaatgaaacaaaacaaccacaaatttgttagttcgaatgttatcaaatacaaatgtttctagagagaagttcagctagaaaattgtttggacctatgactgtcttttagcatgtgcaattgtaacacttgaacagagtcccaatttaaaagtttaaatatgcatataaatttaagtatataattctgaaaaagaaaaagtctaacacatcaaatataccattataacaaaaactttcacaatgtctacaaataatagtttaatttgtgacaacccctggtaatacctcaaggtctatagtattcttaagatgattggttagttacctgagatggaaggagtaaggattccatcaccaatgaccatggaagttcccataatagtgactaggaagagaatgatcttagcgaatttagagttctcgagcttctctttgatcatatgggctcttctgagctgtgtggttggaagttcaagtgtatagttggagagttctacatcttctggttcttggtttggaattagtcccattttcgcataccgacatatcagtgagtacaatgcaaatgttcctcctgcgtttaaatattgtacataagtaacttttctaatttcttgacaaaaaagtaacttttctaattaattaatcaacaaaaaacaaacatgtatgttatttttcggggta

SEQ ID NO: 47365 - DNA, 517 bp, Arabidopsis thaliana landsberg
  unsure (1)..(517): unsure at all n locations
aactgagctgacggggcttttgggctacagtggaacagtatcgccaggtcctgtacgtagcgctacnnnnnnnnnnnnnnnnnnnncggtctaaagagacctgtgcttaaaaagcgcctaagtttcgaatggctntgaaccacgctcataaagccttatgacctcgccaaaggagcagctcttcactgtactgtagactgccgatctgcaagctttcgcgcttcaaagggctgntttacgcgcatgggaatggccgttctcgtatcacaacctaaacgtagcactcgactttattagtaaggggttgcgtcgcaagcgcagactcacctaagttccggagagacagttgttgcncactgtccttgtcgtcgagaactggaacnantatgtcgtagggcagcagctgcttataaggacagatgagacgactgtgaactacatggtgtaatagaaagctgtcgtcagtatacacgccagatgnggcatcaaattgtcagtttggactatgacattgact

SEQ ID NO: 47366 - DNA, 802 bp, Arabidopsis thaliana landsberg
  unsure (1)..(802): unsure at all n locations
gcttgagataatgatgagtgggagaaaagcaatgaatccaaggacgaaagcggtgacagtgattccggtgagtaaaaggagtattccaccggaaatgaagaatgcgaggaagccgaagagttgaccggagtgattaggagactgcgattgtagtagctgacggagaagagatgagagggggtggttggtggtggtgttgctgcgagggacggtggttgagttatagatgggtctctgttgggtgtnnnnnnnnnnnnnnnnnnnnnnnnnnnntttcggcgaggagagagagagatgtgtgtgaggtgtgagaggagaaagagtgaaacaaatggagacaggtcaaggaagtgaaggcgcatgcatgcaaacacgtggagtttcggtcttgttttttactaaattgttcttttaaaaaacaatctaactgcttgtatctaactaataatattcaatttatttcatggcattcttttttcctgttccaaattggattttggttggcaaaagttaaaattagtaagtagatatatgtattcaataagataagagtgtgtagttcatggttataaaatttagacgaccgaattgtagctcatatagcactataatgtccttttaaccggataaaccttgtgtggcttaattatcatttctctgttgatatttcgtgatggatcctgatctttagtttctctatttaattatcctggatccttctttcaagctagttgtggctttccatcatgataatttggggtcatggagtgccaaaagatcatatacatgaccttagatattc

SEQ ID NO: 47367 - DNA, 1210 bp, Arabidopsis thaliana landsberg
  unsure (1)..(1210): unsure at all n locations
atttacagttacacgtctctgtatgtgaccgttcgtttttgtggagacagtagtgaaatggagcctcgtgtagccaccatgcattggactcaggacctttcactaaaatgttcatactttaacattagcaattattacgtactgttgtacatttggatttctgcagctgtacaatcatatgtaccatgtacaacaaattatcaaaaatttcaccgaatattgtgacggtcaaattgagaatcatctaatcattgtgtgtgagagagccgtagaaacaagtatataaatggattaggcctatatggacgaaagactcttcaagcccattttgtaaaaaggcctatcttcatggtttagtttgaacataaaagatttagtacccaataaaatatgtaaatctctgcagattagtgtatcaaacaatttattatttaatttttacccactaatccgctatatttaatcatctagatttgtttcacagcttttatatgcataacgtgatataataaatgcagggttgtaattagtagacctccattggttacgaagcgtccactactaagaaaatactaattaaaaacaaaataatctatatttgtgatctgaaaatgaaatcatgtaatgtatcaatatgtgggttttatagttggtaaacacataaatgacatgaccgtcaatttcggagctctacctggctcattatcgactatattatctgagataatgttaaattatttgtataaattttgttgcaaatcacttttaatggttttctgtaacaaaaacgaatatatgatattattccaaagaagataaagctgtatcgacctatccaaacatatagtattacgttagatagcttgctccacgtttacaagcaattgacaattactcaattagtgacatgaccacactataatgctttcacgtaacatgatgattcaatctcatagcaatatacattaatgtttttatatggactatttttaaagtacatatgctcgattcgtaatttcattcgaattttgactttacggtttaacaaaatataggaataatcaaatttaaaataatcctagtttggtaaggttcggtacaaaattagtttcactgttgattccttataaaatatatcttcaaatttgagtaaatttgacattgaanccgcttttaggattgggtaaaccatttgcagcatggcaaaaag

SEQ ID NO: 47368 - DNA, 1253 bp, Arabidopsis thaliana landsberg
tcatgaagaattggagatgactattattgtagaccatcattgtacatgagtatgcttttgacataattgagaaccaatgttatatgcctatattaaataaccttcaatttgacggagaaccttcaaattatttaaagtaattaaagatgaaagaaaaacatttcagaaacttttaaagttttgcattaattataatgcttcaacaagttgcttacaagttgtgaatgcttatgtaagacattgacaagaagacaggtaatggtcactgatgtggcactgatgaattgcgtccattaaaatgagaagttttatcacaaaacacatcatattttcagaccaaacgatgaacaagttgccataaaaatattaaaaagcaaaaagcatcaacatagttttgttttctgttcaattttataataatcataacaataattgatacgttacaatttcatgtaaactatctagctgtcaaatagtaaaaacaatattttcttttgaacattgtaagaaaacctcaaaagtcaaaactgaaaaaaagaaagtaatttcgtgaattatgtactaaaaaattatatactagtacacatgaattaaattttactttcaatcatgtaggcaactattttcattcaacttattcttgtaaagacaatgcaaaacgatttgaaacaaaagaaggaaatggaagttagggaaaaaaaaatggtaaagaatatttacaggcaaaataaacatttcttcacattgcaagtgctcgtggtcgctacaaaagtaaactaatcttaacgtagctaacaagtaattgcttcaaaactcgtaaaagtgaaatctttggtcttctcttatgtgaactcgtatgatctcaaaacttgcacgatgtaccaagtctctgtgtgttcctcaacgtcatggtcttgcgttctgcaaaagccgagtaaagcaactcctgaaacctctccaagaacacaacccattcaacttctttcatgtcggctaacttcacaaagtttacgctaagcgggagctgcacgttcgcgctcttgtgacttaccaatgctttgtcggtttggttgtctttcggaggtttcaggtatccggatcccatggggtggcttagattgtacttcattgatgtggaaagctttgagagagatagagtaagtgttgcctgcttttcggcaccttgttctttttcagcaatgcttctcttggagctctccaagagaagaacgccccgttgaaaatgggctctt

SEQ ID NO: 47369 - DNA, 942 bp, Arabidopsis thaliana landsberg
tcagacccacatttttctctatccaaactcttgagaaatgaagactttttcaagcttctttttctatgtacaactctgttgttctcctccttggtttctggttcatttcaagcttcaccatctcagtctttatacagagaaatccatcagcttataagcttcatagacgttcttcctgacaagaatcttctcccagactggtcttccaacaaaaacccgtgtactttcgatggcgttgcttgcagagacgacaaagatacttcaagtgatctcagctccaagcctatcaacgaccgattcagtgccgcgtcctcgtctgtcctgtctctcaccggatcatagtctctgtttctctcaaactcacacatcaatggctccgtttctggcttcaagtgctctgcttctttaaccagcttggatctatctagaaactctctttcgggtcctgtaacgactctaacaagccttggttcttgctccggtctgaagtttcttaacgtctcttccaatacacttgattttcccgggaaagtttcaggtgggttgaagctaaacagcttggaagttctggatctttctgcgaattcaatctccggtgctaacgtcgttggttgggttctctccgatgggtgtggagagttgaaacatttagcgattagcggaaacaaaatcagtggagacgtcgatgtttctcgctgcgtgaatctcgagtttctcgatgtttcctccaacaatttctccactgggattcctttcctcggagattgctctgctctgcaacatcttgacatctgcgggaacaaattatccggcgatttctcccgtgctatctctacttgcacagagctcaagttgttgaacatccttagttaccaattcgccggaccaatcccttcgctacccgttaaaagtctccaattaccactctctggcccgagaaca

SEQ ID NO: 47370 - DNA, 776 bp, Arabidopsis thaliana landsberg
tggtttgttgtcttttaacacattctctctgtgtaccaaatcaagatcaggctaccattacagagctcaagaacaggagaacaagatacatttgtggacagatggatcggagcacatattgaagactgtgacaatatcatcaagaagcctttgctgataacagagtttgggaaatcttcaaagtaccctggttttagcttagagaaacggaacaagtttttccaaagagtttacgatgttatctacgacagtgcaagggctggtggttcgtgtactggtggtgttttctggcagcttacgaccaatagaactggtctgttaggtgatgggtacgaggtctttatgcaagcaggtcctaatactactgctcagcttatcgccgaccaatctagtaaactgaaaaacctcaagtatccaccgttggtcacacatagtgcagaatgaaacagtatagatacaaacagtagatattagaatgtaaaaataggaaacatgtatagttgaatatgaacaaaagctaaatgatatgtagaatagttgaatgtcttttgattctttcattggaaacaacaacacattatattgaatatgaacaaaaagctaaatgctatatacaatagacttctttttgggttgaaagtcgttttatttcattggtcacaacaacacagtgggaaattatgtattacagagtagagacacatattcctgtttaaaatgatgaaacacgaatatcatctgaagtagtaataccttttaactacgtttcctgtctg

SEQ ID NO: 47371 - DNA, 1514 bp, Arabidopsis thaliana landsberg
tatgacataccttgagacatttttaactttaactttctgtgcacaagtcggtttcccttaaaatggtggcatattttcaccagatatctgctgtgagtgcattaacttcccaaaatcatgctcaaatctctctgtttgatgtttttcaacagcacatctgtcactgttttcttcctggtttccagtgaagaagtttgctaccataccagatctagaatctgcttccttcgaaactgaaaatgctggcgtttcaatttctttctctagtacgggggatgaatgttgcaatgagtccaaatcctcaggaaatactcttgtatctgtgcaagaaactggaagaaaactgcttggaacctcagaagggatcagagcacccggagcacccattaaatcaataatgtattcactgcatgtgaagaacgaattaggactgcaaaaatcactaccatcacatacaaactgagcctaatatcaggaatctagaatgcaaacaatcaaagaataccttttgtcatctagtttaatcaagttcacagccccatcatcagttccagtgtagtaactgccttttaccaacatacatgggagattaatcttatcagcaaggacctagaaaaaagaaaaggatgggagtaattagcttcaccgtacatcttctaaccgtgaccaaaaaaggaactcagcgatgaaaaaggaaataatgagtgttgccactagaatccccaaataagataaccaagcgatttaagaccaaagaaagaaacaagtaagaggatttgttataaaccttgaaaagcaaagccctgtgtcgtgcaagaccaacattaactcgaccaagtggaagaatagtagtgttcaaagaatttcttagttcatagctccgaagcatccaccttctcaatgcttcatcagcattttcaacggggccacccatttgctctacaactatatttgcaattttctgagtcaaatcacttgacacctgaccaggagcaaagtctggacattccgaagccaaagcggatactctcctctctagctcttgtagttcaggatcaatcaatctgttaactagaatgacctcataatcaacattatctgaaatagagatcgcttgaagatcaacaagaagtggcatcttcccctgtgaaagagaattagatgtaatcccatacacatcgtaaaatccatccctgactttctggtcataattaatgaccttatgtccctacaagaaaaaagaaacatcagcttaactctcccattgtcatataaccaaggcagaaaccatccacattgaataaacccaaaaatggaaagttacacaattaggattcagaaatactcgcaacgaagagaacactgcaggcaatagccaagatcctaattcctttaaaccctcgctaatcgagcaaccagactccctaaagccctaaatccataggaatttgaaaattttcgcataagcaagagtcgagatatagagtatataccccataacgaagcgaaaaaaa

SEQ ID NO: 47372 - DNA, 339 bp, Arabidopsis thaliana landsberg
  unsure (1)..(339): unsure at all n locations
ntcgctatggcaccgacagtgggtcattacctatgataggacgaagttgggcgaaatacgtcgagcttgactgactgatcttgcaaaattagcgcatgcgttgtggttacgggtgaaatgncacttgaccgcagaggtagctgcgttntcctnngaaagtgngttgacgccgnagagcttgantggacacctaggggcaacacnantgttccggtgnggcgctggagagctacatcacttgagggaaactntgcatantagatatcgcctcaaaataactggggtccaggtcggcaagtgacaccgtcggggatacgntcgaccgccgagagggaaaca

SEQ ID NO: 47373 - DNA, 788 bp, Arabidopsis thaliana landsberg
ttattgtaagcagcctgccaatattgcattggcatgccttcccggatcccatctatgtgcatgccttccacggatccatctatgtttacgtatttcaataataatattcaaacacgaactgaaataactacgagaattgagcaactgtcagcaattgttgaggtcactgtcacggcagttgtcacgcttgaggcaacgctagaggcagttgtcacgctagaggcaactaccaagtcatgaaaacatctaataatttcgacactgcttatatatggcaaactcttccgaaagtgatatgtcaatgtactttaacaaaaaaaaagtgatacgtcaatgatcgacttgtcgtaaggccggcccaaagcaaaaaaaaaaaaatacttatcccatcataaaacttacaactaaatattttttataaaataaaattattgagtttgaccgaaggaaatctttttttcaaaagatgaatttaacccgatataaatcttacttcttacagatataaaaattttcgaagttgaacttccaaatttatagaaaaaaataatattttcataaaaaaaaatactataaatgctttaggagagaaagaaagtctggaaaataatatctctaaattattttatagatatatttgatgtctaaagtgcgtctgggttgggcatgtgtcgtacttacagttaactgatagaaatgtggatatcgtgattgcttttagctagttttgaccaatatcatttaatgctaggcactcttgtatacaattctttaaaagattataaaaa

SEQ ID NO: 47374 - DNA, 1124 bp, Arabidopsis thaliana landsberg
gaaacaaacaacacactttgttaagaaactttacattcgttatagcgtagctgcctttagttaactatccccttcacaaaattggcacatgctcaaagaaaatgagtgatcaattataagaatgaatgaggaattcaagttgtaacttgatcaatagtttggatactacaaagaaatgcaaatttgacttcagcagattcctagattgcaacctagatttataagaatctatgacgagttcattaaaaattgcttttgttacctcatcttctgagagatatccatcaggcaccataaagtcatcttcactatcatcttcatcatcagcctttgaacatccttcttccaaactttcgtcttcatctttctcacaatctgaaaggctttcaccagcttcttcctgtaaagaagtatctttattacccagtgatcttttgtcaagtttaaaaagcatgtactgaattcaataaacctacctcttcccattcttcatcactatcaacttcataatccaattctggatccttttgcagaggacgacgtggctttacaacttgactgcaaatgttaaacaacagatccctcagtaccattgtaagcaaacttagagagtgaacaatacttaattgaacagctagatgcatatcagaataacaaatggtattgtcgtatcagaatcacagagaacgttctgtacattacaagttcactacaatgattgttcaatccaaattgaaatgcattggacgataataaccacagatccaacatagacgatggttagttaattaaggaatcagaacagggtaaagtagcgtaaaagtatgtttacttcataggtcatttatcatctgctttattaaacaccatgaaaaaagtagtcacataggcagcatcggaaaactttatgacttatgcagtgaaaattgaaaaatgtttcgcaacaaagctaatatcaaaaaacagtaccaaacaaacccaggggaaagcttgcagttagtcaaggctttttggctaactaataatctatattatataagcttactgctgaaatgaaaattttcaaaataattactaacctttggctgggccagataccataaaaagcctggtctgcaggcttt

SEQ ID NO: 47375 - DNA, 298 bp, Arabidopsis thaliana landsberg
tgtctgtttacaccggcttctccattggccggtccatttctgagaaagaagagttcatattgtgcagaggggattcagaaattcccgagtcctggcctacctgaagctagagaggtatcaacacctgttctatcgagtcctctctatgttgttaagagggaagggcacactacggttgctgaatgtggcgacgtctctgatggtcttgtctcaacttatcttgctcttcctatcatatatgcatggggcatggctgtcgactgaacactccttgggtgcattgggaacttgtgctaca

SEQ ID NO: 47376 - DNA, 855 bp, Arabidopsis thaliana landsberg
gagaatatattcggtaagacgtgaagaggatttatgtgtttgtaaataaaggggacatgcagggcagagtgagagataaagttttgtttcttttacaacattggaatgataactcttccactcaacttcacaatatgcctcaaaatttacttgtcccaataagcctgcctaaaggcacctttcttccaatatgcatgtccaaatttatacataaaacaacaaatactcgcataaaaaatttgatgatcaagcgatcgatactgttacgtctacggctatatatatatatttttttcatatgtggactacaatgtatacaaaaaatgtgtaacccttttttgtcatgtataaagatttgtttccaactcggttgttatgtcaaattgtaattttgcaaatttggtgacaattaattacaaacatcaactccgcatcccaactcatgtattgatcaatttagcaaaacaaacatcattttgagtaaaaatctttatccaaccttaggatcatgatgtacaaacgatcgatcacttagccaactctttttctcatttctgttttcagtaaatgatcttggaaataaacaaaaggaatctttgctttatttgtatctgagattttgtcttttcccttacttggccccatgaatattatttcttagtacacacgtatacatattgttatgtatatattagtgatttagttctaattaagttcaaaagtttattggaatagatatagtctgcaacattagctaacatttttctacggttctaccatctactacaaagtataacttcactctaatgtatggaaaataaaataattaaatggcatagtcacgtaagcgaaaaa

SEQ ID NO: 47377 - DNA, 856 bp, Arabidopsis thaliana landsberg
gcataagttattccaaatggtccaaatcgaatagtcgataggacataagaatttagtaggaattatccaaaatagtgtcataatcacaatagtatcatggactggctccaatatggatgatggatgattgatttggttgatccatttatagtttttggattaattattgggacagcatgtgaaaaacaatcttttctatgtctatcaattccacgcattttggatacaaatgatacaatattaactatgattgaagagatgaaagaagaacaaacaaattaacccaataatatacaagcaaaatccacatataattatgtgcaagaatattatctagtacatatgtaatgtgtgatttattttgaccaaaaagaagatttcgttcagcgatgagttccccaatccaaataacgtaactctttggaactccaattttttcccatgtctcttacctctctttttctatcatataaagttccatttcactcaagattttagataatcttcacctaacagaccggttgaaaataaattgactaattaattacttaattcataatataacaaattttaaattacatttcaagataaccaaacaaggacgtttttcttgtgattttgttattcataattggacatgactcgtaggccaccttttataaaaaaccagctgatttttttcttgggaaaaaagaaaaatacagaaaaaattacataaagaccacaaaactcaagaatacaaaagtgaaaataagaaaagtaaaaaaagtaaaaatatgaggggtcaaagagacctattgaaaatcttttgacccggtgaaagtatagccatgtgatcaaacatagctttcctatc

SEQ ID NO: 47378 - DNA, 895 bp, Arabidopsis thaliana landsberg
acttttttttttatgtgataaaagaaaaactgaagaaggccaatgaaaaatgaagatcccaaagacataaaaagtgacaaaagagaagaataaagaaagaccaacaacaccacttgggggaggctcccatacacaaaacgaaggcgcgaatttcaaggactcttctcgacgaccaaaccacataaaacactcttaccagaattttgtgttgtcttcgttcatttccttctcctcttcttcttcttcttcgtcgtaattttgattgtttctttgcgaaaagtcgtttttttaatcaagtctgaatcacgttttattgatctacactcgcgtgggttctccgtttcgtgcttagatcagagagctccctcccgtgattccgtaagatttctgcgtttctcattacttggtttcatttcaacgtagattctgaattttgtgtgatctagtctacacatttttttttaattctttcctctgctcctaaattccagaattcagacaacggttgcgatatttcttatgtctttttttctatcgttgttcatttcagaagtttcgatataaaaaaggttattgttggattttgagtaacacattgtcactcaattctcatcgttcttcaatcaaattttggattttgagcatcatggatgatggatctatgcatctcgattttatattggacagaaagaatgtttcttgttttgttttgatgatgttttcttatgacaacaatcttcatgtttttgtaggagctctaaggtcggaaatggcggctcatgtttctactggaaacattcataatttctatcttgcggggcacgtttacaggggacaagctttttcatggagttctgcctctactttcatggccaatacattcaaagagccctct

SEQ ID NO: 47379 - DNA, 979 bp, Arabidopsis thaliana landsberg
ccctgaaacacatttctaatccatatcacaaggtttccaggcttaagtttgtaagatttgtctctttactagaaaataggttaagttgagcttgcacagggactgtaaagactttccagatgacagagaaccaacaacagatttgcagctaaaagtagaaagccatcctgaaatctatatagcatgtgtaggtcagccatgaaatgcaagccatacatcaatttgaacaggaagaaccacggtggtacccacattgttttcagagaggtcaagggatgaaaggttggaagaagaatcaagaagtgtagagaaaaccatcctcgcaaaatatctatcgaggttgctatcgccaaaatgtaaggaatgtaaggtcctgaaagaaaaaagatgctcactaaaagtaaaatgaagaaagaagtacataataataatattacaacctttatgaagagactttgatagccaaatgagcaaacatttaacaagacacgttttggcatcagtccatatatatacctcaccgacatcaggaatgaaacgaaagcggaaggcgcagcaagtggatctatctcaatgctagatgtctttatacagaaacgttgcatcccagttgtgtggatacccttttcatgaagagaagtgcatattgcactgatggaactcaaagaaagcttgcagtgaataagttcaagcgaagttaatgtttctcggctctgaatcaagagcttgcacaagggctcaacctggagttcatggaacatcagcaataaaattccagctatctaaatctagtagactaaatagagaaagcgtcttacatgcttctcggatctgatccaacgtagaaccaaacttcgcaatttacttgtcctcaataactcctacagtaacaaagcctaaagattatctctgtcctccctctagaggttgaatgataaaatcatcaacaaagatacaaatttaagttctagagagagat

SEQ ID NO: 47380 - DNA, 372 bp, Arabidopsis thaliana landsberg
  unsure (1)..(372): unsure at all n locations
gtccttcattcgatgaacacggaagaagctccaggcgttgaatgccccaatgtcttgcaagagaggcgtgcttcggcaacgcggacacacctggtgactggtgtgtagtcgtgcgctaagtgttggcttaactatgcaancagtgcaaactngtgtttagtccnanngtcgcgtttgcaancctgaanacnnnnnnnnnnnnnnnnnnnnnnnnnnnnnnnnnnnnnnnnnnnnnnnnnnnnnnnnnnnnnnnnnnnnnnnnnnnnnnnnnnnnnnnnnnnnnnnnnnnnnnnnnnnnnnnnnnnnnnnnnnnnnnnnnnnnnnnnnnnnnnnnnnnnnnnnnnnnnnnnnnnnnnnnnnnnnnnnnnnnnn

SEQ ID NO: 47381 - DNA, 1043 bp, Arabidopsis thaliana landsberg
aacccttcgttctctctgttgggttctttgctttacccttaagtaatctcttttttgcctatggtattgatttgccatgagtttggcttactacttccttttggtgttacgtgtggattagttttattcgaaccatggttgcaaatttctgtcctttttcagcaatcgtgtccgatatttgactttctgaattctgacgaaatctgtgtgtttttgatcagaagctgtgagatgggtactcgagggaacgaggaagaggaagattggttctctgatgctcgtgaagaggtttcatctgtttctgattgtaactctgaagtcgccgatgactttgttcaagcaactggtgatttagatctttggactatgaatccagagagtgttactaaccgtagacaaaagttttttcaatctatgggttttagtttcaaaaaacgagactttgatcttgatcttgatctgttgggagactctagttccgaccatatttcggtttcgaaacagttgacctctgtgtctgaaactgatcacgaggaggaagagaaggaggagaagttgttgaggaatgaatctacttcctctggatcctccgtttcgtctttctcaactgcttctttggctgaagcatttagtttcagaggttcttttcagaatcgtgccaagaacattgatgatcagattttgctgacgagagactattcaagtaatagtagtagcattgctgagggattgagtgaatctgattcgagtagggtcgatagctatggagatttaccgaactctccaatgagtccttatgaagaatcgcctaaaaaaggagctaaagggtggttaaagaagttaggtgtgttaactcatgttcttgacaaaactgaagagtgcactgatggtgagtcaacgagatcatcgatacggaggcaattaactcgagttcagtcttttaagaagcaattcaaggagctttcgtctctgtgtgtcggacaagagttctctgcgcatgatggatccattgtagtgacgaagatttctcatgatgggaagga

SEQ ID NO: 47382 - DNA, 751 bp, Arabidopsis thaliana landsberg
cataaacctaccaccaaaatatatatctttgcaatctacagagtcaaaaagttaccgacaaaattctacagctacagcttacacacttacagctaaaatgctacagaaaaaagtctacgcttacagtctaaccaatcacccacaatatatagcataaaccaaaagttgccgaaaattctgtagcaaatgagtattattggatcaaagttactttgttcattatttacaagccagaaattattgggtacatatacccttctatctaaccatttattactgctcttccaaaacaagaatacacttatttatcaattcaaaatttcgtttcacaatttgaccctgatttaggtttgttctacaaatttttcaatttggattttttccctcaatattaataaactaattcaataatcgttttagaggacaatgttcatactgttaaaaaaattgtctctctagaagacaacattactcttttagtttggttttcgagatcgtttagttcggcaccgacctgcagaaagaaatatgaaaatataagttcgaatttacatgaataacaaatcggaataaaggaagattatttcccaagattaaagataagatagaatccatatctgaaacagagtacctcctccatataaatcgggagctatacagccaagcgggggatccgcaattttagactcaagagccatgatgtcgattattacttagaaccctaacttgtctttcaaactagctagaaata

SEQ ID NO: 47383 - DNA, 911 bp, Arabidopsis thaliana landsberg
cgtactgtgtttcaaggcccatgtaaatctagttcgataaaagttcaggtaagtttatgttatatatatagacctatcttattcatcatatatatatagacgactaatccacaaatgtatatgatgaataagtttatgtttaattaagaaaatcaatcaaatttgtattttctcatttgaagttggatggcaccatcgttgcacctagtgacaaattcgcatggtcggaccccatctcccgaatgtggatcaaattttcaactgtgtctggcctaataatcgttggttcgggaaccattgatagtcgtggttcatctttttgggaggtgacaatttgatatatcataatttatattaattttaaaatataattttgttcattgcaatatcaaaatcactgagatttgtttttatttgcagcttaatctgaaagcttctcaacgacctacagtgagtatatctattaattttactatacattttttggaaattttgtttctgaattctgattatgattgcttttaatttattattaaataaaccactttttgtaggcattacatatcagcaaatgtgacaaccttaggataaacgggataacatcgattgatagtccaaaaaatcatatatcaatcaaaacatgtaatactgttgcaatatcaaatataaatctttttgcacctgagacaagtcccaatacagatgggattgatataagtgactcgactaatatcaacatatttgactctacaattcaaactggtgcgtacttatctataaatcgctcatgcattttatcaacacatgaatactacaccaaacgaactataaattattcaactactaagttctactatagcttcaacttttatgtatttgctaatttataataatttttagactatgaaata

SEQ ID NO: 47384 - DNA, 319 bp, Arabidopsis thaliana landsberg
  unsure (1)..(319): unsure at all n locations
tttcaggcacttgaaaggaccctaaaagctacgcccaacgcttgttgcccctatgacgtccatagcgggcaacgaacaatgtaatcggtgcaaccagaccaatttcctactggtacaggcgcataccgatacgggttgtgtccggnagaacctgaatctggtggtcgcanggnagcgcggctgggagcccntgcggctgctcgaagacggncnaatgcccctggcggaggcggtctagcaggggctgctgctctgtgatcgccaccacggcagtgctcggntgccgcctgattgcggcctctgcgccatggccgtcgtg

SEQ ID NO: 47385 - DNA, 680 bp, Arabidopsis thaliana landsberg
ctgttagcaaagaaaaaaaaaggctttaactattactagtatccttagatgaatatagctttaaataggtaaactatagctataaagtaaataacaaataagcaaggagattaaatatttatagttacttttttgttcttcgaatttagtaaatttactgttttcaagttgctttacattttgattaaggaagttttcttagagagattaggtatgtaaagcttttcttcgtctatatataagtatagatcgtcctcagaagaacaaattgttttattaagaaaatattttaatccgagcttaattctttcgtctgctatattctaaatgaaatcccgtggtagggagatgttcaaagtcggaccaattgggtcacaacgtgcttatcttaagaatttggaatgggaagagaagggacgcaacatgatctctagtatatatgtcgctttcgacaaagataccataaattctattcagtttagctattgtcagaacggaggtcatgtcgtgtctaaaaagtatggtatgtctgatgcccaaaaacaaaagtatggttcgtacaacggtcgattccacgtaatggtaagttttgttataatacatcttcatgttttttcttccttctgatagttataatatctggtaatttttcttagtggaatctttacattttgtttatg

SEQ ID NO: 47386 - DNA, 1279 bp, Arabidopsis thaliana landsberg
tatgaagaccttaaaaaaaatattcttaattcggggtgcacaatgttgtcctgtccaaacatttggctaataatctattatacattcaatcccctatcctaaatggcaaccatgccgtttccaaataattcgaacgatgcccaagaacaccaatgctatgagaggtaacgctcgtgttgatttacaagatgagtttactttggtatagaaagtcagaaattaatcctcatggagctttgaaaatgttcatagagaaatggttatatgtggagttcccactaactgatggtgatttgaatctcattggcttagatctccttgttaatagattttatcttattcacttcaaaatatgttattttggtattatgcttgttaaaacttataattgttatctctttacctttatttgaacaattttgtaaacaatttaatcaattgtcatgtgtaatgaaaatgtcatagcatgttaatacaataactgttgacctaatttttcgtttgtcaaccctgaatcacactcaatttattaggattttctcttcatttgtatattaatgtaatttgcggcgatttttttttgttgattttgcttctcacttgtgcattgtgtctttgtaggaatgaacaaagagttcgagaactctatcttcttcccctcgaatttggtgtctggtttggttttcgcatgttaagtttcatctcttacaagttcactattatggtatcacccatagactatgaaagttgtttatatgaaacatagttctctagacaattcgtaccaacctgctaatttcttctggccatagtatcgaattttccaagttgaaaggcgggaaaaaatgagttacttctctattccaacataaaaaaaagtcactgcaaacacgatttggctatcctacgttcaaacacaaatttcatcttatcaaattatcaaaatgccaataattgaaaaacttaacctgcatcactcgcatcaaatttcactgccgttttgtttcctagtaactcgaagaagacacttcgtactacactcaaaagctatttgatcattataccatatgaaaatccatattatgaaccgtttcattcctctttagtaagcgactttgctactacgaaaccggcctccttgcatttgtgctctttttctcgctcaacgcttcagcaaacgcgcctatgatctgctgctgtgactcaagcatcatctggcaatgcttcagcttcatctccattctcgacttctccatctctctcatcatcttcatcttcg

SEQ ID NO: 47387 - DNA, 1389 bp, Arabidopsis thaliana landsberg
aattaaattatccttattataagatcacagagtatacaagtctttttgttactagtgttttaattgtttaatcaccattgcgtaatgggttcattacgacaaatctagaaaagtatcctctgtttcgttttactggttgacaactataaaggttttagataaagttggaaataccatttggatttttgtgttgtcagtgtcacctgtttaaatacttactattttaagaatatactatacatggcaatatagcttattcgctatttactagtctcggaattcggaaattacaacttaagaggtcaaaaggttagaatgatagaccagcgaaagtacaaataagcaaatttataaaaatcttcgtttcgactagtagtacatatatttgacaaatattgacaaatttaacgtccatgaaaatgtgtactttttaagaacgcaacaaacaacagaatattttcttatctatattcaaaaaagttataagaagtcaaaacgttagaatgagagaccaacgaaaatactatagattagaaaaactactagtacatgttaacacataatatctgacaaatgttacttgtaaacatatgaaacacttgacaaaatttaacattttatcaataacaaggtgtatttttcaaactccacaaacaatagaatatttgaattgtcatatttattaaaaggttttattagtaatttgttttatacctcacattctacaccaacctaaaatgtcaactccgcgatctatccgagcatgaaccagaacatagaattacttgaccaaagacctccgacatcaacggaacgttctagaaatttgaatttataaatttcattcaaaattggtttatcttatagtatatccttgaccactattctatatataatccgacaaaataaaataaaaatgaggaaaacaacgtggaaaaagagagaatgggctccataacgtttagatgatagaaaaatcttctggttgagattagttagccaaccatccccactccttccaatagtacccgccattttttcaattgtattgccaaatttagtaatttcacgcattttaatttatacaaaattttaataatagaaaaaaatttggttatcatattttttttttcggttcttatttttctctttataataatatttttttattttcataattttcttatcaacaccagctaattttggttcttcgatacatgctctttttatgcttttgacctgccttatatatactcaactgaaaataatgaaacaaagtaaaatattcgtgttccactaaaatcaaaatattttctaatcattttcactatatatcgaataaaacattaccataacatgaaaatctcaaaagtcatatacagtatatgt

SEQ ID NO: 47388 - DNA, 792 bp, Arabidopsis thaliana landsberg
ttttttttttacaccatatttgaattcggatactttgatctaatggatttttggttggttatagaaacattaaaactataaaatgttctatagtagtaacctctaattaaaaccaacaaactaacagatccaattatactcatcacattacagtatttccgaaaaaaacatggaaaaataaattcaatagttttgcaacttttgctatctatcttttagactcacacaaacttattatttgaataacgattagaaaatgtgaaatagcggttttgttttctagctttcgattaaggataagctgataaataaaggatgaagaggaaagagtagggacgttctttcatcaactgccctaaccactctactcaaaatttggggttttgcgtcatgatgtcttctcttttgactccattgtaaagatatatgtacatgtggtatcacatttgactcggaaaaacaaaatatatcttagtaaatttgaagatacaatattgttagcgtaagcgatttaaaaattacggactagtttggagttatcaaatcattaactaataagtgtagtggatttgttatattagtcaaacaagttggagacgattttttaaggggaagcttttttatcactacatatttcacttaatggctaaattaagattttaacttagttttggctctgaagatccagttacaagagaaagagagattacgagaaattaatcaattgtaatcaaagatgttgcttgataaaatttataagtttttagctttacgaaatgccaatagatgtat

SEQ ID NO: 47389 - DNA, 818 bp, Arabidopsis thaliana landsberg
gaatctgagttttgttttcatgtccgcgaggatttcatttctgaaaaatcccgatccgtgcaatcacttatctgattataagcttagatatggtactgatggttacaaatctttcaataacttgttcagatgcttcaacgatgcaaggattaagatcaaacttcaaggaatcgacatacccagatgcagttattgttctgtttatcaaaagagactctacatctgtttgatctgtcgttccatttcttgttcaagtcatatccttttgcatacccagttgaataaaggccatgatatcgccattgatgtcgaaagatctgagctttattgctgtgcttgcatcgatcaagtgtatgattctgagttcgacgaggttgttgtgtctaagcagctttttggtttgggtatgtctgttaaatcaggggctgatgttgttgcggttagatcgaacaagaagaggagattggactcgcaattgatcatagggtcgaattttttggtctcacctcgagatcgaagggagaaatggacgtttcctttggggttgagaggtttgaacaatctgggaagcacttgttttatgaatgctgtgttgcaagcacttgttcatgctcctcctttgagaaacttttggttgagtggtctacataattgtggtctttgtcctagaagaacaatgggtttgttgtgtttgccttgtgatcttgatgttatcttctctgctatgttttctggtgatcggactccatatagcccccctcatttgcttgccaggtaaaatctctgagaaattcatttgtgtctatacaagctcttct

SEQ ID NO: 47390 - DNA, 1132 bp, Arabidopsis thaliana landsberg
aattccttttgtaaatacccattttatgtatgtttggaattttattactctatgcttgttaattagccataaagattatgggaagccatgcatgatgtatgtgaccgactgactggtaacatatataatcactattcagaaaaataaaataattaattattcgctttaacgtattgacaaaacttctatgaaaattaaatacagttgctcctctatgaaacataatactataatagttataacaaaagcaagggaatatgaacaaattctcatatccttgaacttggtccatcttcccaaacatcgttaaaatgtacttttcaatctataaaactaagacatgagctcgtcgtcaaacggatagcttatggaccaacgttcacatcattctatatcactaacatgttaccatatattatgacaatgaaaaggaaaattaggtggatttgttgctactattcgttttaggccacacaagattaagacaatagtcaacatcttcctctggaagagcacctccatcgtcggtggccatttttggtttctggattttactaacattgatttacatctcctatttttcagtttttttcttctaattataattgaagaaatttaagcattcaaataaatttctaaattatagtgatatatgaggtatatatattctgcagagattgtatacataataaatacatatggtcttgactaatcacgagatatataaccgtaaagctaccatcactttttatgtataaaaatataattttttagtaaacaaaatttcttaattataaaaattcttatgcattgtgatgcaaaatttataactctttcaatgggtttattaagataatgggtggctgtagtttccaaaaattagcctaagttaatagtctatgatcgactagaaaaagagatacatgatcttgattatggcaattaaagaaaataagacgtaaacatacactgatacaagttatgtaatcaaaaatcaaaatccacgtgcttggttactctttaaattagccgtaatctgcggggccgctttctacgacaaaatatttattaaatattataacatggcttttatatgtccctaatatgaattaaaaagttcattagtttaatc

SEQ ID NO: 47391 - DNA, 763 bp, Arabidopsis thaliana landsberg
gggctcagcaggtaattatcgttttatattcaaacaaaaatgcagatatggctcacactttgttaattatccatggctctagcttctcattatatgttgcaatgaaaatgaagctgaaatgcactagagtagtataaataagtgggagggagaacatattaggatctttagatcattgggatccttagggctttgggagagttgaaagtacacttgggtctgtttcttcttagttttgttcattgattgctgttgtaatcgcttattctaggtctatcaaataacaaaagtcagagtcatctatgataacgtacactggtttttatatattgttttgtgaaatatagaataatcaacataactaaatgagtcaatctatagcaaaggttcaacgttgattaccatatacgaatctgagttaaacatggctgattatgttaatggttcgcaatattcctactatggtaatcagtatgttaatgtaaaccaaaatggctaatcgctattttgattccgtctcaacaagtaaggatgacaggtcaagggaacttattgttggtttgttgtgttattgtgttgcaggtcccgagcaactccatacacagaagctgagattaaggtaagcgtggcaagagtttatcgaatgcaataatacccacctagtcatatgctcaataagtaagttctgattcggatttgtttacattcagaaagcattcagggaaaaggctttggaattccatccagaccaaaatcaggctct

SEQ ID NO: 47392 - DNA, 795 bp, Arabidopsis thaliana landsberg
ccgcttccatgacagatgtggtacagaagcaactgtctctttagagtttatatacaccctccccaattcattcttaatatacatgtatttgacgctcctccttgttttttgtttcggggtgaaggactcaatgatccatacagatttttgttttacgtagtgaaaaatatgaaaacaggacatgtttattaatttcttctatcaatctgtacctaacaacgtccgttcttccttcaagctccttgacgaaataaaatacagttttttttcttcatgttattgttgtttgtgtgattaattgagcacttggcgaccattaattcttcgtttccatggtacagcatacacggactcatatctttacgaattgtgcgggcctgttttcaagttcattaaagcctattaaggcccatttactgatataataattaattcagggtccgtcgaaaatagatatttaattcaggggccgttcttttgttccgtttaacgacgtcgtttcgtctttcccctccttctcccgttctccggtcctcatgcctgccggaatcagctggttagtagaactctctctctcgctgggatggacttgctagttgctaaggatttttttcttctttttgatgatgattggttgataattctagctggtttctctgaataatctagttttatatgtacatctttatattcagtttaaaatttttgcggattaatttagagttatctgtttagttgaggagacaagggtttatctttaaattttgctattgatgtttttgtatgcttataaac

SEQ ID NO: 47393 - DNA, 932 bp, Arabidopsis thaliana landsberg
tcaggtttaaaacgtttcacacacacaagttattatcaagcttaattggcggcatttgcccaagaaaactatgaaattcttgagacatgaattgattgatgtttgactggtttaaaggattaagtttgtgcttacttattggaccggttctaagagatataaaaactcatcatggtttattattttgaatcggttatgtatgtttgactagcattgggccggtccgagtctaccgctcgagatagctcacacaagtctagtggtccaaagagtcggttgcttgatctatactccattggaatcacatcgtgtattaagctgatatatgaatagatggtaggtacaggatttgcttatatccaaatatattaatagttcacagatcccaaaatagcaataaaaatatcaatgccagctgcagaaatttgatgtgaccaatgtgtattgaatctgcgaaaagaaataaaattgtaaacaatgctgtttgtaagagagaaattgtataagtgtgtgggaaagctaagtccgcgtgacaaggatgcggaagatgatgtgcttgtcgtttcttgttcatatgcacacgatagagacttattacatccatataaaattatgtatagatgagcctcattattggatcatcaatatttacatataataattctgaatgtataacaatcggtgagtgatggggaagtagtggtccaaacttttggtgattttaacttgttatcttcttgtattgttgtgtcaaaatgtgacaagaggaagtgttagacccgttagattttgagtgcaataaatcaaaagtatctctaattgaattgttgttagttgtgtgatatttaatgtctcaaaaatgggtccttaaccatctgtttctctattaaattaatgtaacgcgtttttctttcttctttgatatttttttt

SEQ ID NO: 47394 - DNA, 236 bp, Arabidopsis thaliana landsberg
aaaggggccccccaacccagaggaccgacaaaacccgaagacccacagaaacacacccgagaaacggggaccagggcaccacaccaaggacaacagccccacggagacacacgggccagcgacggacaccgaccaacagagaaacgagggccatcgacaccgcaggcacacacaggaaacaaacacagcccggggccgaaggaccacagagcaaacaagcacgacaaggcccaaac

SEQ ID NO: 47395 - DNA, 369 bp, Arabidopsis thaliana landsberg
  unsure (1)..(369): unsure at all n locations
gtccgcccaatggatccgcaacttccggaaaaggactcggttgaggcctccgtcgcccgtcacacgtcgcgacaccgtcgggtgttagcggantgctcgagctgcttgtggggcgagaggcgctcgtaggtgctggcaggcgganggactgccgaaccgctntntcgggagcttccggcgggagttgcatagttagctcacacctgctacgcccacgccgaatgcgantgtttacttaacacaaagcactgtgcatcgttcctgnggctgttaaccnaacgtcacttntcnanagtgctgtgaatgtnaaagtgaagaaatttaannaagcgggggccaanggcgcgactaactatgcntntctcaagg

SEQ ID NO: 47396 - DNA, 998 bp, Arabidopsis thaliana landsberg
acatttaaaataaaatcgataatctaattttaatttaatgattattatttaaaaaactttagtgaaatataactctaatattgtttgctttttcttaaatccgcattagtttttgttatagttcatttcaaatatttttattacatcaaaaaagtttggtattgtcttctagacattgataattaattctagaaagataatttttataatgaaaaaatcttattagtggatagaaaaaactttctataaattaataattataataatgcttctataaattaatagaatattgtatatcattctaagtacttgtttgtgaccggtacttacaaatattaaaacagggttactcgttattgctttgacaactgcagtctgcagatacttgttgtcttaagacggacgcaacccaaataaagaatacagtaaaaactaccaaatcttcatgttcacctcttaaaacaaccgtccattttcattcaaagacgttaattagatcactaacatatagaaaaacataacacgacttattcttaatcaccccttaatacaataataatgcaaaacacacagtttctttagttaatcacatgacaactcttcctgatctcaccattaaaaccagtaagaggctgaatgttccccatattaaccatcgactttgcgaattgttggaagaaaagtctctcgtcttcggcataagctttcactaatgaaccagtcttgcctacattaccagtgagaagcacttgatctgatgtcaataagcctttgccccatagaaggagcttgaagtatgtgttgtcgaatcttgcaggcgacgctaagtctagaggtgaaatgttgttgtcaccgcccgttggtggacaaatcgacctgagaccatagtagtaagacctctctagcgtctcgtctggttggatgttagccgtttgattgtatagtctctgcttaaacgttgtgcacctcgctactccaatcgtatgtgctcctgcaac

SEQ ID NO: 47397 - DNA, 449 bp, Arabidopsis thaliana landsberg
ctccatggtccgacattccgaaaatggaaatagaagaagaaaaaacatagacattgctattaaagggttgaggtatttctcttctttgggatttttccttcttttccgaatgaaaagattctcaaggcacatctgatatgttcttctccatagattgtgcttgtagacgctcggggacatctgctcaagaactgagatcgcattgaatcaaagcctccacgaggacgcatgtgtcctactttgtgttaccttccgggacatccaccactaacgattgtataggctatgtgcctgtttttgcggctgtacgactccgaatgtagcgaacctggcgcagaacatattgtgtgggacgacaccctatctagactgtgaaaaaagctggcatctgtgccagactgaatggtgcactgaaggaggagttcaagtgaccttgaggctatgatcac

SEQ ID NO: 47398 - DNA, 875 bp, Arabidopsis thaliana landsberg
  unsure (1)..(875): unsure at all n locations
cgttatacatacgacgaccaccaaataaaacctaaaattattcgtaaaaaatctaatatttggacgaataacgaaaacaagtggtgtagaaaattaaacacaaacacatgttcgttgaaacttgaaaccaataaagaccctcggaccaatgagttcagtaattttagccattgatgtgtttaccaccaatctaagaccgaatgaatgtttcagttattgtcggctcgttatgttacacctctaacaaacatagctgaaacgagttatatactatctgcacgagaactataagaatacgaccaaagttcaacaatacataactatgtaatgataactatgtaatgacacatacccttttggaagtggtatttgggttgttgctgacttgctgtacatattctaacactgcacagaaaagtacacaacgagttgttgtatagtaacaaattctagtattctacattataatttttgtggttatgataaacaatgtaaaagatatagtaaaaaattacgcaagatgtgtatggaaaatgagaaagatatgggagtgggagaagtaatgatgaggagaaggatatggagagcagaagatggtctttccaacggggatcaaatttcggaccttgttcccttctgctcccttcatttgaccccaccttttttttgcggcctttccattttttttatatctttttcctttattgatttttatcttcaattccacccttttaattctttgtcaaccaattttacttatgattccatgtgcttagataaccttgtaaaaaaaaaggaaagaaatatatncaattattttttggatttggttaaagggttttttgtnggatatcctctaaatttaaacacatccc

SEQ ID NO: 47399 - DNA, 1015 bp, Arabidopsis thaliana landsberg
tcatatgtagaccgaaggatcaatttgggtaatttattgaccttttcacaacatcaaagaatatagtaaccattgcaagcatagatcatgttcttagcatacaaaaatcgaaccaaatatctgtttctgagacgagttatgttaagaatacaaaccttgtttgatgaggctgcatgttggaatttctatgttgagagagcagcctttagggaaaactcctttcgcaatgtctctgatagttgcgtttatcaaaggtaagcagacaccaacagcatccttaaagtgactttcttggctttcatttttcttcctataatcgatacgaaaaattattgccaacaaatccaaacatgtagcagcaggcatttccacgatatactcaccaattcaacgatattgacaaagagggtaccccagaaatcaaagcctccctgcctccagcaactgcacctgaatagaacctggaggattctcaaatcaggaaacacagaggaaacgaccagacaaggaataaccacttatttacaagataaatgcacttacatttgatggccacagcttgatccctgattaattccactaattacctgaagataataagcaaaggcacagatacaaaaattaaaaaataccaaattgtcatacagtcaaatgataagattgtcaaaatgctaaccagtataggttttgaccaagcaaaaagcgctccagataatcctaatgagatgcagtccacaggagtccctgagacaaaagaataatttcaaagccaatgaacaaaaacggtactcacaccacatgtcctaaaacaagatcaatgaatcttcttgtttcagcaaagactccaactttcacattccatacacttattgtcaagcttatagatgttgtgaaacttcaaaaaccagtactaataaccatttcaatcaaaatccgcatacctgaaacttcaaaggctgtggcacctttgagttttacagagcttacagcgattgtttctcctggagtagtggaa

SEQ ID NO: 47400 - DNA, 839 bp, Arabidopsis thaliana landsberg
ttatgtaccgactatataatgagatgtacatatatactctagtctttctatttctcaagcttttatatttctttcaaaaacggaaatttttttcttcacataaacatatttgtaacctaccgttgattcagtataactttctgcattatatccgaatcgaagcaagattggaggcataaagaacaacaactctagttgaacgtccaaaatggaaaatacctactcaaattatatattacataatgtcaaggttttaatttggtctaattaatcttcaatattaaacatatatatgcagttaaaaaatctaataacatcattgaagatatttttgatcatttaatgctttataattatctctatcttcacgtaaattttgtactattagtagaatttaagttaacgaaatgtatgactccgatcattacatgtctaaacgatggcgatagatatgatgtgttgctatgttttaaccgatacgatatattttagcaacaacgaataactatattataattttggttaaagagattcaataacatattttgctaattattttattttatttcgtccgaactgtagtatgtaattaatcttattaggttgctttaacaatagattaagacacttactaaatgaattcactattttacaaacactgtttacgaataatgtgatgctaactacaaaatcgaatattgtgacattaaaatgcttttcgattacttatatacgtactactaagcaacacacgcaatgtatagcaattcaaaataatcaaacctttttaattaactgatattattcgtaattcgtggggtactttcactaatattaac

SEQ ID NO: 47401 - DNA, 856 bp, Arabidopsis thaliana landsberg
gttaggttttgtatatacattttgggtgtttctcttttgttatgtttttggtctaaaaggtgattgcttttcatgtattttacagtcgtcatcctgaagtgaagtgggctgagactaccgagaagatttttctcactgtagtattagctgatactaaggataccaaggttaacctagacccagaaggagtctttgatttctctgcgaaagttggtccagaaaaccacgtttatgagctcaaactggaacttgccgataaagtcaatgttgaggtgagaatttgtagactgacttggtcttattgattcatttgttacctgttttgttttaaatctgtaacatttttttccattcaggaaagcaaaatcaacattggggaaagaagcatattctgcatcattgagaaagcagagccagaaaggtggaataagctactccgtgtgaagaagcccccacactatgtcaaggttgattgggacaagtgggttgatgaggacgatgaaggcagtgctggttagcattcatcttaacgcttatattatctgttcttgtgtacactctctgcactttatataaagttcaggatgtgttaacttatttgttttctatgttatgtttaggtgccgcagatatggatatggcaggaatggaaggaatgggaggaatgggaggcatgggcggcatgggaggaatgggtggaatgggtggaatgggaggaatgggtggaatgggaggaatggaaggaatggatttctcggtttgtttctaacttttgattgtccttcattatgtgcttcagatatacctagctctgagaaatgacttcttacttgttcctttcttcgtgcagaaatta

SEQ ID NO: 47402 - DNA, 1621 bp, Arabidopsis thaliana landsberg
ttaagatattttagggtccaatataaagaatttaactacccaaagtaaggtgcttagtctttgttaattagggtcaaaaccatatcttttgttacttgttatctaaatatgtttgagttttcgtaaccatatgaacgcaaactacattttagtatcgtattagtttgagagcacttgattaagacagtttgaggtcatgaaaagacttgaacggatacatggccactcaatatagcattggtgttagaaggacgtagtcgaaagctaatcatggacataatcatgcaattaaagaaattagaagctgtgaaacttttggatttggagcgtgagtgaacgcaccatagagaggtgcgtgggggaagcatttaagtgagagagaaagtggtcaaagggggcagagagagcagtcaaaggaaggggaagagtgtggaggccattctattgagtattattggttcccttctcattcttctctctctctctctcttcaatgcatcaaatgcttagtgacaaaaactttctaattgttaatcaaaagtttaagatggtatagtagaaatttaagaataatgtagttaatagtgaagtgagtaagtttgcggcataccgttttataaaagaaaaagatatggtctgtaacatattaacgtactttaactttaaccctagcttatagttaacaatcctaccttggtggggtttatgtagaacaacttaagccctatttcagtttcgagttttccctataactagatttcaacaactaagaatgtagttaaagaaaagtggaaaccttatgtaacaaataaaatactaagtggaacttgaataaccatgcttcatatagatacatagtcaatgcagatcctataaacacacgtaaggtccatcttatgaacacgatagttcaatattttatttgttagtgaaaaaggggaaataaaaggaacccatgaggggtcacaacaataaatcacaatgggccaatttggggaagcaaatataatatgatataatataatgtttttcatatatacaaatgtttatagaaagaaaaaagaagtgatgtatgtaatgtgtatagtgtttgtactctatggccaaaagtgcttctctttttcttcccccacacccttcacagatgcagcttttctacagagaaagtgagctgtgttgaaataatgaccaataataataatgaaatgaaaatagaaaacatttctagatagagactggtgcgctatgttaacttatgacacaccaaattgtacctgaaatccaatctataaaaatctattcgtgtgattataaattgttttactgtgactgatatacaaacaaaaaactttagattatatggtttatttatgtggttatacaccgattaacttctaataatttgtgtaaaaatgtcattattctatcactattcggatcaaaaccggtagaatgaatagtgttgacatttttttttttttctaataagaagcactattctttttaacaaaagaaaaaaaagaaacactatttttttttcttatagaaacaatggaaattaaagtaaacaagactaaatacagaatcagccacatagctttgtttgtattcgtacattata

SEQ ID NO: 47403 - DNA, 462 bp, Arabidopsis thaliana landsberg
  unsure (1)..(462): unsure at all n locations
agcgcgttcccgatacatcaacataagtgccggtaggcgatgaacccccgtaatcgtatagtccgttgaattgcttgtaggtgcnnnnnnnnnnnnnnnnnnnnnnnnnnnnnnnnnnnnnnnnnnnnnnnnnnnnnnnnnnnnnnnnnnnnnnnnnnnnnnnnnnnnnnnnnnnnnnnnnnnngctgctgcgtaccgagggtatatttttgatcgcttcggcatagatatgagccgggttcaatgtctgcagggaaatacggtcttccataggcagctcggggatcgtagcttnnnnnnnnnnnnnnnnnnnnnnnnnnnnnnnnnnnnnnnnnnnnnnnacggacgcggtatagtcggatatggccgtgatcagcgcggcactgtcgctggccagctgggcttcgagctgcgctacattcagctccggcaggcggccggcctgggcaaagctgcgggtct

SEQ ID NO: 47404 - DNA, 546 bp, Arabidopsis thaliana landsberg
  unsure (1)..(546): unsure at all n locations
gtttaatctacactttgctctctgctttgtgcgattaaaagatcggtggcttttgccgaaactacttgcacgcggaacacaaatccaagaatggagtgcgtatgcatttgcttacgacatctcggttctagccatatcttttgatcatccgatttttctttcctaatgaagttttgataactccnctgtagctattacacgaattagaaattgatgaagcagaaactgaagcaatatgctgaacacatctaaggaggatnccaacattatggctatgctctgcaagacttctggaggatgctcgccactnacgtatgttatagctaattgtcgacatgatgttgtttgagtattatcntgactgaactgttattttgtgtgcatctgcgaggttatatacggctacatangagtaatctnagctcagtgtttgtgattgcctgtctcaattagaccagagatttaagaaactaaacattgtgacgacnagatgcgactnncntaacatgccgttngagatactgaaagtgaatgattgtttgcaga

SEQ ID NO: 47405 - DNA, 849 bp, Arabidopsis thaliana landsberg
tcgacaaatcaaaaaagaaatacaatgtaacttggtttggcaacttgatcaacagattttagatttgacttttttttgatttattgtagttttttgttgattggttcaagaaaaaaaaagttgtcaaaattttctatagctattcatttacattggacgaataactcattttcaaacaattgtacatttttgacaaatattactaatgatttttggatatctaggttatttcagatatttttattaatttggtgtttttagttataaaattataactaaatataactaatacttttatatataattatatttcgggttttcagatataatatccggattttaatttggtacgtgtaattccggtagaaatatttaaaatctgttccgaattttataaatattcgttttggtttcggacctggaatttttaaattggtttttcgactttgattttatgccgaaacctacgtgtgtctcatataaaaatagtttctggatccgccacaaattctttctcgaccctaggataccctaggtattcatccatctatcgagaaactagcaatcatcattacaattcgtctcatttttttcttttacttccattctatatacatatatgtctgaaaaccactacccggagcccatttttcttgcaagcataaacaataaccacaaagacccagcatgctatctgtacaaactcgcgacctaacacgcataccaacccaattcaatgatatattgtgaacctatttgttaattctagagtcttttaacagttctaccatataaaccaagtgatgtccataatttaactagtccagttacgtgcataccaaccgatta

SEQ ID NO: 47406 - DNA, 1070 bp, Arabidopsis thaliana landsberg
gcaaatataacccacgttgatgcatacaccttgagagatttgattcacaacttcatcacaagagaacgagagtgttaaacaagctcccattgctggagatggaaagaagagagaaaagagagatctagagagcaaaacaagaaaccaaattgagtgagtgacaattattcaaaatgatgaaaagaagagatagggaataaatgattactatatcgaatttaaagatgtatagaatagaatttcaaccacacaaagggaatcaatgattactgtatgcattattgaaaatatttatacttttccacgattatgacatttcccactactctaataatattgtagaactttcaaatgcaaaaaaaaatcggatacatttaagagaaagcacaaaagatgaagtcttgtagatatttgctaaacacttacaacttgatggatttttggttccttttccctacgaatattgcaaaatatccacagattatctatactaactgcatgatcagatgcattcgagctacaaattacctcaacctccatggcaactccatttgtgctcctatatcaacttcactttggaaattcccaagcagcacaagaacctgataaaacatctcctttcacatgaatacatgcaaataagtctgatgtagaatttgaaattatggtctttgaattgagtacctgatctaacggaactgaaacacgatagttatggctatgcatctgctatcctgaccaagaaccaaaccatgaattccatcttatggtgagtatattgcttaacctccgctagaaacaactcaaaccttacattcaagcaatccaacataaaaatccagtaacatttcacacacgaaagtacacgataaaacttcctataacaagtttgagaaatgagaggaaaagaagattcagttgtttgatgcacagggagatgaaggtcatacaaatacaatctaaagaacactccaaaacataacaaaacatgagagtggtagaggaagtagaaagttcttgcaaaaagagtagaaaagggatagaatgataatgaggcagcataacacatg

SEQ ID NO: 47407 - DNA, 1433 bp, Arabidopsis thaliana landsberg
  unsure (1)..(1433): unsure at all n locations
acacaatccttacaaccttatggtagtaccaatatctataagtggatggtaaaatctactatggtaccaatatttatatatggatagtaaaatctaccgtaagtggtggtggtggtggtggtgcctatacataattctcgttacaaattcttattgtttcaagagcaaaggtaaaaacgaaactggattacacaaaaactcaagcaacattaagcattaggaaactattaacaaaatacacccagataagcaagtaaataaaaaagaccgtccaagagacatgcttttactttctaactttttaagacccaaactataacttagagcttcaacttccgcaggccaaacactcttcagggtttgtcaaggaacataccatctgcgccaacttagtttcattatcctcttcctctacttctttgtctccttctgctacactcggcttctcctacattaagcccaacgacaacaactcacatgtaaaatgtctgaattcacaagatgaatcagcgtaaagagtttgcattgttttttctaccttgagcatggctgtgtcaacggtgaactttatcgcatcagctgccgcacgcgatcgcaggtagtacatcccggttttcagacccttaaggtagattcacaacaacataagtgagattaagagtaattgtcagatgagtgaaggatcagatactctttagaatctctaacctatttcacaattatcatacgaagagtttagatgattaaggtttgtacctttttccaagcataaaagtgcaaggaagtgagttttgcgaagttgggtttgtccatgtgtatgtttaagctttggctttgatctatgtagcatccacgatcagcagccatgtctaccactgttctctgtttgatttcccagacagttctgtattgttttgcagaaaaaacaagtcaaactctgtatctagacagggagtgaaaacacaaaataagtggaagctatacctgtaaatcgccttcaagtcatcaggtatctcagcaacattaactatagaaccattctcattaattaatttgtttttcaacgttggagtccaaagtcccatatcagttaagtcatggagaagatgcttatttaccactacgaattcaccactgcacaaaccaagacgacccaatgagtaggcagcaaatggggaaaaccagaaacatacattgtcaatttatttaatcacacacctcaagactctgcggctgtagatgtttgatgtatagggctcaaaacattcattgttcccgaggatctgactggttgaagcagttggcattggtgctactaaaagagagttcctcactccattctttgatatcatatctctaagaacagcccagtcccagcggtttgatggaatatcntaccacatgtcaggttaaaggattccctagagaagcat

SEQ ID NO: 47408 - DNA, 517 bp, Arabidopsis thaliana landsberg
agtgcggaaggagaaagaggcatatgtttccaaatcgtggcgaaaggaagtcagattagattgatgagatgtggaaatctattgctcataacccaaaggtgcagtagattgactatagttataagattgcctgagagagaattttgttttttcgacttataaaagtgtttcgtctctgttgtacaatgatgaagaaggtgttaggactatggatgatgataatttcattgacgatactggtttggatccttctgagaggtatggaggtgacgctggagaccgttctacaactcattatcctcaggtatgagtagtgtatctacaattgtgatctttgagtctagcttttgattgacgatacaaaatgctattgttatgaatcaacaggcctatgagggtgaggatgaacatgaggcaaatatccttttcaaaatggggaagagaaagataatgactgaaagatatcctgcagaatttgcgcttttggtgtgataatgtggatggcctgtagcttggg

SEQ ID NO: 47409 - DNA, 444 bp, Arabidopsis thaliana landsberg
cactggtgaacaatctaaaaaacgcggggaaggttttagaggctcatgaagtagtgaagcacatggtagagaaagggcattatgttcatcttatttcaaagttgaaaaaatatagaagatcttagttttttttagtttgtttcataaggcttttttgtgatatcgattaaacggattttttttttgcctacctcatgttccttaacatgttttagtaggctgttgtgtattagccattttaaccgaaccaaatgtattgaagcgaagtgaaaagaaccaatcagaaccaaacgaaaacgaatggatactaaattttaaatccgaattcactgaatagatacttaaaaatctataaaaatacttgaaaataaccgaacaatatccaaaaaaacaaaattcaccgaataaatactaaaatttaaatccgaatgaactggaaccaag

SEQ ID NO: 47410 - DNA, 845 bp, Arabidopsis thaliana landsberg
tctggtgaaatctttttttttttcttctgtaactttgaccaaacgtaacatatatatatgtaaaagaaatttgagagcatgatataacatatttatgtatcaagatatttataactattgaaaaacagtgctgtatttatatctaagtttcatgtacacgatgagacatatatagatatttctaactttatatttatggattctagctaccaattttattttttaagtatagctatatactatcggagtactaaataaatattaaaaaaaaatagttgcaattttcatgttctaaattaataaatttacatcgtcgtacatttagtattgaataaattgatagttacgtttctctaacgtagactatgtacagaaattttgcagtaacttttcttattaaatcatgattttaaatgttaaccaactaccaatcaccaatattctgacacaaatatttaggattgcacgatcgtatcttcataccgacttgcgatctcttcacaagttgaacccggtttggtgactggtcggactctttgagggatgttacgttcaatccaaaaacaatccaaatcgattattattttcttgaccaaacctaaatttgattggattaagaagatctttattttatgcttatgactaatcgaaaccaatttaattttactgtggctaatattcttgtaaaagcgaaaaacccaaaaccgggttataagaatggtctatcaatgctataagattgttcaaaaattaaacatctaacattaaaaggtaaatttggtgatggtacaggaagattagcagggaatgttgtaatgagtggcaaagtacttgtcaatggcaag

SEQ ID NO: 47411 - DNA, 582 bp, Arabidopsis thaliana landsberg
ttccaacttattttttcttgatatcagcagaaagggtacagtggtgcaaatacaacaatgagaatacaattgctcataacataaaataaatgatgaatcagtcccaaagggagaagagcacgacgaaacagctgttcttcctacacaaataacaaatgtaaagttaaaactttggtcaattccttttactaataaaaatgtaaatcaaaatgataaaatcttatagtgttattttaaccttttttttttaattgataattattcgataattttctgaaaatgttacaaagtgaatcgttataacaatatctcactaaaaatgtggttcacctaacattaatttatttttctttttatttaattttattaagaagatattcgtaatttctttgtggaaaacatatatagttaatcaaagatatttcatcttaaatctcgttctatattcatcacagctacgcatgtatgtttgtatgattagattaatatacattgagggggagagatcgtggagaaagagagcttacgaggagcaagaggaaagaacagaggagataggaaaaatcacttgtatatataaga

SEQ ID NO: 47412 - DNA, 874 bp, Arabidopsis thaliana landsberg
aattatggataataccttaattaactaattcatattttcttcaacaagtatctatttcaatattacgtattactaaatcatttcatttataactccataacagataaaatcatattaataaatcatgtatacaacttatatattaagacataacatcatagatatgagttaaatttaataaaactcctattatattaagccaatttccttacttgtatagaaatagtatttatattattgacgatcttgagtacaaatgatattatcatttgcttagtaattaattttgtttgttgaggaggaaacaaaattatacgaggcagaggtggtataaccgtataagcctttaaggtttgaaggaaataattatttttttatttattagattgatcgacaagtatgtaaattataaaatagtatctgtttatattctatcatcaatggataatgcaaagaggaaagattaagagaaaaacaaaatcgggaatgtaggaaaaaatatttgaattcggattataatcatctatgtatggatattattatatttactaatttaattcttatttatccttagaaattattaacgtcggttacggaattgcaaatgagtaaatgactgagttttttttttatatatgtttgaagaattattttttcccaagaatctacaacaattatccatttgggaatactactcgttctatttaatgatgttttagatgatttactccttccgtttcaaggaaaaaaattgctttaaaatagataatgtttcaacttataatgtaaaagcattttttcttagttttgacgattcatattctatagagtggtctatcaaataataaatgatgcttaataatcataatcaaac

SEQ ID NO: 47413 - DNA, 678 bp, Arabidopsis thaliana landsberg
agctaaacagacttatacattctcaatctacaagcttctcctcaattctttcctctataaaccaaactcttgcttcaccggaaacaccactctccgatctcaatctctccactcttcgccgtattttatcagacccagatatcaaatcctggaaatgcatctcccttttcaatttcatcctggagaacccatctcttttctcattccaacctgatctcagaactcacttgtctctcactttccgtgtcttgtcggagaggagattctcatatgcgaaagaactcttgaagcctgtggctattgatgacattctcaggtacccttttaatgtaatcgtctctagcgttattgatgaatgtggttgtgagaagaaagttgttgggaggttctttaattcgatgattatggtttattcagacaatggaaaatttagtgaagttgttgaggtttttgagtatatgaagaacaatgaagttaagattgatgaaaagacttgtactttgcatttgttgaatctcaagagatgtgatcagatggaactagctagagatttctttagtctaatggttgagtcagggattgatgttgttactgtgtactctttaactgttgttgttacggtgttgtgttgcaatggggagattacaagagcaagagaattggtggaggagatggggt

SEQ ID NO: 47414 - DNA, 543 bp, Arabidopsis thaliana landsberg
  unsure (1)..(543): unsure at all n locations
gattatgagtaataaacctgatgaatatctcccatgaaatgagacaagaacaaaagtgcnttttttttgcnatccacgcgaccgaacaaggatatattataattttaaaaacttaagttatgcatcaaaatacaaaatacgcagttacactttggatatcatcattatatgaaataaatgaaaatgatgacatacatctacgatcagatgttccttcaccgtaatgctgaagctgagacgtgaaattctggattgctccatccacacacatatccttcaatccatgttgatcatgacaatcccctgtttttaatccggtttggtatttgtaattgattttttggttaactccggttcaagataattagaaaacggattaaggttatctgaaaatgtctcggttgtgacttactagagtattcgtaagagcaggcttggtcgggagtgtcgatgtaatggagaaggctggtcccacgatactttgaccaatgtcggatttgtcaagccaacacccaatgctgataaatctcctttcacgtaatc

SEQ ID NO: 47415 - DNA, 1094 bp, Arabidopsis thaliana landsberg
cgagcgaaagctaagtttcgttctggagatggaggatacttcttaccaatagcttcgtataacgatctctcagcagcttcgagatctagagactcttgaagcatgcagactttatcatccatgtcttcctcattcaacatctgactaatgtatcctaaaacagcgtcagagaaatcgaaatcatcagctggatcctcttcttcttcttcttcccggataaaaactgaattctccggcgctgctacaacggtgtttatatgatcggaggagagattgtaattgaaaccgtcgtatagtgttaccggagtgaagctatgcgaagcgggttgatcgggtaaaccggataaacggttccgattaaccatacctgaaatcccggttagacttggttcagtaatcatttctcgattgagaaattattaaggaagaagaagatgattaccgaaggaagaagagaagacgacgtttagagggtgaagagaggaatcagaataaatgcgtttttaattttttaaataattaaaataaaaaggtcctaatctacgaggtagggaaaagcaaatcagagccgttggatcatatgcgttttgtggggacctgtcgtcgacgcgctttatcatttttttgacaatagctaaaatgtgcttttcttatcgggtcattgttcgccacgtgtcgtcattacagtaagtaaagcttacttaatttttttttaatatgcaaattagtacgagtagtacagttttattttattttgggttagtggcaagtacacatttaatgagatttatgtatagttttttttcccaacttggatggtactaaagtcaaaccttaattagtttttaagaaccttaaatgttgacagagttctttaaactttttaataattttcttagttaattaagatccatttgattaagataatgagagagtctctcgaccttcccccaacggcacaatggctataaaattccgttccaactttaaaatagaatcatatttttagggtattgcttgggttaattccatgcttccatgctatgtggtttaggagcaaatggaaacccagatttttttaccccaacaaaaaa

SEQ ID NO: 47416 - DNA, 533 bp, Arabidopsis thaliana landsberg
  unsure (1)..(533): unsure at all n locations
tgctaataagncggtagactggctttattttacagggaagcttcctgcggatccgctgttaaggtgttttcgaccgcgggnnatgcgaggcaaatcgaattctctgaatatgaggacgccatgcgggccattcgccagatcgcgtcgatccaccagggcgtggagcggagccgtaatgcccgcatccccgacagtgcctaccgtgacgtgctttttatgctcatcgactattcaatccgctctttcgagctgctggaaaggaaattgacagtagccgaaaaggaggaattgttcaacgtttttcacgcggtgggcgaggggatgggcgttcccgggctacccgcgaacctgcgcgcgtgggagcggatgcgcaccgagcatttgcaggataacctcgtcaaaagtcctttcaccatcgatctttacaaacaatacccgaaacaccttggctggtaccggtaccaattgctgcggaatgtgcaaatgcagctcgtgcccgaacgcgtaaatgcattgctccgcttgggggaaag

SEQ ID NO: 47417 - DNA, 545 bp, Arabidopsis thaliana landsberg
  unsure (1)..(545): unsure at all n locations
tcccagatcctcatgactccgtgctcgacctccacgcgcgaaccgttctcatccagctgtcccaagctgatgatagagttcctcaacgcggggatgtagtagactccggtgagcagcctgtgctcaccagacgcggcggtgaagacgacnnnnnnnnnnnnnnnnnnnnnnnnnnnnnnnnnnnnnnnnnnnnnnnnnnnnnnnnnnnnnnnnnnnnnnnnggtgaagaactcccgtcggccggtcatgtgatgagtggcgccggtgtcgaggcaccatccttcgatcatgtccttgttggagccgtcgccgaggaaagcgcgtgctttcgactcatcaaggtggaggagtgccgctgcggccggtgcccgtggagatggctcgatgcttgcatgtgccaggagcagggcctcctccgcctccgcctgtgcgacgttggcctggccacgtcgtgcgtgccgacaatccctggcccagtggcaagcttgccgcagttgtggcagccgtcgtctcgtgccggcttcttgttgccgacggcgccgctt

SEQ ID NO: 47418 - DNA, 1008 bp, Arabidopsis thaliana landsberg
taccaattttattagcaagcgtcacttactgaaaaacaatccctataagatttttatttctgcacaaaagaagaaaaaacatgaaaggttatatagtacttatatatccatcgaatttatacgcccacaaatgactaatgcctgattcacatgcaggcaattcaaaactagctcaattttcttctgttaaccagctctgattactcattttatctaatagtgttggattatatatagggataaaatgtgatgtatagatatctcttgaatagtctcattcgactgaccacaaactaaactactaacatcattttctcatacatttcagcgtgggccaataaagccaacgtgtttttattattccaaatgttgacataagatataatctattatatggtaatggtaatatgtgtctcattctcatgctaaaatccatgaacgcagaacgtctctcatcataaaatactagaaggtaatgataaattatgtcacacggattctgcatgttcttatacccttttttcacatggctcacccatcacaaatctcactatctaatgacttattcacccctttctaagtccatgtccaagtccaaaactctaggtgtctatttcttttggatgagcagtgatgtatcaatatctcattatgttacgtagctatcttagctaggttcatcacatacgccgtcctacatatattaagtgttgaatagaaagttaattccatctatctcaattatcaaccaacgtaactatcgtatttagatatcaatcacacacacacacacacacacacacacacacacaaaagtttatgtgattaattaggagtaggattcggagctacatttaaatgcaagttcaaactctacaatatcgataacattattaactcgattgtttaattagtctacttatcttttattgagtaaactcgaaggatatgtatgagttgcataagagggtattctagtactttgtgatatccaacgaataaggcaag

SEQ ID NO: 47419 - DNA, 924 bp, Arabidopsis thaliana landsberg
aacggggaagttgttgaaagcgaaagataaaaacacaaggagacaaatccagaaggagcttcgaactctgggcaaggaagagcgtaaaaggcagcaattagctgtatcagacgtgatcaagaatgctgatgtaattctcacaactttgactggtgcattaacacgaaagctcgataatagaacttttgacttggtgatcattgatgaaggagcacaggctcttgaggtagcatgttggatagctttgctaaagggttcaagatgtatacttgcaggagaccatctccaactcccacctacaatccaaagtgctgaagctgaaaggaaaggattagggagaacactctttgaacgactagcggatctttatggagatgagatcaagtccatgcttactgtccagtatcgtatgcatgagcttataatgaactggtcatccaaagagctttacgacaacaagataacagcgcattcaagtgttgcctcacacatgctttttgacttggagaatgtaacaaaatctttttcaacagaggcgactctactcttagtggataccgctgggtgtgacatggaagagaagaaagatgaggaagagagcacctataatgaaggtgaagcagaggttgcaatggcacatgccaaaagactaatggagagtggagttcaaccttctgatattggaattattacgccttacgctgctcaggttatgctgcttaggattctgaggggcaaagaggaaaagttaaaggacatggagatctttacagtggatggtttccaaggtcgcgaaacagaccttattattattttcatggtccgatcaaactcgaagaaagaagttggatttttaaaggaccaaagacgaatgaatgtggctgttactcgctctataagacaaggttgtatcgattgctatac

SEQ ID NO: 47420 - DNA, 696 bp, Arabidopsis thaliana landsberg
cattgttaaacctttttcttagaaaaaatccctccaataaacaaagggattaaactcttcttcttcttatcctttgtcttcttctccttctttttcattgaaggatgtctctcaagaaacaccgagccattattaccagtagggtttgcaaatttcacgtatctcttctcactcatcgatctcaacctcggacttctaattggctcatcatcaacccgaggaactaacacttcaaacttggttttaaaaacagtctcgtcgagtttcgtttcgtttaccccaggatcaactctcagcttctggagctcttgttttgttcgttcaagctcttccttgagacaagacaaagagttcctcatttgtatgctttcttcttttgcccttttgagatcatatcttgtctcttgaagctctatcttaatccctgatggatcttcccatttctcatcatgcatctgtatcttcactaatgttattatcataagtttttagattcaaacaataatacaaagttcaaatttacaaagagagagagctaaagacttgccactttgagatggttcgagtagacttgactggctaagactctctcgccgaacaaagcaacggcttctttgacggttctaaacggtgccgttgtgtcgatctctgctctcttcggtgtctccatcatttatggctagttagtgcttaatt

SEQ ID NO: 47421 - DNA, 799 bp, Arabidopsis thaliana landsberg
  unsure (1)..(799): unsure at all n locations
caatgagtttgactcatcgcacttttacaaaaattatttggtcatgtttacaatttcaatatagacgtcataaacaaaataagtaatcttaccaatagacctttgacgaaagaagggatagtgttaagtgttaaccatggcaaggcaaccatcgacccactattcagttcgctttccccctaagtgtctttcccattttaaactctcagtaacaaatccgcgtaatatacacgcaaaacctaccactgggagtttaaaatgagagagatactcatcgtcctccctattttgaagatgggagcattgtgaaattttataacacttcaaaattatacagacattcataacaataaagatatacatgaaccaacgataacactcggccttttatcttcgaaaaaaagtcatgtttcctaagtgagctaactaatttatgtcttggtataacataccaatgttacatgaatatataaatttgaacttggcatatatattagagttttatcttatttgatcaacattatagcatattgggccccatatcggcctaaatatataaatatatttttgggcctggaatttggtctgtacatgtaaagcccacatgtaagattgaggatatataaaactcgattctattaaataatactatacagtatttgctagatgctgaagtagtatacaaattacaaaggataatatattaactttatacatttataaaaatgttggcaacaccttgaaaattcatgaatttaattcanaagtcanaacaattaacattgatggaatgatggtt

SEQ ID NO: 47422 - DNA, 306 bp, Arabidopsis thaliana landsberg
  unsure (1)..(306): unsure at all n locations
aaaaccagaaacacacaaacgcaaacagaaacacanccaaccaaaaagacacacacagggagccgcaggaccggaccaaggcgccgcagaaacaacgacacagaaacccaaaaacaccgaaacaaacggaagcaacagaggccaaaaacgcaagcaaaccacagcaaaaagaaacgcgacaccccagcaacagaacacggccgaacgcacgaaccacgaacagaaaagcgacactggcacatacgaaaacagacccaaaagaagaacccgacccccaaaggcgaaaagaaaacacgaaacgacccc

SEQ ID NO: 47423 - DNA, 1154 bp, Arabidopsis thaliana landsberg
  unsure (1)..(1154): unsure at all n locations
acgcttttgagtcttctcttcctaaatctctttctaatctcacgtctttgaaggtttttgatttgagtgtgaacagcttctttggaaccttcccttatggtctaggnnnnnnnnnnnnnnnnnnacacgtcaatgcctcaagcaacaatttttcggggtttctacctgaagatcttggcaacgcaactacacttgaggttttggactttcgaggaggttacttcgagggctcagtgccttcttctttcaagaatctcaagaatctgaagtttctcggtctttcgggtaacaactttggtggaaaggtaccgaaggtgattggtgagctctcttccttggagaccattattcttggttacaatggcttcatgggtgagattccagaagagtttgggaaattgacgcgccttcagtaccttgatttggctgttggaaaccttacaggccagattccatcttctttggggcagctgaaacaacttacaacagtttatctctaccagaaccgtctcacagggaaacttcctcgagaacttggtggtatgacttctcttgtgtttcttgatctgtctgataaccagatcacaggagaaatacctatggaagtaggtgagttgaagaatctgcagcttctaaatttgatgaggaatcaactcacgggaatcattccgtcaaaaattgctgaattaccaaaccttgaggttcttgagctgtggcagaactctctcatgggttcattaccggtgcatctcggcaaaaattccccattgaagtggttagacgtctcatcaaacaagctttcaggagatataccatcaggattgtgctattccagaaacctcacaaagctcattctcttcaacaactcattctcaggtcagattccggaggaaatcttctcatgtccgactttagttcgtgttcgaatccagaaaaatcacatttccggatctataccagctggttcaggtgacttaccaatgcttcagcatctagagctcgcaaaaaacaacctcaccggtaaaattccagatgatatagccttatccacatcactctcatttatagacatatcatttaatcatctctcatccctatcttcctccattttctcaagtcctaatcttcaaaccttcattgcctcacataacaac

SEQ ID NO: 47424 - DNA, 1256 bp, Arabidopsis thaliana landsberg
  unsure (1)..(1256): unsure at all n locations
tgctctcactgatcccaactgctttcttgatataagaatagaaggcaatgaagaagatgaagagcaagcaattggagcagaaagaaaccaactctagtggaaaaagagataagttaatgtanaatgtttttatgcttttgcagccatgtcattgtaaaagctaaaaacatcagtctgtctctgttacttagtttcgcaaatctgtatattattcatttggaacttggctacgaattgctttcactgctctacatgaaacttgacttcagcactaatagtagaagaggagctcaatagtcagttaagtgtcctgtgatcaactctgcgagtaattaaagctgcagaaactcagaagacatgaatatctgaccaggactcgcttgttatagatgcatttggaatatcaactctataaatgattattgtgggttcattacactatgtcaaaagtgggaattttgcaaatcacttctgcaaatattgtttcaaaaaggtgacattgataacaaatttctttaaaatcaataaccaatgatgttaagagtaaacagaagatacaattgtttgtgttgagagctattatttggtgcggatggagagatcttgaagctgctttggatcgacttccgagggagtccttgttagggcacattgcgctgtggttgtctttggaaaggctattacatctcttatggaactcgcacctcccagcatcatcaccattctatccaatccataagcaattccacctgtaatttcatatcaaatactaatgtttcatcaaccatgcttgaccaatcttgtttaacatcatcatcatccagtgtcaaaaaagtttaagaccccaatttctcttaaagatcctaggcagaaacttgttccaacacaacaaaagagaggttgaaccagtctatactcttaagcatatacgtaacgatgttgtattaatctattcttaagtctcagattttttgaccttaagaaatatttacataccatgaggaggagcacccatgtcaagagcctccagaagatagccaaactttgattcagcctgtatgtagggaaaaaaatgagatatggattatctgcatatatgatagcgctggcactctgaacaacaaaatggatagtttccaattgataaaaaaggtgactctcacctcttcaggtgagatagccatgatctccaaaccttttcttgacatcccgctatatatcctcaaactccctcaccatctatatacatagaattt

SEQ ID NO: 47425 - DNA, 676 bp, Arabidopsis thaliana landsberg
acttcgccctcgaagagggcattaccggtatcgccgcggacgtcgtgcgggaagtgttcaaccgtgcccagatcaaatacaccatgacgctgctctacccctgggaccggctctacaagacggccctggagaaacccgactatggcattttcgtcaccgcccggacgcccgagcgtgaagagctgttcaagtgggtgggccccatcggccccgatgactgggtgctgttcgccaaaggtgatagcaagatcaccctgaagacgttggatgaggcaaagaagtacaaggttggcgcctacaggggcgatgcgatggccgaagacctggtcagacgtgggttcgaccctcatttggagttgcgcgatcaggagaatgccaagaacctggtgaacggcaagatcgatctctgggctgctggagacccggctggacgctatctcgccagccaggtcggcatcaagaacctgaagatcgtattgcgctattcgcatgacgatctctatctggcgctgaacaagcaaacccccgatgaagtcgtgcagaagttgcagggagcgctggagcagatgcgcaaggaaggcaagattcaggagatcctcgatctttacctctaacccctgaaagatcggcgacacgggcattcccatccaagcccgccgcctggcgtaatgctgtt

SEQ ID NO: 47426 - DNA, 845 bp, Arabidopsis thaliana landsberg
accgctggctcatcctgggcaggttgcaagaaagtttctgattgtaaaagtctatttcatcctaaggagctgaaactttgaccatagtgccttagatgatctattagcgtagtttggtattgaattttccttgtatgcttgatccaatgttctctgatgagctgcttacagaggagttgttagcatatgtcttattttattgaatttgatgattgcgtactttagtttcttccttaaaatattctttctgttctcatttaccatctcctcaaggtttctatgctcacagctaatgaaccaattgttcttttttggtaggcgaaatggcttgtggaatcacagacagtccctcaaaggcttttccaagagcgttgcgaggtaaacattatgttacgttcagccaatgaaacagagtaatacgtagagaatctttatattaatagaacttaaaacaagaaaatacagctttgagaggtttcttaatagagtcccctcttatccccccttccacctttcactagttctcgataactccctcactggtacccctcatctatatagcatgtgcatcatgcaatcctactgcccatcatagaaaccgtagcttgaacaagtctggagtgatagatagagactgctaaataatagttattgtagctgctaaggtagttatagaagttaacttcaaggctgtagcctgtttcgaatgtcacattaatcccttaagactgaagaattgtcctcaaagatccagtggaccagctggtctcacggaatagccctcttcttcttgctgtagatgtaaaggataggagcgggcgagtcctaaaatgtttgttattatt

SEQ ID NO: 47427 - DNA, 704 bp, Arabidopsis thaliana landsberg
cagtcaacgggtgttgaactatatgtcgcactcagaaaaacgcaaagtcgaagacgaaattggcagtctgaatgcaaaggtcgatgaatttaacggcacggtcattaagattttagagatcacgcgaaaaatgatttctgacggtcgcgttcgattagataaggtggatccagaaattgagatcccagaagattttgaggaaaagctggagagactggccggcctagaggccactttaaagcccgcgacggagccaacagtcacggcgagcgctccaccaccgattgccacgacgacggcctccgcggctccaccttctcctgctggagcagatgtgcttcagcttcagcgagtggctcaggctctgaccagggaaaataagtctctgcgtgatgagaatcgcgttctcaaagaaaaattagagcagattaaaaaaatcgcttagttgcctttgatgacttgattgtttgggtcagcggcatcgtaaacaaaataatccacactgatataggcgtctgggtatttatcccagtccaatttaatcccatggatcacaatgcggtttttttgcgcgtcgtaagtccaatgctcattttccaccaattgatcgctgacttttgcatcacggtgaaaccacacttttatatcacgagtgggagtgcgatctggaatctttggtagatcataaacgatgtcttttaaag

SEQ ID NO: 47428 - DNA, 237 bp, Arabidopsis thaliana landsberg
aaagagaaggaaaacggcagcggaaacggcaaaacgaacaaattgaaggaaaaaaaagcacaattcactaaaaggaagggatggagtgaaaaaacacaaacacggaaaaacacatgcagcaagtggaagataaacgttaccgaaaaaaataaaatcgcaaaaaaagatcaaacagatgaagcgaaagagaacaccacaaataaaaaatcattgaaaaggaagagaaaagcagaaaac

SEQ ID NO: 47429 - DNA, 608 bp, Arabidopsis thaliana landsberg
  unsure (1)..(608): unsure at all n locations
ccttctcttctccgccgttctccgcnnnnnnnnnnnnnnnnnnnnnnnngagctctcctcctcctccggccatcttggagtctctgttgttgtatctgatggaggaccagagggaaggagggaataaataaaagagagaaggcagagaaaaagagaggagactagagtgtttgtgtatgaattggtttaatgagaacaactctgttttttttgttgtctttatagattaatgtttttttgtttgcttaaaaatcgtcatttttattgggaaacgaaaagccgtctacgccaagcagcaagtagcagtgagtggtttatagacacctagctaagatatcttgcattttatagaccatttattttgactaacaaacctacctatgtttcataatatagaaaatatataataatgttttagtaaacaaatttattatttgatatttgattcaaccaattataaaatacaaatagtcatgtattgaaagttgaaacttataaaacattctaagaaataaaataattaaatcattctatattgttttatataataaaatagaaaaactaacaattatttaattttgctacaccataaaccataaaaagacaag

SEQ ID NO: 47430 - DNA, 774 bp, Arabidopsis thaliana landsberg
agatatttatgcctaggactatttcttaattttgacttcaaattttcgatctatgtttcttattatcttaaaagttgaaaacttcatttttaactttaaaatcagtaacataaccgtcactaaaaaaatcacaactttacaacaaaatatacaagtcttcaactatgctataccaatgtcacttcaaaactatttaacccaaacacaatctcatcctttcacttacttcaacgcatcaatgatatttttttgtatatgtgtaataaacggctcctttttccaaatattttaagatctaagcagtagataaaacaagagacatgtatgctgggccaagtatttaaagtttctataactttccgacgaaccgattgtgtgaaacatcgccaggtggatccaatagttgaacttaacgtgtgacactgcgtagtaattaagctaattcaattcatccgaacttaatcaaggggctaacttttgctcagccgtagttttgccattatcaatcccttatggtaatggtggaaacattaacatcataattaaaactagcataaattaaagtagattaaagcagaccatcatgtcgatatctgaaacatacacattacatcatgtgtaaaaactaggataaattataaagtaaataaaagcaaacaattgtttcgttattttaaacatgcaaaatatagcatacgattgctttttcgatgctggtgttggtgcttaagtttatttaaataatgcgatcctacataaaggtatacatcctaa

SEQ ID NO: 47431 - DNA, 862 bp, Arabidopsis thaliana landsberg
tggttcacaggtatttcattcctactcataacactatattcaaaagctggaatcgacacttttggtttatcaatgattataagaaaaggtaaattaccgtgtgacctgaacattgcaacaatatacaacactgattattaaaatagtaagagagtatagccttaaaaagctcatttgcaaatcatgtttagtacatttgttttctgtccacatactttaccgactaaggtgagtttacaagtaccaattcgaatgtaaaacatcgataatgatcatacaccgtaatcagaagctcattgaatataatgcagccttgcttcttgtggtgtttggatgaatgttaatgatcagatattgtactgaccattgcaggtaccaaggagcagccacaggccatcatcagctgcgtcctcgagacacgacggcaaatcccctaaagataaagatagcaaatgtagaatcatgtaaatcctcatttcacttatgtaaatttccaactttttcttattccctaactaattttaatccttaaaagctttttggttttaacaaaaaataaactgtaattgcgctttgactaaactattttttgttgctcataaaaaatcagagcttttctttatccttttgagaagtgggagacgaattagagtttgtgttcacgttttggctttcgttctgttaagttactctgatcgccgttacttttttgacggagtaacggctattgtccgtgatgccttttataataattctgcttagccggctcggtttgactaatcgccaactttttcaagttgtaatcggagaatgtgattattaatccctaattaaaatactctttatctgcattagcttatca

SEQ ID NO: 47432 - DNA, 818 bp, Arabidopsis thaliana landsberg
gatttaagcgagcgagtatgacaaacatatttgttcgagttatctatagttacgatagagatatacggactgacagactttaatgtacttaaatctatgagataatggtgattgacatatgtacttgacagtagagttaaagtcaaatttcatgtgacgacatacatattgttgttatgtgatggtagagttatattttatttaattactagaatagcactcaaaatttttgagttatgaatggcgtggtgatagatttacgagtttaatgattttttagacatgtcatttttctagattaagcatatgttctaagaatggaagatactattatacccttatccgaataagaggatcttctgtggatcgggcaagtagaggtcgtaaactgtagaaaacaattgaattatctgctctgtttggcgatggaagagatagtattagtgtgtgggaagtagaatttcaacaacaggcggtgggtatttagtgttgatgaacgaggcggatgtagggttctaagttcgaatcgaattaaagggtatggagatcttgttgcaatggtatatcaggatttcagtttggatagtagggattgtaaggttagtctaagttataaaatttgtagaacgatgcttattctcgacgatacacctcccgtaatagtatgtaacggaagacaattcgaaggttttctccgtcattgtaaaacaggaagcacatgactatgtgttacggtacaagctataggttgtgtggttggcgaaccagaagttgaaattgtcgatgagggttgctggataactgaggatgtcttgggt

SEQ ID NO: 47433 - DNA, 1284 bp, Arabidopsis thaliana landsberg
  unsure (1)..(1284): unsure at all n locations
caccaaattatttcttttaagttttaaagccaaattttaattgccttctagaagaatatcattatacaccagaaagtgatcatgtccgcgctactataggatacttctatctgattaattttattagacttatcataatgaatgttttgaataaatttgataatcatatgtattaattagaattatacactactaatctcgtgttttaaaacatgaaaaagaccaaaaagggattaaaaaaaaatatatttgtttgagtacacgaacaaaataggctaacgacaatccaacctcaaaaggacatgattcgatacattaccaaaagatagttgtcaacggtttttctgaaacaatcatattaaagtatgattagttcttttaaaaaaccaagaattatattataaaagataaaatatttttacaaaaacaaacaatagattttgaacctttaaattattgttctaattgaccggtgaacacagctacccaacatatataatattatttcctcttaaatgataataaaaaagttgtactttgtctaatttttttttttttgaatctagagtaattattttttaaaaatctatttgattttaatttctataaattctgaaccttcaaaagtagattgtttatcggcagaaaaaaaaaatcgacgtgtacacttttcccacatgaaatatctacctgttcaaaattatatacaaatattaatactatatttgtcctttcagttttttttttcctcttagataaccgtttgtgtcgttttgtttggtagattatcaaagaagaagattgtgcatcagcagaccgcgtcgatgtagaaaaacatgttactttagttttctgaatatctccttccaattttgaaaccattatgttgaatcttaatattttgatcatatcaattactgaaaaacgcgttaacggcattacctaagcgtggcttttttgggggtcaatgtacttctagttgacgatctagccatgtcaacgcttatgtcaacggctgttttggctagtttatggaatttcaaataattctgtaattgaaatgttcataattcattcacctaattagaccaagataatgtcatataggtaaaaatctaattatagttttaattataactagatttggaagtttttatctttacatttttgntattctatattttagatgttatgaacaaaaatttggtggacttatccaattaaattctcttattgtatataaaaatacatagtaatctgaaaaacatatattttcatttgaaa

SEQ ID NO: 47434 - DNA, 605 bp, Arabidopsis thaliana landsberg
tgataattggagacgaattattgttgtcggctctctttttgcaattagacctaaagttcttttcgagttactcgcaaattagaacttctttgctgtaatttgtctgttatcaaaatatggtatataaaataaaatatgctatagaaaactgaaaaggagagggggtaggttgtattggacgaagaaagtttgaattctattattattcattttgactccgtgtagattctactaggagaaaatccggcctatggccagtatacatctctttactattataattaattttttatttttgaatcgacaatgctaaaatataaaattatgttgattttataaaatataaaatttatatactacctaagttatgatagctaaagaaacaaattattctaaaataataatttgtttataaaattaataatcaaattgttagtttgattattaatgacataaagaaacaggaatagaaagagagtttattaaccaaataatctactctgaattttcagtctttcaattttttccagtaatttgttcagtttggttttggttttttttcaaaaacctaagttttgataactaagatttttaagatcggtatt

SEQ ID NO: 47435 - DNA, 762 bp, Arabidopsis thaliana landsberg
acccttcccgaacacagatacaacatgaataagtactggactacatccgagttttttttttatgccccgtgcatgaaacctaacgagcatgcgagagacatgcatcaacgatctcttgataatactcttacgtgtttgaattcatttcttgataaatgttattcgtttaatacattagttatataagaaatatttttattgttgtaacagaattcgccagctcttccttatcaattttattttatattatttggatttttttcttatctatttgtaaatttttattttgttagaataaaatatttttttttaaactatttttgtatgcttggaaagttttttttttttttttttgtgcaacgcttggaaagtttaagttttctttatctttaactattttggttcgtcgattcgtgcatcaagcactagtggtggggcaaatatcaacaacgcaatcaagtgtggtgaaaaacccactcaaatttaggtgttggtcgatatgcaataatttatttccttatgtttatcacaaaatcacaaaacatgcgtcagcatttataattatcaacaatatcatagaaattcgtaccacaaataaggctacttaaattaggagtagatattgtaagaggctgattccgccttaacaaaaagagaggctgattcagccaaacccaatttgactttgttaggtaattatgcgggacttaatttaagtttagatgcggtctttatttgtctggagtttatatgcaattaaca

SEQ ID NO: 47436 - DNA, 766 bp, Arabidopsis thaliana landsberg
  unsure (1)..(766): unsure at all n locations
aagtaaaacctacatcctatactaatatttagctacgcgctatatgataattacttgtgagtaattaacacaaaatcaggagttcctacaatcggtgaaacctcacgtggagtttgtaatgtaatgaaaatggagagtgcatttctacctgctttctccttcttccattaatgatttgccctaacacgtgacctttttactttctcaactaccattttaccaatctcttaattaattccttatcttcttttccatcaattcaaggtttcttatttatcgtaacgaccaactaattcttagaaaaaatcatagtttcttgagaaacgcttttcgtaagctagcttatcatttgaattgatatctatgaatttatccgacgtatctatgttcttgacaagttacaaagaccatggcctacaaaatattcaagaattttgctgtcatcacgagctaattaagctaatatcagtatatatgaaaatacgacgactctaagaaaaacattcgtgaaatgcttttgtaaataggtaaggggatattttgaaataagtatcgataaaaacatatcgaataatgattgtggtttttattcttggttggagttctttacttcttcatttggaaaagggaaaaagctttattggtgaaagtttgtttgatacctgaaagacaatcttaaaagagtttggtagatttcatggtgtacatttactctgaactcctaccgacatatttgtatatttaataacgaagaanatagaaatgg

SEQ ID NO: 47437 - DNA, 718 bp, Arabidopsis thaliana landsberg
  unsure (1)..(718): unsure at all n locations
tgtgtttatccatctcattaggcaaaccctaggctgccccctattcttaggattaggcgggtgatttctgccacttgactggagatttcctccaacatttggcgcactaggtaggggtgtttagcttaggttttttgcctattttcttagctcggtgatggtgtggattgtcgagcatctcaactcctcctccgacgaagtttagatgggggagggagtggagtcatctatatcgtgggtcgctccttgcttcgctccatgtgttgttgtgcccattgtgccgcagcacacaggagtcgacatctagagcacctcgcggggtacccccgacgcggtgcttttagcggctagggagttgctccacaatccccaagatatgtagcctctcttagggcaatgaggctgtggcatgacgacatcgactgcctcctcaatctggtccaaactgcctccagttcaacacagactagggcacgtccgtcgctcgacccccnatgaggtggccaggcagcacttaatgtctttccagtggcattagcatgaggtgttggcgtcatgcgctcacctctatgaggggacacgggctgtggacttacatcagattcgacanagacgtcggtaaaggatcgtgtgctcatggagaggcatgtgacactgacaaacatcgagggtcggacttgatgtgagtttgtgtacgacacacattctagaaatgtag

SEQ ID NO: 47438 - DNA, 654 bp, Arabidopsis thaliana landsberg
tcagaaagtaaggcaatagccgcacttcagttaaagcatctttctttacagagcagatcaaagatcaagtatattttgctagaaattgtatgcaatcataaaagctcagacttggaataaaaagagattacctattatcgtatctggactgattattttccctctttaacattccactagggagataccatagcttagttctgcggctataagcagcactttgaaggctcttaagaagatagggtaacttataagaataatgatttttgcataattgacttctccttctcagagcagactcggctactctttttgtttcctcaagcatattgtagtctaacatgcaagcacaaaaaaagaagagatatttccatcaatcaaacatagaagaatcaaatacaaacaaacactttaaaggtgaaaacttttgaaaatcacgaaacgaaaaaacagattcacataaaacccagattagaattataccagagaggaagagattgtcgtccaacttggagaggggaacgacgtcggtgaacttcctttttccggtacaacctgttcgctgcttgtgggctttcacacagggaagggcacacgatcgaattgaacatgcgggacatttgtacttccatggattgtgtttgcactcttcgc

SEQ ID NO: 47439 - DNA, 958 bp, Arabidopsis thaliana landsberg
cgagcatgaaattgtctagatgggcttgctcttgaagtaacccttgtatgaaattttgttaatctcatagtagaagcaatcagagataataaatcacttttgagtctacttttgaatttgaatgttctcaatcttttttattccattttatctaaatgacgacgaaagagatttaaaagcgaaagcaactgcaaacttatcgtgacaaatttgggtaactagtcatcatcatcatgctaatgttgcagtctcttactaccactaaaataagaagacaaaacattaaaattaaaaccaatcatttgttttcttgagtttctgtgaactgaaaaaaaaaatcaaatcttttttgagtttcaatctctgagagtttctatgaaacaatcgtcatggggttgcacaatcttcatccaattatctctatgtctcataatctatgtgtctctgcattcgggtcacccattcttcttctctagtgacgacggtgacaatgccacaccactagatcttcatttcatctccgttgccggaggtttcaggcatcttaaccaccaaactcgccttctccgtttggtttgtttccaatcttcttacgttttggttggaacatgaaaaattggtttcaatttatctagttatcgaattcattggtttcatggttaaagtctggttctttataatatttctagcttccccatgattcataatttgagttttattttactgaatttgtttctgtttgatcgttgaagatggagaaagttgcagaaacttacaaggccaaatttgttgtgagctcaagtgaacaaggagaagaagattcattcctgcaaaatgtaatcttccattttgggttacttggattgacaaaaaagttctgaatctctttagttcgaaagttagtatgagtaatgagtggtttgatctttttgcaggcgactcgactgtcttctacact

SEQ ID NO: 47440 - DNA, 614 bp, Arabidopsis thaliana landsberg
  unsure (1)..(614): unsure at all n locations
ccataccactaatttccttcgatgcaatcagactctacagcttccagatttagggtggtaagcaaaaagaaacgaaagacgacacatttctcactgggagaagtcaaaatcaaggaaaaaacttataccgtcatcatcatcttcttcatcatcgttttcatcatgctcagctggatctccatgaactggctctccgtcgtcatcctcaagctcatgatcctctgcgcaaaagagaaaaggattcaattttttcatacaaatcagaagaaataaacaaaaccctagtattattacggcgtttcacacagaaaaaaattagggtttgcgacgaagcgattannnnnnnnnnnnnnnnnnnnnnnnnnnnnnnnnnnnnnnnnnnnnnnnnnnnttagaagtacgataacgcagaaattagccctgcaaactgcaaaaaaaaacgaagagattgtgattatgatttctgattttgcgaagagaaagggggaagaaggttctcgcgattactagggttcttcgaaaagagaatccagaaggagctagagaagagaaatgggtttggtaaaggaagagctttactagtgtgaatttttcataagcganaggcgacgaag

SEQ ID NO: 47441 - DNA, 1081 bp, Arabidopsis thaliana landsberg
ggatagtatacagaggaaatcaatcattcagcttagtcagaagacacaaaactataaacaagtgaaaaaactctatccaaatgaggaacagagaaaagttgtctctttttgatgaatgattccaagtagactctgctttatcaataatccaagagatcaaaccaaacaggcatcagaatccagcataatctcatacccatttcctgggatcaaatcagtttgaatgaatccaccagttaatattcctgataaaacacacataagtgcctaactccaatcaaatctagaatatcatctatccaaaaactcagacattaaacttaaatcagaagccaaaccaagagatttacaaagaaccatatcaaacatagaatcattctcatttccatcatatcatcatcatacaaacataaccctaattgcatcaaccatggaatcaaaaaccatgtgtctaacgagtgaaagcatctaacataggagaaacatagctgaaaagtgcagaaggaaccagaatcacaagcggcacaacagctgcataagtatgaccactagcaccacagcccaaagtcccaagcttgatctgaacaacattaatcaaagccaacatgagaaacccacatccacaaaccgatcccaaaccggatgtaaccatcccaaatctaagagccgtcttgttcacatagtaaaccacaggatcgattcgagtagagatgtgaaacgaagaagctatgttgagcctcattgcttgtttgagacctagagcgatgagacttgagaataggaatgatgcgaaagagtacacatggaaggcgacgagattctcagccatacgagctgtggggacgcaattagggtcggttacgaggctgttgtctggatcggtagggttccaagctaatccgatgaatacggcgagtgtgaagagtgagttcacgttgacgattccgtcgagagctgtgatgtgaatactcgtcgtcatttttctctccggcagatccggcgaatcagagagagagcttcgttcagaaaggaaataaaaaaggaggaagagatttacaaaaaaaaatcgccgttgccgggg

SEQ ID NO: 47442 - DNA, 565 bp, Arabidopsis thaliana landsberg
tcaaaagttaaagcataaattttcttatatttgaaatgatctcttttttacaaaatcttcttaaaattatgcgtgatcgatatattaattgtatatatatatatatatataatgtataattctgcttgtgtcgtgcttaaccgtttgatttggtgtggttagatctggttttcccccaacccaattcaattgaatcaaggatcaatcaaattttcaaaggatactcttgttctctacacaaatctttcaaagggttccaccaaaaatcccatcattctgactttagaataaacaaacaaaccacgaaacgtatctctatgcattcactacaacgtgtcatgggcgaaaacgaagcttataaatgttggagcatagtcactaaatttataatgattaattaaattttagattttctgatattcatagaagacaaaagaacacaaaagtagcatcttccaatgaatgtatgacactatgatctctcatttccatttatagcaaatcggctctgtccacatcaaagataactaataaatagacttatccaaaacactcaaaagcaata

SEQ ID NO: 47443 - DNA, 523 bp, Arabidopsis thaliana landsberg
  unsure (1)..(523): unsure at all n locations
aaaaaaaaaaaaaaaaaaanaaaaacaaaaaaanaaaaaaaaaaaaaaaaaaaaaaaacaaaaaagaaaaaaaaaaaaaaaacaaaaaaaaaaaaaaaaaaaaaaaaaacaaaaaaaaaaaaaaaaaaaaaaaaaaaaaaaaaacaaaaacaaaaaaaaaaaacaaaaaaaacaaaaaaaaaaaaaaacaaaacaaaaaaaaaaaaaaaaaaaaaccaacccacgaaaaaaaaaaaaaaacaaaaaaaaaaaaaaaaagcagaaaaacaaaaaacccaccgaaaaaaagcacaaaaaaaaaaaaaacaaaaaacaaaacaaaaaaaaaaaaaaaaaaacacacaaaaaaaaaaagaaaaaaaaaccgcaaaaaaaaaaaaaaaaagaaaacacaaaaaagagaaaaaaaaaaaacaaaaatcaaaaaaaaaaaaccaaacaaacaaaagaaaaaaccaaaaaaaaaacacaaaaagaaaaacaaaaaaaaaacaaaaacaaaaaaagaaaaaaaaaaaacaaa

SEQ ID NO: 47444 - DNA, 756 bp, Arabidopsis thaliana landsberg
caggaacaaaaccgttttgactctaattctatgtctagaattggcatggcagattataaaggtaaatgataattacgtcgataaatatgtcatataggtcacacaatttatcctccaatgccgcatccatgacaaacttcttcaaagatggcttttctactgagtcctgaaaatcgtctgatgttgcaccttctggtttgattgcctatggaacataaaatgatagtgcaagaaatatcataaatgtcacaggtgcctcaacatattaataggaggaaaatacgctacaaaggcagattgacccacagggaacatcgaaaacaaaagaatgaagagcttgatctacggaaaaccattatcagagagaactccagatttcataaaagttaatgacacttccaagaatgtaataagatagaaaagccatggatgaaagaaatgcctatcaagcaacttaagattagaacagagagagagagagagaacctgtgattccatcaaagaaactttggcctttatcatatcaagaacttcattgttgatttgcttgaacctagtatccttttctcgggttgcagaatctcccatatcaatcatgattttcaagttcctctgcaaaataagcattacaaagagtaagaaaccatattttgtttgcttgtacctgaaacagaagagtttttcactggaacatgaatgtcctgaagaagactaactatttaaacaccttgacgaaagtcctaacaagtctgcttt

SEQ ID NO: 47445 - DNA, 191 bp, Arabidopsis thaliana landsberg
  unsure (1)..(191): unsure at all n locations
ctatcctagatcttcccattttaaagagtacccgggctcgatctgctttagtatcaaggaaccagtatgcatagttccaactagtatggtatacttagtgtaagcgagctctaagatcacatctnttggaataaaattcagttagaaaaggaaatccaattagagataagctgcctatgagcatcatggca

SEQ ID NO: 47446 - DNA, 451 bp, Arabidopsis thaliana landsberg
ataaaaataaaataataacgagaagaggatttgaggaaaaagaaatgatatggaaatgtaaataatatatatataaatacataattatgtttctaaagttgatacttctaatatcccaatatgatttgaagataatttggcacaatatttgaatttaaatctgaattgtaaatgaattgggaaatagagaaaaggaaaagagagaagaaaaaaagaaaaggaaaagactaaacacaacatgggctgaccgacccccccccctattcggcccacttcgcccttctaccgcgcagctcaggtcatcaatctccataccgcgcacgctccagctgtcacgcggaccccaccggtctgtcgcctggtaccgcaactacgctattatcgctgtatggcgggcccacacatcagccggggtcttccgtgatctggcgttggctcactgccggtggag

SEQ ID NO: 47447 - DNA, 602 bp, Arabidopsis thaliana landsberg
  unsure (1)..(602): unsure at all n locations
gacaaacataacaaaagaatcatgtgatgacacctccaccgtcagatcaaaaaccataaaaatgatttgatcaaacaaaaagtgagaaactcaagaaccggttcatttgacgagtaagctgatccagtatcgtaccgaccggttaagttgatttgatcgcgttgaaagagtgaagacagattcaactgcaattccgcgaaaccaaacctaacagcatttttctccaattccttcttcttcttcttcttcttctgtaacctcgtcttcttcagcttatactcatagctataccaaagaaaacctcttaaaacccttcttctctcgatccatcgatcagcaacaattcacttctaatcgatcaagagctttccgatctcgtcgatcccaattaacatggcttccaacggcgcttctccggtctttttctctcttgatctctgtgtgctacaatttagtctctttcttttggctgcttttctcattcacactcttaaattgacccattttgtcaatttctgaanatgcgcagagaattgttgatgctactgagaacagcttggataagatcaagcgacaattggcatcttgctctggtcggaact

SEQ ID NO: 47448 - DNA, 360 bp, Arabidopsis thaliana landsberg
tgctgccatgtcaaatatagcacaacagctcgggctactaaccaatacagtctactttcttcaaagcaaataccacagatgccaacgccggatgttacgcctcgaaactcaaaagcagggtgccatacctaccaaacgggtcttgaaaggtgtgtgccggttctatttgcacgcacaccaggaactgtcggggctcaacccgttaagggtggaggattcgaacaactaatgggaggggattcttctcttaaacatgactcggatgagcagctgagatctccacgctaccaaattacattactgccggagacatacgacccgagagcaaggtactcatgtgtgtcgcacttgttcacaaag

SEQ ID NO: 47449 - DNA, 748 bp, Arabidopsis thaliana landsberg
cggtgtttgcatctgtggaatttgcattgaagccaattgtctgaattggttatagcccggctgttgttgcatattcgacatggcagcaatttgttgttgctgtctgagttgctgctgtagctgttgctggtgtcttgggttcatagggttaaaggcatttccatctactgccatttcagaaggattctctagctttacctgaaccagcggccgatccttttccatatccatgttgggtcgcggtgatgtaactggacgcctacgcattctttctagctgttgctgctgctgaaaattttggggattaaccatttgctgcatctgtggatgcatttgcctctgaatctgcaataacatcgaatcaagaactcagagaaggtaaaccatgaaaataacaatccatttatatgaacaattacaatgccaaatgataagagcaacaacaaccattatgtacatacttgttgcggtaatcggagagaagcttgttgctgcagatgtaactgttgctgaagcacttgtggttgtttctgatttgggggaggatgattcctagtaccatccttaacaatctctgctaaactcccaagattactggaaaaaggcgtgaaatttaatcacatgaacaaaactaaaatttgaagttttattacttaaccaaactaaacaaagatagatcctcatagatcagttgagtgaggcatcaccactgaaaagaaactcacctatatcccgtagtattaaggaa

SEQ ID NO: 47450 - DNA, 1076 bp, Arabidopsis thaliana landsberg
  unsure (1)..(1076): unsure at all n locations
attgtattggtaaacccggtttactcggagggtaatttggtaaagtaaaaaaggatggtatcttcgtcttgacttctacgactctgcgtcatttcgtatttttcccattacagactgttacgcgaaggcaagataaaaaggtgaaaggtgtcccaagcaagctttctcttctttctccacacattataaatctacagtatcttacataaagagactgtgtgttgatagagagaaagagcagagaagagataaagcaagcttcttcttccatttgggagaatatttcatttttcagcaaaaaccattgtagactctgtagtaacgacaacaagtattcagacactgtttgggtttcttagatttttctgttcaacatccatatatctgatcagaactcaagtttactaaattttggagagtgatcggaagaaatcgaattctgttcaatgctggatcggttatgtcgtaagttcgtcgactttgattctttagcagctcaagtttcttgcttttgattgttttttatcatcggattctgcaatttagcataatcagcgtgttctagagatggattttgcctaatttttagtatcagaatttttggggtttctgttttctggggatgtgtcaagttgggattttttggaatttgtctttttggggtttttagttttggggtcagatctgggaagcatcggttttgattcttatagttaatggagctgcattttcatctgtagttgttgaattgatttctgtttcgtaattttgggtaaaggttttatttttacatttaatttgcgtactagtcttatgagattgaccaggtttgttgattaaccactcaattttactcttttgtggtttcctcaggttcttatgaatgattcacattttggtctaagaaagaggctttgacttgtgtcataaatatgaaggctgatactgttctagactatgctgtgtttgagctttcaccgaaatattcacggttagtaaattctgttagtgtatgttctgtagcaattgatcatgctngtatgtttggtctcagttgtatatttgtgttacagatg

SEQ ID NO: 47451 - DNA, 471 bp, Arabidopsis thaliana landsberg
  unsure (1)..(471): unsure at all n locations
ccccccttttctccttccccccccccccccccccctttcctcccccccccccccccccccccccccaccccaccttcccccccttgggccccgccccccccccccccctcccccacccccaccgccacacccccacatcccccccttgttctttcgnccccccccggggggcgcccccncacaaccgcacccccaaccccccaccntctcctcccccccccccccctccccccccccncccnncccccccccccccccccccccccccccctcttcttccctccccccccccccccctccccccccccccccccccccccccccccccccccccccccccccccccccctccccccccctcctncccccccccccccccccccccctccttcccctccccccccccccctccccccccccccccccccccctccccccccccccccccccccccccccccccccccccccc

SEQ ID NO: 47452 - DNA, 636 bp, Arabidopsis thaliana landsberg
gcctatggagtgggggcccgaccctacatgacttacagctggctcgccggggcgaagaaggcgaatcgtcgcgcaaggagcgtgttactgccccgcggtaggtgcaccgcttcatcttcgccgcgaccaacggtccaacctcagaccaggggccaggtctgcatgtcaggcacctggcatgccgggtcctgcgcatagaggagacggaccaccgtgggagaaggcacgccaccgcccgcggtgacgcgcctctctgcctccaccaaaagcaatagcccagtctctcacgcaggggcccagacccacgagtcatccaccgtgggtgatagtccctgggtgcaggggagtcaaaccgccgctcacgctgataccgcgcctccttaggacagccgcataagatggggaggttaaattttcaaagctaatacagcagtatcaaggtgccctgcgcgtgacccagcgaaaacggttgaatacggaagtcacaggtcaatagcgggagagctggagcagcatggcaaccaccgatcaagctttggcccacctgcaggctcgttctctccctgaggcgggccaagggcgcctgtcagtaccctggttcagggtacccttactacggtatgaagcatgatgttg

SEQ ID NO: 47453 - DNA, 536 bp, Arabidopsis thaliana landsberg
cacatccatgtccctcctaatatagcatatcccaaaactcaacgctagctttgcttcttgttggccagccattaatagatcgatggaccaaattaattaagcgactactaaactgtacactattcattcattccttccttccttccacaatcatatctcattcgaacaagatgctaagttggctccgacgcttccctaacgatgtgatccataggaaggggggcagctcgggccggaggacctcctcctccacctcctggaggaacaagagcagcagcagcttcaccgcgcggatcatccgttgtgcgtcctccgtcgtcgacacacaccaccagcaccgtggtgatgatgatgatgacgatggcgatgaagacgacgagtacgacgactgtcgtctaccgtcgtcgcctcctaacaacaacgctagaagaaacaccaccaccactgctgtcatctcggcccgagccttctccttccgcgagctagccgatgccgcaggaaacttccgccacgacaacctcatcggagagggaggc

SEQ ID NO: 47454 - DNA, 593 bp, Arabidopsis thaliana landsberg
ctcttggcaatgaactacctccgattgaaatctgcagaccgattgggctaccggagctaaggaggcttcgaagaacgtttgttaaattgatgggtcaatcgagtctaagcggtccaccgttaccaactgatgcagacagtgcaaagagacgttttgtggattacttgaacagagagtttggaggtaataacgcttgaaatttgttgggtgaaaaacatcttatttcttaaaggtttggttatgtattttcttaactcaagacttgttcttcttcatcgaaattcttttttggggctaaattgatgtgttataataggcccgttataataatgcaaacatattttggggctatagtatattttcttgtttttctttttttggttgtcgtattttcttgtttttctaacattgaaatttcaaaagacaacgacacgtttgacatttttggatgtatattaatttataataaatatgtcggcaaataaaaaattattcatttacaacaaatatgctttgatttgaaaataacccctacggtaattaaaagaaaacatacagcaacagttcttatctttggtaatcatattcttaat

SEQ ID NO: 47455 - DNA, 416 bp, Arabidopsis thaliana landsberg
catgtatcgtaatacgacatcggtatcatccaaagtagttgtagtactagctaagattttcagcatatacagtcgtacaggtgcaaaacttgaattcaccacgtactacgggatgcataaataacaaatcaactttaaaccagctattcgtgtctaaatgactttgaatgttgcattttcagcaatatacccatgacagatacatttaaatgatattagataataggacaagcatctgaagatgtaatatacccatgacatatacaataatctgtattcttcatattataatatagtttgctctaaattgagaggttgatgttgtcttaagtataattgttctgcatttattgtagtaataatggcctccaaaattgatccggctagctgacaatgcagtaagaagaagttgcatc

SEQ ID NO: 47456 - DNA, 522 bp, Arabidopsis thaliana landsberg
atagatttggacggaacatctacttttagttgaagtgataagatagctgagatgatatctccactttctggccgtccattatggatattgtgaatgcatttggaagccaaatcaaacaccatgtatgcgtattgctcaggataggttccttctaactgtgtattcctcacgacatttaagttctgatttagaattgtaccaaccgcctgactagagagagtgcccttaaagacacgtcattttggaaatagaaaccaatccaatttgcacggttactagatgaatctttgtctctcacatgacttggaggaatgtgattcccactaagaagatccaattgagacgtcccaaagctgaagacatcactctctggaattaacgttcctacaatatctatatacatcatgtgccacaaaaaggtgcacctgacttattatggaccatgatcacctcattcatatatgaacgttttaagggcaatacagaagagttaataattgatgtccatagctcatcaatcat

SEQ ID NO: 47457 - DNA, 284 bp, Arabidopsis thaliana landsberg
gggggccccaacgccggcaagggaagaaccgaaaggccccaacgccccccaaaccacgagggcagccaaaacgaagagacgacccaccgaagcgcaaacaggaggcaagagagcgaccccgacgcccagagagccggccaaaagcacacagaggcagaccaacccgaacccccagccaccaggaggagccaacccacagcccaaagcagaacaaaaagggagaacgaaagccaccgcgacagcgccaccaaacaggcaaaccacgagcagaccagcaaaacgca

SEQ ID NO: 47458 - DNA, 359 bp, Arabidopsis thaliana landsberg
gaaagagtattgcgttgtccattgttctgctcatgaaacaacaacatgcttaatgagtggaaagtagtcaaatttctgattttccaaacatacagattgttgttccagaaacaaaagtaacatgtgtaatagcccttgtaagtgctcaattaaaaaaacatatttcaggcctgataagtgcccacttaaaaacggaagcacaaaaataagtgtgcagggctaacaaacaaagatggctattagcagtaaaaattacaatttcattaatcaccacactagaaagagagaaacctaccaaaaaatcatcatcatcattattgcaagtgaattgaattatgctgctactcacgaatgaggtg

SEQ ID NO: 47459 - DNA, 646 bp, Arabidopsis thaliana landsberg
tatcttttctcttgatctcttctattaggcatatattacaaaagagagataaccgatgtgtctatacattaaaatgttcatatattagccctttcagaaagaaaaaaaaaaatgttcccccagatcaaacaatagttagctaaatcattgattggaaaggtttttaaaaaaaagaagctgtgaaaactttagaaacaatttttgttttctaaatttgggatattactcatagtctgggataaacaaattgttgaatatattttctaatttataaataaatattattcttggtaagaaaattagatatttgtgcatatatatgcaacgatattagtttatatgatgtgaatactgataggaatattttatgatgccaatctacataaatatatttattcctacacatattataacagaaaaagtttcttttttggtataccatgttgaatagtacacatgatcctggacactgttgggtgatagatacattgggctgcactttaaaagaagtaaccagtcttcttcaaaaactaaaaaagatacatataaaggaaagttaattacaatgaatcattaaagcttaattaatgttaattcaatcatttttcattaaatattgtggaagcacattcacttgatcaaatga

SEQ ID NO: 47460 - DNA, 727 bp, Arabidopsis thaliana landsberg
  unsure (1)..(727): unsure at all n locations
agaggtctgccttcaattttagttatctactttggtgttatatgttgttcttttttgtttcaactttcaagtatatacaaatctagataatttgaagagagggacaactcgtatttatgtcttcttactgtaaggccttgctcctggtatcattttgcaggcagtgattgaaaacattcaattgaaacaaaacatattcaaagaaatcgaaaaggtttgtnnnnnnnnnnnnnnnnnnnnnnnnnatacatctactatcgacctcgatgtaattggtgaaaagactaactcaaaagatcgcattgttggcgcacatttcttcaggtcattctgcgtttccaatgcctcaaaatttttatgcttttttcgtatttttagtgtaatatacaaatggtttgtctttttatagtccggcccatctgatgccccttctcgagattgttcgttcaaagaatacttctgctcaggtgattctggatctcatggcggttggaaaggccataaagaaagttcccgtggtggttggaaactgcataggctttgcagagaataggacattctttccttattcacaagctgcacatatgttggccaatctaggtgttgacttgttcagaattgacagcgttattacctcttttcgcttgccattgggccctttccagtaagtctctccctctatattttgttacctacagtgtatgtgtgaccgtatgtgtatgtgtta

SEQ ID NO: 47461 - DNA, 812 bp, Arabidopsis thaliana landsberg
gaaaattcggaaaaaacgcaactggtgcaacctatacattgtagaaaactttagctcaacaagaatcaaaaagatcattcagtgaccaattctcatataagaatacaatattacctcggtgatcctagcgacagtggcactgcttttcaagctgtttaagtagttctcagaatgtacctaatacataacaaccacaaacaaaaggttacacaaccatcaaaattccaatacatagccaacagtgattgatcacagttcatacatttaagagaaaccaaatagtaccactaaaagatcaatctttgaagcttcaagaggctcaacaattgctttcttcctccagaaacccatctgaaacaaggaacttgcaaactctaccccacttggaagaatcaaatgggtgcctacacaattatcaaatctcaacataaaagaaccaactttcgaatttcacaagattgaccaacagagaaaatttctaaaattggggaaaaagactcacaatttctcaatacccatgaacgagatatcataagacgatgaatagataatcgaaacctttgaaagaggaacgtcgaagtagagtttactgttgagaattcgctctcgtcggagagcttcgggatgagtcgccatcgaaaacgatgatatttcagaggttcgattacaggagaagagaaatttgaagactttgattgcgaaaaacgtgaagagcaagtaaatagctaagtcgcgagttaactcggtccaggtcgagatgactcgggtatgtgtcattagtttttggtctgaagcggtgagatatttttttt

SEQ ID NO: 47462 - DNA, 419 bp, Arabidopsis thaliana landsberg
cttcaactatggagatggaggccatacccgacaatcatcgcaagggtactacattccgttaccatattctttgatccattatataatatatatactttcaccacatcatatatgcatctaagtaaaagtgggtacatgcagagggcacatatatttacataaaatccattttttagttatagatttcagtagcttccaatatacttgttggtcccttcactgggactggtcctggttgtcagagacggcctcatagtgactatagtgttttcgtctgctcctgcttccagtgcagccatccctgcttccagaaacttctgaacagcgtcttctgcgtatttgttgccttcacttactgtcatgttcttcccaatgtctggatatgagtttaggagatggtctccaacgagttgagaggc

SEQ ID NO: 47463 - DNA, 564 bp, Arabidopsis thaliana landsberg
agaagaagattcattatttcaaattccaaaaactcactgaaactaaaatataacattctctttcaagaccttcttcgtccttagttgaaattgttctgtatctaagctccaaagcttgaagcaatgtgataccgcgactaagattctgggaacgaacaaatgaagctgagctctgagaacgaccgttaaagtagaaaacgccattgacggaaccgttatgttttccatcaccgtcttgatcccaatcaacgccgatccaagttccggagtatccctccacatctccgacgtatttcacggtgcccacacgacgcgaatcgttgagagagtggactcgctgcccgattatgaaagactcgttgctagactcagccttcatttttggaaattacgtctgaaacaaccgatgaaaacgaatttgtcgatttgagaaatccgccggaaagatcaagctgacgtcagattaacgtcaagagtgggccgaaacttaatgggcttataaaccctcaccaatagtaaaattatagagatgggctaatttaaagccatatgagaaagaagtca

SEQ ID NO: 47464 - DNA, 549 bp, Arabidopsis thaliana landsberg
agacttcggcgaaccaaacaccaccttaaaaacattgtagaagaagatgatccagtgtctttacaccactcatgtctgaacactcaaactagcatatccagggtttgcactctacatgttcagctaattttaatttcccaagcaaagatgcagaggcactagcagcacacaactgccgcgaatttatgacaggccgggacacccaaacaaagatgcaaggttacgagagacatactgtaacccatgacgcggccgccagggctgacggcggcgtggaagtagtcgggccagcgcgccaggtacgtcatgtagaacgacatgttgaactgcggcgaccgaatcgagagatcagagaggggatgcgctcgaacaaggaaaagagaagggaaacgcatcagtgtcgcaccgtctcggtgaggtggtccaggttgacggaggcgaacgcgaggaggtcgtcgcagcagaaccgacggattgtcgtcatgcttccttctctcctctctctctctctctactcgggccggcgcgagcagggtcggcgcacaggtt

SEQ ID NO: 47465 - DNA, 641 bp, Arabidopsis thaliana landsberg
ttgttaacatgccaaaattcgatcgggtctaaagttttcatgtacattcccgaaatggaccacaaaagagtgcaaaaatgttaatgagcccaaactattggtctccatataatgtcttgataatgtcaagaggcacctaaaataacacatacataagagtcatgcaatgaaaaagtttatgcatttgcagagagacttatcaaatcaagcagtttaaatattctttgaatctataaagcaacctaattcaacaatttgaatcaccatttcacactgaactagtagctaaaactaaaaaaaccaagaacaatcagtgatgcaaaaagagaacatatacaataaatggattcaagcttttaagtaactattaaagatcactttaatggattggtaggttgtaaaattacactatctatacaatacaatacatacaagaattcatgaacatatcaactgaggttttagggcattctaaagcaaaatgggaatatcatatgagtttctagggcatccaagccaacctcccggtaaataagaatattagttatgttttgttgcgtgcattcatctagataatcacaataaccattatcattggcaattagcaaaatactaccacctttattctaaggattttcaat

SEQ ID NO: 47466 - DNA, 357 bp, Arabidopsis thaliana landsberg
actatcctaatcagaaattcacaatcatataatcataccaaaaacaatcatgaaaaataaaaaatctctatattatttacattatcgcctaaattcaaacgtcacttttcacatacagaatatgtacatatctaacaaaagggtaaaaatagtaacaaaagtgaaaaggtagaaaatagtaaaaaagagttaaagaactctctcatcatcatcatcttcttccacggtcgttattgccgccgccgagtccagggaaatttacagaaacccgacccggattcaattcgggtttggacccgtttgaaatctgagtaaggacaagggatagtgattcaccttcttgagaaaaccaaattc

SEQ ID NO: 47467 - DNA, 901 bp, Arabidopsis thaliana landsberg
caaaactccattactctccattggctcatatgctaatgttagtcatcacacatcggcaagtgcaataagctgatcaactacactaggatccgcgagtgtgctagtatctccgagttcttctaattgcctcgaagcaatctttctcaagattctcctcattatctttccgcttctcgtctttggcaaccctggtgcccaatgtattctgtccggtgctgcaaaagccccaatctggaaatggcaaaattcataccgatactcatcagaagtgtgcaaagaacagttcctcaaaagtttagcatctctaaagcttaagcattcactttttccttaatatatatcatacctgatttcggaccattagtactaggcttttacgaagctcctcgctgtaaggaacaccttccagaagagtgacaaacgcataaattccctgaccttttacctgatacaagcaagagccttgaccgttagttactttggtgtgtgataagaagcaaactgatttcagcttttagttgactggtaaatgaagaacgcggaatcaagaacaaaatcaaacccaagaaccatgaagaaaccctaggttgttatagagagctagaagactcttcctgcctcgataactaattaaacatcataagtcatttcttgaactcttatcagtgtcatactgtgcttcatatcccaactacttatgcatagtcagtccacatacctcatgttctatgcctacaacagctgcttctgcacattgaggatgtaaaaccagagcagattctacttcagcagttccgattcgatggccactgtgcattagagaaaaatccagacataagtatagatttgagtggtaggaatattggaggtttaaggaatctattgacatcgttttagattt

SEQ ID NO: 47468 - DNA, 914 bp, Arabidopsis thaliana landsberg
gaaaactcggtccaagcaagctacaaggttcactaaccagcaaacaggcgcacacaaaaacgttaacctctacatcaaattcatcaatctttgaagatgaatgtaccatcaataaaaagttatagtttgttctcgcggtattggacgatggcttcaggttgaagacgaccagtgcagatttggtgaaccgttgaaaagagcggaaacatctccaaccatccacaatgtttcaacacctcgtagacctcttttgccgtcgataccccctttaataagcaacagtcagacataagacacaaagagaaccactttctaatttaggactataatcatcacaagcagaatcgaagatgattaaccagacaaaactaaagagtattatgttcttcacaaagtctacctgtagcttttgcccttgtagcatctctgcttcaagctcatcaaaagacctgtgacgtttacaccaccaaaccatcaaaacaatgataactaaaagcagttgcagtgaaatgtgattaacaaaggtaagacctttttcctctgctttttgcaaatgcttccgcaactctccggtttcttcctcctactgtaatagtcagtgaaagaagagtcaaaagggaatcgctgtaacaatggacaaaaaggcgaaaataactcgggttttgattcagttcttacagcaagttgtaatgacatctgctacaccgcagctctcgaagaaagtactatctttaacagatggaaacaaaagctttgagagtgctttcatctctcttagaccaatcctcatgattgcagcctaaagatgatttacaagtaaacagcttgagatctctagaaacaacttacgtctcctaataggaaacaataaaacttttcatttgaacttacctgtgtgttattacccaaatgca

SEQ ID NO: 47469 - DNA, 679 bp, Arabidopsis thaliana landsberg
ccatccgaaccgggttgaatgttgggtcttcagatgacgacccggagaggaatttacttggactcacccacttcatatctatgtactaatgaaaataaaaatatccaacaggccattacggatgatcatcacacaattattgcatgcaccaacccattatcaatatttttgttttttgtttgcaaaacacaattatcaaatcggcaagtagatgttagtcttaatcactggaataatgacgaaactattcgagtgattaactgattatatatatacttttctgtcagtgactatatttagtataaccaaagaaagtatttaaatagtgttgcaatttctttataaccgatctgaagtttgagctgttatgtgattttttatctttttttttgtttttattctttccgctttcgtaaaagctttttataaaccattgatagactgatagtgaaagaaattagtcgacgaaaaaaaaaaaggaaaaaaaatcgacgacaaagttgaccaattagatgccacgtcatcaagactaattgtaatttgtcaagtggtccccgcttcgtagagcccaaagacgaaatcttattcacgtgcttgtaaattaccaatatgcccttcttaagttcccgtgaacgattcaaagtcaacgacgacccccatgggtcgatctaaaaaagag

SEQ ID NO: 47470 - DNA, 841 bp, Arabidopsis thaliana landsberg
tttttgtatggtacggatctatggagaatacggagacgacgagtctatgagcttcctttcctttgttgtgtctgtctcattagaattttgaagatcaacccaaattcgagaatcgatggtttctggctttctgcttccattttttttctctctctgagtaaatctgcttccatttgtgagttattttcgttataatgttatataagaattcaactttgcaagggtacttgctggaaataaaagaatcaactgttccatcacattaaaactgataaccaaagaaaagaggtaatttgtccaaactgtgtctcactctcacctaaacaaaactacaaaacagaggaaaaaagaaaagaaaagaggatgcctcagtagttcttctctaacaaaaacccaagacgacgaccaaccataaaataaattgaacatatattcctaagcgactctaaacaaaacagaccacaagctaaaacactgtcaatcaatggatagtaaaaaaaaaagaaggggaatgagatacacttatggcaaacatgtcttcttgatggacagaagaagcaaacatagaaagaaagtgagagaacaaggagatagaaaaaaaacatccaacgacttgggcttttttcttctttttatgtttgtgtaagagaaacctcactctcaagcagctgcctggactggtggtccatctgatctgttgttgaaaccaccatcaccaccacgtcctcctcctcttccacgtcctccccttccacgtccacgtccacgccctgcatcaaaccaattcaaaactcatggcttcttcacacaattacagttcaagaaccagataaaacaaggc

SEQ ID NO: 47471 - DNA, 443 bp, Arabidopsis thaliana landsberg
tttggtgcaacctgtccaaaaagtttggtccgggtgaggatgccttccgcaatttatatgcgcacaacgaagaggaccgcacgacgatgatcgatgcgcagcaggtttcggagcgtaacaagtttttcatcaaaggtgcataccaatcgagtgggggagctgaggtgcagctgccattcggtgtgctggaaacctccgtaaccgtaacctcgggcggcgtgccgctttctccgggttcggattacattgtggaagcacagatcgggcgtgtgcggattttgaattccaacatgctggcttcgggacgcgagatcgtgatagagtacgaacgcccggatatgtttcagaaccagatcatgactttagtgggaacacgccttgattatgtggtaaacacgaatttgagcgtaggtctgacggccatgaagtacatggaacgcact

SEQ ID NO: 47472 - DNA, 479 bp, Arabidopsis thaliana landsberg
gttgtgttatcacactcttttcttggtttttttactttgtaaaagaaaggatgttgaggatacatgaatctttttgttttgtggttgttaaacatgtccatggaagatgattagagaaatgagattttgattgtagtagagagagagccagatcagattaatcagttaaataatgatgaatccatctaagctcgctacataatttttcagttaaatgcttaaagctctatctcattgagttttttcatcgataaaatcttgcaaaatcgttgtatgaaaaatacagagaacttttatacacgcgccaaacgcctgaccgctgcgtgtcttttctaaaagaagtgcagtgtcattatcattcctttggcctttaatgatcgattatgtcatgttgagcgtggtttatgtggggccttaaattagtgatggtagagagaagacgataagtgtccataacacgtgcgaattgtggtaaatct

SEQ ID NO: 47473 - DNA, 471 bp, Arabidopsis thaliana landsberg
tatttagttgcaaaataatcctccgagaaaactcttataatttatagatgatttatattttatagtatttagagtaagtaagattcttgtgtaagtggggtcaaaaatttagtttattggttattggttccagaaaagaagaacaatgatagagagaagttgaggcaaatgctattcgtagactcgtagtacattgtccagttccttattccccaagtaatcatccttgttgcatcaagttggttttatttatttcaatattgttactaggaaccgttttgggctttaatgagacgatgttgtctctaaagctttaagcatccttgagagtaaagtgtgtagtttgattgcaataccgtaagtattattatgggttcaagaagaagaggatacatggtaatgacagatctcatgatataaagaacccataaaccatacaagctaacagcaagttcaccaatctctgtggtt

SEQ ID NO: 47474 - DNA, 704 bp, Arabidopsis thaliana landsberg
aaaaaggtaacttttctcgtgtatctttgtttttttcttttcgattttgatgcttttcatgttaaaataaaaaatgagagactttgcattaaatggattgatgaaaagaatttaattttttaacaaaaaaaaagaaaagaatttaaatggattaatcatttgtcagtgctgcatgccctaacttactttatgacccaaagacagaatactagaagattatacacataatggtaaatggatatgaaatgaccaaaagatgtttgtatgctacaaaagttgaaagtaaattacttcggaaaatgattgatagagaagtggaaaattttcgacgttctaaaggccgtcgagccaataaaacccaggcaatatatcaaagaataatttaattaatacttttttgtcataaataatttaattaatattatttacatgagaagatagtgaatgatgaagaccaaaaacataatattatctataaacatataaatagttgactcttttgtcaacacactatgtgcttctttacctaaaactctatttaacttgtcttaagatattgcacttccagctttgtgatcactgatcaactatcaagtaaatttacagatcctagtaaggtgctactgctagaaaattctctacacgtttcccaacgtcatatttaatttattgagcgggcatatagatacaatactgtcaaacca

SEQ ID NO: 47475 - DNA, 640 bp, Arabidopsis thaliana landsberg
ggctctcagcccattcctctttcaatttctccattctctctcccataactctttctcttctgatatatgctttatgtcatcaatctccattatttctcctgcaccttataagattaagaaaacaagggataaacatgattataccacacaaaacattactacacacatgcttaaaatctcacagagctcaaaatcaaataaactttgtaattttgctctttcattgatgggatgggagggaaacagcaccaatagtaaaacttagagaaataaaaaaaattgcgcctaaacagttcatataaagtagcataccttcgactgcacgcttcttggcctctgcatattctatagacattttatctagggaattcagatcaacttccttaccctgataagcacaaaagcagcagcaagaatggtgcaatataagatactttagtaaagaataaaatcaaaactgttggacatatatatcctttatcttggggaaagagccctagagatatacaattatgcaaatcctgggaatgtaaatacttcaatatctcgttcttaccatatccaaatgaataaattggttaatactagtgtcacagattaacctggcaagtcacgatgaaaatcatatcactaaaaatgt

SEQ ID NO: 47476 - DNA, 150 bp, Arabidopsis thaliana landsberg
  unsure (1)..(150): unsure at all n locations
tgcgcatgacgagcagccgatcaatcacgtaattagtatgcgtgattgattagacatgtgtgcatacatagagtnnnnnnnnnnnnnnnnnnnnnnnnnnnnnnnnnnnaagagcttcaaggatgcagcagcggacgcaatagaatacat

SEQ ID NO: 47477 - DNA, 290 bp, Arabidopsis thaliana landsberg
ttatgtaaatagagacaatgctctagtgattcatatatacttccacttttacataaaaaataaaggatgagttgcacaaatagacttgcagttacgtatcttcagaatcattcctgaatctcataattcaaacggaacgggtcactgtgtttacggatcgggtagataccaacccagttattaatatctccaattcggtagggatgtgcctatcatcatctgcaactccatcgattaattcgagagatgagttcctaagctttaggttgtggagtacgcactcaaacagt

SEQ ID NO: 47478 - DNA, 753 bp, Arabidopsis thaliana landsberg
tcaagattcccaattttgctactgatctgcaatcaccaaatcccaacaatctagttacatgtacaatctatgaagaaacagtatccaaaagatcaatacagtacctcaattacgtacctgtgtttgaatattctatgcaagccaccgtagggtttcagctctaaagcctgcaatcatagacacatccatggtcaagctccataaaaatggagaagaaattgagacaaattcgtaagtctacaggcctgagtgagaagtgcttcggcttcagagaaatttcccgcatcgatttgagagagagcattgttggttaacgctaaagccgtgagagcgtctgtgacggcggaggatgaagaagcttcacgaccgtcaccacataggctgaacaaaatttcagcagctcgagaaggcgtggcgcagtgacgtaggatgagaccttgagggagagccacgaggtttggaccggagccgcatcggccgaggcaagcgcagtgagtgactcggagttcgggaggtgcgagagctgttaaagtctcgagaatctggaaggagccttgtcttcggcaggtgcgattcgtacaaacgcgaatctccttcacttgttcccctgagctccggcagctcatcgccggcaaagcgacggaagacataacgataagaatatcgaaccacaagaagaagaaggatgcgcgcctgactaaatataccgagataatcaaatttaaatgtattaaatcccgtttgactaaaccg

SEQ ID NO: 47479 - DNA, 356 bp, Arabidopsis thaliana landsberg
ccatgaccactatacatcgcgcacgtaagaggcatatgtgcaacttgctgacatctttcagggtagatgcgacgtagttgtatggtgtcccaagcgttgacgtagatgtcgcgttgatcgctggccagcgggtatgatccgggcctcagagctctggcgatgaccaaaggcccttcccaggggcgcgttactatgtggctaccacgggcgtcatgtcggagccgaagcaccaactcgcccagctgcagttctcgcgagcggagcctctgccgtcgtagcctcacaggcactgtagttaccgctcctattgctagcatgctcgacgttgggagacggagatgcatcgctggaggatg

SEQ ID NO: 47480 - DNA, 405 bp, Arabidopsis thaliana landsberg
  unsure (1)..(405): unsure at all n locations
cccccccccccccccccccctcccccccccccccacccanctaccccccccccccccacaaccccccccactaaaccccccccccccaactcctcccctatgtcccgannnnnnncccccccccccccaacccactatacccccccccnncccccccccctcccccccccccccccccccctcccccccccccccccccccccccccacaatttctcccccccccccgcccccccccctccccccccccaccccctccccccaccacaccccccccccccctccccccccccccccccccaccccccccaccccccccccccccccccccaactccccacaccccacccccacccccccccccccccccccccccccccacttctccatcccccccccccccccc

SEQ ID NO: 47481 - DNA, 1042 bp, Arabidopsis thaliana landsberg
  unsure (1)..(1042): unsure at all n locations
aaaattttcggggtagaccaatagtaatctacgctattttgcagcttctcattatttccagaagccagagagaaaaacatcatgccgtttttacttttttgatgacacaaacctgacgtctaaatcgccttcttattgtggtccttcttgcgattagatttgacgttttaagtttgtgagatgaccgaagagatgcgaaaccatagcacgtgtgcgatcagtgttctactgtgatggtcaaagtcaaacccaatattttctaaccaaagcgtatttattgttttgttgaaactaaagtgctatgtctccgacaaaaaatgggcaaattttacccataaatagttttcttttcgattaagtaaatgtacatgtttagtaaaaaaaattggacatgtaaatgatgtggatgcaccgaaactaattaaaagctttagatggttgaaatataaattgagcatataattatttatgaaaaagttaacattaattcatcggaaaatcaaaatgtagctaacgaacttgttagctcaccacatcatcagtgtcttcactctccacctacaaattaaatttatgaattcaatcattactttattatatatctgtaacgtatgacccaatctattttactcaaatcaaaaggaccaaaaatataaatctttcacaaaatatgcgtatcatatgtaatcggaaatatctggagtaatcgatacatgcatgtataataggaaatatggatgaggctttttgtatgccagcctcggacacggtacttggtgcgacatatcatgtgaatgctcgaatcactttcaatgaatattcattgatgactcacgattcatgagttgtgaccgtgactcgtgactcgactcatgagacatgcctcgcaccacctttaccccgaccgttccgtacactatatacgcgtatttaagtacgtcaacgtgatttcttcacaggtctatgtattcttatcacatgtataaacacgatcgatcgcacgtgtgcatattaaacatantattttgaagattaataaaat

SEQ ID NO: 47482 - DNA, 595 bp, Arabidopsis thaliana landsberg
  unsure (1)..(595): unsure at all n locations
ctctaggccggcgagaggcatctcgtcgccggaggacgcggacgagttatcttcggacgaggaggacgacgaggcggcctccagttgcaaaatcagcggcttcgacccggtccttggctgcggcgagatctcgccatctgcttcatcgtctgacagcgcttggatgagagggcgtgtccgcttcggcgcggggactcgtctcggcaatgcttcggtgacgagtgccgcccgctgccgaggcgggacagcgccagtcgcgggagctgtgggcaacggcgccgatgggagcacgtcaagccccagcagccggatggagtcggtcggtacgagtccccgccaagacgcggcgcacgtgtcagacggcgaagggctcttgcctccgagcgtccctccccaggcccatcccacaaggcgcgaccgaagctcagcggcttgcttcccgtcgccgcgccggactccgcagccttgctactgacgagctcagcgacgagcatgccgagcctgcggatcccggctggttgtgctcgaggtgcgcggagacgcgcntgagtagatgcgcatcgacggcgtgggcagcggcacgaggatgacgaga

SEQ ID NO: 47483 - DNA, 559 bp, Arabidopsis thaliana landsberg
aaaggaacaacccatgacaagatagatcaaatcaatgatccaccatatacttctaatcaatcaaaccaaaatcactcccgaagctggtatcagatccactgttaaacaaggcaacacattaatctttcaattgaaatcattagcattgtgcatataaccaaaaaccatccaatacattcttataatgcaccataaccaatccataagaaacttttaagtattcagtactcagactaacgtttagtaatgacaaggctctctaaaaaagcacgcaagtccaccaaaaaataccgaaagcagcaaatcagttgatcaacgaaagaaactccgtgagaacaaagaacactaaataaaatagtagataattgagttcaagtaaacaaaaaggcgattcagaaaaatcaaaagatcaccaaactacgcaattgcaaaaaagtgataatatcatttacgcaatgtaggatgagataagcttttgcgttcgtaagaaacagcgattaactgggaaacaaaagagacgaagtactttcaccaacaatttcaacttttttttaccttc

SEQ ID NO: 47484 - DNA, 554 bp, Arabidopsis thaliana landsberg
tcgcaaatatatttgatcctgttctgattgtggtaactttgtaatcatgtcaagtatatgttaatagtagtattttgtcacatcatagaatttagctatttaattgattatttgttggtccaatggttaataaaataacattctaatttaggtatggctctaatctgttctcgtataaatgcatgttaatgtgatcacgtcgatgcaaatgttataattaacactttcttaatagggatgcaggatcggttagtgattctaatttataattgcacagttttcgcgtgttgccgcgtgttgtttcacgtgatgtcgcgcgcgtcgtcgcgtgtcgtccgcgcgtgttgttctcatgcattatcttgcaccgttcgcgtgtgtcgcgtgccctgccacgcgcgtatcgctatgatccgcgcatgagattacgttgttcgcttataatggctcaggtcagttaattagctgttcgggtgatcattaactattacaatagtatttcagtcataacaaagtattagtttaacctacattcaataaaggtatattaatat

SEQ ID NO: 47485 - DNA, 515 bp, Arabidopsis thaliana landsberg
atcagtgcaacaattcccagttataccttattgtcctccaggttatcaaaatcccggatgtccaccatcatcttagactgtctccaaaaaatgatattaatcgcttaaataatacataacaacataaaatatgttttgtattagtgttttttttatatcataaatctataaaaaagttacaaagtatgtcatttagtatttctatgttgaattttggacaaagtttctgtttcaactctattactatagtatactagaatattactcacacattttatagtaatatcatatttttttgagaggtcaaatttttataatcataacagtttgaagataattcttaatgttgaaagtttgactatatcgatattgtatcttatttgaaaaatacagatgggatatattttgagaatttgtcttttattaaattgcataatctaatttttaaatgcactttaaagctttctatttaaatgcacttcatttatatgatattacatatttagcaaaaaaaa

SEQ ID NO: 47486 - DNA, 789 bp, Arabidopsis thaliana landsberg
  unsure (1)..(789): unsure at all n locations
tgtgtaatagattaaatactactacaatatcagagactaaaatttacattgtgtaatagagatatatttatgtggatccacaattaatttaatttttcttttttcttttctttgtttgggtaaactttttatttattcttctaattttttttcttctgtttacatcattaaattgaacatgaaggtgcacaagcgtgatgtacaccattatattgaagtaataatctgtaaattctcttatagtatatagcaaagtttgtacatttcgtatatcaatctcgtattatttaaaaattattttgtacattaacgttcgtacacctcatcatttcgtacattgatgtttgtacattatttcataaaccatcaaatacactgatggaaacattatttcataaaccattaaatacactgatggaaattgttctatcttttatagatgtggtgtacaatagacgtgaaaatgtataatgatgtagacggtacactaggnnnnnnnnnnnnnnnnnnnnnnnnnnnnagttttatgtaatactatcaatatcatgtacatcatcttattttatagttgtacaacgctataagttgtttttttgtgtactattttatacaacgtcgtgcctaatataacacttcttatatcaatattatacattgctttntacattattatcgtacaataccgtatgtataccactttaacattatcatgtatacccgtaaattaagattannatagataaatttacatatctgctaatatatatatatgagatttagattacatat

SEQ ID NO: 47487 - DNA, 965 bp, Arabidopsis thaliana landsberg
ccgtcacgagcattattattatctgatggatcatacttgcgattgtgtatataagagatgctacatatatataaacggtgttcttaaaaaaaattaaaaaataactaaagaatcacattgattatactggtaactatagcttagattatggtttgcataatgacaaaatgattacataatcttttaccaatcacaccatttctacgatatattgttcattgactatgcaagattaatgacaaaaatctagatacttctgcaatttctatatgtgactcacaatagacgcaacttttttaatgactccgttattcattccgaattttacttttcacattccttcatttcatagtgtaatcaatcaaaatctaaattaatcataccaactattataggttagacttgacctctctatctatcttgtgaaatctccaatagataaacgtaacgttttaatttagttacctttattaagcatgctttggctcgaccatctagagaaatatctctttcgaagattcttccatctccaaagcttaatattcgccggaaatagagaatgtttattagaatttccgacgactgagactgagggttcagggaaaccaaggctgagaaacgccggaggaggagtaatcggacgaacgttttcttccggcggagggttgatcggtgttcccggctgcatctcccacttaaaaggaactccttcgttgagactacgatgatgatagtaatagaacaatctagaagaaactcccaccgatgagcttcttgagatctctgattctctcttgcatagatcattctccattaacaataatgaagcttttggtattggagttatgttatcgtattcttgattcatggtgatgttcgtttgagagaagagaaagagagaagattcgtgagttatggagacgatgtatagtgcaaatatgtgtatgtgtatatatattttatac

SEQ ID NO: 47488 - DNA, 888 bp, Arabidopsis thaliana landsberg
aaactgctttttgtaagttttgatatcaagaaaatattcagatggattcattgatattttgttagtaagttgaaatttgtgatattgatataacaatggaagtatgagtccccattttataaagaacaaaaaaatcaagaatctacacagccaataagaatacaacatgtatccattccatattttaatctaaaagaaatttctttgcccaatcaataaacaccacatggcatgttactaattattatttaaaacctgtaaattctatttaattttttttgttcttttttctgtattaaactgaaaatagaaaagagactactttaactttaacaaatttattaatgtctttagtcttataaacctccgctccgtttattaggctcctcttcgtccccaacggctagtaataaaaaataacatttttataactaacactcaatttaaacccttagatctcaattaaaagcaaaatcaacggtcacgattcgattcgattcgaacaaaaaaggaccgttagagagagctcaaacttttccttttcaaaataaaacagtgccctttcctcaaccacaaatcttcaccattcgcaatttcacagtcgagaaaaaaaagttagggttttatttgttgttcctgagagaagcgaaagagatttttgattcagagagagtggcgtctggttgggttgaagccgggacgggaaagagtcgtctccgggatttcttttcttctttgttaacgagtcttggaggagcgttacttcagatcaccgaagaagaccaacaacaaggttcagatattatggcgtcttctagagtctctgatcttcctcatcaacgtggaatcgcacgttcttgtttctcgatcttttattaatttgatttc

SEQ ID NO: 47489 - DNA, 1151 bp, Arabidopsis thaliana landsberg
aaagcctgtacttaaacaagatttaaccagtatgaaaactttctgtataatataaattgttaaaataattaggaaaatatgtttaattttgcattaaaaattgaaaacctcatctattttaaaacaaaaaaaaattccaaaaacattaaaaaaatacataaaaaaaagcaaaaaaaaaaaagcagagggtgtattttaggttagcaaaaggttttagaagatcatttacggcgaatcaaaagatatgacaacatattattgtgggataaaaaaaattattgtgggctaaaagatttgaagtacacgaatttcatttatgtcaaaacggtgttgtaacgtagaacgtagttgttcattctttagctatcaaaattcaaaagatattgagatcgaaaagacgaaaacatacgtataatatattagggatatattattgtagattacctaaaagatttaaggaagcgaattttaactcatctcaaaacgattttgtaacgtggttgtcattctttagctaaacatgatcttttaaatacatttttttttcttttattggtgcattgattccaccattttgattaaagtttttatcttgactaaaaacatttctataagaattcaagaggtgttttaaaaataaagtatatcttgacccacaaataaaaacaagaatttgggtacacattattttccaatttgtataatcatcatatgtccgaccatattaactagtcaagacgttagacttcattcataatacgaattgggtgctagtttggttaaatgcattttatgactacgcattttattcacacaacacaacagaacacaacgtgaaatatacgagaaagacaaatcacaaatctaataatatttgagtttttgacgaggtcaagaaaagtattttaggtccgtcccatcataatttttgtaacttgtttgacttttctccaataaacaaaccaacccaaatcatacgacatatctcctctctttgataatcgccattaacaaaccaaacctcacggagtcttctcctttttaaaagaagagtctctcttcataatcatatgatctctctctctttccagtttcctctaagcttttctcatggtttcgttcttgaccctctcttccttctttttcctctg

SEQ ID NO: 47490 - DNA, 548 bp, Arabidopsis thaliana landsberg
aaccctggcctacacacttctcccatggttgctagcagcatcccatctacaaccaccttaaattctatccatagtgaagaaaaggcatctcacctggtcagtttttttactgttctatccttgcgatgatatataattgtagactatatagtttaacattggtgtacatgatgttgttgttgcagactgaaagtgcagctgcatggattgggcagggatttggcaacctgcaggtgaatccaatgtataacctagcataccaaggtcagccacttggttttccagtcgtgcaggctggtcatggtggcctcatgggaatgcaccaaccaacacagcccatggcagctgctttaactacatatcagaccttaccaccaccgccacacacaacaacggctatgggtgaacccataggacacccgcacattgcttatcagcaacctcaagctgctctaacgaattgggttaacaactattaggtcaaggggaagcagctataaagatacacatcaaatgcgtaaaagagatgtagaagtccggatttttgg

SEQ ID NO: 47491 - DNA, 872 bp, Arabidopsis thaliana landsberg
  unsure (1)..(872): unsure at all n locations
ctttcttctacgttggactcattatcttcgattgatttatctcttgtggaaactatattattttctggggcatgagatccataatcgattttgacattcttttctaaatctgtttcaggcgacaaattcgagtttggggtcatgtcactgtcttcaagtgtttccctgaaaggatctagatggtaaccattcaccgtcttttcatgggnnnnnnnnnnnnnnnnnnnnnnnnnnnnnnnnnnnnnnnntgctctggcttccgaaaaaactaatccctttgaagggttaacagtaacatccacgtcttccaaaagtggatgacgacctttcagaagcccaagttctacagcagtcaaccactgcatggccaacataggaaaatcaatctctccgacataaaaagaaacgtaaacaagaatttttttcatgtaagatagaaggacttgcatattatttgcattaaaaccagtaaactaacaaaaagtttatactaacgactaacttaaaaaatcatcaatttctaacaccatgatcgtaataatgagcatcttggatatagagagtaccatgcctgtcttttatctattcagtagtgacgagaatctaagttccaccaaggtggaattgactaataatcactgattcctagataacttttcaagtataattcataacatttgtgagtatttgtgactatgtttgtgtgaaagagagaaatataggaagagaaacttgcctcactagcaaggtcctggcaccaagacacggccactgtacgtccatcgatcagatttggtgaagaagagcacagaagcaggcttgtaaatgggttttgagctattgaacttcgtggtattgtataaggtggtacc

SEQ ID NO: 47492 - DNA, 508 bp, Arabidopsis thaliana landsberg
tgtccctcagattaaaattaatatacccattcatattatttttgtacatatatagaaaaatctacttttttaaaataaaagttggcatttaaaaaatgttagatatatcatatattaatgattttctttgtctatggctctatgctttagacggggcatgtacaaaagtagtggaatgaatttgatccgtggtttcgaccaacatggcaaatctctaaccattatcatgatggttggctaaaactgattttctttacctttgacaccggagaggacatgtttgatcttacgttcacagccttcgcagtcgatacgagcaacacggagagctactgttggcattggcttcttcttcttcctcttcctcttctttaaaaggactgatatatactccatcgatccttccactcccattttcactcacaccacttctctttgcagttttttttttttccttgaagatattaagagggaacatatgttcacggagagtgatgatacaagtgag

SEQ ID NO: 47493 - DNA, 654 bp, Arabidopsis thaliana landsberg
gtggactcttgagtattgatacttgttagggtaatttgaacgtaagccattgaaaaataatttgtctttgggatattggataaatttatagtctctctcaactaaacgaccccgcgacgtaacatctacttgagacatgtccacataatttttatattagaagataaatatactggcaacttttgtatatatagtggatatatagattatatttccgccccgtaaattataaagttctgtcttgaaataggacatagggagaatagagctgtggtgaccaccggttaaacagtatcccgtaatctaagctttggtatttgaaatgtgattaattaacaaacaatacagtatgtatgataagttaaagaggttaagctgtatggtttagtggggactttgaagcaagcaaggccaggttcaagttatgtttggttgcatggtggaacacgagaaaagacatgtgggattgtgttttatatgaacttggtttggtaattgttttagtttggttaatttgattgaaaaaaactagagtaataaataatcggtaatcagcacaagttttaaatttgttgggtttgatgaagctcattgaaaaataattatttcatttcggtacaagtgttttctttcacacaaaaggctttttttttt

SEQ ID NO: 47494 - DNA, 613 bp, Arabidopsis thaliana landsberg
attgcagtagcgagtatttgttgagcattcagcataagttgtactcacaccccattgttacgaattgaacatctcatttactgatatagttatgtttgactgcatctcgcctcttcaaatatttatactttttaaaggaaatggaatgcaagtgccatttagggcaaatttataagaatttggttgtgtgcgcgcagatgccggaactattcctttttctaaaaaatatagggtatatttacagacaaaggcatcttggaaaagttttgcatatgcgccatgagacagcacatgccatcaatttatactagctgccacagtcgtttaaagataggacattaaaaaatgcatcatgctggcgttaaacaggacaacggaacaatcaaatgtgaattcctcttacctgtccttgctgataagccttggagccagcaatctgaatttccggcggaatcgcatagaacccaggcagccataaaaccttgtcaagggcacactcaactcggcttcaatctctgcgatcttggactccatgcctggttttagcgttggattaagaagaactaaattaagcccctgggtaacatacttagaaaaggaattagaatagcac

SEQ ID NO: 47495 - DNA, 535 bp, Arabidopsis thaliana landsberg
tggatcaactgcctaggcatggactaattaatgaatcaacacatctcttatactttaatagccgcactaccctatctcaacctgtctacaatgtacatgagatttcttctccatttgtttgacctctcttttcattatatatagataacatcttgcattttggctttggttggcagggtgtgattggaatgctaagaaaactatcttctggttcagctttagctttcagaacgttatatgagcttaacattggctacagtttaaaagaaatcatgtccacgtatgacatttctcattcagtgtcttctacacatcctatcaatgcatgttctaatcaggtttgcgttttattatcaatcactcttatattgtttggtattcatacaaagggttttcattcaaaatagtcatgtatccaaaatagcattaggtgaaagtaaaatatttggtagcaagtctgattttaatgttgtttggaatcaaacttacaattcaggtgcatgaagtcctgaagttggtgattgagcgtcttccg

SEQ ID NO: 47496 - DNA, 573 bp, Arabidopsis thaliana landsberg
cgagaaaaagaagaagatgaactttattagtattcaaaataaaaagaaagaaaaagtacatttaaatggattaatggaaaataaactagttagcaaaggcgggtgcagtagcaacggcgatggaagccatggcagcgaccaccggaaaatccctcgttacggcaaactatggcacagttgtggttggacgtacacatgtatttgaagtggtggctctttgattggcacgtccttccttcacccccaatgatctcctctatttaattacacaaataaaatgcaacacataagaatggagatagatcacgtaacactgacttcacatatatatcatatatatatatatatatctcccgtcaatcaaatatggtcatggaccaatgcatatatatagaaggaacagacttatgagatgagaagaggtcaagaagcaggcagaatgcagcgaaaaacttgttctccatatataatcctaatgatattgattgcttgttaaatgctaagaacgtaagtggagcaagagctacttctccatgactccatatatatagatcaagtgtaggtttcgtaggg

SEQ ID NO: 47497 - DNA, 692 bp, Arabidopsis thaliana landsberg
cagctgtacattgtagtcttactcaagatctaagcaacaatacatgtgaaaccaaagttccatattagtatgacagaagtatatatgtctctgcaaatgaagaaaggtgaaaagaaagtaaatgaagtactcagagagaagtgtgtttggtttagagcctaaggtagccttttctttcttggactatgtttggtatcttcttaaacgatcttctgttaagagaccaacttcttttcatatctctcgttccccaccaagacgctatgcgactatataacgctggaaagccgaagcagcacaacactagaaccagcattatcaaacagatgtacatcacatttctgaatccgtctcttagctccggtttgtcttgtcccgtccaaggtactcctccaacattcatcccaaaaactggccatttagccacattaacaacaacaggttaagatactacttccgtgacgaaatggaaacagagaattggttttcggtgctttggtttacctccggttataattgatagaggaaggaatatgatggaaagaaaggagaggtaatagagctttcggttgatttgttcggcttgccagctatccaacccagcttggattgcagtcacacggttcgcaatgaaacctacattctctttaaaacgtcttaaccttccaatatactctttcaacgagtggatg

SEQ ID NO: 47498 - DNA, 892 bp, Arabidopsis thaliana landsberg
agtgctctggaaattctctagattcaatcccttgtgttgtgtatgaaagtgtgtccttgcttatgtttcaaggaactgtcgagaagatttaccttcaaaacttttcatgttctgctcttaagagagagctagttaatgcagtcaatcaagcttttactaatatattcaatgtctcatgtgaagacaatggtatttgcacgagtgactagctagatcataatattagttgatatagacattggagttgtgaatgactttatatttttatttttcttgtatttggtcatcaattcattattcatcaaagaacacacaccatcaaggatgtgatagttccgaatttcaccatgcactctttaacccttaattagttcacaactgtgtctccttgctgattgtaacatgatccaccaacaagactctctgtgtttcagtgttttctccaacattaactcttaatctatttaaacatctgtccaaaattttgtaggctcagtgacaagtttgagagtgtttcaagcccatctttttccagctcttggatgcatgactctataagatattttgtaggtaagtcactacaacttttctccttagcaacagcgtttcgcatcaacttttctttctgtctttgcttttcgatcaatttatttgaagaatccagtcataatctcatgacaaaacctttacgtttacgtacgtacacacatatgtaaacactaacctaaattttaaaattctgattttgattatatgtatattgcttgcgtaaaatcttcgtgcggattctgcctttagaaggcataatctcatgaaaatgaaaaacaatcgcgtggaaaccaagaattcaccggtttattcggtttaaggacaaaaatcaatcggctctctg

SEQ ID NO: 47499 - DNA, 676 bp, Arabidopsis thaliana landsberg
  unsure (1)..(676): unsure at all n locations
agttcttcgcttttaggttaaatagttactttccttgtgcttggaaatttttacagttatcccaaggctgcggaagaaaatcttaaaaaatgcgaaagatcatatcagaagctgtctcctgcgcacaaggtaattttgttatttgttgtgtttaccaatattatgttaatggtttattgctgcagcatattttagaatattcaatattcaataatagccgttaggagatcacccaaatgattcaagtcaagttgattctttgttataatagatagaactaactatattcagccttgccttttttttttccttgtccaggcattggtaacccatttccctatgaagttgcagagattaagaaggtgaaatctataatcagtagatacttcactaatcactatatatcatcttgtactcttagataaacgtcacagagtaatattcatattttatatttttccattatagctgcttttcagatatgattattacttcttcatttgttcttggatatatattatttttttgtcacaataatgatatgccctagagaaattgaggtcaggggcagtctaaacgtgttacaagcaagttattggtgtgggcattttcatcctaagcatggtcttatttccctatgcccccgttgttggcctttnatttgaagttgcaaatg

SEQ ID NO: 47500 - DNA, 669 bp, Arabidopsis thaliana landsberg
tttttccttttctttttcataatgataaaaacagtagaccggaaatcttcacatggtttggactaaatacggtcgaagcagataataaaagaaattaaagaaaaaaatacattaaatatgaataataaaagcattatagaacccaaagttggcacgtgatcggagtaccgagagatagggtaatgattcgacatggcccttgttttttcttattaattttaacatttcttattagtttttgagttttcttctcactttacattttcgtgtggatggatgcatgaaactaaggacgtcgtgtcgctttttgtagcacttaaaaggagtcggacccattcgctagcttctttatcatttatgttgttccgaatgtgagtatggtggccaaatagttagagacatactattaatcttaaatcattcaattaaggaagccataaaattaaataatcagatacataaactcactcatacacatatgtttgactcacataaaggagatattcggatcagatacataaaccggaactttaacagaagaatcacataaaggagataatggggtgaaaaacacgcgggtaagaaacgcgcgtgcgttctcactgaacgcgaaggcgcgacgactggtcacactaaacagaaaatggaagaagatgggttgtgtgatgt

SEQ ID NO: 47501 - DNA, 486 bp, Arabidopsis thaliana landsberg
gcgggagacgggactaacacatagccggaggagccacatgcctgcaaagcagacaactcagcaggcctcccagatgacgaatccagaaacggagacacaagctcagaggaaggcgctgcacgagacgggctaggagccgcagaaacagcacaacacataggtccagaaggaaaaggcggcgcgacaggaggagatatatccgccacgggaatggggtttgaggcagctccaagcacccgatttaggttcatctcgaaatctccaacccgtagtaaaagaaacctccacacgagcctaagcgttggaacctacatgctattatctcaaatcagtgatattgagccccatatagcaggctgagcaaaacgcactcgcctttgtagtagcctcaaagaaagttgacaaataataataataatgaagtgaaaactaatggcagagagactggccacaagcggcagcacagcaaccacagttcgaacacac

SEQ ID NO: 47502 - DNA, 615 bp, Arabidopsis thaliana landsberg
ccataagagaatcagtgtaagtgaatgagaattacatatgtatcttcctgtgcttctcgattttcatacacaaacaagagcgcatccgcaacatcacgcacatccacaagatacagttcatcgctcaacaaggactttataccacctaagaagagacacaccaattcatcaaattatcaagaatgaatcaatcacttaaccaaaatatgcaataggaggtaagagaacacacattatatgtttacatcaccttttatgaacttgagaagtcccaaactactagagttaagcgtggattgaagcctagggcctataatgacagacggacagagcgtaacaacatcagcaaagtttctcttactccactctaaagcttcacgttccgttaatgttttggcaagatagtaataacgccaataaccctgagatcctcagattttttgcatcacattaaacactcaattctattactgtcttggtgtatatgtataacacagagacaactgaccaacatggtagcttcaaagatacaatattccctcaagtgagtgaaggtattgagtatctgaccaacaatcctcgtccttagcaacatcttgaggccattttggattg

SEQ ID NO: 47503 - DNA, 589 bp, Arabidopsis thaliana landsberg
ggttgtcattcagaagctgaagccacttgaagtagcatatcggtttaacgattttgtatcccctttgttggtgagttgggcattgcttattggtgctcctatggcgttatttaagttccaaatactattgaattctaaactatatttgaccattgaactagttacttgttttttttcttagactaacagtgatttcgatgcaaaacctatggtaatgcttctgggtcaatactccacaggaaaaacaacattcattaagcatttgcttaaatctacttatccaggcaagttatccatcttatcctatcttcttctccttctgtgacctaactagtttcgatattttaaaaagtatgggaacaggtcaatgattaaccgtaaaacagctttatataacttcaattgtcatattttttcaggagctcatattggaccagagccgactactgacagatttgttgttgtcatggtatgttagtttgtaattttctaaggtttcatttttgtgagaatgcattagtccttcaaaacgttgatccatcatgtactgctattcatctgcttgttctgttggattatggaatacata

SEQ ID NO: 47504 - DNA, 423 bp, Arabidopsis thaliana landsberg
  unsure (1)..(423): unsure at all n locations
atctccannnnnnnnnnnnnnnnnnnnnnnnnnnnnnnnnnnnnnnnnnnnnnnnnnnnnnnnnnnnnnnnnnnnnnnnnnnnnnnnnnnnnnnnnnnnnnnnnnnnnnnnnnnnnnnnnnnnnnnnnnnnnnnnnnnnnnnnnnnnnnnnnnnnnnnnnnnnnnnnnnnnnnnnnnnnnnnnnnnnnnnnnnnnnnnnnnnnnnnnnnnnnnnnnnnnnnnnnnnnnnnngtatgattaataccagaatcagcccttgttagaatgtatcatcgcgcaagcaggttgtgatctcaattggggcccagatctcgtgattaatgagttgctgtataactattgacttactcatactcgtggtatcaggtggagggtgtccctaaattggctgaagtggcatctgctgtatagatagttgactgt

SEQ ID NO: 47505 - DNA, 338 bp, Arabidopsis thaliana landsberg
ctccacagtcacgacccacgtagccaggagagtcgcccagaccacacgcagaccccggaatggcggtgtaggtacgcggcaacggcggtggctcccggtggtgtcggcggcgatatttttggtggccgaggtaagcagagaaggaaggaaaggagggaggagggggtctgtcctgcccgttatggccacaaacgggtggactcggtgataggatcgtcacacgcgacgacgagcattgcgcagaggttacagtgatctccggcatgtgcgcgaggctggacgcctacgggtaagttggcccagaagtcgtcaatggaggcctcccgattcagctggtt

SEQ ID NO: 47506 - DNA, 492 bp, Arabidopsis thaliana landsberg
  unsure (1)..(492): unsure at all n locations
cgactctacaggactcaccgnnnnnnnnnnnnnnnnnnnnnnnnnnnnnnnnnnnnnnnnnnnnnnnnnnnnnnnnnnnnnnnnnnnnnnnnnnnnnnnnnnnnnnnnnnnnnnnnnnnnnnnnnnnnnnnnnnnnnnnnnnnnnnnnnnnnnnnnnnnnnnnnnnnnnnnnnnnnnnnnnnnnnnnnnnnnnnnnnnnnnnnnnnnnnnnnnnnnnnnnnnnnnnnnnnnnnnnnnnnnnnnnnnnnnnnnnnnnnnnnnnnnnnnnnngcagtgaactcaagtatcaggccacggtggagcgcaatctgtgctggctgtatatcacactggtactctggtagaaggtcactnnnnnnnnnnnnnnnnnnnnnnnnnnnnnnnnnnnnnnnnnnnnnnnnnnnnnnnnnnnnnnnnnnnnnnnnnnnnnnnnnnnnnnnnnnnnnnnnnnnnnnnnnnnnnnnnnnnnnnnnnnnnnnnnnnnnnnnnnnn

SEQ ID NO: 47507 - DNA, 480 bp, Arabidopsis thaliana landsberg
gctaattcatagttggttatcatattgaataattaagagatgtaaatttaatttattatttttccggaaaatgttaatttttatacatttatgtatttaaattatatatatatatatataatctactattttaaatattttctagtattatttaacatgttttcatatctgtttgtgtgaatactaaggactataattttataagtagaactttagtaaatcatcatttgcttaattaaaattatgaatcttactatttaacaatatttcacctaaaaaagtcaactgaaaaccccactttttcaagtaaacagaaatgagtagatattttatgactattacatattaccataagtacttgcatatgcaaactgtttcaacccacatagacttttgaaatttgtatcggacgtctcgtgaaagttgtgacgcatcatggctactagcggtgcacgtggaccgtggagagtgacgttcctt

SEQ ID NO: 47508 - DNA, 603 bp, Arabidopsis thaliana landsberg
  unsure (1)..(603): unsure at all n locations
ctatggcatcaaccatatccaatgtaacatagaattttttttaaatgcatggtctagcatatacatcaccttctgcgggagaaaattcgtcaggtaataaggcttaatagaatgaaaagaagggatgggcatggattcacacactgtgccaattgccaaacctcctannnnnnnnnnnnnnnnnnnnnnnnnnnnnnnnnaaacacagaaggaaagagtcggtatggctcctagtatgagagagagattatagttctgaacctagcagaatgaccaattatctaagagagatagtaatccactatgcgattgaattctttcataactaaattttgtcttaaagccttcttaaaaaatatctgcaaattattattcaataggcgcttacaacttactaacaacgacaaaatgatgcactgctacaccagttcagcaatctaccagaacatacttgatatttggtcttcagattttcgctattctgacaaaatagatacacgacagttgttcatgatcttcaaattttttgacaggttcatctgatcttcgacctgaaaccatgatgcataatggttgaaacaaattatttagaccctagcagtg

SEQ ID NO: 47509 - DNA, 861 bp, Arabidopsis thaliana landsberg
cggtgatacccgtatcagaagaaatacaccagtaccagcaccacaggtaattgcatgattaggacaaccactttctctgtaaaagtatgttagaacgtcattatttggttttctagaacaataacagtgtcaaccaaaacgatgtttggagactagtggaagtgaaggcaatacctgcaacaagggctccatatgggagaacacaaacttccacacagaagacataatacaggttcttcgataactttggtgcagttgacgcaacgtttttttatacacctataaaagaaaagaaaacaaggctttttgattagagaaaaagtcttcaaatgggaaacaacttgtgcaaaaaccagagagagacgttgctgcaaacctttgtagtaggtcctggtatagattgggtaatttcattagctggaaaggaactacaggggtgatgcaaagggaccttttaactctgttgactctatattcccgctgaaaatgctggagccatatttgggttgaagagcggagaagttcatcattaagaatgatatctataggtggaatgttaaacattttctccaattcttgcacatgattcagctcagactggggactgtatatgaaatccatattgtcggtggtggggtcagatggcaaatcaaacatatctgactcttcatgaagcttcctaggagtagatttcagtagcttccataacaacgcacatctcctcaagaaaggaagactatatttacggattgtgtcttttatatcacatgacaaatccatattgttagacctgaaatactaacaacaacctgattctctcaaagcgttggagatgtcattaagcaggtttgccctgattta

SEQ ID NO: 47510 - DNA, 965 bp, Arabidopsis thaliana landsberg
ataacataatgaaacatcttgccctcgaatatcacttaattaggaatattctaataacttaaaaaacacttcaagttgcttgtctttcatgtaaagaccaactcgtcgatgccttgacaaatccactggcttgcaatcgttaacctttttcaaattaacattttttccaagagtggagtagtcagtccaatcttgaggggttatgtaaaggaaaaatgttattatataaatgtaaaagtcttaagtgtaattgtagatagaaaaatcctaatctctgatgtataaatatgttctctcaaaagtaatataattattgttcaatactaattccatatggcacactcttcagcctgctctcgagtctgtactcttaacataaattaacttggttttagtccatcattccaaattaagaaacggtgaacggtttgtatattcgatagctacttggaatcgttttttttcttctcttttttgtttgtttgttttgctaagaatgtaaaattcattgaaaatgaaaatgtttagggtttaagatattgtctgtcttagcctgtataagcggtcccatggcacaaaagattaataatatgtaatttcagaatttgtttttgcttccatatttttatacttgtgataggggtcgctacatcaagagaacgaaacgcaagatcatctatttctctagcacttttagtaactcaatctgaaggttcttcaccaatctcgctggtctcgatcctccttcaagcctccacattctgcttctatggatcaaacatgctctccaaactcataaattgttctcatggaaacggctagctagatagccatagggtatctatagtggccattcatttttagccacaaatgtttttttggccattgataaataatgaagctttttgcagatttctagtgaaatagttgctaacctactttacaatataaaacatatcatattc

SEQ ID NO: 47511 - DNA, 668 bp, Arabidopsis thaliana landsberg
agagatactttaccaaaatccttagcagcattctttgcggtaacgttagcttcaccattgattctgtgcatgtgttcttcatttccaaaaccaccaatggttgaaactacagcagtagcaccaagaagtacttcatcccaattcaaatagaaaacatcacctacaatgtcccacaaagacaaaaaacacattaataatccacacttggacatgtttatgtgaatctttgatataaccaaaacagaagtgattaccagtaacccatgtaacctgatccaaccatgaatcttcgaagttaggacgacctgacctaaagaatcaatcaaggagatcggtcatcgataaaaggcgagactggtcatgacttcaatgaaaaagcattctgttcctactttttctatacctgctaacactcacaacctcaataccattggagattgctgctttgcagatagctgagccaacgaaaccattcccaccaagaactacaacctaagtaaaagaaaaagccttttcaattgagacacgaaaatcatatatacacacaagtaaaaaaggctcgttctttcactttcgtaccctttcggatttgacatctgccacaatgtcaataggggctgaccatgaagcgctgcttaatccagcttcagcataagtgcacttaacac

SEQ ID NO: 47512 - DNA, 697 bp, Arabidopsis thaliana landsberg
tgtggcccgtggacttctttcaaggatctgcaacaactttgtcaaattaaaacatcatataataataatttgaaataaaataaggagaaaataaaaaaagagaaggagcagaagtagcagagtgtcagactttcacagatctgacgatattcttgcaaccaaaggcgttgaagatgcgctcagaccgcatgttctttctcatttatgcctctccttttttctcataatttttttttttgaaggaacactttatcttatcacgaatatattcacacattttcatttcacctttttaaccctttcaagttaccttgacttttattttctttttttaaccttacaagttacaactccttttttagaataattgaatgtgtctttaactcataattttattgcatattccacattccataattcactgacggtaaaagtaaagatatttttttctgggagatgaagatttaattatatgtaataactaaaccaaccagatattttgaatagtctccaacgttagttcaacacatggcatttctcagatcacagcttttttacacattacatcattttcctcaaaaaccacatcttttcagaaacaacagattcgctgctttcaaagaaaaatatcatttgaatttctttttgtacaaatttttttccctcatcgaaaccgactctccaaaaaaaaaggact

SEQ ID NO: 47513 - DNA, 291 bp, Arabidopsis thaliana landsberg
gacaagattacggtcgcagcgtccgcactgtggaggcgcaccgtggcgggtgcgaccccaagacgcctcccgcaagccgccagcgtctgtcgtcgtgcgatgtagaacagctcctgcaactgccaaatccatcagcagtgacggagccaagtctgaggaggcgggcgccagtgaggcatgcggtctggcacgcggatgttacgcacaggggtatgagcagcagccggcggcgccgtaagcactaggattgcaggaacgcgggccactgggttgtagggatcacgataatcc

SEQ ID NO: 47514 - DNA, 962 bp, Arabidopsis thaliana landsberg
  unsure (1)..(962): unsure at all n locations
ctttttgttggaccggcacatcctgtagatctataaataacttattttgcggaaaaaaatagatgtttacatgattttacctaaatactaccatttatgtaaatctataaatatcagtttatagcaagttataaatccttacatggattaacaggtgtacaaaattttacaaaataataaatacaaaagcattgaaatagtgtttttaaccaaaagaaaaaaaagatactgtaaactatataaattttctgtaatctatagaaagaatcaaagtgaagttgcagaaataaagaccaaatcaaatgaataatttattaaattgataaggtggcaaccaacaaatatattgcacttaatatagtaaaaaatcatacattgctgtcagtgagtagtaaaccaagtagtcacccatatataaatttctggaaaatatgaaactcctaatcctacatgacttaaaccttttttagataatttcattatcaaatggctattctttcaattcacccttatatctttgcacaacaatagagagagaaaaagaagttcaaaaaaaacataagatctaattaagagaggtttttggtctagttcctctggttcataccacaccaaccatgaagaacagctacaagcatgaactcatctcaacctcaacgaacgaaactgatcgagtcattaatcgttgctttctccggaaaaagaccacaaaagaagtcattcatctcaaagcttctcaggtcgaatcagattcgtattccttcatcgtaacttaccagccaaatcttcggattcgtcatgaaaatctcgatggacaccaacttaagaccactcttgaacgtcatcccgatcgtgtatttaaactcgaagacaacatcccanaacagtttcttgtctctcaagaaacatgccgtgaacacgtcatgatcatcttgtcngcgatgtatctcccgcaactattc

SEQ ID NO: 47515 - DNA, 898 bp, Arabidopsis thaliana landsberg
acattgtccgctaaaatgtcactgtcattaacaagtacacattatataatatgttaaatagatgaacaagtgagcaaatggtttaagacttatgactaacaaataccctcatggataaactcataaaagtcccaagttcagcttgaatcgatatttagatatatattatcaactatgtaaaaacccaaatataatatgtaactatattaatataagtgtagacaaaatgtatagactacataaaatataactagagtaagctcgttgacgcaacagtttgggagaaagacttaaacgaagtcaagtcgcttttatttaatgaagatgttgagaaatgaagacaataagaaacaactcaagtgcttctttcatcaaatctctcctatttatatgtttctaatttcttctcctctattcatatctaaatcccataatccttgttaatctctccatcatgacgactaaggtaaaaacatgctcatactactacttatacggaaaagaattcgagtttttcgtttcttgaatcattcgattgtgtgcagaaaatcgagatcaaagtggatatcgattgtgagaaatgcaaacatgcaatcatggaagctgtcacagagctagaaggtatgattttttttataaaaacgatgttacatattgtgtatatatgagagatgcgactaaaagatgagaggtttgaaatgcaggtgtgaatatagtttcactggatcaagagaagagtatactaaccgtggtgggtactatggatccggtctgcgtagcagaacagcttaagaagatcaataagaaaccagtagtaatcagcgtcggaccaccgaaaaaaccagacccaaaaccagaccctaagaaggaccctgtttcattccttactgctacgacc

SEQ ID NO: 47516 - DNA, 717 bp, Arabidopsis thaliana landsberg
aaacaaaacactataaaatgtaaatgacaacaaaaaaacactgttttagataattttaatttagtatctcaatgtgacatatgcttttgcctctaaatgatgattttcctcttttgtggaactcatgtagagtttgtcaaacaacatgaatttgaattttgatggtgacttattatgataataccacaaacactagagactagactatgtatcatgataatcatgcaaaattttaaacaattaaattggatttttttctcttatgagttaatttattttcgttatagttaaattttttgaatcgcgtttaaatttttacctgaatttttatatactctcttatgagcaataaaacaaaactagtattttatcgaagaaattgttacttttgtatgattttgaatcatcaatcatacaaactacaccgatttctctaaatgaataaagcaaacttgttctactttttttttgcttgtactacgtgtgcttgcttctacaatcgtcttttccttatttttctcgatacctagttaataaagggagtgggcaacacaagtggaagtggttgttacaaacaaggaacaagatcagctgtcgaaaaaccacaaaatgaataagaaaaacaataatttttatttttgagaatgttggaaattggaaatgatgagttgtaaagtgatggcaagaaatatcattaattcaaaacgttaaagtagt

SEQ ID NO: 47517 - DNA, 647 bp, Arabidopsis thaliana landsberg
ccgatcggatttcagattcgaagaatttacaagatgactaatgggaaggtaacaacaattttgttgttagagagataagacacaattccgattaaatctgggattagcgtaccaatgtcggtacgacgtacacgacaaatactagttccggttctggaaaattgtttgagcaatttggtctggttttgttccggttacaatcttattaatgcatataatcaaaccggtcccgattctcaaaccgattcgggtcagtaatttatgggaaattgttacaaatcgattgttgtggagagatagggtcttgacgagccctaatgcatctttcagattctaggtcattagcaaaacttttgtcttaaaagctgtatagtctgttggtaatttatatgataagtcattaggtagttttaggtttcatcattccttaactacaagatgcattgaagtaattacttaatatcaagtgggactattgaagacctaaccaactttcttatgtacaatattgtatcaagaaggcccaagatcaatagtacacaagcttgagagtctttaaagctgtgagttgtttactccatgtgctcttatcttcttctcattttttttccttctgcaatcataatgtagtgaaatgatcataatct

SEQ ID NO: 47518 - DNA, 592 bp, Arabidopsis thaliana landsberg
gccacatttactattttatatcaattaaatgaattactgcataccgtaattataaaataatatgtaaatgtcataattttttctgaaatgtggtatggacacatatcttgatgataaaagcatgacataaaagttttagaagaagttgcaacttattatatcaaagtgtttagagatagaacatatcttaactaagtttcataaacatttaggcacaactctctgattttcattatatagattagtttcttcaatatttttatttaaattttagtacacatattaatatagggtcatcattcactttggaatgaaaaatttattttttgtcacatttactattctatatcaattaaatgaattatttattacatgcatgtttatagaaattgtaaaataatatgtaaacatggtaagaaatcaaagatttggaaaagacgttcgtgtggataaaagcatgacataaaagttttagaagattttacaaatttttatgtcacagtgtacacaatagaacacatctcaactaagtcattataacattaaactacaactctccgagtttacactataaagataatttccgcattat

SEQ ID NO: 47519 - DNA, 790 bp, Arabidopsis thaliana landsberg
gagagagagtttttgatagtttggtatacagaggaacttgaaatgaatattgtctctgcttatactatttatagaggaagagagatggggacgtaaataataataattcagagatatgtttttttaatctctatagtattttttggtacaaccgttggatgatccatccattaattgacctagacgttacctcattgctttatggttagtaaaattttttttgaataatacaatattgttggaggatatccaagaatgcaataaaaaataactaaaagtctaggagtaattgttattttaacactaaagagcacgactataaactcattaaagtctttctgaattaaaatacaaacactagctagtcacagacttttgaccatttcatcttgtttttgtgtagatactttacaactttttattgctatcgatagaaaagttaaaaagtagatttaggatgagagtttacatagtctacaaaacatttaaaaacaaaaaagagttaagaagatagactaagtttgaacccccctgatttacctggtattgattcagaaaattaaaaaggagttaaaaggataaactaaaagtaacgttaagtacttgggaaatttaatctactggaagttggaggatacgcgtgatcaagcaagattcaagggtatgatcattgcgttttgatagaagaaaaatgataaatttatccttataacaaaacgcgttggtataattgtagatgcttggttcttgaccccgtttatggatggatttaaacaacttgttacaataa

SEQ ID NO: 47520 - DNA, 710 bp, Arabidopsis thaliana landsberg
gaacaatactacatactatgtctcagtgatatcgcacttttttttttctcatctactttcaagttaacatacggcacagttgacttttaactatgatacacaccaacaatatggttggtagtaagaaaatgtattttccctagatcaaattccaaaagttgatacaaaaactctaaattaaccactggatggcttcgattctgtcattaacgtgcgagaatctcggtgtaatcgagatcattataaacttaatgatattttttcattctaagagctagtcttggaaggtgtgaagactttattaatcaagtatatataaattatcaaaaaacacaacccaaaaaacagtaagaacaatacacatctgtaacagcttgtcagtaaattagtagtaataattaaaatctgataaatactatatgctaaaacgttttgtgtatcttatttttgtgagtacactaatacaataatgcttttttttttccttttcatgaataaaaaaaaacgtattgggacaataatggcggcctgatcaacgctaagttaactgcaaccacgagaaaaaaagaatccgagactagttcttccccaacgaccaatcttatgttgcatcaatttcacaacagaagccttaccttttcattacacgcatattgctttttcaaagtttccttttagataaattcttagtctgagtaacatctctttct

SEQ ID NO: 47521 - DNA, 1573 bp, Arabidopsis thaliana landsberg
  unsure (1)..(1573): unsure at all n locations
gagccaattgttataaattacaatctcacatctgttattcagtatctatttaatttacttgtatgggaaatttatttatatggtaacaaaaagaaagaaaattgtaaatagtttactcaggaaagagtagagagaatgttgatagaaaaagagtgatgataagaaattgtttgcatgggagcgaaataacggagaagacatagaagaaaaggacaagacagccccaaaaagatcaagacttgcgtcttggggaatgcagattaacactgactgctgcctttgtgtatgaatggaggagacacgcgatcatctttttctccactgctcctttgcgagaacgatatggactcttgccttgcaacgtctgcacttgtccccacaagtctttggtgaatggcaggatctaatactttggtctagctagggtaaagaatcgtgcttctccgcagacccttcgattgctgcttgtccatgccctggtttacagtgtttggcgacaaaggaacaacctcatccataacaacatcgtagtgatgccgcttacaatcttcaaggaagtagaccggcttatcaaaaactccattactgttaggcggaagcgaaagaagttcaagaatcttatgtcactttggctcagctaaagaatcctaatctttatttcttttctctgagattgtgtagaatccaaatgattccttgtttttttattcttttttgccaaggaacacttactctaggtcttattgtaacacctaaaccttcattataactttcttagcaaaaacaaaagacagcccccaaaaaaaaaagtaaatatccaaaacatacaccaatcttaaaaccaataatatgaaactaagactgaccctttttatatgtcacatctgtctctgtcagtaatgagtatccaccttgtgtacaaccttaatttttacttccatggaccattcaagatcgcatgtttttgtctacaacacatcttcttactttcgtagtttatctattgattctccatttggttgccacaatgttcatagtttcatatgatggtttgtaaagccctcaaaactagcctagaagtcgaaccaaaaacatcattttagggaatatacttgaatttgtgtcgagtcttaactcatctaatcttcttgttaccatctcatctctaaattcaaatccatatttctaacatttgtggttggctaaacgaaagtgagcaaaagaaaaggatgagagagagaggggacagagaggaagatgggtaactaaaagaatagatctggcctgaatctattaaaggcttgagtttcagtctacacactcacatgcaaatgctcttttctggatatgaaatatttatatacataacatgggtctctctatcttatgaatgaatgattttacaccctgtccgataagttataataagttagtttttgaaatccaagtttcatttccccgatatgcccaaaggatctctttccatcttcttacacttgccggtttatctcctccacaagtagattttntgtgtattcgtcgattatgtttgaactcaacgtaaagaatttcg

SEQ ID NO: 47522 - DNA, 645 bp, Arabidopsis thaliana landsberg
tttttctttccttttgctctcggccactgcagccatagcgctcgcctttgctccctgcgcggcacctctgctcgccatggctggggatccgcggtcgagcctctcccatccatggggcagcggctcctccctcggcacctccccttgagcagcaaccgcgacaacttcgcgctttggcggctccctgttttgcgcagtccagtggacagcaccacccctccctccagtttggctaaagcatgcccgaccctatacagcgcagtcctcgcagccgagatttcccccacaaccccgcaacattggcgcttcgcgggtgttcgatgtaatgcccgagtgaagctctatgtcatgaacggcagtgaagtcactgtcaccgtgacctcgcctttgtgcgtggctcgcattgctccgcgtcgtcgtcgagtctccttgcaagcttgcggtttaaccaaaaccttgtttgcgtgcgagtggagaacctcgatgaagtaagtaatgaagagtaagctgtcccttttattgtcaactaatgttaggcgatatcttgtaatgcgttgaatgttggtaagtctattattcatatgtagtcccgtaacgcgtgtcgaatcagggaattaactgagtatgttattggacgtgatgtgt

SEQ ID NO: 47523 - DNA, 777 bp, Arabidopsis thaliana landsberg
tagttaacttgttgtgaattctagcactatgcatctttattggcttattacattgcaatggccaatatatatttttcttttgtaacatagtgtatcttagttttatatttcgttgaatgaccttctagatgattgttacactgattcatctccattcttagcgtcttgtgataatcttcaatttataatgtccaacatttaaccatctataaaagaactaaacacatcgaaatagacttctagctatatatgtgatttagaaaaagattcattgtttatgttccaaaatattcatatcatattgttaatatacgaacaaagtctttgacatttcctcttatagatcatctcttatccaagatttcttcgtaatatactaaaagaagtaatcatcattctagtttattatgtcgccaatgttttcaaacttggataattaatctgtttgtttggtaccgtgaaacaaattttggtttatttatcaagttacagtaaaattcttaatatttttttttccaacaatcaatataggaataaagctaacagaagttggttgaacaaaactaacaaaagctcaacacaattaaaatgaattacttggtctgaatcgaactattaccttttggaatatagttagttaatgttcacaataggaatacaagttggaaaaaaacggaaagaagaagatttggcatagatactcactcactcatacacttagatatttttctgtctagctactttagataagaaatagagaagagagaaaatcaaaaa

SEQ ID NO: 47524 - DNA, 1269 bp, Arabidopsis thaliana landsberg
atatgtaacacatgcacaatctaaaatatttgtttttgcctttaaggatatttgtggctgtaaatggagtaaggaaaaggtaaaatgaaagatccaaaagagtgaaaataaaagatgcaattggtactaaaaccatcaatggccctctttatgtaaagtaaaaactagatagcaaaatgtagtatgtagcatttggagtctcaaccaaaaacatcctactatagtcaaagtacaagatgtagatagatttaaaaagctaagcatatagctctatcagtctccggacacaaacgacttctgctcgtaatactttttctcgctagcttccttcttcgcattacgtttctatagattacagaacaattttgagtgagacaacgttcaagtaaaccaagaagaagaaaattaagaatgagcaaagaaaagaaacttgcctgataagcttcatggtttgctacaatcctcctgattatggtggacgttgtgatatcaagagggctatctagaacttggaatatgcccatgctaattggtacagaatacggattatcttcctcctgtcaaatcaacaaccacattctgagaaaccatagctctttgtcttttacctaatatatacacacttgaatgttgttttacctttcgaaaatcatcgctctcggctactgtcccatgtaccaccaacgagatgtcaaatgtcgtgatctgcaatgttcaaatcaatgtcaaaaatagcatttcatgaaagccgtttgggtattgttattaagcaaagtgcagagaagctcaccgtatctctcgacacttcccatggagcaccaattatcacctcatccacgtagcggcacgccagaacgcttaagctcctttcatggagattcataatagggcgatgcgctcctcgtttagcactgcacagcaacgtataccaagtacaatttggtcagacaaatttaagcagagatgaatttatgcacatttaaattttttcatacagctaagaattaagattagacaccaagacctatattttagcctaaaactaacaccaccaatcatattgatcaaaccccataatacttgccagggcatgaaagggaaatataaccaataaactggaaagaaatcaataaagcaaattgccaaaattgagcttttttaacctgacagtctggtcattatgtataccaacaagaagaaggtcttcaagcttttcgatcccgtttaaggaatctgtccgaattaagtaatttaattaacaaataaatt

SEQ ID NO: 47525 - DNA, 902 bp, Arabidopsis thaliana landsberg
atgcatgacatttcaaacatgtatgaatgtacacttttctgttataacgatcttaatgtcattatgaatatatcatatcctgttatagtcatgattcaaatcaaaacacgagtttgcttttttgccaatatgtttttagagcatttacggcaatgtttgtttgcatcttgttgtttaggtatctagaggaatgggtacatgttgtacatatatacacgcttaatagtgatggttactcgtctatgttagaaaacaccgaaccaaaccaaacgaaatcaatttggtcgacaatggttaaccaaccggtaagatcgacctgaaggggctggaccatggaatgttgaaaaagatggccaaacagtggatcggatcggttctgatcgtggctgataacaagtccccacactagaaactaagggtgtggatcaaagttgaaaaaaacacacatagaggctgcaaagaaaggaccactaattttcttcaatattctattattgtaccttctaaggaaattgcaaaaccctagctagatcatttattagggcatataaaataaatccaacacatgttgtttatttaactgtttcctgaccacaactctatgatgattattttcttctccagttaggcatgtatagtatttttttttttttaagacttctatagtattaattagtaccgtagtacgtactatatatgggaataacgggttcgaagattttccaaatctatacaattgaattaagttatgttttaagatttttgttttacaatacacatatgcatacatacaaacgttggcaaatataagcttgtaatattttgggagtcggtcgtattgtcacgaactctccatctatatgacaattgaggttgttttttttctcgaaaatttgagttta

SEQ ID NO: 47526 - DNA, 427 bp, Arabidopsis thaliana landsberg
tgtgtatgttccattattgaagtgttcatctaaataaaacaacaaataatgataaattgtagagtttaaatgtccattagggttatgtttgatttttttgaaaatctgaaatccaaaaaaaagaaatttactttggtttgaatacatgaaatttgaaatttgaaaaccaaagcagaaaaatttataaaagaaaagaaaaagggttcacctatacctacctgggccgaatttccccttggccggcccagctaggcctcacgctcacgccttgggtcaccaccgagtgggccctactgaccagcgggcccctctggtcatacacataaattcacgtcgcgttcgcctttggtcactgatgcgtgggccagcctcgtcagaccctcccctttccttcgccgcgcggactcctggctcagtggctcggact

SEQ ID NO: 47527 - DNA, 705 bp, Arabidopsis thaliana landsberg
aaacatctggaaaatattagattactaggataggtattcgtcaatgtttgagtaaatattccaatctggagcctatgtgtttacatttgtttatttaagcttctctttaacctggtctacgtatttcatggttttctaattccccaagctactgatgcattactgaatatatcgttgatgctgcagtgactgctgattcgactatcctggcaactggtagctatgatacgactgtgatggtgtgggacattctccgcatgagaacacctgaaaagagggttagaaatacccacgcagaagttctgcggaaagatatcgtcatagccgatgctccttctcatattctttgtggccatgatgatataataacctgtctatatgtcagcactgatcttgatatagtcatcagtgggtcaaaagatggaacctgtgtattccacacattgcgggaagggatatacataagatctttaaaacatccttcgggcactgcaatctcaaagcttgctgcatcgcaccatggacggattgttctatacggtgatgatgatcttagtctgcacctctacttcataaacggaaaacatttggccagctcatagtcaaatggacgaatcaactgtcttgaacttagtaagtgtggagagttcttggtcagtgccggtgaccaatgacaaataattgtgcggactatgaacacccttg

SEQ ID NO: 47528 - DNA, 650 bp, Arabidopsis thaliana landsberg
agttgatcatgatgtttacctttacatttataacattatggatgcgtatttatcgttgtttatggatcatagggtgattttcaacatatatagatccattcattttatttttttaacatttgcatatccactcatattataccgatgcatacaagattcatcaaacaaaaaaaaacttaattagtactactattatttctgtcaatgctcactaagaatctctctagtatcacatctctcttcagtgaacaatgctctgtgaaccccaagaaccaaacattaaatgagtcaccttctttcttaaacaacagttctatagcccacaaagagagctccttgaaccttcttctcgacacaaaggctacttgaatcttcttcttgcttattcttttctaaactcaaatctctatatgaaaatcatttgtagaatggttacacattttatttggttatcaaaaagaagttgcaagaatatagactattagttaagaaaataaactcatttgaaatttcgttggataatgtattgatctcgggttaagactctctaatttgactgtatataattaataaataatcattctttactttttaaccataaacacaattcaatgttggactacatatccaccttacattctaagatcgat

SEQ ID NO: 47529 - DNA, 680 bp, Arabidopsis thaliana landsberg
tagtataaacagaatgtaaaatgggataaatgttatcttttttatatgacgtgggactaaagcatgatgacgtggaaatttacaacgtgaggcctctaacaaagattgctttgttatgccaaaaagggtaaaatcgtcaacaccctattattttactcaactacctaaaacatgtaacatcttttgaaaacgcaaagcttttctgtcgttgttcttatgttcaggtcacttggtgatctctttggtgactggaggaacatccaccacgccattgcagttaccatcgtcaaggagagccgacatcggtttctctttattatcaaagacatctttggggcccaagaaactcggctggtttgtcgaagagagtagccttgcccacatcctgtctgtgatcaccacatggttctgtttctccgttatcctctgtaacataaaaatgatgtttacataaaagtgatactatgattatgatgatatgaggatgatgactttaacggtgatgataactgatgacagtatgatgatactggtataatgatcatgcatcatcaatttttggtgctctattttttgattgccaaagcatgctatcacatcattaaaatttaaatcgattttatgacttacgtaaaagggtatgtaggtttgtcttccgttcactagaccactgatatagc

SEQ ID NO: 47530 - DNA, 560 bp, Arabidopsis thaliana landsberg
gttagtattctagaaaagagttattgtaaattagtagaaaatttttgacttggaggttttattcttctttttatggggtacacattttgtgcaaggacaaatattatgacttttcaaccaattaggaacatacttagttgtgttagtgccaattgagaatctagaacagtctaatttaaagattctgtaaccaaaaaaaaaacatctgattgtttttgtttggtttgtgcctattttaggttttgacagactcaaaggcttaaaattcaaactctaaattaaacaccctaagacttacttatatagctgaagtcaaaaccatctcaaagactccaactatttagatgccgtgtgcaaaacttttatacttatgagatatagttaatgctataaaaatatttcttttaagaaaaccgacatcctaattgatagttaatgaagtaatgtttgggttttcagttttaaattggcaaaaaaaaaattaacatataaaaaaatatatacatcaagatatgtaaatgagacgagagaaaaaacaaaatatgtagtataaacactat

SEQ ID NO: 47531 - DNA, 1141 bp, Arabidopsis thaliana landsberg
aaatacaagcatttttagtaaccatacgttttaagcatgctagtccaatattccaagttaaggaaatgtacaaaaaataacatatgtctagctagaattctatgcattcataacttcgaagcttcaaactgataagagtttaaaaaatgacgtaaaatattgaatttgatctaatgccagcttctttttctaatcagtttaatcaaactcaataaattaaaaaaaaatcttaagaatacgtcactagcttaaataaaatattagacataaaccacttatataaacctttatcataacataactacacaaacacattgtctctctttgcttaccaatagacaaccttaaagccacttttcgtcaacaagacacacaaaaaccctaaacaaaaaatcacttatcaaacttattagtgtctaatggcactcgttaatgaccatcccaacgagaccaattacttgtcaaaacaaaattcctcctcttccgaagatctctcctcgccgggactggatcagccagatgcagcttatgccggtggaggaggaggaggaggctcggcttcgagcagtagcacgatgaattcagatcatcaacaacatcaggggtttgtattttacccatccggtgaagatcatcacaactctttgatggatttcaacggatcatcatttcttaactttgatcatctcgagagctttcctcctccagccataagctgtggtggtagtagcggtgggggcggcttctccttcttggagggcaacaacatgagctacggcttcacaaactggaatcatcaacatcatatggatattattagccctagatccaccgaaactccccaaggccagaaagactggttatattctgattcaactgttgtaaccactggttctagaaacgagtctctttcgcctaaatccgctggaaacaaacgttctcacacggtaattacaaacaacaaagtcttggtgaatatttttcatataagatgtcaatgaaagatcgttgatatatactactatcaatttgaattatggatatatagggagagagcactcaaccgtcgaagaaactgagtagcggtgtgaccggaaaaccaagcctaagccaacaacttcacctaaagatccacaaagcc

SEQ ID NO: 47532 - DNA, 953 bp, Arabidopsis thaliana landsberg
  unsure (1)..(953): unsure at all n locations
tttcaagtacgatttacaacattcttcaaaagatttattcatttatttcacaaccaaaactttgtaatttacatttctacccgtacacgtatattggttgaatagaaaaattattgaatatttattatattttgagttacatatagactatcgacttaatcaaatacacaatgagtctttaaacaatctaaagaaaaagacacacgaacaaactgataacatagataacatataagcaaaataggtcggaatcaacaattacatatataaatagttgcgtggttgatgaattcgtttggtattttcacgacaagatcgtttctaggtacatagaagtcaacttcgttgccatataaactgtataacacttagtcatacaaatcaggtttatttatcgagttcaaaaatttaaattaatcaaaatatatatttgtttgcgacattcttaatcgagaattaaaaattaaaaaaagttgcgtggttgagttaatcgtttggtctccatcgctgatatcttcaatttctctgaattaatcttcacacagctgtattataaagacctagaaaagaaaacagatatactagtaaccaaacttagaatcaagaaagaaaaaaacagctatagagttgaataataagaagaagaagatgacattttttaaaccaattagaatcatcaattttttattcctatttttcatatttcttgtggtatacgcaaccgtgttctgcaaattttgttcagacactggaaacttcaaaagaagtaagttgaggtacgaaacttncgatgatagttatgaagctaggagtagccatgtcaccaaccatatcctcagccgccgcaacaccaaccccttcaccaaatgggtcaacgttctccgccgcactagcacttcttgtacgaaaccgtaagtttcttctttttacttgaatttatataaacgtatgaa

SEQ ID NO: 47533 - DNA, 930 bp, Arabidopsis thaliana landsberg
ttgtgcaaacatgattgaacagagagatagaggctttgagaaagatacctctctcgttgacgtgtgagtcaaggaatgttgttctttaagtaagaactaattaccatgtaaaagacccatagaagaatttgttttgttgtagctttaatttttttatgcttatggatttttgaagaattataagacaatcagtaaccacaaaaaaaacagaacctgaaaaattgtttctccaatgtcagaaacagagcaagaacagaacatgaactgaatgtattcgttatccgtagtgatgatgaatcttcttcttcttcttcttgacatcacaggtgcaagcatcaactgaataagaagaagaagaagaattcaagcaaccaaacttcctcttcacttgcccccacacacttatcttcttcttcttcttcttcttcatattcttccgacgatgaacaacacattcatcattctcaatctcaagtcctaataacttattactcatcttctccatctcatcttcatcgctcgaaacctcaatttcttcttcttcttcttcatctactttctcttccatacccttaatctctttagccactgtatcacgtatctgaagctgagaaacgcacaaaacattaacaacgattctaagaggaagcttctggtttttcgcggctcgttcgaatccttcctgagagagtttaccacattcaagaactttacaaacttccatcttctctgattcagttaagtatctatggctctccaagaatacatcaatggctctgtaaatcccatctgagtagctcaaaataccttgcgaaacagccactgtcatctccgctaactccacatacgcctcgagcttcagagaagcctcacttgcagccaagaacagatattcttccgacagttttgctactttcacgatatgtgaaa

SEQ ID NO: 47534 - DNA, 624 bp, Arabidopsis thaliana landsberg
caaagtatataaccgttaaagcgggaaaacaaaaagcctttcaaatttgctttttggatttagggttcttaagtttcttcttcaccacgttgttctgtttcttcaatggttttttctcttcagactgcaactccattctcactctctcgtcctcttttatatcccgaagaatagtaaagttctctttcaatttcttgctgagcttaaccatgtctatttccggaacattcttagcttcttcaggcaaactctcccgtttccgtttgttgttcaatttccgagactcgttcttcggctcaaacgattcctttacaagagagaaatctgcaaaagcctgttgtggagtcactgcagaaagaaatgtttggctctgagaagtgttcatgttggagactgttgtggccattgttgagatcgcaggatgataatgtttgctcaagagactgagttcccaaagcactgttgctaaagccccgcttaggttaggatctgttgcatacggctgatatttctgcaatcgagagatttcgctgagcaacagatcatattactaaagttaaatctgtatacgaggctaaatattcgtgacttactgcaattgaaccggaaacagagccggctcag

SEQ ID NO: 47535 - DNA, 590 bp, Arabidopsis thaliana landsberg
  unsure (1)..(590): unsure at all n locations
aactcaataaaccacatcgcggcatctgtgtacactgacaattataccttgtacacgagcaaagccagaaagaatgtcatcgacgcacattatccaaggctaatttcgtcatttaccatattcagactaaagccatcagcgtctgtacaatttcagactggcggccactcactgaacaaagacaacttccttctccaccacaaactaataaatttgtattgataatttgatataatcttaatatattttagcaaccaaatgatgatactatgatagtccaaacatattaataaatctccttaacaaacttttaaaacctcattaacgaaaagtgaatagaatcttgagtaaaaaaaaataaaaaaaaatcgtgcatatattcatatgcggtggacaattatttagaatttctctacgcaacaaaaaaaagtaaagaaaaacctacttacaactccggaaaattatttatatatttttcatgtggaaaatattgtaaattaagcacanataatagcattgacatagacaaataataaagaatttgagtaaaatatacctccatggtccaaaaaggaccaaaaccattgaac

SEQ ID NO: 47536 - DNA, 264 bp, Arabidopsis thaliana landsberg
  unsure (1)..(264): unsure at all n locations
aaaaagccaactccagcataaagtacttgtacttaaaagagaagaatatgaagccacactttaggtgactaaacaaaggatttgggaaactatgagcaatagtagtactcaaaggcagtatagtattaatcgtcctataatctatagagatagaggtaagcagtcatgatttctaaaacattatctagtcgtatctagtgannnnnnnnnnnnnnnnnnnnnnnnnnnnnnnnnnnnnnnnnntcacattctcatctgctattc

SEQ ID NO: 47537 - DNA, 373 bp, Arabidopsis thaliana landsberg
  unsure (1)..(373): unsure at all n locations
cgttaagttgtttagccgaatgtataagacacaaacacggtggcaagtctaaggaatttagactaagcaaacttactttttcatataatgtttagaagcctacgaatcagtgtgtatttttgtaaataatttaactagtggacgattttctgatggtattcttttgtaacttaaactacagaagtatgcatggaggaaaacaaagatttataattggaaaaaaccaagtggatgactatattctgctaaaatctcaaatctcaaattcaatattaaactttcatactataatcaatggaagatgatgctgttaaattcactgtaaaagcaanaaaaacaaacatatatatttggaaatcatcaataaaaaagc

SEQ ID NO: 47538 - DNA, 1062 bp, Arabidopsis thaliana landsberg
gatactcttgtggagctttgaaaataagtttttctctttttcattttctatcatcgataaatttgtcaccatatatatactttaacaattataaatttggctccatatatagactttcctcgtagaatttgatattagttgttataaaaaaaaaccaagataaaatgggttagtataaagattttacaccgggagatgttagctcatttagtgcaaatactcatagggttatctaaatatttagatgattgggttctagagttttgaaatgtcaatgtatattttagtacttagaaacaaaaaactatcatacactgtttttagttatttcacaatttcatttttaaatttattgaacttggatatttttgttctattgactctgttattacataattttgagtatattactatttacatgctattacagtaaaatgcattttttttgtttagctactatgtttttgttcagatttctctgtttttttatttttctctttttactatttcctaatttggtaagttgaaaagtattggaagacaacattgtcaaagtgaagttaactaaagtatataaaaaaaaataactacagtattcaaacaaacttcaaagaagtttttgtttgaactattttttcctaatgagattataatcgaattgatgtttgctgataagagccacaacaagatgtataaacaaaagcagaaaagaagaagaagaagatcaaatgcgaatataaaaataggtttatttagatgttgctaataacaataactaagtaaccaccaatggcgggaacaaacggttggaaactgccactaggaaaaaggccgtagaaaaatacatgaacgccaattctgggcagatgcaacaaaaacgtacaaaacaaaaaacacagctgcagaaaaaggagacagagagatttctcaacgtcttctcttctctctgcaactgcaattatgactgtacattgacaaacaaacaaaaaagtttcatggatcaaaaaaaaatagttacagaggattttctttgtagaataaagcgatgtctggattgaagaa

SEQ ID NO: 47539 - DNA, 1022 bp, Arabidopsis thaliana landsberg
atttatgcattttatagtcaagtaaaagaaaattcaatgctaatagattcgatgcaccaagttgccctctgtcaataagtctccctcaagtctcaaagcctttgagcataattgactcttcaaaagaagacaggacacgtcttatgtttctttgcccttttgaattcttttacttcgccttcaaatatctcttttttcttaggttttaatttgaaaatggatttatccaaatatattcatatagattagatattgttaaatactagttttgaaattattttatcaatgatgattgaattaattttccaaaaacataagaaatagtttttgttccttttctccatataccttgtgtaagaatgaaaacaaaaaaggaatgaataagaggatcaggattcaggacagaaaaagagaagaagagagaatcaaaagtgtggtttgatctttgggtctcatttagacgtgtgaaataaatacttcactaagacaaagatttaatagtttaccctcactaaagaaagtaactaaataactaaaatattttgtaatcattgatcaatgtgtgattagagatggacacgaagagttcaacttaagatgtctactaaacctattaacctaacatacacttgtagtataaaatatagtaaaaggaacggtcgaaactccagaggtacaaaacatgtctttaaaaactgatttaagttaattaactacattattaaatgatttctatgtcaagtacctgttgctaaatgcactgccaccaattataatctattactactaacaattagtagtaaccaagagtcaagagacatgattctgtcggttatatccatgcaaggaacaaaaccatataattaagaagctttatatgttgatccactaccatgaattcctaatgcttatctatgcttatgctatatgccaatattttttaaaagtccaattgttcatcattacattccttttaatacgttatctcatacgttaattagattataattataaaaaacaca

SEQ ID NO: 47540 - DNA, 462 bp, Arabidopsis thaliana landsberg
attatcgagtagacatattatataattggttttgcaagagaatggcctagtttcgcagacttttacattctcggtaacaatcttatcaaccgatacatatatgtttgcattatgtttttaaacattatcgagtagacatattatatatcgcttatttcacaactatttgttactctacaactatcaatcatttcctgaaagagtagaacactgtgaagatatacacactgagagcagaagagaccaataccacaagcaccagcacggtatgaatcgccaaagcattgccgcaagagagaagccccagacggatttgtatacctccaccattggccaccggaggaattacacaacccaagatagatccaccagctgcaccaaccacaccgaaacgaggcacatctcggtggatattcgctttaaacacttcgtccgtttctttgctgttcaaaaggttgatgg

SEQ ID NO: 47541 - DNA, 975 bp, Arabidopsis thaliana landsberg
gattccaagtcgctacaaattctagttttttttacgaagattcgatcatcattttattttatggttttgagcgccagagaaatttagcttatttaacgagttagctaagtcacgatagttattatcttgtggaaagcaatgggcaatccgtcactcttaatgataaagctaaatattaaaactgatttttctgattttatgttatttatgttgtgaattaattggtcaatccttatgcgtatttacttagaattaataaacttttctgatgtgattcaagatatagctagtgtcctacaactcctacatcagctaagaatcattcatacatcgaatattttttattaacacgcacaagaaaaacacattagtacacttaaatgtattaatttccattgagttggtagcgactggacattgaattgacatcattttacttttacaaaaataataattacaatttatggcatatgaattcatataaatgttatcataacgcccatgatatttgaacaaaaatctcccacggtactaataaactataaaggtataaatagcaaggcaaaattttcaccaacaatcctatttgaagtctatatatatttatcattatttaaatcttattttcttttttctaagaaaaaatctcttaattttctaatatctttatttttatagtggaaaaaatggtgagtacaattggtgctctctgccacttcatttgtccgtaaaaagacaaattcaaaaaaaattgaatatgtagaggtgatcatgttaaaagattatcttctgcatatttttctttttaggcaaagattgattgactaatatcttactcaccatatatatattttcaaaattaatatcttagtcacaatattttcagcaattcatttttaatatatatctaaaagtgactaagtctatatacatctttacatagatactatgtttaccagcttgtaaagttataga

SEQ ID NO: 47542 - DNA, 769 bp, Arabidopsis thaliana landsberg
ggatattaattggcacgaacagcgaactatacccgcgcaacggtagttttcagtgtacaagacattgcccaacttattgaggatgatgcaaccacgcttagcgggttcgacacatataaagatttaatcgttcttgcttcgccgccgcatgatagcgccaatattgcggagagcattgttaggccaactacctattatgatagcggatttggcccggtagttggtgttccttcacgtatcattgataattttggtcaaaccatgtcttttctggatgaattaggtcctgaattgtgggatcgtagaaaattccttcattggatacgtggtaaacaaattccattctggtggccgagctacaacaatgatttagctctggtaaatccgatcggtgcagccgatacgaccattacagttcgcagaattgcaactgaagatgtttataccggcgacagcatcatgatcctgacaaaatcagggacacgatattacagggaaataacaaattatagtgttgggcttgacggcgacatcctcactattacggcgcttggtgctgctgtaagccttacggatataaatatgatttgttacatgaagagggtaaggtcaaacagcgatagctttactttgacacaggtagcgcctaatcttgtatcaatgacaatgcctgttttggcagtaccagaatagaaaggaacgggaatgtacgatacctttgagaattcggttgataaaggacgaccgttctggttgtactttttcgatg

SEQ ID NO: 47543 - DNA, 517 bp, Arabidopsis thaliana landsberg
ctctggaataggcgtaggaggagttggtgttggtggtgttactacgggtggtgttggtgttggaggtgtcacgacgggtggtgttggtgttggtggtgtaatgacgggtggagttggtgttggtggtgtaatgacgggtggagttggcgttggcggtgttacgacgggtggggttggtgttggtggagttatgacgggtggggttggtgttggcggtgttacaactggtggagtcggcgttggtgttggtggtgggcatggtgtaggcggaggcttgtggtggggtggtttcggagtagacggaggaggcttggtcgtgggaggtttaggtgtggacgggggaggtttggtgggaggtttaggggtggacggaggaggcttggttggtggctttacgatgggaggttttgggtgggggtgagttttggtgggtggtttagggtggggtggtttgacggtgggtggcttagggtgcggtttgacggttggtggtttaggatggggtttacggttggtg

SEQ ID NO: 47544 - DNA, 729 bp, Arabidopsis thaliana landsberg
agagcaaaaaatgataccactgcggaatgcatatatttctaggttttgttttgttttgttttttaaaatacgaaccctagttttggtgggggataaatgattataatttgcatcattgcatggttacgttgatcttcatgcagtgcaatagaaggtttacattgtagctatgtatggaaaatattattgaagtaaccattaaaaccaaacccttcaaaaaaaaaacatttaaaccaaaatgtatacagaacaatagagcatatacatgagctgttctctcaacaaaatccttattatcactcgttttcatatatatatttttaaccctttttttgtgtgtgcaccccattttaaagctaattaagtatatataatcactgtaatatccgttggttttgccctaaggtaatttgaaagtctgtctaagtagagaagtgagaaagggtaccatcatatggtcgttgtcgttcgccattgttacaactcacgaggattataacatcttcgccgacaaaaaatacggagaagaggctgtacactgaacacgtctctcatagtattaacatatatagctttccttaaatctaggccctattatgttctcttagggttcccatttttttaaatcaaaattcaagaaaaatatatatatgatttgaaggcgctttaatttggtttcgatgtaagttactatattataatacatctgagtcctggccaaccaaaatg

SEQ ID NO: 47545 - DNA, 375 bp, Arabidopsis thaliana landsberg
agcgcagcgacggccgcgagcatcacgcacgggcatcgcgaggatgggtgcaggcgggggcaccgtggcgtgcgtaacggggacaaggcgagcgcacgggcgggcatcgcgaggacgggtgccggacagagctagggcacgcgaatcacgtcagagtggaggcacggtgaagctggtggtggacgcctactttactctcctatagagtagtaaagattcacagaattggacccacccatttttattaaaccccaagaaaacctatccgggcatgttgtacagacaaaattaccaggccacaccaagacacactccatcaaaacaaccactgcgacagatgcaagtaatccaggcaaggttacattagccatggat

SEQ ID NO: 47546 - DNA, 476 bp, Arabidopsis thaliana landsberg
  unsure (1)..(476): unsure at all n locations
nnnnnnnnnnnnnnnnnnnnnnnnnnnnnnnnnnnnnnnnnnnnnnnnnnnnnnnnnnnnnnnnnnnnnnnnnnnnnnnnnnnnnnnnnnnnnnnnnnnnnnnnnnnnnnnnnnnnnnnnnnnnnnnnnnnnnnnnnnnnnnnnnnnnnnnnnnnnnnnnnnnnnnnnnnnnnnnnnnnnnnnnnnnnnnnnnnntgggtcgcatagcactctaccgatgcacaaactctttcgagctgtagatcacgaaactcaagtctgtagttcttaaagaggaaggaattcagaccatatcgactgaaggagacagcaagactgatctagaccagaccttcatgtagctctaaatgctagtcgatgatcactatccaaactgatgctcgagcgacgtctctacctactacgcaatagggggctcaacgggaacatgaactagcaatgccaggcggccaacaaacctatcgagtatgctaagt

SEQ ID NO: 47547 - DNA, 506 bp, Arabidopsis thaliana landsberg
tacgatgttaaagtgatacattactctcctactcttctatcataatctaacatatgtagatgtaggctttgtcattattaagtgacgaaggtaactgtgttgaacgttaaatgtgatgcaagtgatgaatgtgaatttgatgaatgcgattcatgtgataaatgccacgtgaatttgtaggatctataaacctctctagggagatgacgtgatgtcgaaattttatacttactaccatgttcttgggtatagtgagtagatcgtctggctccaacgccagcgcttgtcttactccaccgggaccttaggtataatcctttttcgcgattagttagtatctagttcttagcagtaatctcgtgatgagtcagcacttagtcagtagttcactattactagtgactcattattagttagtagttagctagtagttagttattagttagctattccttattagttactagttagtcagtagttaggtatcagttagtaatttgtcatta

SEQ ID NO: 47548 - DNA, 483 bp, Arabidopsis thaliana landsberg
cgagcaggttctggaccttgaggtccggcttttcgagcgactggcgacactgctgcgccagcgcgatgcctcgttcgaaaacctgcagggattcctgcagggggaggtcgccgcgctccattttctgcacgagcgcttccagctctttcatggcctcttcaaactggccaacggcctgcagttcggcgctttcagcgcctttttcatccggccgtttgggcatgatgactcctgaaatttgttatcaagtagcatataaagttatatttgatttaataatataacttttcggggcggctgcgggatcactggggcagcctctgaatcgtgtttgcctgccttattttacgtgcaggggcgggacaatagcgcgcctgcgtccactgtcaatcttgcgggtgactaggtcatccgttaccttcgcggcgccgcaagacgtccttgcaactcccgccacgtctgctcaatgactcccaatcaatc

SEQ ID NO: 47549 - DNA, 636 bp, Arabidopsis thaliana landsberg
tgaaatgtaccgatccaaatttgtatggataattcttattggaaattaaaaatgataaatatttatccaagtaaagttagctcattggttaaaaaggatttctttcaatcttcatggaaacaagatttgagtgagatgatgtgaataaactagagataatttacattaattgttacctagcaaactttggactgaagatccaaaatttctttgatacctcaaaatataaatttagtagttgactctgtcggtgacggtggtggcacaaggacacgtctcagaagttgtgttagtcaccaaaagattcacaagcctctcatgactcattactgaattggtcatctacttatgtcacttagaatccgatcacaaagaaaatattagcataagaataatcaatattaaaattatacagtcaaatttataaaatataaccacaaccaatcaaacaccaagattccgtatgttggccatattaagtcccaaccaacattttttaaaacataacttcaacaatcacaacaatgaccgatcactcaatcaaacaataaatcgtggctaaatattacatttacaaatttctatatggttacactatagggactgtatgtattttggtttctggatatgaccaac

SEQ ID NO: 47550 - DNA, 800 bp, Arabidopsis thaliana landsberg
taaggtatccggaaaagcatggatagaagtttggtatacctaagtttcaagatatatgtatgatctgtaactaatacatcattactttaaagaccagaaattataaactaagagaagtttggtatgtcaaataaagacgtattcccatttaaacaatcgcattctctactttttagattttgttctgttttcaagtcaaaaagaaagaaaaagtttctttgacaaccattcataatactattagctgcagaaaaattagttccctgtcacaatctaagagctaactaacgtttcacaacttgtgtcatcttttaacaaacgtcaaattcttaactaaaaaaacatactttattaattacatgtaacagaaccattattgtatatgaactcggataattacaacagattaaaaaaaaaaaaactgtgactgtaacttgataagtgatagccagaccatttattgaattttctttacattgtcaaagatacaaagactgaagaaaaggtagagaatgagcaaagcttctggatgagaaagagagtttgcatcagtctaaagagagcttagccagagtgagggagagtacttttactccattagccatgtcttcaggagatgagtattcttcaggtttatggctgtatcctgcaaaacattacgcaaccaattaaaagcttaatgggcgatgcaataatttgattaagatcacaggctaattgattcgcatatacctttgtagcacgggatgaatatcatacccatcggagattttcctggatacagctatatacaacaaagt

SEQ ID NO: 47551 - DNA, 544 bp, Arabidopsis thaliana landsberg
cagatccgtttgataaagggtaaaagcaccttacacagagattagaaataacattcttttttgtcaaacatcaggctttaacttttcttgggtaaatatgaatgctgcagggtcagaagggcagcttgtccggttgatctgcattcctaagttctgtgagaccggtattgctgttgcggtgagtttaaaatttgagcagaatttgagaccatttaccctcatagattgcagattctaaatctcaaaatcaccatgtctatttcgcaggtgaacctaagaaatctggaatgtcacactttaagctttagcactcagataaaccaatcataacattgagttgctactttggtagattatttcctgtcttgaagatgtaatgttgagctttttcagtaacacactcctatgttctaaccaaatgtttgttaaaaatcctttttcttgagtggaacttccaaatctttggatatattggtaatgctcattgttttgtcctaattttctaaaaatctcgacacgagttcttaggtagtcacataaagga

SEQ ID NO: 47552 - DNA, 859 bp, Arabidopsis thaliana landsberg
cgaggcattctccgccatcagcaacaaacatcctaatatgtttcgcatttttatcaagacttccacttgcggagccctgcgatacaaaaagagagacaagtattaaccattgattcagaaggaaaatggtttaaatatcagctgatcttacacaaaaggattcatcaggtgtacctgataagcactatcgaagaagggcatcaatccctttgatcgcatcaacttcctgatttgctcccattgttgaatggttggatcaacaccagtagggttatgggcacaggcatggagaagcactatagaaccaggtgcggcagcaccaaggtcttctaataaacctgtgaacaaaagaagaaaaaaagttgacgtaaacgaattcagaaagatatataagcatatcaacaatagcaagcaaagaactcagtagtctcaccttgaaagttcaacccacgcgtcgctggatcgtagtatcggtaagttttcactgtcaaaccagcgagcgtgaaaatctttggatgatttccccatgttggctgagtgatgtaaattgttttctgaaaagcaaaaggagaagactccaattttctatgagaagattctataggatgaagagattcaatcggataggaaaattaggcttaagcatcatcctgatgataatgtttagccatagactctcctccgactctcatgagaaccagagccagacaaacacaccacggtggtaatccgattctcccgaattagcaggactaaaccaatcattagggcaccagtcataaagaataaactaaagaagtagcaaagtgatggaatcgtaaagaataaacagagaatgcatacctgtcagcgcgagtat

SEQ ID NO: 47553 - DNA, 924 bp, Arabidopsis thaliana landsberg
  unsure (1)..(924): unsure at all n locations
aaattttaaattaacatccgaaccctctgacttttgactgtgatataagctctctctctatctctctaatagacttctttctagcatctagcaatttgtaggagggatccatccatccatcatcatcatcatctttgtgtggctcattctcaacgctatagtttaggtgcgtgtatcaaacgaagcattgggaatgagagagtgaatctcacgcttctgatgtcgagagtgagagaatagtgatgtgatctagtcaagactttctttgttcctcactggcttccacttcatcataagctttcaaaatttatgaatcccccaatctatctttagactctattttaccataaatacttgagactaatgattatatattggcattaagagacatataacatgaatataaattcccattttgtggagtaaatattgttcttgtctctgttctgttcactttaaatcttcatttttctctacaaacaataatcattaggactcaagagtttatcaacaatacagaatctgaacgtttagtactcatgtcatgtgaagtgaagtgaagaagatcaacaagaacattaattgtttgctataatcttctatgggccggataggaataattaggcccagtatctaacacatcaaacaaaaacacatcgaagccgaatcgtcggtgggataattaggcccagtatattcaaacaaaataacatttaacagatccaagtccaatgttgtcgtggaacgaacgtcgtttagaataattaagcccagtatttaacatatcaaagcccaatgttgtcctaaaacgacgacgtttgaatgtggaacgtaaacaatcctggaacaaccgtttcaacgacgtttttcctatcactttgttttttcacctctcgaactcctncgatttgctacccttacgca

SEQ ID NO: 47554 - DNA, 1383 bp, Arabidopsis thaliana landsberg
tgtaatttacagtaacagtaatttaagaaaagtaaatcaatgttgattgttttgatcttgagtatgtagaatctggaccctttagtattctttttcagaaatatgactgatttaatcattaaaataaaacttttgaatcattgaaattgcttttcaaaatagattttttacatgtaaaatcatgtaattcattcatgtaaatgaattttccagctaaagcaggaaaaaagaaacgaatgattgagtatttttcttgtctctttcctctgtatgatgacttttgtgtccgataattaattacttgccaacaatcaatcattaatggacacggagaaataaatttaaaatatcatcaatcgtgagagacgaaaaatggcctaccaccctgaaagctcattatagcctttttagccactatataaaatcaaacaccaatcaatatctgccacgtcatcatcctcttttttccagcctgtcgcttttaacctttgttttttcgtctcttacaatgcacaactgttttcacacgtgtcacatttttccctctcttctctctctttcgctctgtcttcttccccgcagtttccggagacgacgccggaggaaaatcgtacggcaactttgcttctacttcacaaggccggtccactaagcacctacggcaaaccgcttagaagtttctgtttctctctcttctttggactttgctaccacaaatagaacgagaggatagacataggaggagagttttgggatattggtggagagcgattatcgggagagccagagaaaaaaataagcagcttcttcctgcctcatgggtgggaccgtgacttttgttttcttcaggtttgaaccgggtttttttcctctcttcatttctcagtttttcccctctttttacctttcctggaaaaaagttagataaaatcggaattgtttggattagggcttcgattttttgatgttgttgtatacttttttcaatagagatttgattgtgaaacttttgtcgtcgtagctttaagcaaacaaaaaaaaaagatgaccggcgttggcgagaatcagcttatctccattcaacctgatgaactcaaatttctctgtaagcattcttctacactctcttcgttaatcaatggcatgcatttgtctcatctatacttggttaattctagggatatctattcttaatttgtgaaatgtgaatgagaaaaggcttctctcgaatttgccatctttttgttctctagagatttcgaaattgtgtgtatcatcaatgcttgttttcctcttgtttacatacaccagcatcaagtttttgttaacttctttgagcttttgaggttctgactttagataaggctgattctcttggtcttt

SEQ ID NO: 47555 - DNA, 1242 bp, Arabidopsis thaliana landsberg
taattctctgattctgtgttggaatgatgacttcaaactttgtttcccatctttttttctctttttcttcattttagttccgcctctcaaacaagggaataaacccattgttgatccgcctcgggaacctattgttattaaaaaacctatcgatgaccctagtctagtgtcagaaccaatcagcattcctatttcagtgccaaatccaaaggaaatgtggaaatatatcgtggttctagttcaaaaccacttaccaatgtggaaatatatcgtggttctagttcaaaaccacttaccaagagagctagacatcttgaagagtattgtgtacggaggtcttatcgagtccatcacaagcctcggtgtcgtatcctccgctgtcgcttccggagcttcaactcgtaagtagacataaacacggcattgagtttcttcatacatttcaattaaaactaatataatcttacttgcagtcaacgttatctctttggggctagcgagtttatccagtggccttattattatctgtcacaacgtaagtcgttttgtttcctttcttttttttgcctgcaaaaagttttaagacgttagtaagataatttagtaaacagagcacatactctgttttcccatgagaaaccgaacacctaactctgttttctcatgtgtctctaaacacttgtgattaaaaaccttatcattcgatacacacttacaaaagaggatatattttggcagctgcgtgggctaaaaacgaatcaaccacgacctcaaagtactaacactgatcatatgacgagtgtggaagtagaagatccgtaccaaacactgctgggaaacagaaggaacttcatactccactgcgtcgttgttgtgctttccttcttcttcttcggtgtgatacctcctctctgctacgccttctcttacagaataaccgacaagggacactacaaagctgcggttgttctcgccgcatctctggtctgcgtcatctctctctcctttgccaaagcctacgctttccgcatgcaaaaactcaggacaatggctgaatacaccggaatggcgtttggggcatctgccctttcattcattgctagccgaatcgccagcgatatctttgaaaagttaggctttcatgagcttgcagctgagtaccgaaaagactgatttcaagattctgcaagtatgtttaagataaacaacaaagctaccaaagagttgttctttagctgcatg

SEQ ID NO: 47556 - DNA, 552 bp, Arabidopsis thaliana landsberg
ggctcgactaatcgagtaaatcgatgacttatcgtgattagtcaacttatcggtgcttaggcgactagagtcgactttaaaaccttgggctagagtgtaaagtctgtcagccccccccgcccccctaccatagtttgtgcctgaatgttggcagtgacaacatggcagcaactgagatcaggtaatggtagccagttggtgaggactgaatgtgcaacaggactccaaaacagttgaatatatgtggtctgaagttttgcatcacacatttgttttttaattaaagttgtaatggaattatgataagcagggtctttttccaagaacttagtgctacaaattttcccaatgccatatatacgagaattattgcttttaagtggtggtttcatgcttttagttttccaatgaaatttgtttagcatggttctagagtaaacaaactggcagacccagtgccagaggtcccacataagtgggatctgaggaagggataaccgaggaaagccttccccgcaaatgcagagagagtgctttaacccgcgacctggt

SEQ ID NO: 47557 - DNA, 994 bp, Arabidopsis thaliana landsberg
ctctggattgtagttccccatgtccgggaaacttatctgtaaatattacaaacaatcagagttagttgatgaaactgtcaagctggggaactataagaattaggaaacatacctcgttacagaaccggtaaagacccatccattggtccatgtttatcactttgtagtcgctttggatctgtgccaaacaaatataaccaatgtgagatgacaacattgcgtgaaaacattctggaaattatacaatgtgagacttttgagtgatccaaacctttaaatactcaacaaagtagtcaacttgggctcgaaatgtagatcccatgacgatctctaggagttgacatatagtctctatgtctatgctcttctgtttttcctctgcattgaacaataaaacataggtcacatacacatgaaaggtagaaaagagaaacaacagcaatatatatatcctcatgcagaagcagaaattttaatattacctgttaaacaataacagaaggcataagcatagaaatctgcaaaatttgatggcctcctgaccttcaagagacagaaataagaatgattcagtctaaactgatactcagaagatgtcaatcaaaatgaaaatataaaggataagagtttgaacctctttctcaagctccggaagggctttcttcaacttattgatcgtatcagctcttaaagccttgaggcctcttctccactcctcctacagatggacagtgagttaagatcaaaacacaaatcacaaacttaattcaagtatcaaagaaaaaaggatcactagctcttatggattcttcaaatttttccttacatgtgtaaagtaaccttgtttctcagctttcatcttcctgcaattgcaacaattaaaaattcctaaggatatgtgactccggtaaagaaggaagaaaaacattaataaaagtgttgatggataattaccaagcaagcatcaagattctgatatcagtatgtgacactt

SEQ ID NO: 47558 - DNA, 155 bp, Arabidopsis thaliana landsberg
gttgttgttgtgggcggggtctcggcgttcgttggttgctgcgctcgggtggtgtttctctggttggtttgttgtcgctggggttccgtgcctgtttgcttgccctgtcgggctgcccgcctcccgtgggttgcttccgttgtgcgggtttcccc

SEQ ID NO: 47559 - DNA, 859 bp, Arabidopsis thaliana landsberg
  unsure (1)..(859): unsure at all n locations
tacaggaagaacaagaatctaagccatatcctccactctctttgaaactgggataattttttttactttattgagatttagtagtgaagacaagatctatagtatatagtacagagacaatatgtaaatttggtgccgtggattgcagttcaattaaacagttacagacaatagagagacagatagagagttacaaaactcaagaagagcgtttggcatttgaacagagattgttccagagatagcgaccacttgccatgtcaacgcatgtccaaaatccagacttcattgccattcccacctgagcccataaaatcagaaaaacccattaatccccaaattacagagagagagaatgaagatcggaggaaaaagaaaaaaccttggagaatccagagactgaatcgtcgtcggcgggttcagcgtcggtgaaggaatcatcgagaggatcgtcagaggtagagttgagcttctggaggacgaagaagccagcgagagtcgctgaaaggaatatgaggataagccttaacggacacatctgcttcttcttcttcttcttcttctcttttcttgatttgctttttccagtttttgatgaagacaatcaggaaagagagagatagaggagctgatgaagaagaagagagagagatgaggagggaaaaaaaagggttaataacanataaaaaaaaaaaaaacatagggtgaagaagagaaaaattcaaagggtggagttgttgaagaagtgtcaaattaggtaggccattccctaaagtcacctcgaattttcaatttcatatacctaataaccttatatgtcctattttatatttgaagntcacttttttttttctttctt

SEQ ID NO: 47560 - DNA, 441 bp, Arabidopsis thaliana landsberg
  unsure (1)..(441): unsure at all n locations
aatcattcgtctcgatcaaatatccagaactagaagcagctattgcgacatttccacaggtagaaggggatacactatgctcatacgcgacacgagcttgtatatcacagcatccactcaatctagaccagtcttgcagcgagtactctctaaatttggacgatatgactcccgacctaaacgtatcctgtatatcgtgcaactgctcagacgcatcagatccgagtaggatgacgctcgtatgtcgacaatcgtgcatgcgccagctttaggaagtcgattaacaggcgaaaattgggacaatcatttgcaagtgatccccgttcgcacgccagaagtggcatgttnnnnnnnnnnnnnnnnnnnnnnnnnnnnnnnnnnnnnnnnnnnnnnnnnnnnnnnnnnnnnnnacgtctcagcgggagctgcctctgtgcagct

SEQ ID NO: 47561 - DNA, 424 bp, Arabidopsis thaliana landsberg
atttcattatttcagaatggtgatttggataatcaccggataattaatactattatctaagtaaaataattatgtgaatttcagcataaaatactaaaattgccattgtgatttttcaaaaataatttaaatttgattaactagatgttaaaatgagtaatcggttcatggattaaatcactttataaaatgatctatctccatcataacctattagattgaaagataggttcagagtttgtgcaaaaaaatgtatagcatacacatctgaactatttctctttggtcaaagaatcctaagtctatttctggtattaaagatgatatctgaaaggcccttttaaaaagatattcaggaatcagtataagatattctgagggaagtcaatcagaaaatgatatttggttagctctggtggtcaat

SEQ ID NO: 47562 - DNA, 860 bp, Arabidopsis thaliana landsberg
  unsure (1)..(860): unsure at all n locations
ctgaatccatcatacatacaatgcaagcccaagaagatatttttaagcaacaggtacgttatacttgcatatatatatatattcatcatcatatggatttggtctttcaaacaggaaatatttaaatttatgctttccttcgagcctaattacattttaagcagcttgtcggtttttgaaaaggatgatatatcagtttaacgaattaagaaatgaatgatttagttagtttttttcaatcggttgtcttttactttagtttagattcttggaccgattcaggttatccatagcaaattagctttaaattaataattatccatagcataacaaagtgataatcgcaggtacgagagctacatagagtatataatacacagaaaatgatgatgactcaactcaaacatagaagccaatattggactgttaacaacaaagaccaacccggttcaagagagagaaccggaagttgttcaggcatagacctcgaaaatgtggttagagcaacacaaacgacgacggatcatatcgaagagagcgaactcgaattgacattgagcattggattgtcttcttcatctactactatgaccacgacaacgaacaaggacatggactactcgtcaacaacgtcaatgagatcatcatcggataattgtaataatcagagcaataataatctatataataacagcaataataaccaagaaagtagcggaccaaacacgcctatgagcagctcaagtcgacgtcgttggatcgagagaagaagagacctcattggctctttcaggacttagtattaaccgaacctcttcttgattnttgataattcactgactctttcttttttcttcttc

SEQ ID NO: 47563 - DNA, 653 bp, Arabidopsis thaliana landsberg
tttttacaaattatagagtcttaagaaaattaatataaaagtatatgtgaagaattaaagcaaatacattatacattttttttttgtctggggtaagcccttacatacttcaccaaggtaatgtatgttataacaacatcttcatatatgctttaattcgtacatgcatcatcttcatatatatgcttttagaaaaacaaaataaaaacaaccgagaattaaacaaataccaaacacacactgacacagtcagtcacaccacacaaagaaaacgatttctctggacgtacgtctacttttattccttttgcaaattttatataacatttacttatatatttttaaaattgtaatgaattttgactaaatcgtcgattagaaaaaacctagacaaaaaaaaaaaccagttatttttttaaaattatatttgttcctattatccatggtaagcaacatgagtatggggagagatctccacgtctccttttctaagggataacatggtttgatttgtatgtaatggctgtgctcgcagcacaaatgaacggtgcatattttctttgactttggcaatcaatcacgctatataccttaacactcatccagcagataatttactcgcagttcacatttgaaaaaaaaagaaatatgac

SEQ ID NO: 47564 - DNA, 942 bp, Arabidopsis thaliana landsberg
  unsure (1)..(942): unsure at all n locations
tacttatgaaactttataattctgattttaatataataaatatattattcttgaagatttctattttttcttttttctttttggcaagttcattagttaacggctactatcaatgggttcaaatcaagaaaagtacactactcataactcaaaaggtgtgaatcaatgtacttcaggatttgtttctgtatatactacttcaaataaatttagatttgtttttctatgtactagtaaaaaagtgaatataattaaatcggaagtctgaaccagactatctaaaatatagttcctcttagaccatctccaatgtgttgttgaacaaaattttgtttgctagctaggtaaaaaaaacaactatgtgctattttgaagacttaaatctagagcaagaaaagataatgtcaacaaagattaaaaagcagttgatcctacaatatgaatttgaacgttctctctgacaattttatccaatcttcaagctactattttttgcaacatgtgcctttggcttggaagacttgaatgcattataaataataatttataatttatttaatcgatttgatttctttacctttgaggaatatgtttaaggcaactccaaacagtgtaggaacccattgaaattccaatcaaataaaacctggatccgatctctannnnnnnnnnnnnnnnnnnaacatcgtaggcttcactcttcaacgaacgtttaggattcgggtcgctctctccgtaaccagctcgatcatatagcacaaagtatataccaatttcattcacaagctcctgagattataactaaaacaagcctcattagtcttcaaccatatctgtaacaacatctctctttctaactgcttttgcttgtttaatctttagaaaattgaaaaataatttagcttttcagacatctaattttcaaacattcacattaaagat

SEQ ID NO: 47565 - DNA, 339 bp, Arabidopsis thaliana landsberg
tccgttccgcggatcgattcgcggtagtgtcctgatgcgcattacagaggcagactacgccagggctattgatacgcttgccgtaacgtcgctgcccttatctcgttctacagcatgcatctacctacgttgctccgcatctgagtgatctgtgcgtctcgctcatggctctccattcgttgcgtctaggaactcggacgagacagtctggcatgatttcgagtcacacttcgtactaccgcgtgtgttgctaaaccttcctcctagtcgtgatgactcttattctgagaattaacaaaccgttactcatatgatcttggtacacaatcttatgatgcc

SEQ ID NO: 47566 - DNA, 561 bp, Arabidopsis thaliana landsberg
gtagaatagatctgagagacctgtgtgtattaaccatcgacccttcgacagctacagatctcgatgatgctctatcagtgcaaagtttacccggcggtttttttagagtcggtgttcacattgctgatgtctcctactttgttttaccagagactgctctcgacacagaagctcggtttaggtcaaccagtgtttacttgatgcagagaaaaatatcaatgttgcctccattactgtcagagaacgtaggttcacttagtccaggagctgatagacttgctttttctatcttgtgggatttaaatagagaaggggatgtgatagatcgctggattggccgtactatcatacggtcgtgctgcaagctttcatatgaccatgctcaagacattatagatggcaaaagtgatgttgcagaaaatggctggcctgcgttgcatggatctttcaaatggtgtgatgtaactcgatctgtcaaacagcttagtgagatttccaccactttaaggcaaaaaaaatttagaaatggggctttgcagctggagaattcgaagcctgttt

SEQ ID NO: 47567 - DNA, 815 bp, Arabidopsis thaliana landsberg
  unsure (1)..(815): unsure at all n locations
tcggttcggataaagattggattttgcggaggttttggccggagattgagagttaaaggaggagaagagaggtttagaaattgacgagaaatgtgaagtggaggtcggaggtattgaagagacacaagctccctggccatgcctgttcttagttaccgggaaaatttcgatgaatttgggtgatgatgagacttcagtggtttgtttaaatccgttcggtttagtaacaancttcaatggtttaattttagggtctattgcaatcggttttcttcggtttggtaacaacaacttcggagaaagtaaaaaaaaaggaagaagtaaaagcccatatttttttaaaaaagtttctttgcatttttcacatattctgattttctaacttgggccaaaatactagtcagttgtcactgttctaatcaatgcagcgttttcacagaactcaaaaggttgctgaaaaaacatcaaagaatcattcattcccctaacttgtttcttaaatctgccgacattatcatatggcaaaagagacaccaaaccatcaagctggtttaagacgatggaggattcacgtctggctctgggttatcgtcatccatttcatcttcaccggtagagtccctgtagattttaagagacatcaattaaattatttatctcctgttaagaagttagacaatgaggatcaattcaagtgttggtagatttgagtaggaggaaggtttttaattacctccccgtagttgccccaccacgacatgagtaacaatgaagaggaaaatcatcatcgtcactgtctattcatagtggcagtc

SEQ ID NO: 47568 - DNA, 625 bp, Arabidopsis thaliana landsberg
taatctgtaaaatttaattcgagcaattgactttagtttttcaggcagggccgactcgttatgggaggggcctaaagcaaaaccaaaaatgaagcccattaacaagtgcatctactaacttaatttggttttaagtttcgaacaagggaccagcctagtcgcggaccaaacaaaattggcgtaaatgattcttatgttgttcatcaggttgatcatcatcaacatggatcagcctagtcgcgggcgacctggaaagttattcaaaatatcaaaatatttgtcgttgtgaaattttcttgtgaatactatcccaagaaaaaaactgtgttatcacatatatagctatataaattttgttgtttccaatttaaatgataaatttggcatctttcatcttccatcatcctcgtcagatctttcaatcatcatataacaaacatcatatgcaataatcaatagttgactgaattttcctatactcatgcgttgacaaacgattggtattcctagagaaatctatacgtacaaacataatgggccgggtatgctaggaattcaaaaataccacaatcaaaaatacatttcaacgtacgttatgatagtcagccaaaatctcaagtcactg

SEQ ID NO: 47569 - DNA, 1063 bp, Arabidopsis thaliana landsberg
gccacttataaaagctatgtcagcattgtaattttcgaaaaaaaagagaggatgatacttgtataaaatgagtttaagttgctaacgtaattgagttgttttttggtaaaatatcttattatttatttataaacgtaaaaataaactacactcggacactctgcgtaaccataaaactaaataagtttttgaatcaaataacttaaagtaaaatgtcaaaaccttgcacttcaagaaattatcttttgtcgtctacaactcacatgtatgtataatatcgaatcgattcgaaccatagcacatcaacgatattactataaacttctaagttagaagctctagttgtgtatatcaaatattaaaaatgtgtgaaaatatgaatcatctgattgtaggaatgttaattgggctataatgattaatgaggtctaaaatgatataaatgtttatgtcaagtgatattaggtcaactaatttaggcgttccaaattagtaagaggaacccggtaaacgtaaaattgaaagaagaaaccgggtattaacatgtatatgggtttaagttcaaatatagcgagacatttaggcccgtttcacaatattgggccgagcccatgaataaatacaaaatagtatttttgattggagaggatcggccctttcttgtcgtcgtttcgaagagactaaaggcgacggagagaatcggagaagaagatgggaacggcggtgggacagtggctagaggaagcgcttgttgacctctgccgcaaaccagagaccggtttgaatttcgatcgtgatgtcatctccggtttagtctcctattgcgatcttgctcagcctgtcgatgccaaggaatatctcggcgtaaatccttccctctttagtcgccaattctcacttaatgcttgtgttattcggattcgatgatttagttttttcatataaaattggttagtgattttgggcaattggataagagattagtgtgttaggtttgaattgatttcaattgagtagtagtgaggtagaattaagctctctgaaccattgaagaagtgatagt

SEQ ID NO: 47570 - DNA, 564 bp, Arabidopsis thaliana landsberg
  unsure (1)..(564): unsure at all n locations
cgtaagagtaatcagtcgtaggtctttttgacttgtatatgaatatattatatgtatgttatcgtataaaaaacaacttaggctattcttccctccaaaaaaaagtggagaaaaacactaaaatgaaaattctcaaagatggacgatacagcgcatctgtcttcgttttgcaacactattttagtattactttttgtttcggaaagagagaatctacggacatatgtaatgaatgaaatgaaataattttatagatcaatgattattattggtgagcatgggctttagataataaaacaatataggtttggtatatcttcgcatatatctttaagtaattttggaattgttaaggaaatttttgatggtttaactaacgtaccaatattatagtagtggcgcattagtaaatggttaactaagaattccacgatttagggtgcttgtagatatgacaaacgataccgtatagtcagaaaatgtattgtatagtcagacatgcatatcagaattagacagctcctgacttttgatactncacacttcataccaaaaaatatatga

SEQ ID NO: 47571 - DNA, 827 bp, Arabidopsis thaliana landsberg
  unsure (1)..(827): unsure at all n locations
ccattataagctaagaacactccaaaatgggttttgtttttattttggagtaatatgatgagtggggaggtacaaatctggttgcatgagaaagagggaattgtctcaccaaacgtaattggacagcgaaggaatgttattgtatgaacggtatctctttgtatgttttgtttccttttttgtctttataacatttagtgcataaatttatgtaagccattagtatttgggatgatatttctttttgtttttgttcggtccacatgttgtagtatacaaaaatgttcgtagagattctagacagctccacgtgaaattgtgagaactcaatgctgtggcccaatgacttattcccatttgttataatcatcacttttaatgttaagtagttgcatctaaacgaaaattgtgagttattgattggctaatggctacggacccattgggtttttgaaaatgatcatctagattggtggtgcctaaaaaattttggttcacaaaatgaaatcgtagcaaaacaaaactcgaagcatatatactgaaagattttaaagtcgaccaaaaatcaacaacactaaaaccggatctgaatttctcagaacccgatcaatctcattacataccggtccaatcaattaaatcacaaacaacaaaacgatgacgttttaagtatttccgagttaaccatgtaagcaaaatcctcttcctcttaaaaaactattacacttaatactntggttntgtaaatgacagattctgattattccttcaaaatataatttgaagtttttaatcttctaaggtnataacacgagacgaagcacaca

SEQ ID NO: 47572 - DNA, 624 bp, Arabidopsis thaliana landsberg
  unsure (1)..(624): unsure at all n locations
cacagatgcaggcaaagtgctaggaatatcatcaatagaaaagaaagcatctttgcaaaccaaggcatagcaacaagcatcagtagcatgagtttcaagaagatcagatttagtagcaagcatgacaggagctttcaatttaatttgttgctgaatttctgtctcattagttggttccttatgggtacttgcagctttatctttatcagcttgtataatttcagcaagagtcaaaggtagcaaggtaatgtttttatctttatgcctaaaagtgtatgtattactcctaccatggtgacatgcatcagtatcatattcccaaggtctacccaacaaaagagaacaagcttccataggtactacatcgcaatccgcataatcagaatacataccaatggagaaatgcactcgtaccatgtgtgttaccttaaccttgtctgaatcattgatccactgaatgtggtatggatgtggtcgtggacgtgtggtcagaccaagcttcttgaccaaatctgaactcaccaaattnnnnnnnnnnnnnnnnnnnataataacacgtgcacgccggatctcgatggcgaagaaagtctggatcaaattatggcgttgctgcttctctgatga

SEQ ID NO: 47573 - DNA, 486 bp, Arabidopsis thaliana landsberg
agtataacacttaatgttagtacaattctactggtatttatattcatgcagttaaaaaagttgtattttgcattttaattccatatagatcaggctacttggagttggagttacaataaaattaagtagtaaatgttactctaatattccatcgtcaaattaagactattaagttgtgttttctaccttttttttttttttgcaatacaaaagtcaatttttgcatggatattattggaagtcaaacaattatatgttcagcatcactcgttgacgcataacacaatgttgattatatattctatgacatcaagtatattttttcctaagaacttagagacatatctttatacgtattcactggcccgcaatttttaagacaccatttgatggtttcagattccgccggtgacttttgacggagttcatctttaccaggcgttgttaaaaagccaaattagtttttctaaatggggccccttaaaa

SEQ ID NO: 47574 - DNA, 657 bp, Arabidopsis thaliana landsberg
aaatcccgttatagatgtggctggcttttgagctaattatgtgactattgctcaagagcttatatatatatatatatatatatatatatacaccacaaaatctagttgaatataaaaatacgtagaggagagcgtattggaaattaggttgtttatcatagtaaaagttggattaagtaattcttacctgaagttttacttttgtagtactaccaactactgttaagcgggtaacttcacatttcaacgaaaactacgaatcagaaaaacaaaaatactaaagattccacatgtttgaaccagtctcactgaagagaagaagaccatcaccacctacaatattctcttattttttaaaatgttttcttgtttatttttcttgctctctggtatgatatggctttctgtctcagtcaaatagatatcgaattgtaacttattttaatattttcgattccattgactttcacaaaatcctctactcttttttatgttagctcctcttttgtccttagaagctataattcaagatcactcataggtctctcttctcttttcttttcttccttattcttgaatggttttattaatattagtaatctcagcagcagcttaatgtcgaccaaactcagtatattttcttcttggcctgatttt

SEQ ID NO: 47575 - DNA, 1066 bp, Arabidopsis thaliana landsberg
tttacaaagtgaattttgcgcctactgggctcatggataggcccatataggcccatctcttagggtccttcttgatttcgaaaaccttattgatctcttaacaacaataacataaaggaagctactactgtattctctagggtttctattctctatttgctttaccttttgtattttgtactttgtataaagtagatataggcaggtaaccttgggtcgaacgaccgtcttgtaatttttgtttgtagctttgtttctttctcaaatgaattggaataagtctgattccatatatttccctcgttcaatcttttgaaaattactaatgaacaaatatagcataaaaattcaaaatcagaacagttcaagttataaagaataaatgagaaatagacaactaaccactttcttccacaccctcatcaatttaatgtttcttttcttttattgttgtcccaaaaccagtttggcttttgaccttaaccttgacttttctccctctttgattgatgttttttttcagcgttaatttattccagtaatttcccttagttttaaacattacaacactaactactaaatgtaagtaaaaaagtaaaggtaaatctttaaattttattccttggctgaaaaagaaagaaagttacgagttacaaaaatgggcccactttgtagattggcccgcccaaaataaatcgatttgaaactcaattttgtatagtcagtctctctcttcttcatgtttggtttcagagaatgaaaggcttaacaagagcttcttcattgactccatcttctgcatctctttagagtttatagatctaataacagcaataaatctagcttcttaagtcttcttggtttttcttctttaattgaatgctgagtatctttcttgtcagctcagtgactattttcgtttgtttgtaatggctgagtcgtcaacgatcgaagcaaggctggttcgatgttccaagtgcaagaatctcttacaagagcctaaagattgccccttttttcagtgtggtggtagtggaaccgctctttgcggttagctaccattttt

SEQ ID NO: 47576 - DNA, 574 bp, Arabidopsis thaliana landsberg
ttctgaagatcggtctttgatttatctctaagctcatgaaccttaattctcgctatacaacaaaatcaaaccaaaacaaaaacaaatccaatcagaatcacgcaattgaagaatcaaaagaaacgaacacgaattagatttaggattataaggatctgttcttcgtcatacccatcgtgagtgttgagaactgatgtgccgcctatttgctattttctggctccaaaccctaattttgttgaagaagaaaatttatacgatgcctttgtgaaatcgatttgagttagaaaaccctcgtgattcttttggcaaatataatgggccgtataatagcccaatagttatttccacaaaacatgggctttttattacagaacatttaattgggtcgtcgtatgccgaaaagagaaaaggtgtgaatagtgaaagctaatacgaataaattcgtcaataaaacccataagcatcagattctgattatgttttgtctgtgagcatgagattcggaactatcattaagggttggcaaaagaattggctttctataatcgctttggtgtttaaacaaatatga

SEQ ID NO: 47577 - DNA, 703 bp, Arabidopsis thaliana landsberg
  unsure (1)..(703): unsure at all n locations
cgagcgactaaattaccagtttttgttaactagtgatatttcggtctatataaattttgaagaaaacccaaaaaaaagcataatttgatgcaaaacatgtatccacttatcattcccattcattaacgtatttattgagattagtttgtcgacttttagtatcagccataagactcactttatgtatattaaagcaggtcaatatagatcataaagtgttaattagtcaaaatttgctttattaaacctaactatcttactctcttttccatttttcccgtttcaagtgtttgctaaaagatcaattttaattttctcgtttaaagtatttgctaaaaggtcatccatcacccataaccataagtcaagccgtgcaaacatagagtattagaaaaaacgttaatttgagttcaatattacacaaagtcgcagttgtaacaaggatttgcacaacaaaagattgaaagattaatggattaatgacaaataatttgaaagatccaaaatatcattaactatatggaatgttaaaaaatcctgcaattttttttttttgccctgttaaaaattcaatactttcaaagaaccaattttaaaattatttgtcagtaaataaaaatagaaactacttgatttattatntttaatagaaaaatgatgttaagtcatcaactcttttattntttcgcaacttctcaacata

SEQ ID NO: 47578 - DNA, 937 bp, Arabidopsis thaliana landsberg
aacaaattgtgactctctttaacaccgttttaatgtcttggtagaattcgctgatgctaacttgctaacttaggttttagaaaaaaagttcttataaaaagaagtttaagttgtcaaacattaaatctaccatgcacgatccgtgatttgatatgaaagaattgatgaaaatgatttgatattgttcataaacatgttaatatctttaatatcatgaaaaaatattgttcataattacatgccacaaagatttacctattgttttgagttctattttagccaattcaatcggtgttcctatattttaaccaaaatacaaaaaattcgtatttatgtcattatattcttttcatgaaacatattttttcatatccaaccccacttatgaataatcagtatctaacacgacatctagaattatgagtttctatacatttttataattaaaaattcagattttttggtatagtgagaattgtagtgcacggttaaatcaacaactagactaaagacgactccatatcattaacattcattcattacaatactgtttctgccatccattttctcttcaccatcatcactccttcaaatattcattttaactatagtttgttttcatgctataatgattctatatttctatcaaacaatagttacataatttatttgcttaagaaaataatatatatttaaatctataatattcacgactaatagacgttaattgcaagtggtgtaagatctgtatatgatatatattttctttcacgatcacaaactgtacatgatgtttctttctcaaacatctatacaacaaaagcttcattattattgccagagaataattatgctttaatatgtgattttgttttaggattttttttttttttaaatatatcttgaaaaatgattctaaagcttttttttttttttg

SEQ ID NO: 47579 - DNA, 514 bp, Arabidopsis thaliana landsberg
aagtggtgctcgggtaccggattacttgctaaatccttcttgttacacccgttacagctttgatccagggggtgaattggatgtggagtgggcaacatgagagtacatggacactcccaatgctggtgaaggattgaaaaatccagagtcagaatcatttccaaaggctactttattcctcagaataagaccaaggacgtaagtgaagacagtagtaactgtaatgagactaaccctatcgtagctggagagttggcagaagaagagagaccaagtgcaacagaagatggggatactgcaatacgagaatcagagagctgcaccagtttccaaagcaaaggtcgtcaatatcgtgccaagcttagtttagatgaaacagatgtctgatctttcaataccatgatggttggaaaacgctacacagagatgaagttggggtccatgagatacagtcatgtagcaatctttagcctgacatgtaagatatttttaattcctagacttcttttttacc

SEQ ID NO: 47580 - DNA, 1075 bp, Arabidopsis thaliana landsberg
aaccagaaaatgattatgtgcaatgattccgctattcagctgttattttgacacaccgactatatatattattgaacatttttaacaaaataaaaaaactaaaaaaaaagaatatcaataaatttaaaataaataaaagtttgtcaacgttagttatagtgtgaactgtagatttcgttttaagtatattctaccagccatggccagtgaacggtatcatgaaatgtgtgtaaagcagttgaccgaaatatactctgattgatatagtataactacttcgtgaattacgtgtttcatttaatatagttattggtttgtgactttgtgtgtttatatggagttacatggatttaaaattaatgaagattctattgttattctaataagtttttgaaagctttataagatttagtgttattagtttacatattagtaaaaaacaatctaaacattttacaagtttacctttattggattaattaatgattttataaaaccaatgatgttattacaataaaatactttttttatcctattaaaatattgtgttattggtttattgattctatattttattcttcacaaaatatgattatcaaagtatgagactatcatataagattctcaaaaaacatttctttcatagaacataaaagtaatatttttaagttgggatcatgtttcaatacgcaaactagtgatatgattaatgatttgctagtcattttctctaaaaaaatattaaattaatgacatcttaacatataaattttcaaagttcacttaagttagacccaattttacgtagtaaatgaaaagttagagatttaatttgcaacgcaaaatatgaaaaaataaatggtcattttcctctttttattcttatataaaatatttggcatcaaacaaaagattagtaaatagttaatataataaaaatcgtatgcaattttaaaatgactctacaaaagtatttttatattttagttataacatctaacaatttagaataatatgcaaaaacgttttgacaatttttacgaaaaaactctttcttaagggctttgaattgatt

SEQ ID NO: 47581 - DNA, 1226 bp, Arabidopsis thaliana landsberg
agaaacctgtaatctcctggtaaaataggtataattttcctaactggccatgttatactgtcttctttggcgtcacgaatagtttcctgtcaaaggcgttaaagaaagattgttaatcaataataggtaacattatgctgtcaaaacatacgatcaaatttggtttttggcatacttcgattgcatctgaaatccctggaattgatgttaattcaccacctataactttgagggtaaaatcaagccctttctgctcacagaaaacaagagaagattactaaaacgtgatagtaagatattataacaagcaatatatatcatcactaagttaccttctcgcggagtgaataagaaagtgccccaaagcaagggaattcatcaacaagaggtttgaaaatcagcctgaaaacacctgtgaatcctatgtttttgacctacagacacaacacagtaagctcaagaacaaaaaatggataacaaagtttataaaaaatagcattactagtggagtacctcaataggtagagacacgccaagtaaggttttgacatccaacacgatttttggattaccatcccattgcatttcaagttccattgtgattccattaggtccactttcactttctaagatagaaactcctgaaaatgagtgagcataacgacttttaatgtctcattgatcaaataggtgagcataacgactgttataatttgaaaactcggcaatataataaacgtttttctgactacacattacttttctctaaaccgtatgattcaagcaaaacagctacataaacaagattgctaaaataaaacatcttcaattaagcacccatttgcatcaatgtttaagatacaagttctctggattgaccgagttacggataacttcataaatatatcaacactattagattatttataagaaccaacaaaaccaaacctgtgaactgaggagccacagtcccaagtgtgaatttagagaacttgagagatgctaacatagctggtgtatactgttcaagtactggttccacactgcttttaatcagctcagaagctgcctacaagattaaccaacagaaaaacgaagttggtgaagatatatcaacacatccaaaaaggtaaaaaaaaaaaaaaagtaccattgcgtgttaattaaagttacctcatttacataaggccagatctttcaagttcaagattaagccaatttaactg

SEQ ID NO: 47582 - DNA, 614 bp, Arabidopsis thaliana landsberg
  unsure (1)..(614): unsure at all n locations
gtgcttgaactccccatttgctagcttacatagctcgttgtagttctgtgtatctgcaaccaaaaataacaaccaaaacatcaaaacacaactcaatagcaaatctgataaactcgacacagtaatggaatcactaaattaccaaaagtgttgccaaaattggtccaagtttcagctcgaatagcgttatcactctctgcaattccaataacctcaaggtaagtagtaagaggagaaggaggagacgatcctctaacaacgatctgaagatcatcagtagatttgccaaccacagatccaatctctgaaccagtcacttgaatcacagttctgactttttggccaatgaatctcctcaacaaagctccgttcacaaaagctgaaggacttgaagtatccattgctatctactgttcaaagattcaaaagcgaattggtaaatcagtttcgtattcaatagcaaagataaagggattagaaattttgaaaaccaggaaatcgattttgagacattcaatcgaagggaagagaatngattaagatgatttaccttgctggagaagatgaatcgttcgtcggagttgcaaatgattagccctaacttctgaggactt

SEQ ID NO: 47583 - DNA, 2055 bp, Arabidopsis thaliana landsberg
actcctacttttctattttacagaaagtttaagtattactatatttttcatgtgttgtttcagattcttttcatattcacgctttacaacacttcgaaccatttggatcaactaaaggtttgtttcaaagcttttgtctttacttctcagacttctatttgtcttaaactcttaataatcagttatgtttctgactttcaacagttgggagcaagtagtcctgaagaagctgccaaatggatccgatcattgcaggatgcttcacaaaaggttttttttaacagttttaacattttctttacaatgaaagattttagagacttttcttcatgggactcatgttttcattaggggtttccgattccggattgcgaattttttgtatctcatgctgagaagggacttgtgaagcttgatgtatcaaagaggaaccgtcgcaaaaactctgtggactggacaaattattcatcgacaaattactcatcaacatcattgaatgtcgaaacaaacgtagcgcctgatgtcattgcaccttctccatggaaaatcttcggatgccaaaatggtaagaaaatacaaatttccttgcgattcaagaaaccgatggccttatcgagcttttgaatttcaggtttacgccttttcaaagaagctaaagattgggattcccgcggaagggtaatgcttatttggtcatattattgaaatatatgtgaatcataattggtttttaacttattttcttttgctgaaacctcttgcagcattgggatgatcacccagcaatcatggcagttggggtcattgatggtacttcagaggatattttcaacacgttaatgtctctcggtcccttacgatcagagtaagctctatgacttttgataacttgtcctattaggtcgagtctcacttactttgtttaaaagttaggcaatataggtctacatattatgacttctattattaagagattgaaaaattgctggatttcttgcagatgggacttctgtttctacaaaggaaacgtggtggagcatcttgatggacacacagatataatccatcttcagttatacagtgattggttgccatggggcatgaatcgaagagacttattgttgcgacgctactggagaagggaagatgatggaacatatggtatgaatcattcttgataatgttcttgatttgttgagttttcgggtttataaccttcttaaccttaaaatgtcacaggcatactttgtcactctgtatatcacaagaactgcccaccaaagaagggatacgtgcgcgcttgtgtcaaaagtaaagtttcttacctcactctaatttggtttttaccatatgaaaagttagaagggatactaatctagggacatcggaatgtaggtggtggttacgtggtgactccggcgaacaacgggaaacaatcactagtaaagcatatggtagccattgattggagaagctggaacttatacatgagaccatcttctgcaagatccataaccatccgtgtggttgagagggttgcggctttacgcgaaatgttcaaagcgaaacaaggacacggcttcactgagtttgtttcaggggagtttttggacaccaaaccctgcttgtccaagatcaacactatgccccttaaaacagaggccaaagaggttgatctagagactatgcatgctgaggaaatggataaacctacttcagcacgcaatagtttgatggacttaaatgatgcttctgatgaattttttgacgttcctgagcccaacgaatccactgagtttgatagctttattgatagctctccatattctcaaggacatcaggtaattttgtgtttaaccactttgcttgtggatcaaactaatttgaaaggtatgtgtgctttcagctcaagattccaacaccagctggtattgtcaagaaacttcaagatctagccattaataagaaaggctatatggatttacacgaggtgggtttggaggaaaataacactttcttgtatggagccactctttaaaaagatccaagtctcac

SEQ ID NO: 47584 - DNA, 1718 bp, Arabidopsis thaliana landsberg
  unsure (1)..(1718): unsure at all n locations
tctgaacaaagccgctgagattttatcggatctggtgaacagcggtgatgatccgtcgacgagttcggtggcgagtggttcttcgggtcaggaaacagcgtctacctctgagtatggggcagggtcaagttctagctgtagcgaagatttgactagagatagatggtttaagggaagcaagcagagtagagttattgctgctacagggatggtttcttctgtgattgcgaaggannnnnnnnnnnnnnnnnnnnnnnnnnaagagtttcctatgatggaacggtctaaagagctctgtgggaacgggaaaaaagctgcggatagagagaaagctgaacagttcttaagttcaatgcttggagatgattgcgagcttagcatggctgttgttagagatgttttgtgtgagtatttcttcttcttagtcagttaatttttccatgggagaagatgttagtagaaaagtatgatccttaatagttataggattacgttttaatgtgtccgcgatattcgaaatatagccgtaataatgttatgaggagagactagattgttcgatgaattgacatggaagtatctattttttgtaggtcaatgtggctatgatgtcgacatggtaagcagagattgtcttcaaacttacatggggaagtatttagtatattgacagggaagctcctgaaatatgctgatacttgcccgactatttattttaaagcttaatagcgttttcttcttaggctttgaatgtcttgcttgacatgtcttcttcatcaactgatgattcattgagtggtaaatgtttcggcataggagtcagcgatagtgtaagtgattgttttttttgttaatcttcatagatctgtttattttgttttcttacacgataaaataaagtgcaatctcctgacattatttaacagctggcagagtcatcttttgatactgatacttctgattgtgaacttttctggggtggagactatagtcaaaggtacttctatttgcttcttaggctttcatcttgttattgcaattcactgattttggaattatcagagttgatttacacgttagttacaagataacgagctctctgcaacctctccttatcttttaattagtccttatcctcttctatgaaagaacaacaaacgaactatttcatggtggaggattcagttcatgaacacatgatatctaaattactcatgagaccgccaaaacttacattatgatttcttaatttcaacattgtggacgaggtcaaaactaaatatctggcctttttttcttttctttgtctgaatggtagggactacgcaaaagctctcatgagttctcaagatccttttgcaactacccaaggaattgatgagcttggtcttccacaaaaagtgttggagtctctgttcaacattcgccagaatcctaaacatgaatccaagacaacgagttggaggaatgtggcaaagaaaatgcagtcacttggcattgatgcttcttcatctagtggggaagagcctcaccctaatacgtttggtactttactatggtttcttgattttagtatttgcgtatatagctgcaaatagcatgctcaatttgccatgagtttgccggcttcgagcttctgatgtatgtctgtttacctgatgaaacacttggcaaattttgctttggtgtcattggcataaacatctgaagttttgact

SEQ ID NO: 47585 - DNA, 269 bp, Arabidopsis thaliana landsberg
gaaatctcgcgacacacggagcaaaaaatgagcaataccaagagcaggagcagacacgggacggaacccaggcgatgcccggacaccgaaaaagagcacataaaccaagacacagaaaaaggagagcgggcaaagcactaacgaaggaaaagaagcacaaacagaatcgaagaagcaagaagaactaaagggaaccacgaccaacacaagacaaaaacacaggcctttacaggaaggaaaagaaggagaggccaaaaaaaaaccaaaaa

SEQ ID NO: 47586 - DNA, 794 bp, Arabidopsis thaliana landsberg
tctcttgtttcttcttccatgtcaaaccagctaatgcactactgagtccagatactgcagattcagtttcacgccgatgaagcttctttactgtgctccacgtttcatcgttggctccatccaacaaagcttccaccggttctgataaagcttcatgaacttttgactgcaaattagaggctaaaaatcagtaactaagctcaatttcgcaagctttctttattctttctgttacctcgtatagactggtaagttcagataacttggaagtccgcacagaggaaatgtgagcctcaatgtcacgtactagcttgtcccgtacttttgatgtgtcccaattggcttgttcaatgatggcacctgcacactcttcatcgaattgggtcatgcaagccttgaaccaatcttgggaagctgaagaaaacccttcaccaatgcctaaagccttatcaaaagaagccttaaacttttcaagtattccccatcttatatgtcccaatacatcttgaaacgctggattcacaagctgtaaggtaatattatagtaaggaaggcatagtatcaatctccattcatttatcttcattgacacgtctgcatataattttaacaacatgattaaaagatcttattatatattacttggagaagcttttcttcaagctgctgtctcttcgaagatctgacaccttcatcgaagaatgtagcctccccgtcatatctaataaaatagaggaactatgaagatcaaatccacaaggaagatctaagaaaaaaaaatcttaatgatatta

SEQ ID NO: 47587 - DNA, 444 bp, Arabidopsis thaliana landsberg
  unsure (1)..(444): unsure at all n locations
tacatgaaacgtttactttgaagttttgtctcaatcgtattgagaattgtaacattaaccagtactttcactataccagaaatttttagtgaatnnnnnnnnnnnnnnnnnnnnnnnnnnnattcagtgcgttttcgtgcgagatgcaccctcgtcatggatgacgacatccaaaaaatgtcaagtgtaatagcaaatggagactatagcaataatcgaaagaaactttgtcagatagatctcataacaggtcgaaattgaatgagtcttggtttacatagaaaagttgatattgcaaggagaattaggtgaaaacaagatgttggaaaaccaggttcgaataaccattaaaagattaactagatacgaacgataccatttttaacgcaacccagtctcgatacttcaatagcatgccgactcgatagatggatagacgttctg

SEQ ID NO: 47588 - DNA, 450 bp, Arabidopsis thaliana landsberg
  unsure (1)..(450): unsure at all n locations
cccccccccccccctcccccccccccccccccccccccccccccccccccccccccccccccccccccccccccccccccccctccccccacnccccctccctccccccccccccccccccccttttccccagttccngnnncncggcgggccccccccccccacccantcccccccccccccccccccccccccccctccccccctcctctcccncccccccccccccccccccccccccccccccgtctcccccccccccccccccccccccccccccccccccccccccccccccccgcccccccccccccccccccccccccccccccccccccccccccgccccccccccccccccctcatcccccccccccccccccctcccccccctccccccccccccccccccccccccccccccccccccccccccccccccctcccccc

SEQ ID NO: 47589 - DNA, 517 bp, Arabidopsis thaliana landsberg
  unsure (1)..(517): unsure at all n locations
ccccccccccccnccccccaccncnccccccccccccccccccccccccccnccccccccccccccccccccccccccccccccncctccccccctccttcctcctctccccccccccccccccccccctcctcccccccatttgttttttacccacnnccnnccgcgcgcgcgccccccccccccaccccccaccncaccccacccacacaccccccccccccccccccccccctnccccccctncccccccnncncccccccccccccccccccctccctcccccccctcccccttttcccccccccccccccccctcccccccccccccccccccccccccccccctcccccccccccccctccccccccccccccccccccccccccccccccccccccccccccatctcccccccctttttcttctcccccctccctccccctccccccccccccccccccccccccccccccccccncaccccccccccccctcccccccccccccccccc

SEQ ID NO: 47590 - DNA, 579 bp, Arabidopsis thaliana landsberg
gcttgtagcttttgtactttcttttgtaaaagtaaggatgatcagttgataaaaaaatcttatactagaaagttatttggttatttccctaatgtaaccaacttaaatatcctattagtttacaagttaagtgtttatacttctacttcattcgtacattggcgttcacataagattttccgtattttgtacagaaaagaacaacttaatcaaattaaagtgataactagtgcattttcagctgtgaaaactaactcttggtttctatatctaattctggattctccaaaaaaaaggtcaatcctaacttttagtgtagtggaaaatacagactaccaatatctaatttatactgtatcatttagtttggcatctttctaataatgatgtatactcgaacatttataaatctatggtatagttttacatatgtgatggaatctacaatgatttgaggagagtacgatataatcgtcgcatgcatacggtcggcaattttagcaggctaagtcacaaatatggtcaacgagataaccagctgttacagcttgatctacgtacaccgcttgtagattttac

SEQ ID NO: 47591 - DNA, 607 bp, Arabidopsis thaliana landsberg
gccaccatggagaaaaaaataaagcagggcgagactttgttgacaccaccactgaccgcactcccccgtcgacgggccacgacggcgactcttccccgtgatcgcgaggggtgttgaggcgggcgggagagaggcaggggttaccgaccgagcggacgcacggagcacccgttgcggcgagcgggaaaggcgccgcctttccgcgcccgcagccgcagccgcacgcgtgcgcggggacgtatcacgaaaccgccagaatcaccggcggcgaacgagaccggaacttgggcaagaacgacggcgcggcacgcaagggctcggaaaccgccctgccgcgacgccgcaactgaaagccaaaaggacgagggaatgcgccgaaactggctggagaaacggcagcaggtgggggggtgggaggtcgatcggggcctcgggggaaggggagagagtggccgagcgggggcgagctcgcagtcgcaggtggggtgggaaaatcgacgcggggggcttaaaaggcgactcggcaaggcaaggcgcgcgagcctgttttgtaagcgagattacgggggcgtagaccgaatccttccagcttttagttcagattctg

SEQ ID NO: 47592 - DNA, 618 bp, Arabidopsis thaliana landsberg
  unsure (1)..(618): unsure at all n locations
tacaagtatgacttagtaggtccaagtttattgatttttgttactggtacctccaagttttgttgaacattgttgcttcttgcaagacgtattgtgatctatgaattggaactcatgtctgctataattttggtcattggatgtgtaaattttgtgaaatatgttatgtgaacatctgtacgcttgaatgagattgctcaatgggctatagattttgataatataaaatagtattcatggaaaattacaaattagatttaatgaggccacaaatttggccgaccactagcatgggccattttataaattatgacaacaaaatttgtcattgaaaagtgctatgtcatattaataaacgttataaccatttgtcacatcagctccacatcataggtatgcatgattttatgacaatctggtccatatggcaaggcttaagctgattattagtgacatttttctttggagtaatgacaatatttaacgtcataaaatctatgacgaagtagaatcgtcacaattttaatgacagaaaacttcaattcggtcatagacatgtttagccacgcacatagatgacgaccnaaaaatgcacacaagcgtcatagattcaactat

SEQ ID NO: 47593 - DNA, 422 bp, Arabidopsis thaliana landsberg
agactcgaactacatcgccattcgattaaggagcttacttacgggccttcgggagattgccaatcctaaagataaatataagttcctaaagtgggcatgtgataaagtatgagaccatatgaacatatatgaggtaaaatttgggcggccatcaccaattagtgttcaaattttcaaatgctcgagagatacgtcagtacctttcggaacaagctctcgtgttggggcagtaggtgctttagggctttgaaaagtggagtcatgggtgctaatgaatttgatatttcatccgccttaagaccaagaatgtatataccatcatatcattgtgagaaagaattgagccactatgcagcattatcaacgacttttcggaagttgagatataaatccatcaatgaaacttattccggtttgtattc

SEQ ID NO: 47594 - DNA, 765 bp, Arabidopsis thaliana landsberg
tttggccgagagaagaaccattgatcgtcgatcatggttggaccagtaagacctcaaatcgtacttttcggttcttcaattgttcaatatagcttcactgatcgtggttggggtgccactctcgctgacctctactctcgcacggtttgtgacatcttctcttccaattccaatttcgacttgtagttatccttaggattttctgattttgactgattagtttagtgaataatctacaataaacccactaaacctgtaatgcaaatctgtactttactgttttcgcaaatggacaactgtttcactgtcaacaatatctaatgattgatgagtatataaatttcgtgtcttttactctgatccataactgttacacttaaaaattacttcttttttttgtgtgtgtgtttgatatgcttattcacaggctgatatcattcttcgtggatatgctggttggaattctaggtttgccttgaaggttcttcaccaagtattcccaaaggttctctctttttgcaaaaagattatgtaatatagtgaaaggaattagctttacttgacctctttctttttggttatgtactgttaggatgctgtgatacaaccttctttggtgatagtctatttcggtgggaatgattcaactcatcctcatccttcaggtcatggccctcatgttcctttatctgaattcatcgaaaacatgaggaagattggtgaacatctttggtaaaagttgtgactctctctcttgcttcttcc

SEQ ID NO: 47595 - DNA, 515 bp, Arabidopsis thaliana landsberg
atgtttacattacttccccctctctttttagtttattttattcctccattaattttaaaatatccaaattaaaatgacaagagtttcactttcaattatctaatttatcaaaccatttttttgttatcataatggtatctaattcaattactccatatgaaccggtagagacaataactcccctggagattttccttcatgtatatatatagtgatgatcatcacgttactctttaagtctatctgctcatttcctcacacgatcaaaaagatagttcaaatttttctttaaagcttaagaaaccactcagtggaaaccaagactaattaaggctaatggtttctcgacaagaaggaaccctctactctagaaagagggatttcacagtctgtggagaagagtttcacaattcattcaagaagagcaaacaagaagatcaatcacagagcactctgttcaatgaacgaccaaaatcggagagtatgagatcaattacctttgattttgaacttca

SEQ ID NO: 47596 - DNA, 672 bp, Arabidopsis thaliana landsberg
cgatgaaatgcgtgagagaggaaaaatgcaaccaacgatcgtgatttacaattagccttattggatttttatgccgagacgataatctctgtcaatcagcgacctttttcatggtaagatcagatcattacttattatgcattctcgtttagtttatattagcagatagatggaaaagctttaagctttgggttatttaacattacagcttagcaattttgaggaactaatattcaaatattgtggagaagttatgattttttctcttcttttatatgattcttctccaaaaccaaaccactagataatgtgaaaaaagtgaccacctgctccatttcatcaactccatcttcttgtattaactatctcatttcatgtatgtatatatactctttgagaatttgattctatcatcacaatcatttacttcaaacaacaatctttgcttctctctgagtgatcatctttcttgttcaatggctggtcaaaagatactttctttactggttatagctcttgttgttacttttgcagctgcggctcggcttcttgatgaagaaaatgcattctcagctaccacaaccacccttggctcaggttcaggttccacggaattggttttggtgcaggaacagggtcaagtgggtcaggttcgacgggattcggttttgg

SEQ ID NO: 47597 - DNA, 641 bp, Arabidopsis thaliana landsberg
  unsure (1)..(641): unsure at all n locations
gttatacagaatagtggttaagacgtgtcattcttacatatttctttgttacgaacaatgcattacaccatttctctaccaaaatctattaactagaacatgcaaacgatgaaaatgtggaatcatctgagacaacctaatcggacattactcacaatcattgcagtagctatggccacaatccatctcggaggcagccgagggtggcacatcatcataacaaacattgcaggtcacctccgccgaggaggttgggccggcattcctggtgtactgaagaggaataccagcctccgagaagagcctatccctgtccttctgatcaagaagctcgaaaatcctctccacgtcccagcggtagtggatgaggagcgtccgggcatggtgctccctcaaccctagcagctccatcaccttcctaagatcctctctctacaaacccacaaacgccccaacaaccaaatggagttgagaaaaaaaatgaaactaagcatcagtgtatcaggaatagcgtatagtgtggaaccgaatgggggagagccccgcagtcacctgcgccacaaaagggatccttggtgatacctgcacnaacacaagcaaggaatgcacaagaaacctagagtggtctacacggagcagat

SEQ ID NO: 47598 - DNA, 984 bp, Arabidopsis thaliana landsberg
  unsure (1)..(984): unsure at all n locations
tcccataagataaagaaaatgtcagagataattgaactagcaacttaagaatatcatacagctatttttacatacaaaaatgaggaatttgagagtctgaaatgaaaaacgatgaaaacacagttatgacactcgttagcacgaccttttcaagggcgattaatgcagttaatcccgaggtaagcatggcaacaacttctggatctggtcttggaacaggaagcacatgcttagaagatacctaaatccaaaacagacaggttcacatgatcactgaagtcttgaaaaatgtcaacttgttgctcatatggtttagtagttctcatactatnnnnnnnnnnnnnnnnnnnnnnaacgtcataacagcagctggagtcccaacttccaaattcttaacagnnnnnnnnnnnnnnnnnnttagtccaactccctggaaaatattgaagcgatttagaattgaacaaaagctgttgaagttgaaatagaacaaaatatacctcaaatccagcatcaaagggaagcttcggggagccaccagtaaagtaacgacctgagctgaagtttacctgttcatggtacaaaataaggatcaattaaaaagtacatttcacaacaagggtgtattacctaataactgataatgatagggaatctaaaaacagttaaatgtacaacgataagcgagacaacaaaacgagacaacaaaacgttttgcacacaatagacgataatatgatcttacatcacttgcgttaacaccagcatagatgattttcaggagaacttggtgtggtccaatgggtaattgtagtggtgcacggactatgcgggtagcactgcggaatttatgagacaaggtgtgtacaatcctgaaagagagaataagccagcagtatgtaaagtttaagaggagacagaaatacaaaattcaaatgcctataaaaattgtcacacatagtcccatataaacttacattttctcga

SEQ ID NO: 47599 - DNA, 572 bp, Arabidopsis thaliana landsberg
gcgaaggggtatctagtggtttctgaccatccgatctaaaatcgagcaccgagattagatctggccgcctgcgaacggtacatagcgccaaccgtctgtttcgagatctacggttcggatttaaagactcttcgaccgatctggttcgtccgattgtgatcgaagggacccgaatcagccctagtcgcatcatatgctcgacgcgatcatggccgtcgcagatggttcggatggcaggcgttcatcttctcccccctccgagctatcccgtggcgacacagtaccctgagggcggcggacgcactcatcataacacgaatccccttctccgatgctccgaatctcgatctaactaccactacacgatgcggggaaagaaacgagtcgttgggagagggtagtaccactagattcgctcagagttctccgctcgtggcgacggtgatgcagcggtggaggagttgacgacggcgagaaatcccattcgcccagtcgccaatctgcacggagatgcctaaactgcttcggcaagccaagggaagctcacgataagacccatgcccaggtggacg

SEQ ID NO: 47600 - DNA, 746 bp, Arabidopsis thaliana landsberg
aaaccgggacgtggcgttcacgacctacctagtcgcaacccccacgctcgctactacctactttacccgcgttcgaagttcggacgttcgcatcgcgaacctcgaggatcatccggcccggcggtttctcgtttcgactccggtattccccagataactgtacgcgagcttgatgcatgtctcgaaaccaagaaacgccattgtgctgcaaggccggccggctggcccggtagttgtactagtgcgggtatttctcgaatattgatcgtgtgaccactcggttcctagttggaaaaatatcgtagctagtcgacagcgcaagcatgacgtacattgcaacagtagtattctgtaattgacttcgcgacgccatctcgggaaaaaaaaacggctctttcgggtagctacctagttatgttcactctaaccaccgtggctagcccaattcgagtgtgaatagcaaaccggcaccctgtcatgtctggacccgggaatccaagattcttctatgatctcttactgggtttcgggatcggaacagagaagaacaaattgttctaagctacaagatcctacactagtctcaccagattgaggttgaatatgtcttctatacgcggacagcagaacctatgtcgccctgaccctttgggggctaccttacgatacgacagatactgttttgttcggacaacgatatgaagcctggctgagcatcagtgctgtgacagtccagaaaagcaata

SEQ ID NO: 47601 - DNA, 666 bp, Arabidopsis thaliana landsberg
  unsure (1)..(666): unsure at all n locations
gtcctttcttcatttccagacagacaaatagtttgactttgtgtttttaatttcccttttttctagggttgttaatatcatcatgtctttgttcttgaatttgagcatatgctttctttttttaaggaatatacaacagtttctatcatgatttcaaatatttcttatacaaacgtatgtgtatattttcgtatgttgtagacttgtagtccttttttcgaccatattttagactactttttttctttagtgtttccaaaacactttgttactcattttttctataatcttaccacattatacatgttgtgtgttatgcatcttttttattgaaaaaagttgtgttgaagcttagtttgctctctgccatagaactagagtaaatagtgtgtgtctctctaccatagaactagagtaaatggttccaattggtaacagtgtataatactataattatataatatttaaaagtaaaattaaatctcaaaataaagtataatctttatattaaatagnatgtatagtaaattctatttatgggatctggataaatttgaggtacaaaattactaatatacatacgtatactccaataaaccaaataatacttttatcttaatgaatttcccagagatgttcttatttgcataaacaaaaaggtattag

SEQ ID NO: 47602 - DNA, 326 bp, Arabidopsis thaliana landsberg
tatctagtctacatgcataattaggagaacatgacgctgttcttagatatgtcacgtgccaacctgcctaaccaacaaaacttacctccgagccttgccgctctgacatgtaatagcccctccaagaccgcttatgaggggatggatgaggtgcagtcgcctatatcaaatcttaaatgatatggctacaaacaaaaaaactctcataacagtagtctcctgactaataaacaccccattcattaatatcaaatgaactgcgttctaatgtaaccataaaacactccattgagaataactgaacattcaataggcgacacttctgc

SEQ ID NO: 47603 - DNA, 1252 bp, Arabidopsis thaliana landsberg
tcgtcattgtcaacacatcttctcaccttacaatggagagcatccagtcagtaaggaaaccatggctctcttcgctactgcttaacatatgactcttcttcaaaggtaaatcgcagcttatcaaaacatctacttctctatcatcaactcgatcatacgctccaaaattatcgccatcgtagtcatagttccaacagtttttttggcaggatggtttcttagcttaatgagcataagagacctatcacctatgtaagatggacataatttgcttcggctactacacacaagttaggcccaattacgtttttgggtcaactagtcaaatagcccaaacaacatgatcaaaaaagttgggtcaatggtacaatgttacgttgaatttccatatatataataaaatactatctgaaaatacacgaaaactattattcatttgacgaaaatacccttttgacaccccaaaagcctctgctattttaatcacacttctctaaacagctatggagtgctcaaaagaaattgtgatacgcgaaagaaagaaaaaaattactttcaactaaaagaagcacacagcacaaaagaggtagtctcgttgtgatgtcagtataaagccagttgacgcaattccatctcccgatcgaacctgtacaaaccatggcaacaacgagctccgaccggttaatcgccggtttaacggcgtcgatcggctcaatcgaatctcgttacgcaaatccagctcaatccgtttctctaatctgtcgaaatcaaatcaatggcgcaccgcctatcgtcttgcggtcctctcgaaggtccaggctgtggttaatcgaggcgattcctccggcaaagtcctggaacggatctaacgatggcgacgaagatatcaagaagtcagacactcgtaattacgcgatcggtggaaccggtggtcacgcggtcgccggaaaagatgacagaacgatggagatagtaatagcagcggcgaccacggcggcgctgggtgtcgggaatcgcgtactgtataagctggctcttattcctctcaagcaatatccctttttcctcgcgcaactttccacattcgggtaacaaatctctctcttcctcactctctttgtagaaatggctaatattagatttcagttttggttttgagaatttgatttccatttgtggtctcttttgatgatctagcattcattgtgttcaaattgtggaccgtaccgttggaaaatggaatcccaggttt

SEQ ID NO: 47604 - DNA, 618 bp, Arabidopsis thaliana landsberg
gtttattggacaaatgctttatgaattaatttagtctttatcatgcacgattatctaaagtaatgtgctccaagtgggaggaggctcacaaatcagagtggacagttgctgcctggtgccatgcttaagttcgatacagttggtggagtagccgtagcaactttgaagattgatggagaatcgttaccggcaccaacctagagcagcggaagtaccagcagggacaatgtagttggttgtaccagattaccaaccagcggcatctttgaatggttacctggtgtgcgtgatcgggaatgggacaaggaaagcgccttttggaggccacatgcagcagcaagcaatgcagagctcggggcagccggccagcagagaaaagtgtcctgacagcccagaaaggaaggaaggctgataggctcggttttgacctttgacagagaagaaagatgcctggtctcgtctagttgcctgctgtgttcttttccgccaaaagatctccaactgccaaaacaaaacggcagaaagagcaaatttataaacaagggggcaaacaaaagctttgcttgtgttctgcagagggctggggctcttattgtctcggatgaatgtcggagcaaa

SEQ ID NO: 47605 - DNA, 638 bp, Arabidopsis thaliana landsberg
ctcgccttggaaggatcctaaaaatcaaagtactaaagtagtgaatttgggactgaacctctcctcgattttcaaatcctagtggctagtactaaaatcatgttgtatagactgaagttctgttctttagtctacaattttttccaatatgtatcatcgactttctatggtcacacatctttggattaataagtcgaaaggattgctttaagtagataagtatctttagagaaatagtttgacattctttggccttggaaagtcaggggaatcaaaaccaactgtcataggcatataagtccttatttccttgagagtttcattctttcttataccggtttttgctcatgatgagtttgttttttgcagagataagaacgtttgaggtgcttctcagaacatatgaagtgaaggaagtgaaaatggataccagtagcatggttggtgagagccacgaggaggacaatgaaggaatgaggccttgcaagagaaagcaccgttcaaacgaaaacgacactgtttcacaggacaactcttctaatgcttcttcagtcgtcatggctcggccttgtagtgaagcaagaggtcacaccggttacttaacgtttgcaagactccaatgtctagcttactgagag

SEQ ID NO: 47606 - DNA, 1271 bp, Arabidopsis thaliana landsberg
gtctattcttttaaaaaatactaatttgttgttactaccttaaacgtgtttgaaaagcctgtagtgatcgggtttgatcaatgattacatcatggacttctacagattattcacgttgttccattatttatcttttcaacccagggaaagtttgggttaatggtttataatcttttattttattttaattttagtgcagaatcaacatttgataatagtagtgatggatcaatgaacctgaaattgtaggattaaatcaataattttaacagttgaaggttgaaaccatgtttttttgtttctgctggaatttcataaatgtagtatataattatctttgcgttatttttttttggttgttgtatataattaacttcgactatttactttattatctattgcaattcatatatactcacatcaccgtatgtggggacttcattacgtaagattattctaattcactaacacttattttttggtcaacagtaagcaatctcacgatcaatgagtgcctccttcagcgttgtcatctgatttgtatattacgcgatgcccataaactatatgataaaaaaacatacatttagttagttaaatatgcacatcaccgtttaattatttgcgaggaagcagacaaaattatcccgacttatgctgactcactccacatactcgacacaattctttaagtccatataaaaattacttcaacgtgtatatatgtattgatttttatttaatatatatgaaaatggttcataataagaaccagatatcgaagagatttcaccatcaaggtatcgtcagaccaaacatatgatataagcattatttagttttatactagtatttcttgcacttgaacctggacacaaaatcaatttacttggcacacattaaaagatacaaataaatgaataattaataattgtaacaataaatgttgagaaataagtaaatagcgaaagcaaggaatggatcggagaatatgcagaaacctaaccatgcatgttccctgtgtccccatgggatactttaattgatgcgggctcttctttttggaccttggatgtgtggtccttgatcaactaatctcctactattaaaacaaataaagaaacccatttagagaaaatgttgtcggaactcggaagagatcgttcttaccataccgagttaccatcaataatcttaagataaagaattgattttatgactgaggcgcaaagaattgaaaaatctatggccggagtccatttttttcttta

SEQ ID NO: 47607 - DNA, 1133 bp, Arabidopsis thaliana landsberg
ttaaaaggaaataaaggtgaaggaattttagagagaaatatatatatatatatatatatatatatataaatcaatttatcgttttggttgtggatccgacttttgcatatggtcactgatttattgcatattcatagttggggtagtcaatgggtaataattgtgtgtctgactatatgcttattattggtactatttacgttttatccgcactaattaagtttctattctctatgtcataccattaaaataatttttgatcggaatgatccagtttaaaagttcatagttatttcaagatcatacgattacaagacggtaaggaggacaaattataaacgactttcaatctaaactaataaataaaatccatttgatagcgcgctgggttcaatttataaaatgttacttagattcaggtatgtcacgtgtgttatcaagacccgtgctaatgatttgttttgtaatttgattaaagttatacttatactatagctaaagtatcttcccgtcagttttctaacgcagagataatcaatttcattgacctatttcatgctcgtaactctaaagaaagaaagactacaaatctttcaatgaacaagttggttttaactaaagttatgaaccatatgaatttgcgcaagggaaaaagttcaaaacaaatgcaaatggttgtaattcaaaggttataggtttaccgtacacgtcaaaactcaaaaactattgactcaattaattagttggtcatatgcaattttcacgttcaataatccatttgaaattgaaaatatgcaccaattatatcataaaccttgctcggaaccattaaattataaatggaaagagatttgacttttgtgtaactgtttttctgtctttttttgtttctatctcattgttaaaagaaaaattaaagaatgataggaaaaaaaacatgaataaggtgcaaataattaaacactgattgaaaaggcaaaaaaggagaagtgtcacaaacaaagatgaagaagatatctcctcctccttttcagtgggtaacgaaagcgtcttttctattatttttttcccgtatccctaattttcggtttttgtaactcgatttattttcttctccatgctctagtctagac

SEQ ID NO: 47608 - DNA, 1153 bp, Arabidopsis thaliana landsberg
cagagtagtaggtgagagatgagagatgcttctctttttgtaatacgaaattctaccaaatcacaagttcacacgtgtctcgtttgaaaagaatcaattttttatcaatagttataagaaaataaaattatttgtcttgtggttgtggttgtggttgtggtaggtgagaaatatcaaatatttttctttgttaaacaattcaaacaaagataaccaactctgatgacttacaatggtagtattttcttctttttttttggacaaaaaatggtagtattttctaatcatggattcttatcatagattactacgaatttatttggattggatttagtttacaaacaaaatttcaccttacttaattcaactgcaaagttatttgaagagtatatacatgtgttctttatattgaagggtctttacctactaatttttgtgtatgcatgtattcttaacttaatcttgttgttagagcatttaagaaaattaaaagtgatctagaaagtgaagtacatcgaatctggtttagtgaattatctttcacaattcaacacaagttgtatagaaaattaagatggtgtaaaagtattcgtcatgctatgacgacgataaatgattttaaaattttcacttaagtattagtgtattacgtatatgtatcttaataaagaaaacaagaataatcttgtgccgaactcaatttcatagttaaaaacttttttttttggacaaccaaatgaatttaattaaagcatttctaggtaaaacttttcaatcctttcttattttctattgaagtagctgacattctatgaaagcaaatgtcaaggaaatgatttagcgttgaaaaaaatgaatgataacgattttaagcagaaactgacaatcaattaggaacaagtgtgtcgtctgggtcctactcaccatactatctgtccgactttgattacacagtcctctcaagtctaatctttttccttttattaatctatttgtttatcgattaagagtttgatcactctatagtttgtataaaaaacgtttggtttcatgagaatcaaagttaaaatgacgacccacaaaaatgtttaagattgtcaagtgtaatgaccatccatacattcttagttaacctactttcatttacatatct

SEQ ID NO: 47609 - DNA, 977 bp, Arabidopsis thaliana landsberg
taagaacctataattgagcatagatgacgactaagtcaagattgaccatcttccaaggcactatttacactttttaaccatctaaaatcgctaatatttatgattaacaagcatctatggttggtaagagaatcaaacaaatctcatttatactcaattaatcatcagaatctcgtgtctcaacaacgaaaaatttgtttgtcggaatgtaaagattgaccaaacacgattaatgagagttcatggctttttctttctatttacaaaagttggggttcaatcaaccttttttcttctttggcgttaccttaatagctttacacaacatcacttcatcttgtaatatattcctatgatagctgagaagaaaaaagaaagaaagaaagagataaagctggtggtggattttggagattatgagacgcaggggtatctacgcatatgttgtagtaggccatgccaatcggtgttgaaaccacttgtccttgtatcggtcaattttgtgtgaatgtgatcttaacctaagattttccataaatttatagcatgtaagtgtatctcagaagagcaacgtaatgctagtgatgtttttatatttttagaccgtttaagagtcttaggtgagtggaccactcattttcataatgtatttccatgagtgggtccttatagttaggacccatttcatttccaattttcatcataaaagcttataatatatgccatactcatgtccatcaattcccacatcatctctctctctctctctgcgtttatatagtactccactcttcttctttccactccacacaaaagaagaaaaagagagaaatgggtaactctttgatctctcttctctcaatcttccacttgctggtgttatggggatcctcagtgaatgcctattggccaccatcacctggttattggccaagctccaaggttggttcccttaccttctacaaaggttttaggga

SEQ ID NO: 47610 - DNA, 430 bp, Arabidopsis thaliana landsberg
tatagggatagatatttaaatcacaacgagtaattttatcacttccatatcctctttgcataagcaaattatatagatatagccccttgctattagaattgcagacccaatgccatctcacacctcattccacagtggggaaacgacacatggatcataccaaaaatatgcacatgacaataactattagcaaaatatgtttcaattcaaacaaactagcaatcaatcggtggatacctaagattcacagaatcaacctttcttcggcttccgtccatcggttactaaagattaggttgcagtggcacatccaaaggaaaggacgataggaggagcgattgctcacctggaatcggcagacgtagtactcatccccagtatgcggcgcggaagtactcaagaggcttgacgccgggcctcggtggcatga

SEQ ID NO: 47611 - DNA, 541 bp, Arabidopsis thaliana landsberg
cgaaagtttgattctctgcttcgttcggtgttggtgttgaagtcgaagagatcctctgcgtagctgatgaaatccgaggaggtggataggaatgacttaagagagatttgggatgtttctggctcatgagaatggtgaattgtggcagcacatgatgaaacttctccattgtcacaatggcctacaagaacaaagcaacatagtatatatgagaagacttgtcaaaagaaacaaactttaagaatatactgagcgttgagaactgtagtaataaccttgattgtgaaactctgaagaagtggtttcctctgtagacagttggttaagtgatccatgcgtctcttgtgaagagcatgaattattctctgaaccgaggtcgttgtcttgttgacggagtttcttcttggcctaaaggagaaacaatgttaaagaaactatgtaaaggtttatgcattgaggcagtgagaaagattgctcacatttggtctactagcctcaccggacttcttttcccggctaccactactagagcttgagctca

SEQ ID NO: 47612 - DNA, 608 bp, Arabidopsis thaliana landsberg
ccttggttcttattgtgtcaagttacttcgtcctcaagtaacttcaccccttaggttaattcacaacaataattcgtctggctggttcaagcggaagaaacacaatatgaatgaatctgtgtaaccaatatatataatgtgatggattacattttgatatcttgtatcagcaaaattaagatttacatcttgtatcgatctattcactaacaaaacttgtgtatttgcttatttccttcgggggtttgaatcaaaccggtgacgtttgaggagaatctggatggtcgttgtcgtcatcaacagaggttttggtggaggagatggctacagaggatcgacatagaggacaagtgttgtgagaataaagccaaaggtgaatacaatcgagatgaaatatgtgtttacataaaggcatttccaccaactcttcctttaactcgaattctcccaaacagacgcaacatctgcaccaattttcattatcataccaaatcaatcaaactttcaatccaccataacaaacaaaaaccaatggtcatagtaccataaggacttgaaaaagtataatattcacatttaggatatgaaattctaccagaagtctagag

SEQ ID NO: 47613 - DNA, 338 bp, Arabidopsis thaliana landsberg
ccaaacagggctggaggcgcggtctgttggatatacaacggcccctttcagtataagaccactcagggggcatgtgttctgacgggcaaacactgtcgcagattcggcctcgttattgctgctgggcccgacaaccttatggaaattcccgggctgcaaaagctcaacccattaaccctcacatctggaacacactcacacagatgtaagaatcaccagctattctattcgaaatcgatgaaccttgctggatatagaggaagaatgggatcgatacagcagcattagaagcgtatttcactacactggacaagggaaacaacatgctatcacaaccg

SEQ ID NO: 47614 - DNA, 679 bp, Arabidopsis thaliana landsberg
cgcgagcccgccttcggttcttgatcgagatctttatgattatctaatccttgacgatgattactacttctcaggtgagtctaccaaatatttgaacttaattaattgctttttgaaccttctttgaaattttgcgaaaagaatcatctcatgtgagtagtttcctactttaactgcaaatgaggtaagaatttggtcatttggtcaacattttaaccgtttcagtacactttatttgaaatactaattaataggattattcaaaatttgaccaatataagaattttccttaaacgttggatttatttgaaaaatgattaaatttaaccaatataagaacattttcgcttttaacatttttcttgattttactgtaaaaaaagctgcgaaaatgagactttctcaacattttcgagaaattttatttttatttgcccaatcatattttaaacgtcactttaatttgaaaaataaaacaggaggagattcagaaagtgcatcggagttgtcaacaaagcaagtagagacagcaacaaaatcttcatgttcttcatcaccagcaaaaacaaaaacaagtaccaagaaagaaaacaacaatagcaccaacaatgattcagaagagacagagtttatcacaaaactaatgaatatgctctcagatctgtctgaagaagacatg

SEQ ID NO: 47615 - DNA, 763 bp, Arabidopsis thaliana landsberg
gtttcttcttacaattctcctagtgtataactaacacttctccatcttcttcgcatatctcatgccatcttcttcttctagatctctttttctctcttttggtgtttaagctctgtttctgctttttacgttgtgaagagagttttgcttaggttatgatgagtggaggattaaagagagagagatataaatcaaatgacgaaagtacccttgtatatgatgttttaaaatgtttttctttcttaaagaacacagattttttctttcttgggattgtttgggatatttgactttctaaataaatgtaattaaacactttattagaaacaaaacttaaatgtaaattatgccattaattacgccctgtgttatcatgacatgttagatttttttcatttttacagttaatgacagcaacatataggtcataggttgttataaatctttttatgatatgaaaacttatcctacatgataagtataaataaatatgattaaataaaataatttttgctggtttcatattgtttctttatataggtgacaaaaaaatattttttctttatatatatatatataataataaaaagaaaagaaagaatctttggaaaaaagagaatcaagaaaaggaaaaaggcgaaggcacagagaggcgtagagctgaactttgggtcccatgtacgtcaccacatcatatacgttcacgttgcacaactcacctatgcgcatgacatacatacacattacacatacatacacttct

SEQ ID NO: 47616 - DNA, 669 bp, Arabidopsis thaliana landsberg
ggaccagcgaaacactggcctattccaaaccaacccatccccaaccaaatagaaaccattccttcggttccaagtcaagtaacgtcctatatattttatatagaaagtataaatatacacacactagttgaaaaacttgaacaagaacatgttagagggcatacatatatcattcttactaacaagagatgttttgtataattaagccaagactttctaatattatatttgtgtggtatagatatcataccaacaattgaactagaataagcaatatatttaccatactatatcttgtttacctaagatttaaaacggataatagccatcggatgtacatgtacacgtgaagagttgggatatgaaagaaatccaaaggctgagaaaaagaaagagaggtgaaactccaatgaaagaattgggtttgtatacggaaacacgagtcttgtgctctctgggggatccggaccacacgagcggctaaagaagcaatgttgtcaaaaacgttagagccgtatgggttatgggccccaccatctctttacttgacgtggttcccagttccaaacttgtgtggtgtatatatcttgtttggctggcaattaatttttgaaaattttaattcgatttctgaggacaaaagtggttgctgattaatcaactaatcca

SEQ ID NO: 47617 - DNA, 574 bp, Arabidopsis thaliana landsberg
gttgtccacttatatcgttcatgggacgttatcaaattgtaagcacaccttggaatatataggcgccaatcttcttcagctagttcaagttagcacctatatgtatgtatgcttatatgtcaatatgataaaatactaagtctacataaataatatatgatgtctatataggcaccaatcttcttcagccacaccccaaccacccgcacccttcacccttctagaattcgctacccatagggattcgccaaagtcgtcgatagcacggcgacgcctattggcacgtcggaggcgcacgacgcggcaagaagcacacgatctcgagcattggagtttctacaacatcattctccatggtattattttgttaaattaagaacttccagggatgccagtgcttgacaaagagagaatatatcttgagagggaactaaaatgtttgacacacaacaaatgaataaacagttaaacacagaagcacaggggatatgctgcatgcatttggtagtaccacaacactatttctcttgttgctttgatgttatataatagcacacaattgtaagtatagcaa

SEQ ID NO: 47618 - DNA, 683 bp, Arabidopsis thaliana landsberg
tgatgcaagacttggatgtttttggagtttaatcaaatcgatgaaattataattttagttttcgtaatttcgtatgtatattagcggagagatcacactatccgaatatttgttatcggatagaagattacattagacaccgagaaaaaaaaaggaattataaaaatgctttacaggatagtggatattatacgatattctgctaatttccatctattggctctatgataagaccatgctgcaaacacacttctttcaacacttgttctgttccacggtcaacattcaattttctatttaatctcgatttatatttcatgattcatgagacgtatagagtgcctatgaattcatttttatacaaaaagaaacgaaaatcatagggttttatttatatataaatcgtcaaatcctagggctctagatcaaaaagttggctcatcgatagattttttttttttgtttacctcatcactgcagtagaccgaaacttacattgtgacttgtgagagctcgtaaacaacaaaaagtaagatttcttacaaactatgacttgctatgccggaaattttgatcgtaaggaaaaatatttaaatatatatgtatacatatattatttcttactattaaaaaaaaaataaaatcagctggtttagaaccaatattatttagaatctcattaa

SEQ ID NO: 47619 - DNA, 877 bp, Arabidopsis thaliana landsberg
tctaaggacttctacaatctttcaagccatgttttccgagatttatgctgttgtttaaatgctgattcgaaaacgaacgttggggggcaagtcttatccaatattaaaaagggcttccatagctcgtgtaaatgcagtcagccagcaaatcactacaacataaatcaattttgtgtaagtggcaaccatagaattcataatccttttacaaattttaaaaattggtcttttttcattcttaagaaaacaaaatgggcgcttttcgtgctaaaaaaaaattttaaagtaagtttttcgtacttaaaaaccatttcgaccctttttcacattaaaaaatctttaaaatatctttttattcatacttaaaaaaaattagacacttaaatttactccaaaaaaattggattttgtacaattactcctcttgatctccccaaacgttgtctgtggtggcaagaaattgattcactaacaaataaaaagggatattatctagcaaaattttagcaaaaagggataaattttggccagaaattttagcaaaaacatttaactttatcattatgttcacaacaaaaagggaaatttagtcactaacaaataaaaaagggatatttttttaaatagattatataagaagatattctcgaaaaagtacataaaaatgagcattttttgcaaatgcctctttattaaatcaaagaaatatacgctggttatcaaaaccgtcaatgatactccaaaattttaacattattgtaaaaatttactatgccataatttcgaaaacatattcttaccggtactcttgtaacactcaattttttaattagtatattctaattttgaaaataaaaaattaacttaattttatgta

SEQ ID NO: 47620 - DNA, 1422 bp, Arabidopsis thaliana landsberg
cgagcggatctgtctatgttcgtaatacatcagcagaatcctgggcccagatctgtgtgttgttggttcatcgatacgacgtcgttcaagtgataaatatgggtctagaggcccaagaacccaattttttatggagatattgaagtgaaaaaaaaaaatggatgagactttactaaaattccaaatgtttgtggtctacttttgtccaccgtctattcattttctttcgtaatctttatggtatctagagaatcaatcaactaaccttggtagagtgccaaagttaaaaatctgcataatctactcgaatcaatcaaggaaccaattatcttttcaccacacacacacagagcaaacaaattccaagacaatagagagaagatcatggttaaaaaagagattatatgaacgtttatgagaactccaaccacagaataagattgatacgttacggcttcgcattaatccctcaaaggacacgcgtgagttcccctctaaacacaaatccatttcgtaccaaaactatcaaactctctctctttcccaacaaagcatataaactacacttatatgactcagtaagcattcatcaccaccactaaagtcttaaaggacaatgcaaagagagaaagaaagactactaaagcctaaaggtaaggaagagacagaaagaggaaaatggtggtcacacacaccaatcatcaccactcattcttgtttagcttttttctaaccttcttgtaatcatattcgaccccgaagttccccctactttttctataatattttgtagcatttacattacactatacatatattattcctattctgttcaaccatagtatcatatcatattcatatttacatctcacgaattagttgcttagatacgacgtcattttaatggaacggtcttaggttttaaatatgggctttgttagaggcccaatgattaacttttaagtaattaacttttcaccacacttaaaaaaaacaaaaggaaaacaaaacgtaagcaacaagagagaggcgatcatggttgaagaagagattatatgaagaaaaaagattgatacgttacggttttgcattaatccctcaagcgacacgcgtgcgtccccctcggccctctctctaaccacaaaaaccttatcataccaagtaccaacacacagtctctctcacctaacagagcatttacactacacttatgactcaacaagcattcatgaccaccactaaaatcttgaaggcaaggcagagagagaaagaaagactactaaaaaagccttacggtaaggaagaacgagagaaaaagagaaggaaatggtggtcacacacacacacaccaatcatcatcactcattcttgtatagctttttctaccttcaaaagtcaatcagtcttcttcctaccggagag

SEQ ID NO: 47621 - DNA, 1067 bp, Arabidopsis thaliana landsberg
aatatgtattaaaacgttaaaaaaataatattttaaactttcattaacatctatcaaaatccgttccgctatataacatattttgcaatataatcaatttcgtattattttaaacatttatatctttagatattcaaaatatttattattttgttaaatttaaatatataaattataatattaaaaactttttaaaagttaactactcacaattatatgcgttgccaaacatccaaaaagtaaagaatcccgattctatcttcaatcgttttacatttgtacactttccgtttcaaaaaaaagtggttgtaaagttattttgtttcaagcggaatgtcgttttatcctttatccaaagctaattttcgaaaatatattatagcattaatgacattaaataacatcatatttgtgttaggcattttttttttaatttacgttaaatgtgttaaatgacaatttttggaatatggtagtatttattaaaacaatttataattttgtgttagtatgtttgtatatattatatacaagacacacatatgttgtcattctcaaaagggacttaaattgcaggctaacagaatagtgttcttaaaacgtgttttagttctctattttaattaattaattgattgattgattataaagtcagtacatatcacccggtcgaggccttccttggatttagaatcgtgccaccaaaaataatttattcaccccattatgcaaatatttatttaattttaacaatttcagaatgtagtctgagggctaaaataccatccaacaaaaactactaatagtagtctaattaacagttcatatatatcaacaaatttatctatattcatactgcctaaagacattgtgtattatgtatatgattattgttaccatctttaataactagcctcttaaaatttcttcagttctggtgtggctcctttatactagcgggcgtgttttggctgtagtatagagaccgactattggtgaacattattatttagcttcaattatacttaatttattattaaccccaaaataataattattcatataaa

SEQ ID NO: 47622 - DNA, 573 bp, Arabidopsis thaliana landsberg
catcttccccagggaaacgcccatcccgcccgctcatctcgccctcatgcgagattcacgacaaccgtcctcccgtcgctcccttttcaaaacagcagtgcccgcacaatgtgctaccccttcgcctgatccatccgccatggccgcgctgcctcggctcgcgagcatccgcaccgccctgccctttccatcgacgttgtggcgtgctggccaagcggcgccccggcgagcctccgctgccgacgctctactcgcccggcgcggccagcggtgcgacccaggcgtacgtcgcatggccgatgagccgctggtgccccacgcccctcctgcatagctgttgtgccacaccgctaggtcgcccaccggcaaacatgcacggacacccgacgctcgctgcccctgcattccaaaagtgacgaagaaaccaccggcccgtgcaattgcatcgtggtgaagaaaacgcgtgctccgtcgtgcgcagtgaaagaaggaaaggtactattctatgggcccactccatttctctcccatgtcgtgcgtgatctcagatctatacatgttaagctagaaaaa

SEQ ID NO: 47623 - DNA, 649 bp, Arabidopsis thaliana landsberg
gcatagctcacgaaagcagagtgttccctacaaagaaatcacaactcagatcacagtacccaaagtgacacctcacagaatcaatcaacacggagaaccaatgtcatacctgcgaatatcatcaactgtagcttcacaagttgttgaaaaggcgtcgtcaattgcctgaacaacttttccaatttcattctcatgttttgtacatgacagctcctgagcagttacttcactggaaggaagtttgggttgggtcaatgaactatctttgctctttttaagaaaccgttccatgattgaagcttgtttctgtacttgaagttgcttctttagctcggcttgttccttctctctacgcttctgctccttctccgactcatcttgctgtttctttatcccgtttcttgactctgtctcttctttttctttattattttcatcaacaattgctttctgcagtagcttctgctctttttcctgtcacagtgaacaaatgctcagtcagaagtcagactttgaaatcaaacaacacatccaagatgactaaaagagaataaacagcgccagaaaagacttctagaagacaatgaagaaaaagatcagcttacttgttgcaatttttctttcaatacttgacgttccattctcttct

SEQ ID NO: 47624 - DNA, 750 bp, Arabidopsis thaliana landsberg
aaagacctgcttgctccaatgccattgatttaacaatcaactcgaggaaaaaccacgccattgataatacatcgtcatatacaggtccaacccggtaacctttggcctgcaaggccagtaatagtgttcatcaacaaaagagaaataattaagaaaattcaaagcagatagctgaacagtaacacggagattgctcaactttgtttataagtataatacaaatatatatcacattagaacaaagataagctagtagtttcatccagacaacgtgtgcaatttgtaccttgcttctagctaaacttccccacacagttgctaatccaggataaaccggtggttgattgcctccaaaatcatcaaaagaataatcaacataggtgaccagaaatcgatttcggtcagcatcatcaaacgacacctgctgcaccctataaaaccaaattgaaagatctagtaagaacaatggttcgtgtgcttgttatacatttactgtgtccagttaaacacattatttacaactctactgataataccccatccaaagttaaagaccaatgacatcgtgacataacaatctttggtcatttagctaaaccctaacccttacttgttatatgaatgttctaataaaagtttttactgatcctttggtttactttttatttgaagcagattatatatcctacccttttacaaattcactagttgtactaaattaaaactagcttagctaaacaccataccgag

SEQ ID NO: 47625 - DNA, 589 bp, Arabidopsis thaliana landsberg
tcgtctagcaccgcgtgctccacccacgacctccattttctttgcacgagactctgcacgagctgcaaccacgacggcaggtggagcagcaacaggttgcctttgtagaacatctcttccgtaggggacgtgaaggatgcctccctatgcctgttgccggcgccggttctctagaactcaaaacgggacgatgatggcgacgacactggcgttgtggtcgagccaccggagagtggagagggtgcctctgccgcatcatacaatgcaacatgttgctgctatgcaccgctgcaagctgttgcagtggggtaatgtggacttaacatcatacaatgcagtttatagggactgcttgtcatgcatgatcgattgtaatttgaccacaacactgacaatctcatattcgttggatagcgatcctaactgtgttgatgttttcgagagcgcataattaacatggaagtttttcacggttgcacaatgatagactgaccatattggaggcctgagatggttgagacgcaaagaacactcacgctggctggaagtgtaaccagtctgaccggctgagtaccgaactgcatgaggt

SEQ ID NO: 47626 - DNA, 590 bp, Arabidopsis thaliana landsberg
tttcataattcctttctccatttcatttttaaaattcatactactcataaaagttcatagtatgagtataagtttatgactagtttaactttcaactatctagctttcatatgattccctagttcaaagttacactactcataaatttagatactcatactatgaaatttttatatagcaaaaaaaaaattacatctcagtttgatatcaataactaaacatacctatgtaaaaacttacatagtctactacccaaaatatcaataattattgtagctcccactacccaaaagacaatgtccattgacttcacaagcttcttagtcttctctatttctatgctctaaaatctccttatatacatagtccccatacttatcctcaaaactcaccacaaaatctcatcaactcaatggcttcaattctctcaattcttcttctcattctttcactttcaaatctccacttcacttcaaccaccggaaacaaccacattaacgacagaaaatccttagaaatcattatcggtggtggtaacgacaacaatcctccaccgtcaccttcaccggaaccagaaccagaacctgaga

SEQ ID NO: 47627 - DNA, 443 bp, Arabidopsis thaliana landsberg
  unsure (1)..(443): unsure at all n locations
ttaagagtattatcaagtgcaactttctctatggagcacttcttgataacattttacacacactcttttaatgatagggttgagattagctttcgttatgtgaattctcattccaaaaatttagttcgatcaaattaataattaattgacacactggtatttangaagtatattgataattattaaaatatctagtagtcataatataagtctataaataaaagatctaaatttggatatatatatatatatgtgtgtcagtggaagccatatatcaaatcgttttcattgccatttaaaattgacgtttaataataattcaatggggcaaaagaacctggtgtatatctcacaagcagacctcataataataaagaaaagctgattgtacgataagattcacaatcgtaacaataatagtttaacctaaaccctgatatttg

SEQ ID NO: 47628 - DNA, 1160 bp, Arabidopsis thaliana landsberg
atcatttgaagagcacggacataaaccaaagaacacgtacgagagaaaataattttataatccttgtaagatccaaaaaggaggaaatgaaataggaaatgtaaatataaaaaagaagagaaaatgcccattggctatttcaattttttctcaattacaaaaacattatcaatgaatgaacaaaaaaaagggacacaattatagagtcgaaacataaagaaagagttattgtactatttcatactggagaatgcttgtctaatttcttggcttcatgatggttctcattttcttgtcccaaagcggcgtcgtatctctatctttcccctgtcaaaaaaggaataaaaccaaagtacttagaaactttcaacactcattatttctatcttttctttttgtgtggttaacgtacaagaaaagtggaatcggaggaggcttgtttggatttagaagcaactgagcagaagtaggagtagagaagcatcccgaggacagcgatgagtattcctgcgatattacgaggagtgaagggatcgtgaaggagagtgtaaccaaatgcgagcaccaaacacgttttgagatgtcccaagacttggtatgtcaccggagatgtctttccaatcactaaaaacgtactgaagttaaccgaaaccgttatcaaacacgacaacgttatgaacccctgcatgattcatcattgtcaaatttcacaaaattttagtatctatctagggacgttatgatacaatcatggctcaacatgggcacggctctaaggggccatgcgaaaatgggctggaccgatccaggacaatgattctaattctattttaacaccaattgggaataaatggaattagcgatgtaaaaaattaccacgacgatgggagagtaatggaaggagaaaacattgaggctagtgaggtatttgtcgacaaaaggacccgagacgaagagtatagcagcttggaacggggctgattggtataggagttgtgttgatgtcacgttcagtctcttctggatagtgtttgttagcttcaccacaacattttcatagtcatattaattatactatgtcttaataattaaacattagtttaatgaaacttaaagcatacaatttggccgacgcaagttgtgtcaatggcaaggagaga

SEQ ID NO: 47629 - DNA, 234 bp, Arabidopsis thaliana landsberg
ttggagttcatgctcttggttatcgcttgccgttgatcaccgtagcagaggctctctttaaaagaaaagcagctttagcaacaacatatgaaacaccttcttatgatctacagagatgatgatggttcactgtgcttgatcacaccgagaagcgtctcgtgatggtctgctttctactatactctattgctttgtcagaaagtgtggaagtactgtgccgaattgatcactcag

SEQ ID NO: 47630 - DNA, 326 bp, Arabidopsis thaliana landsberg
tgccgactttgaccgggctgatgggcttgacatgtcgtcgtcggtacaagcggcagtatcgctttatggcatatccgacctgcgtaacattggagcgggattttccgacgaaataggcgaggtccatgcctcgaccgcctcgaccgaagcattgctggtgcatggcgtggcatttggcgatttccccggagcgacgatcggcagcgatccggccagggcccttgcggcagcccactcggccatctggaagggacgaagccccgctgctactgatgcacggccgtgacgacgatctcgtctcaccattgcagagcgaacagatggca

SEQ ID NO: 47631 - DNA, 876 bp, Arabidopsis thaliana landsberg
tattcggaattgaatttgggtagcgacaaatcaacggtactaacacaaaaagtgtttgtttcaaatttaaatattgtttgcacttgcatcatgttttttttttttgtcaaaaacacttgcatcatgtagttccacatattttgtaagaaaacacaattttcatgattattgtttccgtttcaaacgaccaccaataataaacactaaaatatggtgttctcttttgaaaataaaacactagaattagacctttgctattctctgtccttattatatatgtattgctagattggttaatatagatgttagaccttttgaagatggatatgttgtggtagagaggtgcgtaaagagtatcatctttcttgaccaaagccgctttcttgatcttgtctcttgcagttttaagctcttggtccacttttgatccccagagaggtgcctatgaacatgaaaaatgtagaaaacagggaatgaacgagtgtcgatgagtaataaggatttagaacttgcggtaaaaacttaataacatttgcatacaagtgaattttttggatcattatgccgcttcaatatcatattgttcatctgctttattgatatgacaattgatggtggctttgttatgctcctatggggatatttcttgcggatttgaggaatctttggttgaagaggatgcagagaacttgcagtttcattgcttcttctacgttgtccagaagcttctattttgtgagaatcattcagaaacttgtgctcagaactcttcaatacctctgtagttctgttatacggtttaagcccggtgaatgcttcttgagatgcaagaaacgtttcattttcagcacttttagtcgtatcattggattttcg

SEQ ID NO: 47632 - DNA, 703 bp, Arabidopsis thaliana landsberg
aaaacctggtaacaataagccttcagtgttccgaaatcaagtttcaaccaactgggaaatgaatggatgatatataaatgtaccatatgctaagagaatagaaagataaacaacaagaaaatgtgtagtatgcaatcagccgacatttggaaactaataatggcaaaagcattcaagaccaagacattaaagaacaaggtgtaatagcttcatcaaaaatagaatggaaaagtaacgaccacttgctatttttgaaaaaatttgatctgaaaagcagagatcaccctaaatttcatacaaaataaagtaccattcatcccagagatacaaagcgcattccactcctgtgtgctcatctagcaagcgaagaacctgagagaaatttagtcagcaaatatgagcatgtacaagagaaaatctatgagtaaatgacgaaccttataaggacattgacccttagatgagctacccgagccacgtttctccgatacctgtagttacaactctggacaatgagtaacttttacatgaaaaccacattgctaccccccaagttcgattaaggccaactttacctccaatacaaggaaatagctatctggatttatggaattctgcatttttggtagagaaactggcccttcatctacagcgcaatcaacaacagaagagatgatatcatctttaactcgagcttgaggca

SEQ ID NO: 47633 - DNA, 328 bp, Arabidopsis thaliana landsberg
tcgcaggggggcaggtggtcgaagccgagctcgagcgaggcagagttgttccgaggctgagaccggctttgggaaaggcgtagtttcctcccgagggccagaccatgctctgtcgtacgcgcgtcccatccggagttggcagacggcatgggggagcagtagccgttgttgctaggcatgcgcattgaatgcttatatcccctgcggcctttggctgaggcctagctcagggttgtcctccttgcctgagacaggcttgggcgaggcgaaaacatctgttgagaacctcggggggaggggggggcgatgaggatttccctgagtacgt

SEQ ID NO: 47634 - DNA, 803 bp, Arabidopsis thaliana landsberg
agctaaacacttcctagctagaccaaaatcacaattctatttgatattaaagtaaagatcatatggtttgtggaaacaagatttggttgagaaggacacaacagaaagtgggaagactatcagcaggaagcaagataacaagcctccttactgctaatgacattgttttttgcggtacagaagctggggtcattaaggtgactaacacacaaactatgaagttctttgcaccattttaaatgatattatataagcacttagtccgacactaattaatttctttcgacaaaacagggatggattccgttatagcacaaaggacaagtatatgaggtaaccactacaatttcaacaatcagctcaacggtatgatatatgaagactcatgttcatatcacagtgaagaagtaaatacacatgctttaaactagagtgatgtgaagcagtgaagctgcactatgtgatacttgtacaagagttacagagaaaatgtagtttagtagtccattttacttctgtgtagatagtgatttttgcaagtatttattatcacttaagatcatgcttcaacagagtacacaatgacattaacacgagagacaacaattactgtggaatggaatcagactaagtcgtaaaagttatcagagatctaaagttggtcctacattcgatcaaaagatgctgcataaatattttcacaacgggaaaatgatagtcttcacatggtcacgtctgaagaatctattatgcagaatcttggaaatgcatgagagtccaaacttggtcccaaaacatttatt

SEQ ID NO: 47635 - DNA, 786 bp, Arabidopsis thaliana landsberg
attttgagattcaatgactcaaagacttcacacagtttcaccattgtatctgtcctcttattacatgttacactcaccaccattgtcctctctcccatgaatgttaccttcaacttcaatcacacccaaatacacacaattttcaatgaaaaattcttctcctaaatcttatgatttctaaatgaaaaaaggaactgaaacttacttcgagaacttcgatgagagaagtggaagaaccagaatcaagctgcttcatcttcttggatgtgacaggaacaagtaaatcacgatcaaaatctttgctgaaactaaggctactctttggtgtagattcaagttctctgatctcagcttcgagcttcttttcttcatattgtaatccttctatgtaactaatagcatctttgattattgaggctttatccatctatcagaaaacaaaaacagagtctataataagtttgaatcctggaattagaagacaaaaaacaaggggaaaaagagaaaccttagtgatattgggaacaactgatcgaagagcgaagagtctctggttaagtttctgtcttctgtttctctccgacacaatattcttagaagccggcgacgaagcagctccatccggcgaactcgaatcatacgacccagaaatggcttcttccaaaggccagcttctttttttttaaagaaacaaatatcaaaatctcaagatggaaagcaaagtaaggaaaaaaaaaggacgaaagaaagaacatgtcgtattcgaagtcttcgttttggaggaag

SEQ ID NO: 47636 - DNA, 919 bp, Arabidopsis thaliana landsberg
  unsure (1)..(919): unsure at all n locations
gtacagtgaaccagacagaccttctaaacaaaaacaacacatacaattatatcatgaagagacgatacaggaaaatcaaattggttgtataaagaaatctcgttttactttctttttaaaaacccaactcatattgttataagaaagagagttttttttttctgtctaaagaaagagagattaaaactctgaatttggctttaaaattttgatattgacgactgtcacataccagaggactgaattttttttaatactatttctgaagaaaatgctttcttaaatttaattattaattataatataaagttcatattcacacggtatataaaaaaaaggttttttcatatgacagtaaatataaaatttattattattgccaagctgaattctaataaatatacacttctgtttgtcaagttggaactgtatctgtcaatgaaaaggtacttaataatgataaataacccaaaattgttacttttcaacactcataatcgaattctgctatctagtagtagtcattacgtagtaagttagtaacgtatctaagtgaaccacttctctaactaatggataaaactaaatgagagtaaataatcaacaaaacaaattaattaacgaatactaaagattacaacacatcattaaggagagaaagaagagaagactcatttgaatttaagctagtggtcactctctccaggcgccgctctctctttccttctttctttctctctctctctctgagaatggtcagtcaatttcaccactgagagagctcaaaatcgcctgaccttgaccttactctctctatctcttccccgagaaaaccacctnccagtgtagataaccagaagaagataagncaaggtgggtcttctcaattntacctttttagtccaaaaacatgaaattg

SEQ ID NO: 47637 - DNA, 101 bp, Arabidopsis thaliana landsberg
gaaacgctaacaaaaatgtcttcattgctcctccaaggatttattatctatattatgaatcctaaaacaacttaaagggtgagacgtttaacactacataa

SEQ ID NO: 47638 - DNA, 784 bp, Arabidopsis thaliana landsberg
gcatagagtcactaagaccataccttgagaacaaggccgacaggaagcaaatattccctttccactattctgtgtccattagaaataaagttaacctgtagctcaaattgtaggaaatgtcatccacattccaacatcaaaagttaacacttaccaaaatccaactctggcacttccattgcgaagataatacagtttaacagtaacagatgactggtcgtccctaacacacctaagaattaagaaaaaagaaccgcatgaagaactctttaagatctattgccactttaggggaagattggcattactatatgcaacacataaggaagagataaacttcaaatacctagtgacaactgccttgctagagtatccttccttacgatcacggaatgagttccgaatcatacttgttggctattataagagattcttagtcagttaaattatgatacaaggaacttcatgggaatacactatacccataaactttataagcaaaacactatactcataaacttagtcagttaaaaggcgaggtagcttacatggttccgctttggtgcaataacacatcgaaacactctctcaatcccattcaaaataaagtacctatttcaagaaaagctaaaatttatcatgatcgacttatagaagggaagatatatcaagagcaacatgaatgcatagacaaaacagatgtttttaatcacactccagtttccatttgcctataaacataagctgtcattgctttacaaaaaaatacagtttaaaaaaaaaa

SEQ ID NO: 47639 - DNA, 919 bp, Arabidopsis thaliana landsberg
gtcactggtactaccatgaatccggcgaaggcagaaagaaaaaccgtcgccaacatgtgtctcagccctccaattccatcctccatcaccttttagcctatgcttgccgacttcgattcaaaatatcagaaaataaacacaaaaagtgttgagagttttgtttttgtttttgcttttgattattgaacaaacaaagaaagcttacttgaaaatactacaatgtggcagatatttttccaatctattctttattccaaaaattcggttgaagcatgggagatcacatcagacttttgaggacttttttggtattttctggccgactcgatcattagtcaccatctcttgtgtagggagtaccttttaattacacattacgaattatgtgacattttgtaataactacgatcgatttgaagttaagactatacaaaatttttggtactgccatatttcaatctgcattaaagatatataaatccagacgattacgtaattaaataaaaatttatccgtcgcgtacaaaccataaatatccaccacatttgcgatgatactgggcagtgaaaaattctgtcaaaaaatgttactaaaggtttactagaaaagaaaactaccgaaaggtttgtcgaccatatataattaaaattttgttttgttgcaaatagtgtgtgaatattcatcgcaataatgtgtgatttttgtaacttataccgtcacaaattgtatcacaaaagttgtctatagatttgtcaagtagctttcttttagaattaaatggaaataataaaatatccaataagtagtgattactgtcctatgtccattcccacacgcttttgtttatttttagggtttttaaaactatctaattccaatttgatatttcttacattctttaaaatttctgtattttttt

SEQ ID NO: 47640 - DNA, 1016 bp, Arabidopsis thaliana landsberg
gttgtttactgtttttcctacctaatttgatctttgtaggtcgaacaacttcataagatattcaaattattttgctccccttcagattcgtactggaagaagtacagactgccaaacgcaactctttttaagccgcaacatccgtacaaacgttgtgtggctgaagccttcaatggtttcactccatcctctgtgcatctagttgagacacttctcactatagaccctgctgatcgaggaacttctacctcggcattgaatagtgaagtgagtaatccttgccctccaatctttcaattgtttgacgtatgaaacttcaaattttgagttttttcattctttttggttagtttgtgatcacatattatgcaagcaaaagcacttcctgatcaaagtgctatattatttggtttgcatgtgcagttctttactactgaaccgttaccttgtgatccttcaagtttaccaaagtatccaccttccaaagaactgaatgtaaagctgagggacgaagagttaagaaggtacttaattttacatcttttatgtgttttcttgatgcttatgctatcaattagactgatgtgtaatcggtctcttctcgtggctgcattcattgtaattctaggcaaaagggtcttgctggaaaaggtagtggtattgatggagctagaagaataaggtatcgaggggatcgcactgggcgagctattccagccccagaagctaatgccgagagtcaagcaaacttagatgtaagaaaatcctcatcttatcccatttatactcatggacacgcacataaacacacaatcttcatatgagcatatatatatatatatatatatatattcctcaacgcattcactagttttagtcacactgcttgcatcaagttattgagaatacatgcatatgcataggcttatagatcagctatacatatcaattatctagcatggtattttttcgttccaatgcagaagattctgtaatattgccccttgctaatgtgt

SEQ ID NO: 47641 - DNA, 1103 bp, Arabidopsis thaliana landsberg
  unsure (1)..(1103): unsure at all n locations
gtcttatggattaaatgtcaatactgtttcactatttgctatatatccctacacttatggaggagtttaggcgaatttcactgctaaaggaagaaggcttaccaaccttaaccactcactcaagctttttaacttacccgtgaaactaacatttggctaagcctcaaacctgaattacccttgtttgggttcatatgccgactcattacgtccacaccgctacttccaaaggcacgagtccatgtgggtcataaaatgacgtgtacttgtttttttcttacagagatgaagaacttaactgatttgattccgttcagaaacaacggattgaaaacatgttgattccgattcgtataatgtctagattccttttctttaactcgtaaattctttcttggacgcggtttcgagactttgacgttgataaaatgtgaatatgtgtacatgtccacctttgcctcttacgttgacggtcgacaactttttgcaagtcttccaatttctttccatttatgcaatttttcccctcaacctatttatatcttcactataagctaatctactcattttaaatacttttcattaaagatcaaatttaagattaatctgaaagctaccaaattttatttatgattggaaaacgatgcctaaccaataacaaaaatgactttcattagcattttgatttattaatatcctgaaaataattaagttggtcctagctagctaaacacaaaactaaaatatatcattccaccaacatcatcatcatataatagaagtttataaatgttttatttgaattttagttcaagttacttggttttagaaaatgcgtaaccaatataaagacggctatagtatgaagcgatgttgatgcggaattgatctttagttaaacagctcttaacttttacaagaatttaagttatatctcaattaaaatttggtttcgacaacccctgaatcgtttgtttgttgtggaacgaaaggtttgtgtgagttgctttatgcaggttacagaggaattaacatataattcaggttttttttatctatttaaacagttgaacagttntaagttttaaccatacataaatata

SEQ ID NO: 47642 - DNA, 1127 bp, Arabidopsis thaliana landsberg
agaagacttatagagtggagtttgaagatctttacatttatgtgacctgtaaaccgaggagcctcctattgatccattctcatagctcccatgaatatccatgtgtaaacttttaattgactatccatgatgtgtgtctaaatctgctaaaaagggtgtaatataagtgtcagtgttttgacttcagcaaacagtattcaagattcaaaacaaacaaacagtatcaagagattctttaatataaacaaaccgactaaagaatcctggtggtctcagcatataactgtaagcggcaatatacgtaaggcacaaagctttatatacattattgtacctgtataatcttttcaggactgctgtctgaagtgcctgctctgatccagaatctatcatatgcctttgattctgtggcactcaaccctaaacctgacgagtaccagtaatgtggatttgtaaatcataacccatatagcctttgatgctaaaagaaacaactttttttaataagattgaagcaagccaaagctgctaactgaatggggctggagaatcaagtagaacacactaccctacttgtaagatgcaatgaaccatatgcatcatttaccaagtaactccatcctaacgtgttcctctaagaagaagacgcagatccccggcgtgaatcaaaactgagatcaccactagatttcaatttcaaactgcaagaataggatgcccaactatacaaatcagaacattatacattaatcaactgaagctatcagagcaactaataggaaaataagaaccagaatagaaacctgttcttctacttattcatcagttactgaatgagtttgttccatccttcaatgattgctgcatagttttcttcatcagaacctttaaaggcttccaaaacacctccctgcttaagatatccgtatataaattctttgtatgtgatactatccggaacaattcctttttccctcatctcatttagaagcctagaagcttccgttacattcccatctgtagcatacccaccaatcatcacagtgtaggtaatcttatttgggtgtacgttctttgaatgcatgtcacgcagaagacattcaactctgaccatctgacccatttac

SEQ ID NO: 47643 - DNA, 658 bp, Arabidopsis thaliana landsberg
gaggattgagccggtttgctgaacctcaagagggttgaaccggtttaagttcaaagcatatgtagatacctacgcagcaagctagtctagcaatccggttcaacgatttaaccgctgaccttaaaaaaccggataaaaatataagcaacatctatccacagtagatgcaatttgtaaacctcgatttcgtcttccgtatagagaaagcttcttcatctcagtgcgtgtgattagggttttgaattcgaggctcttaaaagggttttcttcttttattgtatctagtagagtcttcaatggcaaatcaaggtggttttaagaagaagacgtttggttgggtgataaaagacttgcaaactcataggcgttgctctgttccaatcctaattggtgactcttattggtaaaagcatagtttcttttgttatctttcaaatctttatcgtcaaaacgtgatcgtatatatcaaatcatgaatgatcccatataccgtatttggttattctttctttcttgcaggcgtcttgttgctcttcccaatgaaaacggttacttttctctgtttctcgaagttaatatggaactaattccatgtggctggagaagatacgtggaatttcgcatgactatagtcaatcatatatctccgatacattct

SEQ ID NO: 47644 - DNA, 2209 bp, Arabidopsis thaliana landsberg
tttgatctcttgattctaacacatcatttcttggacgaggagcaggatttgaaagcagttgctcaagctgagaaatcatgaatgttgctttatcgtcatcactaccacaagattcagctatgagactgaacatgttaatggttttcacttgaagctcgtgtgggatgggtggcgcaaggaaaggatgttggagaagctcagggattctccatctttggttacggtcccaagctagacatttcttcattaggtcgataagccacgggtttgagagttgattgtaagtaatctcgtggtttggatcagttatgactttgaactttgcccagaaggtcttataatctgcaaaaggtgttcttccatataccatttggtatagtatgcaaccaagtgaccaaatatctgatggtcttccacattttatagtgttcccattctcgtcgctttcgttacacatgaatgcttctggtgacatgtaactcaaagtccccacctgtcacgatacatacttacccccattaatatcagcagcttgtaaactaaatacaaaacaactcttttttaattaagaggatgatgacaaaaacagaaacatggtagggtattattacctgtgaatctcgttgaatatttgtagtgtcgctattgatggccttagcgataccaaaatcaataagttttagaaagcctcgaacaagaaggaaatttgcaggttttaaatcagagtgcacaatacgctcctcatgtatggtgttcacagcttgaagtatttgctgcaattgtttttcaatttatatgagaatcagtgatttttgagcacagaaaaatagaagcagaaagaactcctatgcaaaagaaaagatatagtttagtattgtgtaagaacctgccagtagaaccgaagccaattttcatcaattgtccggtcagatccttcgatttccctccatttttgggataacatgtgagccagatcgatttctccatattctagtaccatatatataaatccatcttccttaactcttccatctttgttactcattgtgccattcaaaacctcctggagtaaagtcttatccgtgacctaattacaacagaaaattagtgttctggttgagatgaaaatagtcaaccatgcacttcagaaactaagaaagaacataactgtcccatggatcagaaaaacaaactttaaggaagtacctcatagtctataagctgaatgatgttggttttccctttcagtttttttagatatccaatttcctggcaaaatccatatgctgtagcatagtcacgacccttgagcttgatcttttttagcgcatatatggtacaatctgaagaaataaccttgtggacttcactgcttcctccacttcctatcttgccaagcctctgatacagcttcccattgactttaaagaacaagtctggatcataatttcttttacgaggcgctgatggccctttgctacttgcaaccttttcatgcttatctgatttttgtggctgtgagctaacactggtatgcaactcctcaggcagacgagcattcgcttgtccgtcgctcccataaatggaagatcccactggagcttcaagtcctgtggtgatctgttgctgcttggacgtatctgtctctttgactcttacttctggatcattagttgaagctggcatctcagacgcagtggcatccttattgggatgtagtatgttgctgaccttggaagacggacaacaagaaggcaagttcccttgactttgaacagcatgaggatttgcattcgaatcagctttaacataagaaccagagacatgggtagtagcatttaacataggagctgaagatgaatggattagcgtagttgtggcccatgatgaccccacagccgaacaccgagttcttggttggttcaagaagttgggaaattctcccagctgaccctggatctttgccagtgaagatgaatccttgtattcagattttaaactgacctcagaatcaacagatgggagattctgatgttttgatccaatacaagcatcaagatgtgatgcttcagcctgatttgttgcatcccattccatatctgcaaggacaagtgagttcaagtaagattattagctcaacaaaccaaccgtaactatgcctgtgtacactaaaattgagccacggagaaaatatatgacagtggtcaaa

SEQ ID NO: 47645 - DNA, 291 bp, Arabidopsis thaliana landsberg
tcagtaatacatcgtcgatcatcttctaataacccagcttcttctatagacctaacattgctactataacagtagattctccatattcgtcatgactgtgccgacaaggacacatgagagcaccgacgtcgtcagcatcactaccggctacggcagcgacacctttagctgcgacactaacaccatatcgctctggcagagaccgttcaccttctggacctacctcccacaactctctgcgaccctctgcgagtggcgccgtgtccgcgatcgcggccacagtaccatcag

SEQ ID NO: 47646 - DNA, 607 bp, Arabidopsis thaliana landsberg
tcgcatctcgactctacccatcgcagacagacgctaccaacatgtcaccggtcgctacatcgtctccgtcgttgccattaggacccccacactcagaccttcgcctcccatcgcagtcaacaacatcatctcaggtattgacttctatccctaactcttctcgtctcatctctgagcctactgctccaactacacatgggtcgcaaacctcgacccagccaatccgtgtttccaatgagcctactgctctacctcaaaatgggttgcaacccacaacccagacacaaccacaatcccaaaatccaaaccgagccgtgaccatacaaccacagatccaaaataatgaaccaccacaaaattcccacaatatgaaaacccgagccaaaaacaatatacgaaaaccgaaacataaactaagcctcactgtcactgccaacaaattgaaccagaacgaaccgaccactattcaccaagcgttaaaagacgaaaattggagtcgtgcctcctctcttgaatttgatgctcttatggacaacaagacttgggatttagttctccacaggcgagtcaaaacattattggctgcaaatgggtcttcacaacaaat

SEQ ID NO: 47647 - DNA, 623 bp, Arabidopsis thaliana landsberg
  unsure (1)..(623): unsure at all n locations
tggtgggtttggaaggctgttttgtgctgatcatgaggtgccagacgaatttgatggaaccttgctcacagaccaagggtagaaaaccaggctgctccatgtaactcatccaaaaattcgtcgatgaccggcactggaaatttggtttttgctgtcaaggcattcaagtgtctgtaatccacacaaaactggtaagtgtcatcttttttcttcaccaaaattacagacgaagagaacacactcttgctgcgttctatgatgccagattgcaacatgtcagccacttgcttctcaatttctgacttcagagctatggcatagtggtagggtctcatttggactgggtgtgctcctggaattagtgggatttgatggtcgcagtcatgcgctggaggaataccgtggggcatagcaaacacatgagagaaccgaagaagtaggtcctgcaagggcaccggcaagggaatgaagaatagactgatccttctctgagatgtcttcagctgaatatactccatgactgcctcattgctctgccnnnnnnnnnnnnnnnnnnnnnnnnnnnnnnnnnnnnnnnnnnnnnnnnnnnnnnnnnnnnnnnnnnnnnnnnnnnnattagcatt

SEQ ID NO: 47648 - DNA, 674 bp, Arabidopsis thaliana landsberg
tggtgattaaactagaattccgtttttcaatcatatatttatttatccacgttttttgctaattacacaacctccaaagatccaataagaccgaatcaagtttacagtttttgtacgctaccgaaaaaatctccaaaagtccaaccattttcccctcaatttcctccttctcccgttataaaccaaagactcgattttgtgttgattattcgattcacgtaattaaggagatttttggatcaaaagatgggtagggtttttatggttgatctggaagggaacatctacatctgcaaactctgtaagacccatctttctacagaccaagacatcatgtccaaggtttgatcttttcaatctccatgatctggctcattttttcttgtcataaatctgattatagaattttagttttacgttttcttcgaattttcagtgattccttctaggatttaccatgtgatttttaatgtcaattctagttttttgaatatatagagtataaatattggtcttgagtgagatcttcatgtgtcgatcccagagttgtatattttgatcttctctttctgatccagtcattacatacttagtgatgactatagtagtggtacatttaaacttgtgcagtcttttcaatgcaagaacggaagaacttatcttttaacaacgtg

SEQ ID NO: 47649 - DNA, 402 bp, Arabidopsis thaliana landsberg
ccttggtcattaggcaaatatatcagagaatgtaatttgttggttgtttagtctggaattgtactacaagcagatatatttttttttctaaaaaaacttttggagtcggagggaggacgacgctgagaagtagtagttttaagataagcagctttgtttgtgtataccatttaacataagctcctttaggattcatgcccaacttgaacacccttttgatttttgggtttttattagtttctctcatgcaatttcgtttctgtactatattactttgcccgttttgttttggtcaagtttgtatgatgccgacactaatgatactgacaatcaagaccatgccctgaaagacgagagacacacgagaattgttgatatcgacctattcaaacataagaaacc

SEQ ID NO: 47650 - DNA, 1318 bp, Arabidopsis thaliana landsberg
  unsure (1)..(1318): unsure at all n locations
taaggtcagttctgttaattatctatttagacacaaagaaacgtttcttcagtttgtaaccttggaagcagaagcaatgtgaggaacaacaatagcgtttttcgtatcagcaagccctggtttcatgaatggctcttcctgaaacaatgtgatttaacaacacttactaagctcccagagataaactagtatgttttgggttcatcatagcgtatatgacagtacctcgaacacatcgagaccaactcggaacatcgggttctctttgagatgttcgaccaaagctgcctcatcgatcacaggacctctgctgcagttcacaaggattgcttcctgaagcaatcaaatccaatcagaacaagatcaataataataagaggagaccaaatgaaaagtgaaaccacctttttcatcatggcaagcctctccttgttgacaagatggtaagtggttttgtccagcaccgggtgaagacttatctgtttcagatcacaaccagttcataagagatacactagaaatgtttaacaaacgaagaatagtttgtgtctgcgtgaattccatataccagatcagcctcacgcagcacctcctccatggacgaagctcgtttccatgtcacaggttgttctccatttgctttcaagaactgtccataagctgccaatcaccattatctcaaatacataaacttgaacatgaagatgaaagagaaagactacatagtgtagaacctgttacatacctgtcacaaatttctcaagacgagtggattggtaaagatcaaagtagatcaaattcatcttgaacccttccacctgttttcgaaatgacgaggtataaaaccgaagattttgtgtatataatgtgaatcgaaatctacaaaatgctattgcaagaagcttaccatcattctagcataagcagatccaatacgtccagctccaataactccaacagtctgtcctttaagtaagttccccacaaacctaccgaaaccaaacatcgcgattacaacagttctcaagttcttgaaatcaagaagaatagagatcagaatgttttggtgcagtgatcatacagatgaggaagccatccctcgtacaagccacctctcatgaattcgtcggcttcaacaattcttcttgcagcagccaaggaaagagaagcagctagttcagccgtcgtctcagtcaacactccctatccaactcaaacaaacaatactaaccattactaaagcttttaaaaacacttcctaagcctatctttgggactaaaactngtttttggtggtattacccgagtgttaccgaca

SEQ ID NO: 47651 - DNA, 620 bp, Arabidopsis thaliana landsberg
  unsure (1)..(620): unsure at all n locations
ttttgtcaggtttannnnnnnnnnnnnnnnnnnnnagtttaactaaagtttagttagatgactaaagaaaccaaacatgaccttatataggctggaaggtgggtggttacatgacagatctaatcttgtacttatctgttacaatcctatcctaggtgggtggttaactgacagatctaatctcatacttatctgttacaatcatatcacatctgttaggaactctaatttatctcttttatcccaataatatcgttgttaatttatactaatcatattagaccttcaatttaaataaatcttagattatatttttatttaaatttttaaattaaacttttgggtgttatgcgctacgtgaaaggaatattttcttaaatatatatatacgatatcctaatttgtatcgactttaccaaaaggacgtcatgtagaaacaaaccaaccaaacatacatcgatccattatattagcttatatttctaatttctgatttccattttaaatttaaaattcaagtctaatttatagctaagttaaaatttctatttcaaagataaattgcaataaacaaaaactcaacatgaatacaaagcatttttaataataatttatcattt

SEQ ID NO: 47652 - DNA, 556 bp, Arabidopsis thaliana landsberg
cctttttctcttcgcgtgtccttttttcctttatgttctgtccatcgtcatgaacggttctgctaacccttctccatctccctctgtgtactggcccggttatctcagaccccatcatgacttcctgatatgttagtgagttagcgcaactcagcctgaatgctttttacttcgtgaagtctgtgattgctgggaagagtaactccttaatgaccatttccatcttgtcccagcgtgttgtcgctgtttcccacctgcgctcgttttataggtgatcattctttgttgatatccattcttcggttctttctctttttcaatttatcggtcaaaagccgtgggcgctgtacatcgttgccatatcttcctgcctttcctcattctcattgtcctttataggtcactattccattcatacgcgcatgatctgtacatatctcaccaagactttgggtttccctccagattttgtttactaaccgtcaacattgccaccactaagtactaattgtaagacaatgtcaagggataactaggctcccttacatcaataaat

SEQ ID NO: 47653 - DNA, 793 bp, Arabidopsis thaliana landsberg
cataatacacctctacgatatcaccatctttttttcccgcttctacgattccattttgcaccttgttctcttctgcggtttcactaccttctttcacgcttcttgcaagatctttatcaattttttccttttaaagactccttcagggactttattttctgccgtcaacctctcaaagtcactcaatctttacatatcttacagagcctgagattaacagagggattctaagattaacagagggattcttgaatgaatttgagagaaatgcaaaaaaaaatggcgaaaacggattggccaaaaaaacaaatatctctctttttatatacgttcatgtatgtgttagacccaacttgagaatgggtcaaggcccaatttgtttttatttatttttattaaatgatattcaatttaaagagaataagttttacagagctaaaagcccagttttggaagcccaaaatacaaaaataaaaagttattacgaaacttgaaccaaaacatttccctttgagacaataatatctgcaaattattttgaccacaagaaaaaaaaattgagaagttcgtatcaaaagtgttaatgtgtatataccctaaaccactttcgtcaaatttagattgaaaagatttgaactttcgaaccaattaaatttgattagaaacatttgatggtaagcttagtttgaagtgcttgtagcttggccattgctgcttctatttttaacctcttccctgcatgaaaggacgacgtcttaatcatcatcttctcgaccacagtcccttgcctaat

SEQ ID NO: 47654 - DNA, 550 bp, Arabidopsis thaliana landsberg
  unsure (1)..(550): unsure at all n locations
nnnnnnnnnnnnnnnnnnnnnnnnnnnnnnnnnnnnnnnnnnnnnnnnnnnnnngtatacctatcctggcacctacaaaaaaactggccccttacgtacgcagttattcctttgcatattctggggatccaaaatcaccattcaagtctcgtgcaagtctgctttcatggccggaccagtgccctagcttatgtaaagccgtggcataatacttcgctgcatccgggaaagcattttgttgaggtaggtgaatttcattcataaaaggcgaataaaacgcacgatccatttgatcatgcaaaatatttgctccggattttttcaaagcattttctgctaaatctaacggattccattctggttgcgctcttacaagctccggtacgtcttccatttgacttagattgaacactttcgcgaaaaagaccgcaggctatattcgacttaacaggtttcttaaccttttggccagtcggttcatctaactctttgaccggatcagaccatttccaatactttacatacgtagctttgggacctttcttgattt

SEQ ID NO: 47655 - DNA, 550 bp, Arabidopsis thaliana landsberg
  unsure (1)..(550): unsure at all n locations
gtcccatcttcaacggtcgagactcttcggttacattttcttctaaatgaatcttctctctcaacatctaacccttcgaactctctaacccaaaaacaatgtaacaaacaagccagcactagaaccattatctgtaacggaatcatcgccacgaaaacaccacattctaccctaaccaaagctttagcctctctagggtctcgagtcgatatcagnnnnnnnnnnnnnnnnnnnnnnnnactaaacaacattaaaactgctataaactgacccgtcagtgaggaaacatgaagtnnnnnnnnnnnnnnnnnacatgatcgagattggtgcgaagaggcactaccgaaagaggagatcagagagacgagtgagactgcgaggaaggctaaaccgagtgaagttggagggtttctaagaagaatgattggtacgaaagaacacagggagaggaggaggagagtgaaattcagacacgatacgagaatgttttggaacaaacataactttctgtgaaaagaagccattgatgttttgtgaaattatgtttttt

SEQ ID NO: 47656 - DNA, 754 bp, Arabidopsis thaliana landsberg
  unsure (1)..(754): unsure at all n locations
ggcattgctgccaaaatggcaaattccttagcccactttcttttgtcatactttccagaccggcctaccccaccaccatcccctccccatgtctcatcctccactggaagtgacggaaaagtagatggactatctgcaacaaccggaggaactacccaagtgtttgcccggaaaccataaggaaggttgccaaactgaaaaagaaccaagaattattacatattgaagattcctataatcaactatagacaccgatataaggtatacttgcagaccttattgtgctcaatgaaagctttcataagagcgtcataagcctgcagccacaatcaaatatcaccaccgaacaaaaaatagaaccaaaaatgtaaaaaggtagactttttatcaccaaactgaccgcatcaaatggccggcttatctgttgcagcagctcaaccaaggagtggcacagaagttgctgtttcccaggtggataaaaacctgttcttgaagcaacaaccgtgaacggcttcccacttgaaactttaatctgtatttgacaacaatggcttagcacaatttcttaaatccaaagtatagcttcaaatgagaggagctcttacatcnatttgaaacaaatcatctaatcctttatcctctttggatggacgaacagaccttctgatgtctgaaaattattttgtcggaatcaataagcaggatcaacctcaaaattcgattaacaagcgaataaggaaactcacattgaata

SEQ ID NO: 47657 - DNA, 911 bp, Arabidopsis thaliana landsberg
cgaacaacagtgtattttaaatcagttttccaacaactagtttcataacatcggatttagaagatattctataatccctagttgaatgacatatgattatgttctttttcaagaatttgaatacaccttctaagtactgtatacggggaaaacaaatcacatatttaactactatatcgccaatgtttataatcaggtacaaaattcttgaatacacccttctaaatatatcaggaaaacaaatcatattctactatacataaaagaatatataccatattatttgccagaaaaaaaaaccatatcaccaatgtatacacgtaactataggttaaaaaaaattaagcaaatagatactccctcgatcttcgttggtgtatacagtatacataccccaatataaatagtttgtgtcacactataagtatgatcagtctaaacaaagaagaaacatttaaaataaaaacaggttaagagattatcataaaaaagggcaatcaacatgacaagtttaattgcatttcttttcactgtccttgtcatcgtatcttctgttcattgtcgtatgacaactgctagtactccaggtataaattgtttttttcttcttcttatatccccattatgaacaaggtattgttttgtttttaattaatgtacatactacattgtgttaataatttttatcaaccactaggttatgggataaagcaggaggatcgtctatgcatccaaggacaagaaggaacaaagttatgtagttctggaacaagtcgcgactgccttaacttttgtttaattcgtggttatgctggtggctcgtgttatgcttatactcttgatcaatgttgttgtcgtatccctcctccacggctccggaccgaaaagtaacgcatttaaaacccttatct

SEQ ID NO: 47658 - DNA, 967 bp, Arabidopsis thaliana landsberg
ctacatccacatccacatccacgtccgttggccaattaaacagaattaactccatgtggagaagtggagtctaactccaacgtccaaaaagagagctagacggtcgtgaccactaacataggcgctcttccgcaggtaacccatgtgtttaaccaaagaaaagtgctcaaattaaatcgcattttaggttatatgaaagtgtcaaaacgcatgaaagtccaaaaaaagttatatatatccaaatatctttttatttttattttactatattttcgttctaacttagtttttgctcatgttcaacacctctctcctatttgatgactaaatagagcataaaattgaattcacatatggtataagtcgtgtctcgtgattaattagcttttgtttctcagtgtaataaacaagaaataagcaccacatcaatgtgggttgggtttcttttcttttttgtgggttggttccttgtctttatatttggcatttagctaggcttctcattctacgtggatgtgagtggaaccgccccgtgacctcttcccttctgtctcttttcacctaattcccttaccaaagtaccaaacactcgaccgcatctaacaacatccacacacatttatatatatacacatacatattgagaattcacatagccatatatttttttggtcgtactttgtatctttggcaaaacacaaaaaacaaaaacaaaaaaactccttatatttttgtatttgatgctaattatcgtatagatgcccaaactcaattcaacccaagctcccaatttatttcttctccttctcgttatccttctttgttcaacgcaaacacaatgccacaccaaaggtctccgattacgaccaagaaaccagaagaatatgaacacgacgagtgatcggacacaaaacccggaagatgagttcatgaaatgggtgagattcgttggaagccttaaacactc

SEQ ID NO: 47659 - DNA, 598 bp, Arabidopsis thaliana landsberg
ttctttcgcccaaagaaaaaaaaaaagaaaaaagtttatttttttaaactaaaaactaatctataatggcatgtcggaatttcttttaatcgatatatgaaacattgttcagggtgattttccaaatagataaatagggttcgagctcccgaacttatagcttttgggccttcctcgtcttgagtttggactgctacgtaggattctatataaaatcacaaaactttagaggcaagtgatgttagtcttgcgttaggactgctccattgcaaacaagtattgtttatggatatttgtgaaatttctgagtgaaacaaacattttccttgttttcaaatttcaaccaagtctcatggtctgttttactaatattagtgtttaaaactctataaaacacatgcttagtatttttcggattaccacatgtttgctttttgttgaagaaaatttatctctagtggctagacatacgaacatcgaaaatttagcacaacgatttcttttaaatttcattattttcaaataaaacaaaaatcttaaaatgctggatttttaaccatttaaattctcaccttttagatttttttctttttttttt

SEQ ID NO: 47660 - DNA, 124 bp, Arabidopsis thaliana landsberg
cgtttagccaagagatttttttgatccactcgatatgttgttggagtgaaccaacagactctttttactaagcccgacatatctatgtgactcagcgcagtaaaccaactcatgagtcaggtcg

SEQ ID NO: 47661 - DNA, 1240 bp, Arabidopsis thaliana landsberg
  unsure (1)..(1240): unsure at all n locations
ttcaatttactcattcctaattataaatcgctgaatcaagaatttctgtgataataatcatgtaccaatgtaactgcatagacattataatattatacacgtataataaggtgaagaagcaagaggaacgtgaagtagaagaggacaagttcagctttaggcagagacatgtgagaaactcatgaactctcttatgtatgtgagacattcccatacatgatgaattgatgatcatgtcatagatacatcatacatccatcatcattggtctaaagtcataaacttctctatataacttgatcctggaaccttcgagataccttttaccttcatcaacctcctgattctcgcaacatcatcccatcttctattagcagcaaaaatattagacagcaacacataaacaccactatcttcaaactcaatatctaaaaaactatctaatatctctttaggaagctccattaatgtccctctattcttacaagcactaagaatagctccacatatacgtacatcaggtttaaccggcattgctttgacgagttccaatgcttcatctaacaatccagctctacaaagcaaatcaatcatgcatccataatgttctagcttaggaaatagatagtattctctgcttttcattttatggaaatatcttctcccttcatcgactaaacctgtgtggcaacaagcatttagagccgcgagaaaagttaccaggttcggcttaaaacctagcttaaccatttcttcaaagtatctaagggattcaagtccatgcccatggatagctaaaccacctaacagagcattccaagtaaacacattcttacttctaattccgttgaaaatctccaaagctgtttcgatgtagccacattttgcatacatatcaacaatggcagttccaatatgcgtatcccatttgattccagcggttaaaatatactcatgaacccatctttcgtaatccacagctcctaagctagcacacgcagagagaacacttgtaagtatatgcccatctggctttataccagaagacgtttgcatcagagaaaacaagtcaatcgcctccttagatctttcacagtgaaccaacccactaatcatactattccaagaaactntatctttcttttccaactcaccaaaaactctcatcgcatcagacagttgctcacatttcacatacatatctataagagcattaccagtctctaagctgatcaaagat

SEQ ID NO: 47662 - DNA, 462 bp, Arabidopsis thaliana landsberg
tctactctaataacaacagcctgatctccaccactatctcacatcgccaataatgataggcacctcgatctcaactcctcgcaaccattctctgaattaaaatccataggacgtgccgtccgcccagtagagccgtaactcagcatcgatcactacatcttgaccaatttcggtaaacataccttgcgatccgtaaagcaccgagagccacctttacctagtacaacagcaccctaaactacacaccatctatggaccagttatcttacccacgcaaaacgctggtcatccaagtccaaatccactaactactgtgacactcctcatcattcgcatacactaagatcagtaatctactactccgtaatcgccaaagtatacgctagcagaagctgcgacagccacgcgttctcgagtatgagggcacggagtcacagcaattcctagaactcaacagaagct

SEQ ID NO: 47663 - DNA, 982 bp, Arabidopsis thaliana landsberg
  unsure (1)..(982): unsure at all n locations
acaacagcatctctctgtcacattccccatgtataagtttgctatgtttttttttagagaatgcttgcttgtgcacaagaacacatgagccctaattatgtttctctgaatcaaaaactcattcttgttttatatctttttttgccagactgcataacgaagaagatgaaagtgtcacaatgccgtcgttagaaaccatatggaacgtttannnnnnnnnnnnnnnnnnagagttgtctcagccgcagaagcagccgcagccacgaccagaacaacaattttatttcatcccagcaactcacactctagctcagctaccaccacaaaggaagtcgttgttgtcaaagcaaacgtctgaaacgcaatcccaaaaggtttttataaaccgctggttctcttgctttaattttatcatccatttcgacgtgattgaatcaagaaatagaagaaggaagaaaaaaggaaagactagtagattatctttgtttgcatgatcaaactgtatcatatagtttgaatctttttgtactgatgttgtaacttgtaacggagggaactaatcttaagccgagattaatgctccaaactaccgaaccaattcaagattgccattaaaaatgttcaatcgggatattggctttggtttttgtgtgagttttccggtttaagaaagtagtataggtatgattgttagtgaatgtttaattctagtcaaatatatcattactttcctattttttcttagtaaatggtaaaaaggtgttgagttttttttttttgttcagagacattatttgacatatattcttggatttaaattgtatatagcaaacaaatttgtttcaatgaaaataaggagaacaaaaaaaaaactaaaagaaggacacatgtcanaatttactaaaaatttaaaataattttaatgtcgtacacaacacggggacatatctaattaaaaaggaagtaataacgtctaatatca

SEQ ID NO: 47664 - DNA, 789 bp, Arabidopsis thaliana landsberg
gaacaattattttgagctaattcaagtcattttttttttgtttggctattttacgacagcatgtaccagttaaatttaagtcaacaaaaagtttacggtatcatttgtggtttttaatcgtttttttatttgcttttttatctacggatgatatgactatttatcaaccgaaaaaatattaaaatgagtatactcatatacattacaaaagccgagagacttaaatttcagtttctattatcgtttcacaaggattttatatcaagatattattgcggctctagagataattatgtctatgaaaggaatattcttttcattatgcattgattttagttcgagaacatacgtaacactaacaattgtggatggacatgaaccgaatgaaactgaaaactgtttcttaaagaattatttatttggctctattagttagagaatcgagatgaagttttgtaacgtcaaaaaaaattcgacgtccaaaaaggataatgcatgaacattcatgaagagccacgtcctttcacccttagatcaacccttgaattgctctagggacatttgtttacttcactaatctcattttgttagtttttttaattagaaaaatgaattgttatatggatttaatcaaacgataatgtgccacatgcatattcttcgtattcgtattatcgtatactatacgtcccccgcgtaatggtatttctttttatcacgtgattctgcatgactgcatttgctatatataactctgtcagtatttttttaaaaaaccaacaaaaaaac

SEQ ID NO: 47665 - DNA, 578 bp, Arabidopsis thaliana landsberg
  unsure (1)..(578): unsure at all n locations
gcagtcannnnnnnnnnnnnnnnnnnnnnnnnnnnnnnnnnnnnnnnnnnnnnnnnnnnnnnnnnnnnnnnnnnnnnnnnnnnnnnnnnnnnnnnnnnnnnnnnnnnnnnnnnnnnnnnnnnnnnnnnnnnnnnnnnnnnnnnnnnnnnnnnnnnnnnnnnnnnnnnnnnnnnnnnnnnnnnnnnnnnnnnnnnnnnnnnncgtcactcaagtagtgagtttgagagtggccgttagggcgaccacttgtacttctaggccttggcgacctatagtcttgttacgcaacacagcttcactnnnnnnnnnnnnnnnnnnnnnnnnnnnnnnnnnnnnnnnnnnnnnnnnnnnnnnnnnnnnnnnnggtttggtatagttgaccctacctattnnnnnnnnnnnnnnnnnnnnnnnnnnnnnnnnnnnnnnnnnnnnacccagacgtagtgggatgtaggcttcagttgttttggtacttttgcactacgtacgtcttattatttattttgtaaccggcttttcactggcaggtcagtaggccttttagaaggcgaacaaacgaaagttctacgtgggcg

SEQ ID NO: 47666 - DNA, 549 bp, Arabidopsis thaliana landsberg
tggccggttcagatcagacaagaaagggtcagccagcaaaggttcatcaggttgccgtgaggtggatcttttcgtgaagcaagtagacgggaagaaggtgactgatcctgcgaaacaggacgcgctgcggtcaccctgaggtccgagacgctccatccgctcagggtcatggtcgtcggccgtggacccgacacggagctcctcgtcgccaacccggtcgaggcctccgggaagggacggccgcgcgtgttctacgacgccactcttgctctgaaggcgcttgggatctgcatcttctctgtaagaactgcttcttttgtttgttccatttcaggcttagtatttcactccattgggtcttcttcttttgctccgtttcaggctgagatcgggaggcaagcggcgtccgagcgccactgggaggtgtacaggttcctcctggatgacagcaaggagttcccttggcaagcagcctcgctaacaggaactgtgtcgtcgatagggcgaggaagacgctgatgggatgctcaactgagacttgggtgggtg

SEQ ID NO: 47667 - DNA, 781 bp, Arabidopsis thaliana landsberg
ggattgggtgattgagaatcaagaaggagacacgatcgggaagttgaaattgaaattcttagattttggttgttgggtcaacaaaagaagaaaacttggaaaattttccagtttgagagtttttccaattgtaagagaagtcaaagagtggacttttgtcttcttacgattcaacgaaagataccgatcgcactggggtattgaaagcagaaaacgacgccgtgtgggagttatgttctgttttaatgcacggggcatcatgacgtcattgcttttgtcacttttttgtatgttctgttttgtcacccacaatgcggaacatagaaaaaacaaggatttctgttacggttatataagttatacaatcgttgggtagttgccaatttgcaattcgtatttactaggcatggaactttaaacagaatcgagaatgtcgaaccagaccgagattttccgaatttcgatttagggaattgagctaagtcactaacggtaaagtctattttagtaaccgttaaccgttcagttcataataaacttgtatatttatcgattaaccattcggttcgagtgtttgaactgatcaaaaccagtaaacgataaacatataacctctaaagttcattatatctagccatcgtcggccagcctctttgtctttttcttcttacgtcgtaatagtaagaatattttactaatttgcactgtctgaaactctgaatagtccaacacaaacaaattcatgagtgatatgaaattaaaaacagattttgatcaatgc

SEQ ID NO: 47668 - DNA, 819 bp, Arabidopsis thaliana landsberg
  unsure (1)..(819): unsure at all n locations
gtgctctcagttgtctctggtcttaggtacaccaatacagtttggaagaccggtgtcaaaggtaaaacaatagaccacaagtttgtttttaattaattggtcctctcgatggttgagagacaatgtgatccaattcctttctttaatggctacagtggacagagctaaggaaatgcttggaacctttagtcctcagttggagccatacaaccacgtgatgccagaagagaccactccttctggcatgtnnnnnnnnnnnnnnnnnnnnnnnnnnnntaaggttggttgttggtttatgaacttcataatctagttctgtaatattcagttctttggtgttggttttaaaaagttactcgacaatcttgtttcagtttcttgatgatgataataagtgctacttggagatcaactacagctttgacatccgtaaagaatggcctgcgctttgaaactcggagaatgcgagagttgtctcctgagagaggatgttgtcggtagaagaaagttgtgtttgtttcactccatatctccgtttttttcgttgaacatataattgtgaatcgttttctgatcatcttagaacaagaacgacatttacttcctacatccttgatcttgatttttccagtaatgtcgttggaaatcagtatgtctgtgtttgttctcaactctgtttctcattccacgttaacatgtgtttgatgatatgattgtgtcagattctgacatgtataatgattctcagtccagatgaaagttaaaaaaagaagaaggttttgctttacagaaaatgcagagcctttctttattcataga

SEQ ID NO: 47669 - DNA, 856 bp, Arabidopsis thaliana landsberg
ttaattaaattggttctgcaacaataatcaaggtattacaagatcattttgcttgatttttttctcttaatttgtcttcatatacttaaactcaattaaaaacagatttttatcccgtattatttggaaacaaatgtttttgcgatatgttgaaatacgtatcaagttatatattgaagactaaatcacaaaatacattattttaaaaataaatttgaattcttcttttttcaatgtttgggttaagtgtatgcgtaagtataaaaaactagcggaaaaataaattttagaatattatttaagtttctcttacatatgttaaggtttatgactttcaaaagtttagattttttttttccacattatttaagtttctcgtacatatgttaagctttatctttgcttcagcatcatccttcaatatctccattttcctctcaatgacatcataatacatcatcttctcaatttctttatcatccaacgtgtacgaaaaatactcttccatcagaatgagtttgccgatcttttcatcatcatggaggaactcataaaacgacccttcctctatccctttctcctttgacattctttttcgcaaattctagatcatatggacctggaaactgtatcttcaaataacaagatgccaaatgcttccaatgaacatatttgatcacattgttatgcttagggagatacaatttattaacaactccttcaatgaaacagttgaaaaaactctgttcttcaccatcaactgcagcagcaatggagatggcattggtgttttctccgatttccctcttcagtttgacttcactgtcttttttggtcaaaaaacacttgagagaat

SEQ ID NO: 47670 - DNA, 926 bp, Arabidopsis thaliana landsberg
gtatcccaacttcttttttcatatatagtattctgatttctgagcaaccatttctaattaattgtagctcgtaagctctttattaaatttaactaaaaatcttagttttatcattataaataacgcatcgcatgtagatgaaagtatataaataataacttgtacacatgcacgtttgaacaatccttagaacaaccaatatatttttatctgcattacaactggcagaaaaaaagattatgatgcatctaattacttaaataaccaaactatatataataagagatggaacagtttggtagattcggcgttgaaatgacaatcccgtaggcttattagctatatcatggccatatgtttcctcaatgagaagagatgaaacatcgttacgtgaatatctgagcttccctcgtgtatccttgcttttttttcgcaaatttaatatgttcacgcaacaagcatcataatttacttcttaaatagcagacataatgattaccatttgcataaatccttatttcttccaaactaacaaccctcatcgcaatgatagtaagatcaaactatacgagcttagtagtactcatgcaatattttgaaccagtaaaacttacccttttgtggacatgcctatgagagaagagataaacaaaaaacgtgaagacttgatcaatattctagctagatggtagaaaataatgcattttttattagcatgacgtttatatttctcttctcgtaaataaatctaaagaaaagttacaaaaagaaaatttataaagttgtcacgtttagtgaatgtttctactttctactctcgtagatatgtccaaagcagggtaactttcactggttgaaacatatatctactgtttccctcaaatccataacaaaattcacattattatggtgtgacgacattttgg

SEQ ID NO: 47671 - DNA, 962 bp, Arabidopsis thaliana landsberg
gctagcatcttaactcggctgagaagaacagccgttctggcacaatatcatctggaagcactgtctcggatcaccttgaagattcgggtttgcaaagagtagttcattatctacgcagaaccaaggaaatagtaagagaacttcctttgcaggattgcttttcctttctttatgccccttctttgtactgtggggttatctaagtcatgtgcatcctttttgacaggctgaaacagagatctcactaatgagacaggagaaacttcggttgcagtcgcaagtgagttgttgtctcctctcttatgcctaatttgctacgacatcccttttaagcgacaacctttctcaatacacacatgcaaagcgaaaacctcctctattattcagagttgtggctgcggtatgatttttttttttgcaatttgtttgtctagcttgagagtgcattgaagatggcagaatctgcccggggttcacttactgctgagcgcgccagtacgagagcctcattattgaccgacgatggaatcaaatctcttcagcttcaggtaaagttgggtgattcgatatctgataacatatgaactaatgatctaattagtctttgtattagttgggttgaaacaattttcatttgctgactttaaattctccttgcaggttagtgagatgaacttgctccgtgaaagcaacatgcaactcagggaggaaaacaaacacaattttgagaagtgtcaggtttgtatggaacctttctttatgtctctcaaatgaccaaaccacattacaccacctgattttgttagctgtcttagagaaagctgataaaaaatttaaaacatcaggaattgcgtgaggtagctcaaaaggctaggatggaatctgaaaatttcgaaaatctattaaagacaaagcaaacagagttggacttgtgtatgaaagaaatggaaaagctaaggatg

SEQ ID NO: 47672 - DNA, 925 bp, Arabidopsis thaliana landsberg
atgtattattgcactctctaacaaacacataatataaatatatttacctacatcagattcttcatacacattgtaatcaatagaccatagagatttacatggcgacttctaccttctcttctcgtggggcacaaaccatgaacaccatgttcgtcaagtaagtttaccttaaatttagtgttgagcatatgcattatttgtttcgtgcatgtcaatctttacgcaaaaaccatgctaattttctctctattcatattgattcttagatcatacacttttggttgttatgatcgtttaattatgtatcatgttatatatcattaacacatgcaatttgcatatatataggccgatgcttaggaaatcaattcacaagaagagtgcctcgcatgatatagtgagggatacggtgaagactgagggctctagctccggagaggaggtgaagacgatgagaggcttctacggcgccggagaaacgtcgtcgccggcgagtagttgggtgccacatgaaggtacgggaatatactatccaaagggacaagagaaagtgatgcaagatgtgcctcctcctccagctggcagccacgcggacgagctcgttaattggttctcttgatccattagtctcgagtgactctcttgtcatctcgatctcgtcgaagtctctatattattgtctattgttctaatgggaaaccataaaatatatgtgtaattaagtggaaatatattgtcatataaccaatgataatgaataattaatgatgattacaaaatgagttacgtaccaaactaccaatgcatgtagattaactgctgctttattcataatgtaccttctaatgaataactaaagctttgatccaaaatccaccaaacaaaaaacttatatccattcttacaaattggaattgctatagtt

SEQ ID NO: 47673 - DNA, 439 bp, Arabidopsis thaliana landsberg
atttctaccataatgcttcagagttttttttgggaataattttcttttgttggaataattaaatggatgcaaggaaataagagagagaggtgtgggagagaaagagacctggagtctagaagagagctccttggtatgcaaaacgttggcaagcttcgagagagcatacgcacgtgtcgcatcgaattgactaatcgatcaaaaccaaaaagaaagatttattacattttccaaaggtcaaaagtcaaaacctttttacttctcttttcccatttattaccctcctatcgagttactgtcactcatcaatcaaaacattaacaactacgcagctttttgctttggtaaaaagtaaattcctcgacaagtttttattcacctctcaagaacaccaatcctactctctcatttatagttctaggcttctagctgattaggt

SEQ ID NO: 47674 - DNA, 1250 bp, Arabidopsis thaliana landsberg
gaagaaaatatggggttaagtagttaagccactttgctcccaaaaagtaaggatcaaacggctctcagcgatctgaggagtcatcgtcccttcttcatcgtccgatccccgactcgccgcatccaaagacctcactaaacaaatggtttcctttacattataatcgtcttactttaagtttcctcatatttcataacacttagttgaaatcctcgtgtttgtacgataagttgataacttatcagttttaacgttaacgtatacatacaatttatttatattacaatttatacaagatatattgtcgtgcacgaaatatctctctaatttttatgtataaaaaaattgcacgaaatttctaacactgaaattctttgtctgaatccagcaggtcctacacatgtcgcttttacggaaacaataatttatctctttaattacatgattaaacctccttataagttaacaaatgtcaaaaccaagagcgtcatgtatattgtaagcgtaaaattgctaagaatgattagtaagtggcgctaaatctaaaggcaaatgttaattggagtaagtaactactactttactaaattatctcataattacttctttgtttgaatgaaaataaactaatatagatataatattaatattctgaagcaaagccgcgataatggaagctgatgtcactgccgtttaatgactttttaaatgaaagcagtgattaaaatttattatttttgtcgccttccattgttgcatcacactagaagttaaatgagataattggtcaatattaacaatttgctagttttgattttacaattatagtttgattaggtgtaaagcctggatttaaagaaaaattactattcctcgaaaatccacctaatatattttgattagtctaataatttatggtgcaatatatgcatatactgtaaatagttcttatacgtttttctcccacgatgacgtgcttcccacataattaaatttagctacagtattatatactaatgcctatacatatattgatatatacttaacatatgtatgtacgctgtactggctggtttctaatatcaccatgattatttttcacttacgtacggatctgaatctgattaataaattacagtttacataacttaaagacataatgcctagtcaacttcaaaatcaaatataattttttttttttaagtttttggtttgcttttatatatttttataaaacaacatcgtatagc

SEQ ID NO: 47675 - DNA, 990 bp, Arabidopsis thaliana landsberg
gtgcttcagatgatttctgggttcctcagttgttacttttttggtgagtgttacttttttctttagctactttgcattctgtgggaatacagagaagcattatgtgactagtgtctctttttccataagtttcaagatgtctcaattggttttgttttcaatcatgtgttcttgttcttgtgacagatgtcattctcaagatgctactggagccatatctgcatctaacttcactaatgggagtggttggttctttgactaaactatgtatcatctatttagtcttttctcgctgggtgacttgaaagtttgaaactagtggcctgtgctttctatatgtgtattcagtcggatgtccaagaaagtctgtggttgcttaaccgaatcacattgtatgtaacatggaattgagttgtttttcatggctgattaatctttcaggttccagaagatgaagcatttttaacggaaatcataacagaagcggtgattaagtcagtggagaagctattcctcaaccctggaaacggaacttcacaaagaagtttacacttgaagaacattgctatcaactggttgtttctttttgacaagactatggcttctctaaggtatgcctataagttctatagaattaattgcttcatttgcttgattgttttgcttgatactccaaacgattacacaggagaaacaaagatcaagaaaaaatcagcatgtacacgaacatgttctccaattcacttattccttatcatttgatcaattgggtaatcagtcaaggtgaagtgattagagatgcagacacactaagaaatttgacccccgcatccttcattggtaaattgcttccctatcgttaatatataggtcatgatgattgttttcgtgagtgatttgttcccatctgttctctggagctgttatgatcacttgactaacccattgtacaaaatctgatcttcagaatggcttgtttcacatgaagag

SEQ ID NO: 47676 - DNA, 502 bp, Arabidopsis thaliana landsberg
gactactaccctaccatggttatagctgaatacaaaattagataaataaaaacacgccaggtattacttttaacaagtgaaagaaataagctggcaaccatatggaatttaaaaagattgtgtaccccacctgggctggcttcagggctcctccaggggtgtacaacaggcacaatgcactgatggggagaagccagtctgctctttgtctctcctacagaacagtgttaggggtatgggtgacttgctaactctcacctgctcactgtcatataagcattccccatagaaacgtggggcaggtatgccccacacacaatcacagccctgtcggtgccactccgcaaccctatctgtcccattcttaccctgcagtcatgagtgcatgcttttcagtcacggaggccgtcctgctcttaggacagccactcctgattaactgggaataggaaaattaaaattcaaagattacccaaccactggatgtttcctaaactggcct

SEQ ID NO: 47677 - DNA, 359 bp, Arabidopsis thaliana landsberg
  unsure (1)..(359): unsure at all n locations
ctnnnnnnnnnnnnnnnnnnnnnnnnnnnnnnnnnnnnnnnnnnnnnnnntgtcctggccgcgcacgtggcgtccttgccagccagaccagcctcaatgccagcgccaccaacgccgcgctcaccctggtcaatctctacaagtcgctgggcggtggctgggaccctgacgcactcacatccgaccggcaggccggcggcgatgcgcccctgacgaccactgcgtcgtctgccacctcgccatcaaaggccggccaatgagtgccgcagcgttgcagccgacagcggcgccacccgcacccgctgctgcggtaccctctccgaagcgggcgatcgccgggctggtcggcatcctcatcg

SEQ ID NO: 47678 - DNA, 345 bp, Arabidopsis thaliana landsberg
ttaaaaagtcaattctttaagattgattttgacacatttgtctgattaaatcaaatgtatagctacgactatcaagttgattttttctttcttttaattttgtatctcatgtaattttaaccgggtgaataatatgaatttgaaatcagaatttgtttaaccgtgttattgaaccagttaaggtttctactcttagtaaccaattagacatgtttttctcaattatcgtgaaaagaaaactcaaaacgaataagttccaaagaggtgttctaatgcctgagtttagtcaaaatcaaataaaactgttggttcaacctgcataaccgggaatatgacatgatataa

SEQ ID NO: 47679 - DNA, 351 bp, Arabidopsis thaliana landsberg
  unsure (1)..(351): unsure at all n locations
gcatgacaccgctgacatgcagcaagagccgccgccccagttgcccacttgggtgttaacgcgcgaaatcctcggcggagaacccgcgcatgtcgagcactgtcaccgccagcgcatcgcccagcgccagcgccgtcgtggtgctggccgtgggcgacaggcccagcgggcaagcttcctggtcgacatgggcatcgagatggacatcggcctcgcgcgccagcgacnnnnnnnnnnnnnnnnnnnnnnnnnnnnnnnnnnnnnnnnnnnnnnnnnnnnnnnnnnnnntggccagcagcttcgcgctctcgccagaattggaaagcgcgaccaccacatcatcgcgcgtga

SEQ ID NO: 47680 - DNA, 538 bp, Arabidopsis thaliana landsberg
aaaatttaatttttcctaaaagaattttactttaaatatttaaaaagaagaagcatgttcatttttcaatatatctggtccccatattaaaacaagcaacaataattgacaatctctttctttcatcttcatcttattcttctttatctctctctctctctcaagactattgagcttctttcttttttcctgagtcttttagtctgatctcttacaagaatggcgttcgcaggaacaacccagaaatgcatggcatgtgacaaaacagtttatcttgtcgacaagttaaccgccgataaccgggtctaccacaaagcttgtttccgatgtcaccattgcaaaggaactctcaaggtttgatctttgattctagtttgtgatgatttctcattaatccagaagtagatctagtagatatatatgtagatgaagaagtcccatcaattaagtagaaatctttgaatttttggctatggaaactgattggtctaaagaatcgactgaactgttactctctttcttcttcttcctcttcttg

SEQ ID NO: 47681 - DNA, 687 bp, Arabidopsis thaliana landsberg
ttttacttatctctcaactatttgagttaaattctagtaccagtaacttgtagtctggatgtcaagctccaccatcaaacctacaaaagagaaactaatttgtataaaatgcatttgtaaggtacgaaactagccacacactcgtcaaactacatgatcataccacaatgtcgatagcaccgacaaacaaagaggactctccatttttcaggctacacttccttataatctttccaatgcctttttctccccaggcttcaccataagagttttggatgagccaatagtgctcaccttcgtcggttgtaccaaaactaacaactaacaccgcatgtcaacaaaaatacatatcttttggcttcctacctttgtatattccctaccattgttacattaagagaagcaaaagtcaattttagtatgttcagttaaattagctacaggggttaaattcaaacttactgatttatggtccataaagctttggtaagaatcagtcaataataccaagtataggacgctgatatactagcttaagcaagtcttcttccttgacatcctttttggtgatcacattaaattccttgatcttgtaaaaggagtcatcctgaagagtgaattgaaacaagatgatggatggagctaaatactgagctattaatagttgtgatctctagctagctatca

SEQ ID NO: 47682 - DNA, 889 bp, Arabidopsis thaliana landsberg
cgaaactccagtttttgagaattctagcactaataaaacagtctttgtcaaaatttaaatggtgacaacaaaatcagacaatatggaacattggctcaggtgtctaacacattattgactgatcatcacaagtatcttttacattctactattcctttctaagcaaaaaaaaaacacatgtacacaaagaaataacaatacctatgtacaacccaaaacaaggaaaataataaaaaggacaaaaagcgaaactaattcaaatatcaaaagtcttaaaaagaagaaaaaacgcaccaaaagctatataataaaacggtgaaagtggttgagacgtaagaaatcaatccaaaagcgtccgcgtttttctatctgtgccgtgttcctaactccgttaaaccactcgccatgtcatcacaacgacttttcaaatatacacacgcttctgggccccatatagccaactaaccaatcacgatccttgttttttctcgggactggaccccaccactcacagtaaaacgccgtacgtcacgccacgtcaaacttcaaccaacaaatccggtcttctccctgaagtaaaccgagtcatcccacctaaaccaggcagaaccggttcaccgccgtcaattgatctcctcgaaccggtactattcctctgcggcgaggatttcccgacgtctcccggcggaagccgtcctctaatatccgtcgatcttctcaccgaaactctcggcggagagactacgacatccctccgaggcgcgtgagctccactcgcagataagtctttgcaaccgccaccggttctgaaaatagctctgaagctagcgaaaaaaccaggcttcttaaccggaaccggtttatccttaaacgaattggttcgaccgga

SEQ ID NO: 47683 - DNA, 1072 bp, Arabidopsis thaliana landsberg
  unsure (1)..(1072): unsure at all n locations
ataaacacgtgaaagttaatacgaaagggtgagtagtatccacatcaagaattactactctctctttaaccaaatgagacaaattctgctgaggttatcccttttgtccactaccctacacacctccagagagtggaggtgtcatctcgtacctttttctgtagcgagctcttcggtctggtccagtccagaccaaccatcaggttcagatacagaactgtgggtccgtcctatgccgttgatgcgagccatgtgagattgtatcatgctattttctgtcaccaaaacaaaaaataatgtgtcaataagtaatgtttgtggccttttgacaatgtttgttgacactcatgtcaaagaaacctgatttgaatcgagtctcaaaataaagttggaagatttagaactaacataaacttaaaatagcaaagaaaaaactattatgacttcttataagtttccgatataattgagttgttagagaagatggagtttcattaaagcaatataagaaaaacaataaaattgtcaaacagactatatattcccggataggagatactacaatataatatttcagatttaggttgaatctatatcaaagaagggtaagaaagctcaataatgggagtcaaaaatgaactctagtgtcggctacataaagaaagttatacatgaaaacggtaatttgttttttgtttttttctttccataattcatatttagatagaattggctttacagattacaacacacaatacttagttgatttcctttctttaaatgtacaataaatcaaaaatgaattatttgtttttttgtgcgaaaaaataaattatttgtaagaaattcagtttagttatgtattggttagagattttttttaaatgctcatattttttttaagttttgttgtttattaaatatcaaaaaaaaatctctttattataatatttatttgaagacggtaacgcccttatttttttattaatttatttgttttttaaactgtaacgccaatccgttactcggagataaaagttcgaaacgtaattaaattntattagattttttc

SEQ ID NO: 47684 - DNA, 808 bp, Arabidopsis thaliana landsberg
  unsure (1)..(808): unsure at all n locations
tgaaaaaattataacatatttttatctttttaaaagcaataaaaaaagctcgaggatgggtaaagttttgcctctattattaaatatattgtagttattaaataaccataagcatatttaaccgtaatcgttgtaaccataactgtattcaactgtaatcttaaccgatggttaataaaccataaccgtggtcatgcctacgcctacgtcatagaagagaatgcaaattgcaaaagacaaaacaaaatcaaaacagaaagtgagaaatcaaaaagatattcaaatgaaaacatacaaaagaaagtctcaaattttccagcttttcttcttgatcatgccattgaaaatggtcatcaagaaaacatacttgagttgcttatacatatggaaacaacaacaacagattgatacacaacaacaaaaaaagaaagaaagaaagaacaataataagtttaggtagaggaagagcctccacctttggaagaggaagtgatacctctgcaaccagcaccttcatgccattcaagcatgatctcaatctcgccacattcgacattgttaagtctaaggatcaagtcttgtgtgatcttaccattgttccaaacaatgctactctcatcagataaacaattgtgccttgaatggttgaacccttttgatagcacacccattaggtagcctcaaaagctccatccccattttcaaagcctctaagtatggttgaatgtctatgttcgcatctcccattttgtcatctcctgtgaactngtcccaatcaaacactgtctgaacaatttcaacaaaaaac

SEQ ID NO: 47685 - DNA, 485 bp, Arabidopsis thaliana landsberg
aaaaaaaaagaaagaaaaaaaaaacaacaaaaaaaaaaaaacaaaaaagaaaaagagaaaaaaaacaaaaaaagaaaacaaaaaaaaaaaaaaaaaaaaaaaagacaaatacaagaaaaaaagagaaacaaaaaagaaaacaaagaaaaaacaagaacagaaaaaaacaaaaaaaaaaaaaaaaaacaaaaaaacaaacaaaaaaaaaaaaaaaaaaaaaaacaagaaaaaaacaaaaacaaaaaacaaaaaagaaacaaaacaaaaaaaaaaaaaaaaaacaaaaaaaaaaaaaaaaaaaaaaaaaaaaaacaaaaaaaaaaaacaaaaaaaaaagaaaaacaaagaaaaaaaaacaaaaaaaaaagacaaaaaaacaaaacaaaaaaaaaaaacgaaaaaaaaaaaaaaaaaaaaaaaaaaaaaaaaaaaaaaaaaaaaaactaaaaaaaaaaagaaaacagaaaaaaacaaaaacaaaacaa

SEQ ID NO: 47686 - DNA, 496 bp, Arabidopsis thaliana landsberg
gctgaaaagggacaaagcccagcccaacacaacggcgccattccgatctcagtgcagttgctgaactgcatccttgctgaagcccagggtgatgcctaacagggtttcaactgggcctctcaacttctcccaaaccaccagccaccgccaagccgcattacaaagaacgcgaaccgctgccagtccaaaccctacggccgccgccagcatcaagctccccgaccaaaccctactcgtaccccgccgccgccgcagccgcagccggcgcaacaccagcaagcagaactagcagccatgccgcccaaattggacccatctcaaggtggtggaggtcttcgtccggcgtgaacggaagcgaggtcggcgcggcgtcgtcgctggcccccaagatcgggcagctcggtctcttcccgaagaagatcggcgaggacatcgccaaggagactgccaaggattggaagggcttccgcgtcacggtcaagctcaccgtgcagaa

SEQ ID NO: 47687 - DNA, 581 bp, Arabidopsis thaliana landsberg
atggtgctttaatgagcggtttgaatccaacggataaagcgggcccggcaaacttggagcccttttttaccataaacgggctggccaccactttaaaaagcagataggcttttttcagctctttgtcggttttgcttttaaatgctatctcggtattgtcaaaagagatcatttggttttttctttctgagtattgcgtattgctatttgagtattgagcggtcttggtttccatcttattgtattcatttctatactaatctctcaatgctcaaatctattaataagccctttgtttttttccttccatgtagttcacaaaagatttattgaccacacgcatcccacctggtgtcggataatttcccgaaaaataccagtcaccatgattgttgggacatgccatgtggaggccgggaatactctgaaaaatgatctctacttttgatttacatccttcaggtgttacgagctgagcaattttattcgagatctgctcttcggtaaactggtcatacaactccttcactacgtttttgatttgggctttgggcttttgcagctcggcttttgctttccgg

SEQ ID NO: 47688 - DNA, 566 bp, Arabidopsis thaliana landsberg
catttcattgttgaaggagcagccgattgttttttatttgcagcacacctagcatccagatgtccccatttatcacagacagtgcatcttggaggcaaccatggataaacaaaatccacccaaaattccttatcattccgagtaaacttgatcttctttggtaactctttagacaaatcagcattgataaatacttttgccatatcaaaatttgaacatgctgctgtttctggatgtaaacgcaccggatgaccagctgcacttgtgatgaagctcaatccttcccaagaaaacatgttcatcggaacattcttaagaaaaacccatagcggaacagagtgatgctctgcttgctcatcctccacattaggagtccactttgttaccaccattggcacctctgcaatattccacatacctcttttgagaattcgagctcgaaccagagggttactaatccggaatcttagagttgtggaattaacttaataaacatcgatcttttgcgtatcaatccctgcttccaaattttgttgacaatgacatggactttagcacatgaggag

SEQ ID NO: 47689 - DNA, 538 bp, Arabidopsis thaliana landsberg
aggaggcgtggaaaatcgagatttgtttcgtcgcacgggatgcgatgaaacaaatccctcgaaccacgacatcgttttctgcgacccatgcaaaacgtccgaaacgccgggtgcttattgatcgccgcaacgagcagcgaacaaggctgccggcgtcgaacgcacgggagcctcagatgcgcacgttcagctttctattcgccttcgcggtgtttctggttggaccttgcatggcagggtcgtcggccgaacacgcggcacacatcggcaccttcagctacagcggcaccccggtcgcgggccccgcgaccgcgctggtgatggctgcgcggtgaactgtactagctaggctgcctcctcaattcccaccaccagtcgcttgccgagcaccagcaacgctgccgtcagcggtgccattttggtttcatgctttggatcgagcagccgccgcacgaccttctcgttcttgccaagccgttttgcgaattctgtcttggtgatcgcagccgcgctgaacgcctcatgcaaagccagcttg

SEQ ID NO: 47690 - DNA, 644 bp, Arabidopsis thaliana landsberg
taatgaagccataaaaaagagctgtggcatactcttttaacttcaaaagatatggttccatgaaggctaagtctttccctaaatgctttgagggatctaaccctattgccgcgacctgtaaaggttttacaaaccataattataagacgatgttgacgttaatagaagcaggaataatataacaacaatccttatctaccttgaccaaaatagctttgatcccatttgctatctgcaagtaaacgagaaacgagttaagtaaaacatatacgaaaaagaaaaataaaaaattgagattgaaataggcttgaatctagattttctcttatactgaaacagtttaccatgtcctgaagaagcaatgtctgatcttgtttccacaaaaatgccaaagaaacaaggcctaaccttgaacaaatactctccacacgcagtcgttggtagtctgatgcaatggcaccagacgatactgcagtgatggaaggtatctgtctcttcacttcacttaacaagacaaacatatcttccacttcatcatctggagtcatttggtagctaagtttctgatgcctgcaaataaaactcgtcagaaattgttcaaaaaatcaagccttgccttggaaagcctaaggattctcaccttg

SEQ ID NO: 47691 - DNA, 1113 bp, Arabidopsis thaliana landsberg
aatttactcttcattcttgaacttgaatcgttatgcgttccttaggttctttgatttcttgcctttgatgtttagtagttgtttaattgattcgtggtggattactgataaacatttacaaagagaacatgtggaaccaagtaaatggtatggtaaatacgacgcgccaacaagactaaacacatttttttttaaaagcctttacaactttattagatttggttcttactttaattaaactcgtatcacgacaaagtccaaactctactgtccttcttaatataactaaatccatattctaaataagtgttcgcagccaagttatggtgcacgtatggaatcgccacgagaacacggtttgcgtagtttgtcaaacattttcttaaaaagctttcatcgtttttcatttcttttagatttttcagtcttcaaaatagtgaatgcaagtgcaaagtgataagcgtgtgaaggggacagtgctaaacttgaataaaatggcgcagccttttaattttttgtatggttctcttttctcattgcatccaaatcgcatggtttatattcatattatgacattttattcttcttaaggataaagtgaatagattacaaacagatatagtttgcacagaaaacatcaaaatacaattcatgttctctatacaaaattacaaatacgtatttacatccaattttggcgacataataaatatgttttattcttagataaagagaatcaacttattgacaatgaaaataaaaatagagaatgagtagttttgtacggtatataaccaaaaagggacatattatatgatataaattattaagctataacaatcacaaaggaatgatttataaaagagaacgagtgatttttttatttatttttttggtcagcaatgaggccaaatgattattggaatgaaacatgagttcattgtatgtagaaaaataatttccttatacgcgatgtagacttttgtatcattctgctttgatcaaaatttgttttcgtcactcgtcagtctcattatgatcaacgagttttgaaacaaaacactaatttttctaaaatgcaatttttaaaagggtaattcaaacgaaacaaaa

SEQ ID NO: 47692 - DNA, 595 bp, Arabidopsis thaliana landsberg
gcatcgcgccaccaggtcattgtcccggccatcgatcagggtgcgcaggtcactgcactctttaatactatacgatcatgccgacattatgccggctcgaggctccattccgttgacctgccgggggcgtggacagacagcccaggcggcccgtgaaggactgcccatgaagaccccggataaccgcatgccattccatgctttccagcccgactaaggccctgctcacatgctcttacaaatggacctacaaactcccacaaaaagacactgacatgaccgtcggccccctttccctgctcttcgaagacaagcaacagctggccaaccgcctggccaaggatctggatgcgccttagctgcactggctgtccggctatctcgccggcctggccacgcaacatcttgcctgcaaggctgccagcgacaaaagcgcgccgtgcatggccagcgatgcgcaattgcgcctcaccgtgctgcacagaagccagaccggaaacgccaagcctgtggccgaacaactggcccagcgcgccaccgcagcagagctggacatgcgcctgctgcgagccgatgcctatccgctgcatgagct

SEQ ID NO: 47693 - DNA, 847 bp, Arabidopsis thaliana landsberg
gtctggaacgaatcgaatgtttaagactttgagtattagaaaattttttatcaaattaaaaattagctcatagtattggagccggctccgctaaaacacaatagagttacaaaccaatttaacattttttgaattttcttgcatagaaactctaaaaaacaaaaccagaagttcgcaagaacatattttttgcttccatgattgcaaaaaacttgaggtatgtgaatagaccgatgagcatatgtcttgatcaacactatcaagtttcaaacaaagaaaaggtaataatacttatcatggtgtgacaaaaacataggagcatcgtttggttttttagcgtttgcaatcatgattagcgcgtcttaaaaaatgacgaatgcgtcttattagatatggtttattaatgaaccaaaaaaataggtgcgtactgatatatcttaccggccctattgcaattttttaaaaagttagtatatagatcgttagcgttagttcttttgtgaagctacgtacgagatcatattgaataaaaacatgcatgcaattgagaaaattgtagcaaatagaaagactcagcttgctctttcacgtcttattggttacgttcctttcaatgaatagctagctaataagcattggtaagttaaaagaattgacctaatccacgttttaccaataaatgagattgcgacaccagtaaataatctgttcacaatttcactaataaacaaatagaagctagtgaccctaaaagtaaaagctttaataaagcatactcgaaatgtttttctcttttcctttttgggtcaacactgaagttgttttatgaaaaaacaattgggacaca

SEQ ID NO: 47694 - DNA, 1978 bp, Arabidopsis thaliana landsberg
ttctcgatcgatttttacgatcatgtgattgtttcgcgttatgggtttcttctgattgtgatttatgcttcgattttgttaactttttcggttttaggtttgttcttagaatttgctggaaaatatttatttttttgttcgttttagatcagtttggtttctctagggtttaggcttgatgggtgtgattgattgtttttgattatggtgtaaagattcaaaattgagtggtttttgtttttgttttggttacaggtttgacattggcaccactcgttgtgagagtaaatccaaatttgaatgttattctcacagcatgtatcactgtttatgtgggttgctttcgttcggtcaaggatactcctccaacggtaagacaaagacgcaatcagattgtttttttttattagtgaaacaattttccaaattcgatctaaattgtttctttggtttgaaatggtgtaggagacgatgtcaaaagaacatgccatgcgtttcccattggttgggagtgctatgcttctttcacttttcttattgttcaagtttctctcaaaggacttggttaatgctgtgctaacagcttacttctttgttcttgggattgtcgctctttcgtatgtcttatctaaatcatgccttttgttttcttatttgtttatctgtggtcaagtcatgacacggttatgtgtgtttgcagagcgacattgttaccagccatcagaagatttttaccaaatccttggaatgacaatcttatcgtctggcgttttccttatttcaagtgtacgtaactaagatttaccttcagtgttctttggtagccatttttctcattatataagttatgggtttgtttgttatcgtttgcttagtgctagtctttgaatacttatttggttgatgtaatgatcattcaagatcctaggtgtttgtctcattttcaaatctgtttttacttttcttactctatccagttattgttctatccttctggttgagatgtgcttattttctttgatgtctaacacctttttactaaacagctttggaggtagagttcacaaagtcccaagttgttgcgggaatccctggaacattcttctgtgcgtggtatgcgtggaaaaaacattggctggctaacaatatcctcggcctttccttctgcattcaggttacttcccttgcactttatgggaatacataaactctgaagcttcactgttataacataatatttaagtttaaagtgaactggagtcactgttgttgagtgtctctttttttactaattaatgccgttgccaatacagggaattgagatgctctctctcggatcattcaagactggtgccatccttttggtaagaactgcatcttttgaatgctattcttgaaaacttgtttggacttctagatgaaaagaaaattcgtttgaaaatgactcaatcattcggtgtttgttatgcttgacttgcaggcaggactatttttctatgatatcttctgggttttctttactccagttatggttagtgttgccaaatccttcgatgctccaattaaggttagtaaaaatgcctcaaaagtacacaccataccaaattgattctgatttgttcttagtcaatttttcagtaatctcattgttacatatttctttcagctcttattccctacgggtgatgctctaagaccctattctatgcttggtcttggtgacattgtcattccgggtatgttctctaatgcttaacccaatagctatattcagcttatggttatgcattcttgaatcatatttttggatatgatatgaatataagatattaattttttgttttcctttacgtattttcgttgcactagctctaagatttgatgtgtcaagacgtagacaaccacaatacttcacacgtgcatttatcggatacgctgttggtgtgatcctcacgattgtagtcatgaactggtttca

SEQ ID NO: 47695 - DNA, 1164 bp, Arabidopsis thaliana landsberg
  unsure (1)..(1164): unsure at all n locations
tatttgtctaaaacattttcaatatataaccaatcaaaaatgtaaccgaaaaattaaaaacgtttcaattatacattctttggacattaataagaaagatcatttatgtctaatactctaatcccaagtacgaatttgtttttttttcttacaatttaaactagaaatacaaaataaaaataaaataaagggtttttatttgtgagtcgaatgaaataacgaaaatacccctgatctcttttgtgcctgagattgatttcaaaacgctgcttcttcttcttctctgatctctcctcttcttcggatcgtcttttactttgtgaacgatggaccaacaaccggagaggcgagaaggccggagttttccggagcgtaaaggacagaagcggaagctagaggaaggagccgccgccgtagaagatcgagagatctctgccgtcagcaccgacggaggccaagcgcttcttagcgaggttgctgctcaagtctcggtactaaactctgccttctcttggcaagagtccgatcgcgctgctgccaagcgagccactcaagttctggctgagctagccaaaaacggtgaaaatcagcttccgatcttactcctttttctccggtttcttcatattttgttgcatgactagtgacctttgatgttcagcagaggatttagtgaacgtgattgtcgacggaggtgctgttccagctcttatgacgcatctacaggcgccaccatacaacgacggggacttggctgagaagccgtacgaacacgaagttgagaagggaagcgcttttgcgcttggtcttcttgctattaaggttgtgatcctcattttctctatgtcagctccttgtatagtgtgtttagcttgttagaaagtagtttccttttttgttttgttgatccaaatcaattttttttaaggcaaaattttggtaattgaactcttatacacggaggggattatgtattgtttgtgtgatcgtgttgtggaattgatttcttaacagccagagtatcagaaactgatagtagacaaaggtgccttacctcatttagtgaatttgttgaagagaaacanagatggttctagctctcgagctgtgaatagtgttatcagaagagcggctgatgccatcaccaatcttgctcatgagaac

SEQ ID NO: 47696 - DNA, 1929 bp, Arabidopsis thaliana landsberg
tcattattcgcgaaatttgtcaataaaaccacaccacactgcaagggacccgtcattgctctctcaaatacaacaatggtttggtttatatgtataagaacggatcagaatctttggcaaagatacgaaccaataagattccaacaaggtttcttcctctgttgttgttgttgttggattggtacgcgtgtaagatcttcgttcttgtgtaacaaattccacattatgtgtatgtcttcatactcgcaagaactcacgtcatgttgtaatctcaaaagtcctacaacacaaaagaacaatcatttagtgttttaaaaaaaaaacttaacaacgatttattagggttttattgaaacattcatagtaaagatttttccgcaagaccaacacgtataaagcaacaaaaccttcaaagacatttaattcttgatagctaaaaaagtttccaccgacagtttctatatatgatcaagaatcacaaaagaaagtgataaaaatctaaactaatctcgtaggaatacgaagatcaacttttattcgttttttgattgatgtgatgaaacagaggattcttagccctcggtgaaaaggagggtagaggatcagagcttaccgctgtgtcgaaacccgacgcgaacggtgaaacgattccagatacgccgggtggggaaggccatcgtgttccaccactctctccatctcaggccggccattagatgaaagtgtaggggaagagaagagagaggatgtagaaagggagaagaaacccaacccccaaaaactgacgttacaagcaataacttcaactaagtagataaagagagagagtcttattaaaataaaaaatattttaataggaaaagaaatatcagccgtatattctatgttttattcttaaaaacgtattgcgaatattgaatgtagtcgtgctaagacattttggtcctttcctcactgatggtgaaaacaaatctttttttttcttacattcttctggtttggtcgatttggttcggatagtgaagttttgtgatttgagttttggaaaataggtttcatataagatcaaaatttacttggatttggtgtgaaacatctttttgttcagattaggagtccgttagcttttagataaaaaaataaaaatagttacttctaggcagtaaataaaatattttaaaaaggttgtgattgattgttaattataatttgtaatgtaaataattgaatttagatataaaattaatctaagttctgttagaaactcattaatcatataatctaatcttttattttgctctgaataaaacatatttaggattaacacggaaatgtgcggtacaactgtaaaaaaattatgatacgtttttaataataataaaaatatatatttatatatatgtaaacatttgtcttaatttgagtatggaagtattatgacaaataacataaattattctatttttttttatcttcatatttttttttctaaaaaataccaatcatataaatggaaatatttttgatattaatttaattatcagtcgagttataatagaaattagattggattgaaatgggatgatgaaatttaattcaatttagaaaaaaaaaaaaaaaaaaaaattggttcaatttaaatcggttcggttcaattataatggtaacaacacaaaaagtagagttttcgactttcgatttgcgaaggaggagaataaaggaaaatcacttagctgcgtcttttgcctttcggcatgctgacgtcataccaattagatttgagccacgtatgataagattcagtgtgggtcccacttgtcgagtgccgttgtatacgacgaacactattacattgtcggtagctcctagttgcctccacgtgtaaatttcctgatggctttcatgaaatcaaattgggtttttagtcat

SEQ ID NO: 47697 - DNA, 468 bp, Arabidopsis thaliana landsberg
cttttatgtttacaaaaaataatgtctatctgtttactgtaactattaattcattttttaactccacgtatcatccaaatattttgctaaaagtccctttttgattttttttatttcactgggatttagtggcagtgtattttctagtatggcaagacggtggtatcctttaattatttcgtgtggtagataaaattattgtttaaaatgttaacaattttttgcattttcctcgtcttataaatgtatatatttttaaataactgtctaccttaactatctagactagatttgtcgactaacatgattatatgtttaaaatattcatttatatttctaaataatggagatgcagttctacgtcgtcgcaaaaactgcaattcagtgggatggacataatactcgtggcgtcactcgccgttgagccacatatacgcctacgacgccggcccggtagctaacctatac

SEQ ID NO: 47698 - DNA, 462 bp, Arabidopsis thaliana landsberg
cacacgacgcgctacaggccctatgctggacaacgtcagtccgcttgaacttgaggtccctcctgctatcgattcctttggcccctttcaagtttgcattgaagttgtttgacgtaatgcctctgaattctgagaaggcgcttcaaggcggcacacagtctcatcgggctagcacacagtctcatcgggctcccttgtgttctcgatcgtccggggcacctgcctctccggcggctgcaaacacccgaagcaatcagaaccaaaccaaaaactacaaaactctacaggtggagtggacagttcgaagagcgctggcttgcctgctccccgagctcctcggcgcggcaacggcctggccgcagtcgcggcgagcgagtcattcgtgggccttcttctctcgcttaagcttgccatgcacctcacgacgcttgtccttgttcttaatctacgacggcagtgtca

SEQ ID NO: 47699 - DNA, 1311 bp, Arabidopsis thaliana landsberg
ggctagtctgattttaaaaggtgggccaatgattgagtataatataataattataaggggggcctaatgtgctgtgtattgtttcatgtttacccgagtataatatagtaataattatgaggtgggcctaatgggccgtatatttgattaatgtttatcggaaacaaggataagattatctctatatccaaacaaggtcaatgtcctctaccgtcttcctcctggttccggctttcttcggacttttcgtcgtcgtctctcgaacgcgtcactcttatagtcggttttgtcgtcgtcagtaatttgcgatttttgaaggttaacgagaaaaatgtcagactctgataatctacagcttccaccatcatcgacaggtgagaccttcttcttcttcttcttctttcgcttattcaaatttccgagctacgttcttctttagtgttttcgcgagacgtttttttttgtaaaagtcggtctcgtacaagtttcgataggatttttgttgggagggatttcgaattttttttattggtagagagttcttagggtttagaggagattgatcagatcatgaaaatttgggatgctcatctttatcatctgtattttgttaattctaggggcaacagttgcagctactgatgttggttggtacattcttggtgaaaatcagcagaacctgggcccttatactttctctgagctatgtggtaagtgttcatgttaacagattccttgttctagtaaggtttataagaaatacgagctattaagcgctgtactttacttgtttgctttgattgggcagaccatttcaggaatggttacctactagaaactactctagtctgggctgacggaagaagcgaatggcagccactttctgccatccccgagttaatgtcaaggatatccggagctgagattgcctatccagctgtaggtaggatccttttcaccattgctagataattgaattcttggcattttttctaagtatcccatattcggggcaattactatctggtatctgaccaggtgcagctgggttgataaatggatctaatgctggaaccaggggagagaagcaaggttatactgcttagttatttatatagaaaatgaattcttcaatgttataatttgcaaaagtgtggacgatgcttaccacagtatgttgttattgtagcctctgctagtactgaggatgaatttgagaaatggcagagagagattaaagacgcataagcagaggctgaagggtgaaaaatggttctgtctctgtactgagcttgttgagatgatcatgaa

SEQ ID NO: 47700 - DNA, 796 bp, Arabidopsis thaliana landsberg
  unsure (1)..(796): unsure at all n locations
agtgtaatcagcatccggtttagttgaaataggtcattttgctacgaaaataggttaagtttagttatgataggttcgaaagtcgaaactaaagaaggcttctctcctaactgccgatagaacaaatgaagttgattattggctttctttcccaactaactctctgttttattttattttcctactaaactttaccagcaattattttggtttttgcttacagattttttttttttgaagaaatgttctaattagtcccacggaacattcaatgtaactgattctgtttttagtcctgaatgtccgaaacctataaagttccgttttggacaagagagacgtgcttggagaccaaatatttgaccaccttttttatttgttnnnnnnnnnnnnnnnnnnnnnnnnnnnnntaaaatttttgctaatatatttcatcacttgattcaattgtatacaccttctattttatttacagtttataagaaaatacccatagtaaaattgcaaagaaaaagttagttgtattgtctccactttggacgatatattcctaattaaggcttagaaaaaacgttgattaggtctgaaaatatttatctttaattattatggacgatatttgatacatgaaataaatttttgtcagtgtaggatatcgatatttattatatgtgaatacgtagcttgccaagattacagaaacgtagatgagtattggtggcttgaagtagcgggtgtaggttagaacttagaaactacaaaccttaaattaatacctatacgagagacgttgaga

SEQ ID NO: 47701 - DNA, 863 bp, Arabidopsis thaliana landsberg
  unsure (1)..(863): unsure at all n locations
tttgcccggctagtcgtctaattctaaaatagccaatttacatttgcaattgttttttcaaaaaaatacaacagtaagaggtcttatcaattaaatcataagaaaaatatgtcccaaaatgtcaaaaaaccaactacgaatatttcttttccttttaaggccaacccaggttttggaatacttattacaaataaactcaatttcaataaattcttgtacacaaattaagcactaatttcattgtgaagataccatagtcacattcacatctatatgacatcaatctataaaatccaaaacaaactatatattatatttatattatttttttgtcatcattatatttccattaattaatctaattctggttctaatatactcttggtcagaaaaaatataaacattgaagaattggtcggctgaaaattgtgaaaaatatatagcagaaaaatatgataatgttatcataaacaaaattaatagtaaaatttaattttaatttaacactacagtactatacacgtgtgtatgtatagctctataagtatttactctctttcagctatttattttttcagtgaacgagcattcttcttcttcctctgtgttgttgcttcttagatatattcaaataaaatgacgactgtaatcgacgcgacgatggcgtatagatttctggaggnnnnnnnnnnnnnnnnnnnnnnnnnnaaactagaatctagccctgtcgacgccgttctcttcgtcggaatgtctctggtactcggtattgcttctaggcacttgcttcgtggaactagggttccttacactgtcgctcttctcgttatcggaaatgctcttggatctcttcgttcgtttcg

SEQ ID NO: 47702 - DNA, 627 bp, Arabidopsis thaliana landsberg
aaaatgtggtgtttaaatataaattttaatatatattttgagtgaaacacaaatccaatttggttttaggatcataaccttaatgtaagattcttaagagatgatggatcatttagtccactaattttgtcgtatatctttacgattatggattgttaaacccattaacccttaatttctttaccaaattataatttttaaaccaattagtatatatgtttggttctacttgaatactgataacactaaaggtgaacataattcttccaacataagcctctcagtattgagatatagatgtgttgatatattgacataagataggcttgatctgcaactcttgactatgtggggcttaactcttctactgaattttttttctttgttacagaacaattcgatgccgtttaataaatatgcatttttgacgacccacaattcatatgccattgaagggaaagcgcttcatgtggcgacccaagaagatactatagttcaacaactcaacgtgcgttttattaatcaatagacaaaaaatatatgttacttcattattattatttttctatcttgtgaatgttatgtttttgttcagagtggtgttcgagcattgatgttggatacgta

SEQ ID NO: 47703 - DNA, 869 bp, Arabidopsis thaliana landsberg
gcaaaaacctcatgttatatatatctgcataaaatgcagtaaaccaaagtgtaacaactaacaacacactcaataatacctgaagattgtagtgttactccactcggaatatggtggatacaaaccatattctcagctattttgtgatcctcttttgcaggatacgatacaatcaaatcaccttcctttacttcaaaatcaggagatgctctcaagaatagtggtatgatatcaacagtcgctgaacattcctggcgcaaagaaaacctcttttaattctttcccgggccatgataatggacacgaaagtgattagttacgagaaagagagttataacttataatgtatacctcattagaagtggaacttatgataaggcggtgcacacctcgctcacctaagagataaccataagcaaactcgaattcaaactctatcgtggctgaacttacgccacttttattactcaataaactacatttctcagccacccgcgcgttttggcctagcctttctgcccatttgatatacatacttacaacttgctctgtccatatctgcaaatcctcaaaatatgtttaagaacaaacagaaactaagttacaagcaaagagttggaaactgtaagtgccttgagaatgatgaaactgacctgagattttgcgcctggagatccagatttgataatcatacaagcgccttcagcgtcatattgatccctaagaaagctagacatctcatagtgatgcaacgatctacttacatcgagtgatgaatcactaggctgctcaaagagaccgtaatctatagcatccatctcacccaattgtatgatcagcttagcttcttcagcctaaataacaaaaca

SEQ ID NO: 47704 - DNA, 849 bp, Arabidopsis thaliana landsberg
tgtttatttcccttaagggttgttgtttgtcggttcaaggattctgctaccaaaagaggtttaaacagtagtgttaaaatggtctatgtgtagctcgaaaatgggggaaactttcactcttccttctgaatttgatttgctacgtctttgttatcaagaattgtaacattcttttcctttgaggtttatgaatttggagttataagaagcttagtagaaacctaaatatctctgaaactgtcaaatatcttcactaatttgaaaatcttattctgaaaactgacactagtctaataaacataattgatagttttctatatattagaatctataatcgttatggtgcaagggaaacatagttgattgttaataaaacaatttagggggacttgagaaacattaacattcgtatttgtgtgactgggtcatagtcttactgaacacaaaaccagaataaggtttttggattgtttcagtttcttgttgggaaggcccatttttgattagtcaacgaccagattgaccagcgatgacgtcgacttctctgttttgttttcaaacttaaagaccctcgcggcatttgatttcgatttccgattagggttcctcgcagatcctccttcctcggttgtaacaaggtaatgtctctaacacaaacttttgaatccattgatctctcgcttcctttctgatttgacaaaagatgatcgttaaaatccatgttcggattctgaattcctctctgagaaatgagaatctcatagattgtttgtataaaatttgatcctgcttctggattcagatagagaagaagatgaatatggaagtggatacagtaacaaggaagcc

SEQ ID NO: 47705 - DNA, 179 bp, Arabidopsis thaliana landsberg
gacgacttttcaaattaacccaattgtaaaaactaaaccttatatctctttaaccttttataaatatcattgaacaaaacaaatatgtaaccgcttttgacaatgattattcattacctattccaagactattaaaatatttttctacaagttaatccacaatgttttacacccaccat

SEQ ID NO: 47706 - DNA, 498 bp, Arabidopsis thaliana landsberg
taacacgaaaatctgatataacataaatgatcatacttttaatcttaaatcgaagagaaaagctcacattataatgttcaactagttcccgtagctcctcctttcggctagatatttttcttcctgcacaacacaattaagaagaaaacctcttaactcaattacttgatttatacaatgacataacaagtaagtagatatacaaatcaagcagaagcacaaagccacaaactacgaagataacatcaaagaatttgtttaccttgatgatccttgagaaccgttaaactagtggaatcagagatcctgcgttcaataatcagagtatcaccatatatttcaggcttgaaagcatcctctccttggtttttcagttcgacataaacaagggcatagctgcaaaaaaaaaacccaaatagattgaagaaagttatgtcatttctgcaatttatctcatggagaagcaaatgtgcgcaaacctgcatccagttttaatga

SEQ ID NO: 47707 - DNA, 260 bp, Arabidopsis thaliana landsberg
gaactgcacaactgatgttggcacatcaagagcaatcatatgctggcagtactggaaatagctcaagagcaatgtatgttggctgatgaagaaaggtaaatgtgttagaaaccagtaagagctaaaattagataagctgggcagaatatcactttatgttgtattataagaaagtaaaaatacaactaagggaacttagaattgtaccgccctctcaaggattctgatgacaacaaccttagaattgccatatcaagttt

SEQ ID NO: 47708 - DNA, 779 bp, Arabidopsis thaliana landsberg
ctgtcgcgaaaaaaacaatgacttttcgagtgaaggtattttatttccttatctcttgccgtatcgaataaatggatggtaccattagaaaaacttcacaaagagtgaatcttcaccgtcatatcagcaaattgcatcgaaatattctcacacaaaaagatttctatatattattcgtttttgaatcgtcaacaaatggaaatggcatgtaagagtagttcatggattaatgggccgaggcccaaagctctgaaacgaggagcaagacgataactatttcgacaaccattttttgggatatggagaagtgagaagatgtataacagtataaggtattccgtatataaggaaactaaaagaatctcagaggattttactaaggaaattaaaaattcatagatctcttatatattaccattcagatattgatatagaaataacaaaacatttttaaactaaatcgatggattcatcttccagtcacatgatatgcctacccttttaatagattgtaagattagagtatatattttatgcttatttgaaagtgtttactaaatcttatatatgtctttaagtgcagatatgtctcttgaaaatagaatctcctatgtcgggatggaataaatttttggaaatggtctcatattctatcactcttctcgtgtaatttacaatttgatcctattattattattcactcttttctaaattcataatgactttgttgctgtttctatgcatataatataagtatataacatatatgactctcatga

SEQ ID NO: 47709 - DNA, 618 bp, Arabidopsis thaliana landsberg
tcgtcgtacgggtgatcgctacttttgttggtatacctgatctaacgcatgcgtgtaaatctatttaaagacctatacatagtttcgtaggtttcacgtaatgtcttcaatggttgaactaaatagtgttactcataatcacctatccatttgcaccagatgaaagagacgtattcattttcttttcccgcttaaaattatatattgaattgatctaaataaccgattcaccaattgtatatcttagtagcggaaattgggccactattgggcctaataaccattctaacttttacggatccgacttagcccaaacacatcgccggttcagaacgctgccgtaaatcgctgcatcggaaaaagcacgatgatactaaaaaccatgagactgtcttctcttccgattaacactctcataaatctcccaaaatctctctttctaatttctccttttcgcttccgtaaccctaatcgttcccttaccgtcgcgtctcgcatttcatcaacgcttcttcgcgtttccggtgtctcgtctcgtccgtgtggttactggttctcgacgaacgcggcgatgacgaatgttggagaggaaagattagcatcgattccttcaatcga

SEQ ID NO: 47710 - DNA, 667 bp, Arabidopsis thaliana landsberg
ccgccttctccgaccgtaatcagccgtcacctgccggtttagttacaataacaatttagtatttatttgaattctttctctcatcgaagtctaaggaagatggagcgaggagctttagtgggttcttcttctacttctagctactatgttccttaccactttcgccaatcaaagtcgaatttttcgtcattcaaaccaaaaaataagctaaaccctactcaattccggtttaactgttcatggtttaagccggttagttctataacggcggcgaaatgcaatatgtttgactacgcggtgactgcagccggcgatgtggaggctgagcatccagttgacgacaaacagtttgtgcgttggttccgtgaagcatggccttatctttgggctcaccgtggctgcacattcgtcgttattatctccggcgagatcatcgccggctcttcttgtgatgccattttgaaggtaccgtctttcttcaccgtattatatactttgatttatgagaaaaaagcacgcaaggtgttcgattgtttgcttgcctcaactaaagttgttactattcttattttgctatgttatatgatcttttctttgcaatgtgcttgagttttcagttctcgtatttgagtagaaagtgaagtgatttgatatatgtgcaggacat

SEQ ID NO: 47711 - DNA, 714 bp, Arabidopsis thaliana landsberg
cagattaataatctattacaatcctacatagtcgttttcgcatactgatatcatttctcattttctcaatctctacctgtcccagagggcgtggctattaaagctcctagctattgcactgcatactggttctggaagcagttcagctcacctagaggcatgtcagagcatactttctcatctttttgggcgggaggtaactgaagcagcgattgaacctttttcttccagtacatatcctcaggatggtcttgattatgctggaactagttcaatcagtaaaagtaaggtgagtttggaaacacctgcgttttatgctctactatactttggcacatcctagttttatccctacccctgccggtgttttgcatgtgtagcattggtctaagagtctaccattttatttttgaggcgatccatgcatgatacaaataactgtactgaccccactctttctaaactcaccagcatgttgccttgcagggtgatgtgcaccatctcttaacagtttgacatttattgaacagcagtatttaaaatattaagatgtctcctttttcatgcagcagcattttctttcactgtaaatctaacgatgttgcacctgtcatcatttcttgtctagttttaagtcgttttatgggtgctgctgtcttacttttgtttcttctttcgattgagttcaggcattggctttgcttgaaattcttc

SEQ ID NO: 47712 - DNA, 2101 bp, Arabidopsis thaliana landsberg
accgtgttcattttttgtcgttttctaaaagctgcttagttccgacgaatcctccgcacaaattcaccggcgattagcgaaatttcgagaatcgcggcgactagaagtacaaggatagtgatacgaagatgactaaagcagtagatggactcacatttccgatgtcgagagtatcggagtcagcttctcgacttaaaaccatcatttccgatatgcttcctcgctttactgacgattactccgacgacctctctgttcgtcatcttcttctttttattttcatcttcctctttgttctagagacgattcttaggtgtttagttcgatttccttggtttttacttgtgagctcttgtacgcactcttctctgctcgcagaagtaacattatcttcgtcgtctctctaatttatgtgaattttacccgatggatttgatattggcgcttctcacctactttttcccttatcgttttgattgttcgatgcaaattatcatcgattatcgtttagcagctcttgtagaggttatgttgcataatgattttggaaaatctgagttacaggatccgtaatagggctatgtgtatgtaatcactttgtgtggactggtttcatcttgttgaattgtaaaattgatccgcgggagcagaaattgcaggttgatgagtgtttttgtgtgaagatcacgtaagtttgtgtttactgatgaatcagcttgtttcaggagtatgttacggtgcttgtttgtaatggaaagagtcagagacaggcaagcgaagatttggaggcatttcttaaggagcaatcttggaaatttgttgtctggtttgatatttgcatcccctctttgttggcttgatacaggtattggtgacttatatgacgattttgataggtgtttttattttcagcttgtgggagcttctagtgaagtacttctctcaaagtaattctgcttctggacctaagactgatgttgactttggctctaatgatactctaatcaaacaaggtttaagctccagaaagtatgatgattatgattgcaaagctgccgatggtactaattcgatgaatgtaagactacgacatctgcttctttcatatgtgtgtatgatgcaccagtttttttggtcatggtcttaatgtgaatggctttgcaggaacagctgatatcagttactgctcccatagatgacattgaggctcctgtatcaccaaaagttgaaaaaatgaagatgtcacgacaagagctcattgatagcccttgtacaagggcacggcgaagaaagaaagaaaattggaactcgtctggttactctagaaaagtactgcgctctgtcattgtttcagccactcagcaaccatgtgataggaatcctgctaaatatgaaaaggttggaaggttaataatttctggttctgaattggtttatcaattgtttatgcaatttccatctcttaattgatccttgcacatatgtgaagcagtctatgaatgaaaggagtagaaccctaaagaagcgcccatactcaccagaaagagaattggattctcggtttgctccttcaggtactattttgcttcttgacaagttatgatcttctgaatatatgacgagtgacattttgcactaataaaaacgtctcaggaagagctgtgtctgcaagataccatgatgcatctctacaccaagaaacggagcctcatgttagtgtttgggatcgtttgggccgagcaagctccgaatgtgttcttgacacagaaagccgtacattgtctaagtttggtatccagacacgtgaaacaaaagtgcatcagcagcatggaccagtatttcctgcagcgtatagtgaacaacatagcgagatatttcaaagagaagttcttgcagttggttacaggcacagagttccccaattcgataaagataggaaacccaagagtgaaactatcacatccactgaaccgcatattgcatataacctcagcagaaagagacgttatggcatggtcagccccaattcaggagagtttagctgtgttccccaaaataaaaaagctgaacaagattttaaaagccaagcctgctctgcctt

SEQ ID NO: 47713 - DNA, 494 bp, Arabidopsis thaliana landsberg
aacttcattttggtgctatactgtcgccgtcctttgttcgtgtcccctcccgacgctatcccccagcgattacgtgaattataggggggctctatggatattgttcgtctcctttccttcccttaccttattattcggcctaccttgtcccggggtccctatttccactgcgggggtccttcaggcctctttcatccagccttcctgttcccttgccattcacatacttttttatgaactgatataacttccccagccgggctcttctttcgagctcatctttgagttgcaagcactctatttgggttgggtgtgaccggactttctttatattcacaatacttgctcgcttctcttatttcatgcacttccaacggcctcggtcgtcgaagatcaaagtcgcttctatgctgaattcttctccaaattgaatcccggttgaattcggtgtatgcgggaaatcgtcgccgatactctgtggggctatccggttt

SEQ ID NO: 47714 - DNA, 515 bp, Arabidopsis thaliana landsberg
acgacaaaaaaaggggggaaatagaacgaaaaacgaccggccctttccctatcagaatttgaatgaacagatccagctacatttttggccatatcctacaaaccctacaggtggaacatgctccaacatatatctcttgcgcctctcaaaatgtcacgacagtaactcatgcacacgcagctggtatccgcgtgcctggatcaggccacaggcatttgcatggcctctggcgtttgcgcacacaacaacaagaccgtcttccacagatgttgataaggggggtggtcgggtggatcagtagctgtttggccacatctggttagcctgagcagcaccacttaggttactatcgctaggatttcggtgttcggggcccaggcctggcatgtgactgccctagagcagagcgatattgtgaaggtaggtggccatgcgaacgcggtcgtgatgactctgcccttgatagccatacatggtactggctgcaagtgggggcatcatcgtaaccagctcat

SEQ ID NO: 47715 - DNA, 1599 bp, Arabidopsis thaliana landsberg
ttacgattattggattctaacgtttttttcttctttaggtaaaatgaggattttaatgttgagaaagtaagcttcggatttatcatgtaatcgtgatgatatgacattcgatgacttggtagatatgtataatcctcgacgtctttgttgtgcatatagcatggtttataggggctcattaaacagggtgtagatttatacatttaccataagtttgaaaaattacaactccacgtcaaagagaaaataaagaaaataataagaattcaacaaaaactttccctagtaacctcatcattggaagtgtgtcagtagcatttaaattatcctttcaaggcaaatctccaaacttttctacgcgatttaactatgcgcgtgactcccaaatttcctttctcgtttattatgtaggtcaaagttgcttttatcttgtaatttttttcttatgttcggtcaattcactaaaactccagtaattatttatctgtagtgtagcgtatgattattattctgcaaactctgcgtaatagagactttttaaaaaacaaatgcagtagtccaaacctactttctagaaagaaaaagaaaaaatgttctttagtttccctcctaaacggtgaaaagtctctttgtcgcaatttgtttacacatatcctgataaaactgtttattgggctttatgttgggctcgtttattcagcaggtctgaacctcaaaactatattataaagtctaagcccaaaaggctttaaatatggtatcaacaacatatgcttatgctatgcatcattttcgcaaactatggtgttgtatgaattagtgggttgttcaagatgttttttcttaagcgaaaacctatttatacagtttgcaatggatataagcttttgcaaagtctacaaaaatcacatgtatctttggaaaagtatccatgcttagatatttcatatttctgatccaattatccaaacaaacatgtcaacagataaaattaaaaaaaagctaatcttttcaaaatatacaagtcaaactgtcagaatataacaatttagactagttgataaaaatatatttttgaataagaacattttagattaaattttggtaccataaaatgtttgatagaacgacgaaaccattttgacatagtaacggcaatctcggggaagaagaagaagcggtagagagaaaaccgatgctcacagcgtttgcaagtcacgcgcgttctcacgttttcgcgtttgttaccgtcccaacaatcacgcgccgcctccgtataaatatcttacgccaatcacctctctcctcttctcttctcctaaacgaaaccttctccaatcgacccaattctgtttctcgtcgttgttattgttcgagctctgcgataatgggttcttcttcggtgtttggcgagcaattacagtatcctgcgactcggcgtgatgattccgtcgtcgatgactatcacggcgtcaagatcggagatccgtaccgttggtaagagttcgtttccagctgcaatttctcttattatgcttttaggtttccggatgagacgatatttccaaatgagattttgaacacatcgctctgaggaat

SEQ ID NO: 47716 - DNA, 118 bp, Arabidopsis thaliana landsberg
aatcgagacttgtgaccaaaaaacggggttgcacccaggatacgattcaaggaggaagggtggtttcattttaagcagaggtatttgacttgctgggaatctcacagtgaaagaacaa

SEQ ID NO: 47717 - DNA, 509 bp, Arabidopsis thaliana landsberg
  unsure (1)..(509): unsure at all n locations
cnnnnnnnnnnnnnnnnnnnnnnnnnnnnnnnnnnnnnnnnnnnnnnnctactcccaaatcaaaaccagaaaacctgacttaactttttttttttgcattttgacattggaaggatggggagttaccagtgcttcctttatcggtttatggagctgtagcaatggcgcacagcgaaaactcagaagaatactcttctccttaccaattcttcttctacctatacgataaaagaaacgtaagcatcactccaaacttccttagcttgattccatttttgaaactaagaagcttgctcttaatcttgtttgtattttcctgcagtctggcttaggaggattatcctttgacgaaggacagttcttagtcttcggggattggttttaaaacttttcttattcggacgttcagaacttgcaagttgcatttgaattgatgggtgctcttgtgtgctccaaaatctgcagatacacaatagcaggaaaagatattctcgggcagatcaagactg

SEQ ID NO: 47718 - DNA, 517 bp, Arabidopsis thaliana landsberg
atggtccgcggggccacttcacagagatccatcaccaaagctcccattcctattttttactcattgccgagcgtgcagccgtgaagaatagcgctgtgacccacggtcacccgatcgccgatcgtcgtgccgcacttctgatacgtgccgtggacgacggtgccgtcttgcacgttggagtctttaccgattttgatgggaaaaacgtcaccgcgaagaacgacgttgtaccaaatggaggagttctcaccaatggtgacgtcgccgatgatttgcgcgctcgaagctaggaatgtgttgggatgaatgactggctttcggttctctaacgaaatcaggtgtgccatgtcacattaaatacttttgtcgcccgtctgtccacttctgattgactataaagttttcattattcgccgagccgaccttgctgttttcaatataagcgcggctcgcataaaacggcagtttggcttcgagggacatgcctaaaacgttgtccaaatcctgttccaaaact

SEQ ID NO: 47719 - DNA, 701 bp, Arabidopsis thaliana landsberg
tataaacattaaactttcgtgtcgtaagaaagtcacataatactgtagttacaatattaatcttaccaaaaacgtagaatgaaatcgaagtttcataaacaattatacatgtatgaaaaagtatatgatctactatatatataaatcgaactttgacggatgtatcacaaaattaatgatatcaaatatctaaagaagttgattactattaataagtcgaattggttgattagaattaaataaggtcatgtgaagtgttgatatttctctcataaaggtcccacattggcacaattccataaccaaaatcttgagcaataataacgttactatcaaattgggttcagaaacatgatacataccagaatttagtagagcaccgacttcggccaaaaaaaagtagattcaccgacaaaagctcagttctcagatcaaactgaaccaagaatcaaaatccggtttactctgaccgagtactcaaaattggtttggtaaaaattacaggcctcactgttgtaaataaattatagcagagccagagggtagattaggacaacttacctcaaaagctggaatcagaaaccgggttctgaaccaagcttttgttaaccggagaattcaaccatttggatcccgcgtcccgcaacaactatttggtatcggtttctgcagatagatcaagtatacagatttggtatgtg

SEQ ID NO: 47720 - DNA, 1209 bp, Arabidopsis thaliana landsberg
agattaccacacagactacttagaaaaaataacttcatgcatgatccatgctgctaagatgatagagtgaaacccaatttcttttatgcaaatttcaccactttactttcacatatacaaatacgtgttttgatataggcatgtacgtgaatacgatgaataatactacagaaaagatgatagattattgaaaaaatgtgtacgtgaataagcccaaaaagagatttgatgaaaaagagccaataagcacaaacaggcggttacaaagtgagagagagagattgtggagtaggagtcagtgattctagtgggttcctcctctttttctgctctctttcttctatttttattttatggactaaattacaaactctcatttaattttcttctcgctcaatttttttttctacctagagaagtcgatagttttcttaataatctacctccattttcttgtgatcggtccaattaatcttatatccaatcatcttatttatcttctacatattggataaggctcttttattctttaccaaagataaagctccattctttttcttaacaaggataaagctcttttaattaagcactcttagacttttgattttctgtttaacttctacatttcaggtttgtgtatgaatagagatcgtccactccatctgatcaattgccaagtactagcttcacccttgacagctataaagttagtcaactaaattttcaattttctgtacaacttttttgaacccaatattattatttggaaaacaaaaaaaaatgcaacacataaatatagcctggagacaaagtctaggaaggacaagatcttcgtctgatttaccatgaaaaattatcaatatttctttattgttttcttcaataaaattttgaaatttagcaagtggaatttgtgtttactatggaaatagatagagaaaggtggtgaaaaggagagagtgatgatgaatcacaaaggtttcttcacatacaagtatagagagaatagtaataaagagagaaagagtaatgatactatacattagtcaattactaatactttattatcatttctctatccaactacaaatatatacacgcccacataattttgtatatgtattctcggaaagagaaaagattggaccctcttttgtttttctgttcagccataaaaaagcctttgacgagaaagcttccattctactt

SEQ ID NO: 47721 - DNA, 947 bp, Arabidopsis thaliana landsberg
tatatatatatcattttcaagtttagacggagtacaatcttctataagaaaatattttaaattgtcagtattataattagaaaataaattatcttcaatatgtacaaaagtttcatattgaattatctctgttgttcaactatatatcacacaataatcacttaaaataaagaacgtaaattacgtataattaaatgtctaagataaaaatggaatataaaaatgtaaaaatgcttacctatctagttttattaatgtaagaaaacatatttgtcttgctctatcagcttgcaaagttgcttgttacatcgaatgaattgttttcaaatcaaatattccaaccaattttttatttgtttttatgatgataatgatcttttcttataactaaactcatgtcacttttcataatataaatactcattttctcattctctcatcctcttttactatatttcctctggtacccgaagtcaacttaaaaatattctgatatatataataatttttcgtaccaaaaagagtggaacccgaggtacataggaactaatctttgtaatacttgattatttggcgctaaatatacatgatcattttttattcctgtggtttgtagaataatgaacccaaatccggatgaactttatcagaccaaaactaaattttatatcctagaacaaaagtctaaaaaattatatgtctcattatcttatgtttataatatctaaaatattttgaatcatttggtgcttaattcgcaaccggttgtaagctttttttgcagttgttgttttctccttattaatagatttgctggtttatttttctcacgggatataagccagtcagccactctattgaacctttgcattaaaaaatggataccatcaataatcatgtcaaactcttaataaatttaattaattattgctaactacttcaaaaaa

SEQ ID NO: 47722 - DNA, 602 bp, Arabidopsis thaliana landsberg
tattacagtaacgacattcgatacacacacttcgaagatagagtggaagactttacaaacatactttatatttccaaaactcatgttttataacataaaaagagttataattattacaagtcctgatatactcaaagtgcataacttattaccatagcaggaaggtagaacccttccaaagttcacacataaacctaactaatcctgcttcaggactggtttgtgttctagtatccttcgggtctcctgttgcttgtaaacccgactgattgaacgctaccgcactacgtcgacgggaatagcttaaccgatcctcggtgttcgatgtcattgtggacggcggggattcctggtcagattagctcaattagtacatggattaggatcgtcttggaccggggatgatgatctgatgcttgggttcgacggtcatcgccgtttcaagcgagtcccagcaaggggtggccggcgggcgagcgcgctgtcgtcgaggacctagcaccgcgaagaaatagaagtaggagggcttaggtgaactatcagtgagacgtgtaaatagtaccgcagactcttaccgattattcaaatagccaaggactttt

SEQ ID NO: 47723 - DNA, 289 bp, Arabidopsis thaliana landsberg
ttctctaactcctctctccaatactccaatccaaatctctccatcaattccccatacccaatccctccttttgattgcttcaaatgtccacaatcaaaacccataatcgcaaacgtcgtcgagaatctcaagtacccttttgtttactctctcgctgatctcggtaatctcccggagaaaccacataagaacattgttaggctacttaaaggtaagccctttaggaaaccagatatctccgcaacgattcaggaggtattggatagtatgagagctagcggtaaaaatg

SEQ ID NO: 47724 - DNA, 735 bp, Arabidopsis thaliana landsberg
gggtctgtctcccatgtgtcttactactgccttgcttcggctctatagcttcttcattggatctcttaatccgaaaaggaaaagtacattgctttatcatttagtttacatataattaagtaaagatcacaacttgacgtttgttaacaatccattacttcaaactttccacaatagtcttgtaaatttatccccacatgatgtatgttaacaatccattatttcaaactttccacaataatcttataaaccaagatagagccaaactttagcttccatttttatttcttcggtttatgatctctacttgaccagccagttaatatatgggcttgggccttatgggcctaattgcttatcgcagaaattatctagggctcggattccgattctctctgtgactcacatcgacatcgtactggtttgttgattttgattggtaatcggaagtaaattacgacgttgaagctccctcagtctaaaggattcggaggttgacgctgaactaaataatgggagaagagctgcaatatcagcagaatggttcatctgtgacatctaattatggttatggaagttcgcttgcttacgatcaatctcaagacattgaatctgccgcaaacactgctcttctccgagaacaagtacacttttttttggtcttcttcttcttcaatataagcttctaaattccattcccggactttgccatgggtaccatgttgatttggtttt

SEQ ID NO: 47725 - DNA, 1766 bp, Arabidopsis thaliana landsberg
catgcgtttttgtttgttcgtaatttcgaatgtaatgcttcttaataggaagagaatgagatattgtgttagaggtatttcagactatagtgttgatcatctctccttataataatgtctgaatttagaatttaccaatattgaaatggactttacattatctatcattctccatgatttcttcacaagatgtctctgtatttggggatttgcagacaaaaaaaacattttgcaggtcggttaagtgaaaaatgaaagtagcttgagatgaatttttgacatgataccaagtacttgtctatgttggggacatctgataaattaggaaattagtgtatgtccttataaagaaataaggaattcgggatcagtttgaaacatattaaagttaggattacatgtgactaaaaagcccaatagttattgataataaagcccagcccataaaaagacgactcttgagtctagacggtttttggaatctgaagtgaatcgtcggaaaaatttatcagtttcgagattcggagatctgcaagggagaagatgatcgtttgcgtcgccgtcgtcggccaccaggtctgccgcagaatttacaatccgagtttctattgtgatctgatttcattaggtcttaccgtttctgacttgaacttccctatggatcgaaataacagaacaatccgctttacatacaaagcttcacggatgctgacgatgctctcaagctccaccacattgttcattgctccctcgatgtcatcgaagagcgaggtccttttatccaatccaatccaatctccttttggtttttgctctgcatttcttcatcttattaatgtggtttagtctgtttcttcagtgaacaatccgaaaaagtctggtacaacactgaacgaggcttttcttggcttgctctatcctactgtgaactacaaagtgtaataagcacattccctcactctctctgatgactttgtgttgttggggatactcctttaatggcttcttcttattcttcctctgcaggtatggttacttgactaataccaaggttaaatttatattggtcactactgatttggatgttagagacaccgatgtgagaagtgtaagtatctttcatctgctcatatcctctactttaaccaatgttatccacttactagttctatagagttccttaccaaagttacagttggttcttctacttgagtatgttacttcctcttagcaccaaatatgtgaagaagagtttcattctttgtgtgttttcttcagttcttcaggaagttccatgctgcttacgttgatgcagtctcaaacccctttcatgtccctggcaaaaagataacctcgagaacctttgcgcaaactgtaagcaacatcgttggatcgtacggtttgaactgaccttctcttataagttgctttttgtacctcaaacttgtgttttacggagcattgagcaagtctcatttctttatcatcatatgttgttaatatcaactctgaaattgctgtaaggtgacttgttgcttcacatgttacctttttactcgactagttcctctcaatttgacctaagcggatgcacttaccaaataattaggtagttttcaacgtcccgtaaagaccaactacgttttcatatcatgagctgtaaatgatgcaatatatggtgggaaaattcaacaacttgatgatgttcaatgtaagggatagagttagcaataaaatgctctcgtcatttcttaattggtggaaac

SEQ ID NO: 47726 - DNA, 567 bp, Arabidopsis thaliana landsberg
aaacttacattccccacgtttgatggctccagtcccaagttatggcaacgacgttcgaaaaatactttgaaatgtatgccacagaggagatggtctgggtcaaagttgccaccatgtattttgaaggggcagctggccgctggcgctggctccaatcagtggaaccccacctgccttctctgttgtgggttcagttctgtcatttggttcaagaccgattcggtcgcgaacagcacgaactggtgattcgcaaactttttcatatccgacagacctccaccgtgcaagactacatcgatcgttttagtgaattggttgatctgttagtcacctatgaacataccacagatcccctttactataccatgcgatttatcgatggcttacacgacgacattaagtctgtaattttagtccaacgtcctagtactttggatactgcatgtgcgctggccttgttgcaggaggaggcagagtcgtctcgccgtcgtgaggtccgtcgtggtgatgccacttgtcttacaagactccaacgaagacatcatcatatcagaattgggacaaaca

SEQ ID NO: 47727 - DNA, 627 bp, Arabidopsis thaliana landsberg
tgattccctgaaaccaatgtatatgttgtttgatgacgaccaggtatgtttctttttttatatttggcgtagtgttgagttgacaaataaatttctcagacggaatttgcactttgcaggataacaatctgagacctcaagagatcgaggatcttttttcaactgcacctgaaaggtaccttttttacacctccagaaggcaaagaacgtgtacttttgattatggtaatctccattatattgccatgccatactaaattgtgaatggcagtccatggaaggaagctccttatgaagatgctgcggaaaaaactgcccttggaggactatcatttgacgctttcctgtcaatggtaatcaatactcttttacatgcttaacaacataatgaagcattcttgtgcatgcattatacacatactcatccttctttattttatttttctttgattttgttgactgacatacttaaatttcacacaattctctctttattttcttgtaacacatccaatttatagttggattatatgtcgttttgcgattttgaatggattttattatctgggccaaagttttgttcatgaactaattcaaagtttaattgtgtgctaatctttcaatttt

SEQ ID NO: 47728 - DNA, 759 bp, Arabidopsis thaliana landsberg
aacaattttgaattcatcccggcaagcatcaaacggctccccaggttgaacagactgaatttaaacaattgccagagacttcaagcattgcccgatgagcttccacgaggtctcttgtatatctacatccatagctgcacatcactagtgagtatctcaggttgcttcaaccaatattttctgcgaaagcttgtagctagcaactgttacaaattggatcaagcagcgcagattctcattcaccgtaacttgaagctagagtcagcaaaaccagaacactcttattttcctggaagtgacatacccacttgcttcaatcaccaagtcatgggtccttcgctgaatatacagttacctcagagtgaatcatcgtctgacattctgggattttctgcctgcatcatgattggagttgatggacagtacccgatgaacaatctgaagatacactgctcttgtatattaaaagatgctgatgcttgtgagctggttgttatggatgaggtgtggtatcctgatccaaaagctttcacaaacatgtattttggatcagatcaccttctcttattcagcagaacctgcacgtccatggaagcttacagcgaagccctgtttgaattctcagtcgaaaacacagaaggagattcctttagcccgcttggagaggttaaaaaatgtgcggtacaccttatatcactcaaagacatgatgcaagagttctctaatgactctgacaaattcagagttctgattggatct

SEQ ID NO: 47729 - DNA, 675 bp, Arabidopsis thaliana landsberg
  unsure (1)..(675): unsure at all n locations
gcatacatacgtaaaatgatatttacatgtatgaaatttaggttttgagttgaagaaatcaagatgagatgcgatcataacaaacggacatggggagttataatgatgctgttctgttgtacattaatgttagtaaatggaggcaatgatcatcaagaacggcgttcttctcaaaactcttttttttttctttttttttaaattgaaatcaatttattataatcataaatatactaaaggctaggataaccctagcagtatacaaacaaaaaaagcttgttcatccaaaaaatatatctatgtaggggacgatgcaaacctagagattcataaaaccccatgtttaatttttttgttatgacataacgacagaagatttacactgattttgacgttcctgatctttaaacatttttcaaagatgaatccagaatcgatttatcgtttgatctcaatatgtaggaaaagctacatacatatatataaccagcaaaaatatattntttttaaaaaacatgatcaaaaagagaaattagtgatgctcaaaagttacaaatgatccatactcgaagtccagagaacacacatacgtaacaaaaagaagacaaagcacacacatacgtctaagtaagtattatactaatatgtgcttgaaatccctttgtagatatatta

SEQ ID NO: 47730 - DNA, 708 bp, Arabidopsis thaliana landsberg
acgcacaatccatagatgggtgagacgatcaaagccagacgcatactcctcttctccatcgtattcctcttcttcttctctcaggcctttctttagtgttcagctgagggtgagcatggctcaagaaatctcgcagtggtgatgaagaaaagggtgaaatacagaggacctcgcaacacaacaacatcctctgcagcctcaactattatgttcccaggctccttccatattggtgctgcttcctctttactccttgctcttcttttataagctcccttgtagtgatcattattgtactgtttgacaatgattcatgtaatttgcttttctcgattgattttgtagaaatttctcaaatggtctaaaactctgtttgtaaattatttgctctgtttcaaaagtatatggtcacttgtcccacatctctacgtatttgtttcaccttatcacaatcctataaccaagtcacatagatcttactacacatgcaaacaattcatcacagaaccaagctgcatgattctaaaagcatctcttgacaacctggttgctacagctgtgttgatcaaaccatcactccaggtcacgatcgccccagagatccgcagtatccgttcatgtgatgcgtgacaaaagagtggttcaaaaaggttggatggagaactttttttgtttttggattcattattgtaaatttgtaattatcta

SEQ ID NO: 47731 - DNA, 513 bp, Arabidopsis thaliana landsberg
tgttgtaagttatatagattatgatcaaatgcttttgtaactagagttattcttttttctcactatctatcttattccttgtttgttaaatctattgcgaatttaaaagattttggtgggtcagttacgtatatggattggtttaaagtttagactttagacttttgagagttggttataacatacaaatggtatataaaaatatccaattatttggaagagtttggtacctaaaatactataaaacaaaagtagatggatgtgatctaacctttcccttgctacttttatatgtaccataaatatcttaaataaataaattggatgataaacaaatacaatttgagttgcataaatttagggattaatatggattttggtttgagattattaaaaaaaaaagtgagactattcaagaaaaatttggattgaaaaagatatgacatcgtttgggcttatctctcttggccaccattacgcaaatggtggtaggtaggtgaagaacggtgagag

SEQ ID NO: 47732 - DNA, 869 bp, Arabidopsis thaliana landsberg
tcaaagcatccctcatgttttagttttgctctacatcttttatctcactcaatattgtaagcgttggaccgctaaattgctcgtaatatcagtaccttttggttgagatcatcgaagaaacttcacttcataatctttagaggctaaaagaactttcttgtgtccctttgtcgtcagagttcttgtgtccctttgaaattttgtcgtctgagttcttgcattttttctcactggtattttcttgttgttttgtggttttgcaacagtacagaggttgttttggatgctgcaataaaccaccgcttatagttgcagtggatgagccgtctaaagggttaaggattcaaggtcgtttagtgaagaagccaagcgtatcagaggacttctggagcacaagcacctgcgagatggataatagtacacttcagtcacagagaagcatgtcttctattagcttcactaacaatacttctacttctgcaagtacaagcaaccccacagaatttgtaaaccacggtgagttgtaatttccacacattgttgattgttgttgatcctttcttgcattttagttacttgacttgttttctaataagtgaaagatcattccaagctaatgtggttttatttattcaactctgaaagtatctacttatgatgttagcttactcatttggatggtcaacccgcttttaatatatgtagacgggtgttggcttacattattgtttatatttatttcttctcaatcactggaagatctctaattcatgactgactatggataaaatacatttgggggcacatttttttagaatctactatgtattttgtttgtcaacatgaaaatatttcgtctcatgacacgt

SEQ ID NO: 47733 - DNA, 499 bp, Arabidopsis thaliana landsberg
  unsure (1)..(499): unsure at all n locations
aaggcgcacgaccgtcgatggcgcaaccggtcagcagcgaactctggaaccagccgcgatgctggtctgatgccttccaggtagaggtcagcggggaactgcaattccgggcggcgcttgagcaccgcagcatgcgtggtgccggaatcgaaccagacannnnnnnnnnnnnnnnnnnnnnnnnnnnnnnnnnnnnnnnnnnncgcatgttgcgcgaggaacgcagccccatcgagcgagaaccaggcttcgatgccctgctgctcgacttgtttggcgacagtctccagcagttcgagtgtctttggatgcggctcgccggactccttgtgcacgaacaacggcatcggcacgccccagttgcgctggcgcgagacgcaccagtccggacggttcttgatcatggcttccagacgcgcacggccccagctcgggaagaactgggtgtcatcgaccgccttattggcatgttcgcgcagcgtgacgcctgcggtatcgg

SEQ ID NO: 47734 - DNA, 839 bp, Arabidopsis thaliana landsberg
cagaccgatactgctacaagttcgtcttttatgtcaaagacaaaacaacattgcttttcatggcctgggaattcaaaagatcttgtcagtcacaaattaaagttaccttaaatataattgactacagttctcagtaaaaaaatcatccgactatagttccaaaatatttagaatagttatctaaaagaccttgaaagatcacgaataattcacgcaatagtaaatcgaaatgaaaacaaaataatctaatgatccatatgttcgcacatgcatttcatcgaatttgaattcatttggagatatggcgacaaaactaacattttacaaatggattactgtatattgttgttatgattgaaattatgttttggttatgagcaaggacatggaaattttttactaatactaaaataaataaataaagacagctccaggaaatgggatcttgacccctgagcatgtgatgggcgttgaatcatgtcctaaccaagacaacgcgactgaaaatcataaatgctggaataagctctaatgattttgatcataatattatttcttcaacaagattatatgtgaattagttagaaacaaatgttatatgtcaaatattataattaaactaattaaatcaaatgtaaggatttttaacaacgatacgtttgggataagaaattagggaaggaaaacaaaaaaatcaaagtttggactttggacagagagatgcttagttaaatgcttctgtagttctgtagtaggaccacatgagtcacatgtaaaagtatttatggaggaccaaccatatttggtttattaaatgctgtctctaataaatggtaaat

SEQ ID NO: 47735 - DNA, 521 bp, Arabidopsis thaliana landsberg
tctcttctcgtatcacacatcaattattgttttgcatatcaactaggatctgatgtttaggttccatagattaattcttgttcacttctcagttcatacgcaactagaattgaaaatatgttattttctagctagcttttattatattctatatagtgtatttgtaattttgattaaaataacaaaatcatatttgtgtatcttattatttattattattaatataaataaacatcatctaaataatatgtatttttatatattttataagcctatctcgtagtgtgcacttagaatcacatagacgttcaaggcactatgcactctttgaacattacttttatccaattgcaactaaataaactatacttattaacttctaaaaacgattttcctcttcttgatatatctcaatgttgctctatatggatactttgacctttcatttgttcattaaaggtcatttagtacattgttctcaacgatatgtgtatatcttgagtacatacggtaatccatct

SEQ ID NO: 47736 - DNA, 903 bp, Arabidopsis thaliana landsberg
aaaagtaaaaggacatgatcatcataatacgtcataaattttcagtccagttaagaaaagaaaagaaaaaacttcatttcattctaattttgaatattactctaaatcaaaactataagtcaaattccgattcgctcactgaaaataacatatttttacttgatatatatatacatcagacctacttgccaacacccataagagcgaggaaataatcatgcaactcgaagatgcaagatgttggtgatgaaaatcatccttctgtatatgttaccatcggatgaaaaaaaaaaaaaagtatatgttaccatctacaatatatataaataaattactcaacatggaatttgtctcctcatcctgctattatgcaaaataagaaaatctatctgtcaaatagtataattacaagtacaaacgattttctatttattgcttgtacgcattttacaaaaatcatacatattgttattcatagtgattcaaataaaatgatcaatcatacataactagataaccaaaaatccaaaatcaatatattgtaacattgttatttgtcgagattgatcgtatattacacatcatccctagccttccttttgcatctaatgactccacaaagcaccagcagataaaaaaactcttcgagtctttacttgtacgaaccttataaacaattattcatgtttttttttaaaaaaggcaaaagaaataaccaatagaattgtagaactagagatacaaatggaaaacaccaaattttatcccatctcaaaagcaggagagtaaggtcccaccaattatattgcacacacacaaatacaacttcccgcaactctttttgtttctaataagaaaaataatttttatagttagcaactatgatctaaatgacccaattat

SEQ ID NO: 47737 - DNA, 1068 bp, Arabidopsis thaliana landsberg
tacatggtagattcatgataaagaagttagagagaatgatttcgacttttttaaaacccactttctgcttccctcctttatgcagacaggaaaaaaggaaacaaaattttatgaaagagatctccattagagaaagagagagcgagagagagattaatcttggaagagcaatctcacattctcacactgctcttagaaaatctctctttcaccattaaaaatcccaaagagtctggagaaatgggaaagattcttcatcttcttcttcttcttcttaaggtctctgttcttgaattcatcattagtgtttctgcttttacttcacctgcttcacagccttctctttctcctgtttacacttccatggcttccttttctccaggtatctctctcttcctctatccatgcttatgtttttttttgtggattgatctgtgttttagtaaaccaatgaaaatctgacttttaattatatacgtaattgctatttttgagctgctgaatgagtgaattgctatcttctacgtatctctttatcagttattctgaaaattccttctcatctagatccctttgggataattcagaaattagatacagtgagaagattagctcaagcgtttgatttctgatttcagggatccacatgggcaaaggccaagaacacaagttagatgcacacaagaaacttctaatcgctctcataatcacctcatcttctctaggactaatacttgtatcttgtttatgcttttgggtttattggtctaagaaatctcccaaaaacaccaagaactcaggtaataatcatcttaacattaagaatgagaacaaatctgcaaaactttacatttgtaacaagattctgtatcagtttcttcattgtgatctctctgttttgatatctaaatggcttcatgcggaagaaggtgagagtaggatttcattatccaagaagggctttgtgcagtccttcgattacaagacactagagaaagcaacaggccgcttcaaagacggtaatcttataagacgaggcgggttcggagatgtttacaaggcctgttt

SEQ ID NO: 47738 - DNA, 533 bp, Arabidopsis thaliana landsberg
atccggcttcccgccccatttcttcaacgcttgtttccttgtttctttaccaatcacagcgtttaagtttttgaccatcatggggtaaggatgaggacccgccacagatcccaatatgtaatgggtagtctccacatttgtcacccaatctcttatcgcttcagatgtcgcatccttcaatgtcgctgttccagagtggactcctctcacctatagcaccagacacccaaaaaaaggttcagtaacaaagtttatcacatttaaaagagatggaaatgaatcctaagcatcacctcggcaccaagaagtcgcattctgaacacattgagtgcttgtctctccatatcttgagcccccatatagataatacactccaaaccaaaacggtcacacacagtagctgtagccacaccatgttgacccgctcctggctcatcaataatcatatttcttccccaaccgcttagcaagaagagcctgagccacagcgtttgttaatcttgcgagctcctgtgtgaatcaagtcttttctt

SEQ ID NO: 47739 - DNA, 449 bp, Arabidopsis thaliana landsberg
tatattcaatatgattattatttgatcttttgtgaaaaaatatgaagttgatatataatctctaatgatatattcagcgaacgagatatgtgaaaaattagcggtggtggggtttcacgcaaacatgataagttacttaacaacacagcttcaccttcccttaaccaaagcagccaacactctcacaaacttcgccgggacatcgagtcttactcctctccttggtgcctttatcgccgactctttcgccggccgattttggaccatcacttttgcttccatcatctaccaaatcgtaagtttatatacacataaatttaaaaccattggaagaatttaaccaaggctcagtttctttggaccaaacttagtctagttgtcattatcttgatcattctatattactagagattttacatggaagtataaaaaacaggggatgacgttgc

SEQ ID NO: 47740 - DNA, 981 bp, Arabidopsis thaliana landsberg
aaaataactgaaatggtgaagttgttaaaaaaaataaaaataaaaaagatactgtaatttgaaatattcactaatccatctgctattgtactttaacccggaacgcaaacagcaggttataattaactaattaatatattcgtccgcacaattaatcagacacctaaaccgaatataatgtccggtacaaagtacaatccatgattaattattgattatggactcgcgcagaacacgcaaagatgaattataaactcaaaacataaagaagccaacgacagaaaatattaatttgcagctttgattgccaaacaaaaattagaattatacttggttggatcgcacatgttaccgtcgcttgcgtaggctccactgtcacatgcatacacggcagaccatacccaatttcctcaaaactttagacttagccagagagagagaccttcgaatgttttgcttgcaatgtacgcttatttaacgtatgaaaagttctacaaaataaaagatgtacgcaggtctttgactctagggttttgtgaagcatcatgacatattctcatcaacggaagcattcgagcacattattgagaatgtttgaaatgtttctcttgttagtgttaccataccgccctcgaacacaccctcgacccctatcacttgacactatacccttgtcacagccacaaatgttcttgagaatgtcatttgacacttacaacttttacaatcgttgtggccggcctttgatcatgtcgataattatcacactcatcattatccatgttcatgctatgcatttctagccaactcattcacacaatttatagcatgatcactcgcaaataatcaacttttttcatacacattacatgtaaaataattttagagcatagttgctttaatcccgcatccaagaatttattttagacctacaaatggccgcacgcccgcacctatagaaagaattcacatttcgtgggt

SEQ ID NO: 47741 - DNA, 816 bp, Arabidopsis thaliana landsberg
  unsure (1)..(816): unsure at all n locations
aagggaacatgtggtctgaccttcattatttactaatgtatcacaagccttatccagaagttcttagttattaaatgcatagttgggattaactaaccctactaactaaggcaactaggttttaaaatggttatcaaattcacaaattcctaagctaaaacaatttttttaataatataattaaattacatgtctgacgtatctatgagttcatcagcttttttacaggctgtataatttttattagtcaggcatgcaataactaagagccattgttaatgaatgagcaggtgtttatgtgaagaaggcattaatttaaagagagcattgatttgttcaactaaaaaccagcttctctaatcttctgcattaaattaaggaattgatcacaaagtattaaaccccaccaatataacaataaacacacttttgaaagtgagaaagagacatataggtaagggacctcagtgtcttttacagtcgaatcctatgaatgtggagcactaatttcatgggacacatattattacataaagacaaagtaaaatgccaaaatatataaatttaccccacattattccaaaacctaagaaaactagaatcttgtgagtctagagacttgaccaattgataatactctttacgttgccatcgtgctggtcaacgctaaatattgatttttaaaaaatctaaaaaaaaaaatctaaaaaaattattgattttgacctaaacttntcgattgtacatgactatatcgaatctcaaccacctgtatgaactcttgcttcttcttatttatctnttcatgatattttc

SEQ ID NO: 47742 - DNA, 1225 bp, Arabidopsis thaliana landsberg
atatgtagtatattataaaagactttaatcaaatttaatacagtaactcagcatagaattataatttttcattattattctttagtgtaaagtatcactactattaatgtaaagctgtaaacaagagaccaacaactattcattttaagtttagagtaattacgaagcaaaaactatatatactaaacgatattattcaaaacgaaaactatatattaaacaagaaataaagtcaaaagtgtaacgtttcagaacggacggtcacgcgtgacacagtggctctctcttttaattgattttctgtctccactttaatttaaattttattcacaaaataaatttgaaataatcaaattcataattaacctttttaactgatttatagtcaacttctaagtttctacttaaacatattaataagggaacttacgtaatgacaccaaatgagaaatagtattaacaagtcaattaattaaaagcttttaataatttcctaaactgaacacttttgtatcttgaatttgtggataaaattagccaaattttgtagattaggtttgtaagtaattactgagattagttagcgaagaagaagaaaaaaaggacagtccccatgttttaatgacaatggctctactttccacgtttataatattacaaaatctttcttttgctcagaacacaacttgctttgaactcttttaccttcttcttcttctttagattctctgtagcttgaagtggattcatgaatctgtaatctcgtctctgtatctaaaaagcttctgcttttaacattatctctgtttcataagcttctagaagcttcaatggcggagtatatctgtttattcggcaaggttcttctctttctttctctctctctcgagtctctttttgtgattaagcttctgggtatctctgcatgtatgttttatcaatggaatctaccaaaaagttctgttctttgcaaagatttcatacggaaaagtcatgatttttgagtctctctgttatttctccgttgtaaatgaatgtgattggtttagggtttagcagcagattctcgtctgctctgtgttatcatattcttgattccgacttaattttgaaccaaagtgttgcttctatttgaaacaagaaaacgaagagccaacaaaagccctagagagagcaattaacgaagaagattcacttgaaatagtttgcttagggttttaaaatc

SEQ ID NO: 47743 - DNA, 517 bp, Arabidopsis thaliana landsberg
  unsure (1)..(517): unsure at all n locations
gctagaaaattcacatgttttgatgaactttttatttttcaggcaatgagattgtgtgttacgaaaatccaagtcccactgcaggaattcatcgtgtcgtgtttatattgtttcgacagcttggcaggcaaacagtgtatgcaccaggnnnnnnnnnnnnnnnnnnnnnnnnnnnnnnnnnngagatctacaatctcggccttcccgtggccgcagttttctacaattgtcagagggagagtggctgcggaggaagaagactttagatggcttcttcctttataaccaattgatattgcatactctgatgagatttatgcatctatagtatttcaatttaataaccattttatgatacgagtaacgaacggtgatgatgcctatagtagttcaatatataagtgtgtaataaaaatgagagggggaggacaatgagagtgttttacttatatagtgtgtcatgcgataattatattagtctacatgaaatgaagtgttatatttataccttacgtgt

SEQ ID NO: 47744 - DNA, 493 bp, Arabidopsis thaliana landsberg
  unsure (1)..(493): unsure at all n locations
agctagaggttgcctactaccaactctagctcctgtcacatcatatgttctgtcatttttatctgtccagaagctaaatgttttttatttaagccagatatatacaatataagatatttatatttatattatacaattagtgatgttagacggatggctgactttgtttgtttataatcgatatatttggagggacaatcgtcgtcaatattagctgtaggatcttgccacactttagagagtttgaccgctatgtgtctagcatggcgacgcttggtatcgaaagcgagtatacgtgtgtaggcgtatgttgttttggatgagcatcatgccatgcacacaattattggtgcttggacgnnnnnnnnnnnnnnnnnnnnnngtgtgcacatgtagagttgcatgtgtgtcaggacgctagctacgtgcacagtggtgaggtgtaggtggaagatggagaggagcagcgatctaggctggtcgtgtgcatggt

SEQ ID NO: 47745 - DNA, 1175 bp, Arabidopsis thaliana landsberg
gccaagtttttttcggcacgtataacagtttctgattctgaagtgattttagcagaaaagttggttcatcaagcagcttttgttaaggaggagaatgatgaggctaagcctgatttggttccacaagataaacggtttgatagtgttgatttaagctacgctcttgatgatttatcatctacagctttggtaaaataccaagtacagtcccaatctgcccttgtttttgatgaattaccctttgcttttggcatcaaaccgaggatccatcatgttgtatcccaagtgttcgacaaaatgtttcagagagagcataatttaccgcgaaagagcaagaagaaaaaaggctacaagtgttggaaattcaagttcaaagttagttatggtataagaaattggctaggcgagcatttattgtttgataggagaggagtgattcatcattggaggaagcacaaggttaagctgttgcatgaaagtgaagaccttaaattgctttacttgtttcaagtgaggagggattcaaagagcatgaccaagcttctgtttgtcgttggaaatgaccaaataggtgatgtttataagaatgattataccatgattcaatgcaccgaagctgaggtgttatggtcacatgtgcatgtagactctattagagtttaccaacggatgcaacacacatttgatcaattaagaggaggttttgtaacaaagtttcaagttgtggcaaagagaaaacttaatcaagtagatgtcatgttctacactgtatttgaccagcaagtagccaacatgtctcggtttcgggggcgggtaaccaagttttctgatagctttcatgttttcacacaagttggtcttgtttcttataggttgcagtttccacctctggccaccaaatctactagtgactctgcagcaacaacacactggcatcataagctgctccacttgtcgtccttacaaacccatagaagaattgtggtcacagaagaaatggcggaattggatccttattggtttttgatggcgcatcttaatgatattccacttcaaacagggacagagactgatgcagttcagcaaaacactttgttatgtagtgatacatcactatacgttcatgcgaatttgacatccgcactgttggagaagactaaagctcggttcagttt

SEQ ID NO: 47746 - DNA, 572 bp, Arabidopsis thaliana landsberg
ttactacagatagaacgatattctatctttataatatggcacggccagagcgtttgcaattatcactccctctctttgcccggacccgccgcccgtatgccccgcagacccgccgttccttctgttgccgacctgaatgccgccgccggcggcgttgccacgctggaccgcgcgctggccgtgctggccgtgttctcgggcgaattgccccaccccacgctggccgacatcgcggcgcgcacgcgcatccacaaaagtacggtgctgcgcatgctgtcgtcgctggaacatgcgcatttcgtggccaagctgcccgacggccgctatgccctggggccggaaatcgcgcggctgcacctggtgtatgccgactcgttctcgctcgagcccctggtgatgcccgtgctgcgcgacctggtggtgcaaacacaggaaagcgccgcgttctatattcgcgagggcggcaagcgcctgtgcctgcaccgcgtcgatttgccgcgccccgtgcgcgaccacatacgggtcggcgacctgctgccgctggaacacggcgccggcggccggtcatgctg

SEQ ID NO: 47747 - DNA, 774 bp, Arabidopsis thaliana landsberg
atctgccttgacatagaacatccttctaacctattaattacttatttaatttgttatgagataaattataccagaagggtgtgttaatcattggaccaatagacttaataaacaaataaaatatgtaaagcaatccagttttgatcggaaaacattgtatatccatcttgtatttaattgaattcttttaacaaagggaactttatttgtaagactaaacattaccaatatacgatgcttgtacaccatgtaaaaactcacgcaaattaagtgaaatttggactagtaagtctagtataatataagcttgagtacgttataataaatggttgaattctgaagataagtcgtactagtagtaatttaagtgtaagatcaagatacatgacaccatcaaataaaccaatgtcctgtctctacaaacatatactatatggtatgattttgtttatatatgccctcgtcttaagtcttcctgtaacacctaacacgcgctaatgacgtctccttcatatggtcaaactcacacgtacatagccacacgtgttgtattttatattttcttgttcctcaattgaaaatgatttgaagccaatatgattcaatatatcctttaatatgatttaatataataaatgttctaaaaattgtctatatatgtgtaaggaacaatcatttaccgtctcattacaaaggaaataatagtgtacggtaatttgttagtcaacccaagtgacgtaatgaaatgatgagtaacacttttcctttggatta

SEQ ID NO: 47748 - DNA, 1014 bp, Arabidopsis thaliana landsberg
  unsure (1)..(1014): unsure at all n locations
atgaagaaacaaaatcaaaggtctgtctcagtggttctattaattatggaatgggagactcaattatgcggatggaaaaagataagccttgtgtggtcaaatcttgaacatacatatatnnnnnnnnnnnnnnnnnnnnnacggatctctctattcatttgaaagattctaattacaccagagtctccggtcaaagccaatcttcaactgttttgtttttccaatatagcagcaagaaccaacgactattgtacaaatcttcatcctcttctcttgtattaaaacaaacaaaacctccatagactattcttcctctagagcagagttctgtctgaatccccaccaaaagtcaacttgtctgtcgcaataccacaaagagaaggaccatactcgaatttccacaaaagggtaggagaattctaatcaatctcttcagaaatgaaaccaaagtcttgatatctttagatctggctatcgaaaaacacactagcttcttctaatcagaatacctatggagactgtctctgttttgctcttcttcttcctcttccttctagcggcagaagcaaggagcaccaagcggacaggttgcaaggatttcacctgcggagaacatgacttcaagttccctttctttaggacagacatgccatctcgatgcggtcttttcaagctgaactgcagtgcaaatattccagagatacagcttgaaaaagatgggaaatggtatacagtcaagagcgtctctcaagccaacacgataaccatcatcgacccgaggcttaaccaaagcttgacaaccggaggctgcagtgacttgtcaagcttctctcttccagattctccatggctcaaattgaacacgttgtacaaatgcaacaatagtagtaggaagaatggtttcagctatgcgaattgcacaggagaaagaagcagcttgtactacaatttgggagatgatcatgatgttcagggtgttcacctataagactcagagagctggggactccaaaa

SEQ ID NO: 47749 - DNA, 665 bp, Arabidopsis thaliana landsberg
attcccaattataccaagatcgaaattaggataactttggcctttatctaaacataattgctttctaatttgcgcgcacttttccatgttaatatacatagaacaacgttctatgcaatgcacacatacattcaagtaccactgaaatggcaaacatctttacttgagagcaatcaacgttaactcatatgcacagcttgcatatctgaatatcagatgtatcgattgtaaatccgatagcatagcttgattgctactgtttgatctaaagcatgaacttcaacagcggtagaggccttactcctcaagtggttgaagagatggtcattgatgtaacgcgctgtctccgggccaccgtgcccatcgtagaccccgacgaaggtgccttgcagtccaggctccgatgtgctaagcggcccggattcaacctggctatggtcctccaataggttattggcctggaccacggccatggagaactcaccatcgacgacctgcccgccgtccttgtacacaggagccgtcctggcggccggtggatccgatctttgcggggacgccaccggtgatgcagacccagcaagattcaaataacgatcagactgatacatcctcatctcggcgctccccactttgccttcatctgagtattgtctcgctcgtgc

SEQ ID NO: 47750 - DNA, 1171 bp, Arabidopsis thaliana landsberg
atattgaatacaaattttgattattgaggtaacctggaacgttaagaaagagagagtgttctctgttttccaaggaaaataagcaattctggaattaggcatatgtcaaatgggctgacccttatattgacagtccaaaactcaaaaagcaattgtttattttaaatatatttaggcctactcctagtataattcagcttatacttaagatcatgatccagttcaaacaccataataaggtagttccaaaattttgtttaatgaacatataaatggtactaaactataaagtctcaaacctttgataaattttgtttgtaaacgtattcgttatttgatattatttagagttcatattttataaactttgaaaagttttacctctacgtaaaaatgtacagctatttctgtaattcaaatataataatcagtttcaaatttaaaaatggctttaaaagggggaaatgaaacaatagaagatgggctgtgtggatataatgatgggctactgaaaagctttgagtagtaaaatgtgtaatcactgtgaacgacccatttaacgaatattttgcgatctaattccacgatgtgaagtaggagtggacaagttatttggatgatccacaccgattttagatctgtctcgattttttaaatgtccatgatcatgaatatgagtaaaagcggtaagaatctagaggtgcatgtataatatatgtatggataatgaatattttagttttgattattcgaatctgacatgaaaacatatattattagtttttatacaatgacaaaagcataatgtatacaatcacgttttgaagttcatgcttgcctgaggagacttcgaagtccatgtagatcttgaaaatttgttcgctaaagatagttaattaaagtgttatcaaactagctaacaatttaatgtttcatgtaagtatgaaaatattgaggaagagcattacttcataaagcacaagatgtttgatgggacaattgaagctttacaaactttaagataacattgcatatatctccaccaaatcattatcaaaaggccaacttgaattactttgctcgaagttcgggttgactgacataatcagatttaaggtggtgttaaatttaaacttgataaccggtctagtttaattatggggtcatgatc

SEQ ID NO: 47751 - DNA, 898 bp, Arabidopsis thaliana landsberg
gacacttttataaattaagcatcaaaacctctagtaagtgaaattataaaaacattgataacattaacataaactaataatagactacatgttttattgtaaatatataaatacaagtatacaacatgggtgatctctcttcaacctcacacatacggccgttaaaatcagaagatatttttttgtgcgtctgacaaattttgaaaaaggagattgtataataaaggaagctagaggagaaagggtgggccaatcggcgtgaagaaagcgggccttaaacacgtgggtacgttaaggcccacatcacgtgtactctcatgccattgccaatctcttcctccactctcgtgacttccctctctgcctcttcaacttttacatattcaattttgtataaattccatcctctttgggccgtttttttcgtgaataaagataaaatattaccacagtattaaattttaagttaaatttaatttatttgattcataacctcaaccagatttagagaaaaaaaagatgtatagttaaatagaaaataaagggcccaaagtaccaaaacaaaaaaatagagggcccaaatttgaaaaacagagacgtctaattatgatggtgtttgtttatactgaggtagagacaagaacattggcccgaaatgttacgcagatacaagaagtgagcccaaactgtagtgtctatgagaagaggatccacacatatggttggttcttagcctaaaggtttggttcaaattaatatgaccttattgtgaatccattgctgtttattggtcacatacactggtttaatcagcttacatatatccatattatattgccaaagatgatttatacgtttatagagaccctacactgttaaattaaattctaaaaaacat

SEQ ID NO: 47752 - DNA, 696 bp, Arabidopsis thaliana landsberg
ctagtgactagtgtgatcatcttgtagaggtctattacacgtgttagtgactagtgtgatcatcatacacatgaatttttctacaaaatacacatggatttttctacacatacacatcccataagctctcctaaatccaagctttccacaacccaagggttccatgcatagtctaggtttatcgaggcccaagcttagcttatgcatacatgctccttgtagccaatatgctctagaatcctgactccacaaacatgagattcatgtagctcaagttctccatagtccaggctttggtaaacatggctacatatcattctttagattttctagattctagcttccgagagaccgtactctgaacgttaactcacgagtcatgtgcattaaatgaaatacatacacgacgttttgtatacatcacattcaatctaccaaaagtattattttacaccaaccaaatggatgtaaaataatacaaaatggaactattcaacataagtataccaattcaatgtccatttcataagtataccaattcagccacatataatagttagcagaaactacataccattcaaagttatagctagtttatatatttgtaataaggacttttcaccagttggactttgaagccaccaaaaaaagtaggtgaaagtgagttggtggggggattcaaaagtccacatgaca

SEQ ID NO: 47753 - DNA, 454 bp, Arabidopsis thaliana landsberg
  unsure (1)..(454): unsure at all n locations
ccccccccccctcccccccccttctcctcccccccccccctcccccccccccccccccccccccccccttcccccccccccccccccccccccccctctccctccccccccccccccccccccccctttttttattgtccccccccccccccccgcgcgccncaaaccacccacccccacacccccccccccccnnccccccccctccntccccccccccccccccccccccnccccccaccacaccccccccccccccccccccccccaccccccncccaccacaccccccccccccgccccccccccgccccccccccccccccccccccgccccccccccccccccccccccccccccaacttctccctcccccctcccccctccccccccccccccccccccccccccccccccaccctaccccccccccccccaccccccccccccccc

SEQ ID NO: 47754 - DNA, 423 bp, Arabidopsis thaliana landsberg
ttacctatataccttgcatataaaaatcactgatcctttgattatagagaaattcttaagataacattaaaacaaattttattgacaattctaccacacacttcataaatttccaaaatatcattaattcacacaatattaaggtggtatttaagagatttttcttttatttgaggcgattttgatattttctatttttctattttcattgatttgatgtatagttactatttaaagtcttatttgtgaaattttacaaatgttggaaaaaagcattttatggtgctatatttgtcaatttcccttgattatatatccttttgaaaagtaatgttttttttatgtgtgtgtattcatgaaccttggaaaaactacaaatcagatcatggtttgttttaggtgaaaaatttagaacacagttac

SEQ ID NO: 47755 - DNA, 689 bp, Arabidopsis thaliana landsberg
  unsure (1)..(689): unsure at all n locations
ttatttatgctagctcattagacctttctagattttttgaacttctccatattcctcttggctagatctagttggtgaatatgttgggaccaaatttcttggaatattggatagaagttatcatgttgaagccataaatttttgaatctaaagatgtttggtctaggcacattagttgcaatctctacaagccaagggacatggtctaaaatatatctggccagagtgtgagctctagttcctaagaattactgaaccacttatgtgaaatgaagcaccactccaatttttccaatagtggatgctgctgcatatttgactaggtaaaagcttgaccatgaagggggatttcttgcaaacctagctgattgatggaggcattgaattgaagcatgaactgaatattacctcccactttattgtgattctcagggctgcgaataagattgaaatcacctaaaaagatccatggttgatctggcaaaattataatattagagaaccattctaggaaatcctttttgccatttgacgtgcttgggccataggtataaataaggagccatgactgatttattaatttggtgcgaaacaaattgtttgggcatcacattttagaatatgtgtccctagagaattagactttgtgagagggtacatgcacnagcgacccatagtggatgaacaaa

SEQ ID NO: 47756 - DNA, 845 bp, Arabidopsis thaliana landsberg
aaaagtccagtcctctgtctatcaaaatcccacgggtaattgaaaatcgcgggacctgaatctgcggcgagccaaaacttgtggatcttttaatgaaaacttgaagattcctctttcccgtgttgcttatagggttttctcttcgattcaccacatcgtcatgaaccaaatctctttctggtgcctttctttactccttacggtggtgattgctgcagaagagactcctatcactcgtatagccttcggatcatgcgctaatcaaagtgctccacaggtaaatcaatcgtacaacccctacttggctctggattcagtgttttaagactgctctgtttggctggtgtttaagtgagctgattatggtttttgtttaattagccgatgttctcttagatgatataagcttgtgttgcatactatgttaaacattgtatttttgttacattttagccgatatgggatgcgataaacaagtttgatccgcaactgtttatttggttgggtgataacatctacggagatataagaagaccacttacagtcattgggaaagagagaacttttgggccatggaggaattcaccgaggtttgtaccttcttcagaggaagaaatgaaactaagatacgctaaagccaaagctaatcctggatattctcgtattcagagaaaagctaaggttattggtacatgggatgatcatgattacggattgaatgacgctggaaaagagtttgatcgtaaagtcattaaccaaaaacttatgcttgatttcttgaatgagcccctcgatagtcctaggagaaagccagtctggtgattgatgcttttctataattatgg

SEQ ID NO: 47757 - DNA, 1598 bp, Arabidopsis thaliana landsberg
gaagcacttgttcgagctcagaaaactgttaagattcaaagagctctccgttgtaactgtaatgctgctccggcgagaaaatccacggtaacacttacttttgcggtttggccgtaccgagtttatttatttatttttatattaagcatacttagcaatcaaatctgtttagagttccataatttgatatatcaaacatagagatcattttaaataattttctcgggtcaaaagaaaataatcttaaaatgtaaaaagattgaaactgtttaacctttatgtaaaaagttgaaatcttcttaaactagtttgtaagcagataaacacttttttaactaggctgtaaaagtgttgatgtaactttttacaggaaagattctccggatctttggagaatcgaaacaacggcgaagagacagctaagatagtggaggtagatacagggacccgacccgggacttacagaatccgagcacccgttttatccgggtcggatttcttagacaacccgtttcgacgtacgctttcttcaccgctctcgggtcgagtcccaccgcgtctatcaatgcctaaacctgaatgggaagagtgcagtagcaagttcccgacggcgcagagcacacctcgtttttctggtgggtctccggcgaggagcgtgtgctgctctggtggcggagtagaggcggaggtggatacagaggctgatgctaaccggttctgtttcttgtcgggggaatttaactcgggttacatggcggatacaacgtcgtttagggcgaaactgaggtcgcatagtgcaccgagacagagaccagagagtaatgcttcagctggcggatggaggaggagtatcggcggcggtggtgttaggatgcagagacagtcgtgttcgggtgtcagagaagctgtggtcgggaatatcgagaggcgtaggatgcgttggtgattcttatttccataattattatccgtttagttttggttaattaggggagtaatgttattaatttaatatagtttgatattattatagttttctaagtttcactgacaaaatttaaaattgttgtttcttgtatgctacatattctatttctatgtaagttttttgctacggataatttacatttttattagcttaactaaaattatccgagtttttttatattcggtgttgagaaaacggtactgatcggttagtaaacaattattggttcggttaaatataccaaaccaatattatcggctacaacgcatgcaagagactattttgtaaacaaccacttaaacataaacacgtgttaacgcgattcacatcaacgcgtgtggaaaaaggaaagttgcttccttcgttcttaatcccttctctgtgaacacaaaaacgcgaaataacatacaaaaaccaatacaagtgatttccattatttctcgtctacgtatacaattgatcttttccccatctccaattcagatttggacagaggtattttttgatccgattcttacgaatcctgaatctttctcgtagattaatcgatcgatcggtttttaattcgcggaaaaatgtttcagtaacccgtgatcgtgtcggttggggt

SEQ ID NO: 47758 - DNA, 526 bp, Arabidopsis thaliana landsberg
aggcatccaatgcattgatcttagctttacaggttttcacatatctcatgtctccgcaatatatatatcgctgtgtcgtcttaaaaacagcattacacagacatgtaaagatgtttgtctgcatctctcatctcttgttttcgaaatgtaactctgggatctgatgatgcttctttcttcttcctttacctgagaatcttttgggtaaaaaaaacctcgtagagagtttttatttatctcttaaaaagaaaagagcttaaaacatatcacacatccagaagttacttcgtacagttacaattttacaatcgtgtgttattggtttcgaagaaagtcaaaactgatttcttttctttttttttgtcggaataaaaaattgatttatgacaaaaagagtttggatcaaatttgatgttcttagttttgtccgaaggacaacagaagcggttgtgttgttgtaatatggagatcaaaaaacaggtcaacttagaacagctgtttttgtcagtttcttaatatctaaaaa

SEQ ID NO: 47759 - DNA, 590 bp, Arabidopsis thaliana landsberg
  unsure (1)..(590): unsure at all n locations
cagtgaaaaagctagcacaagaatcattgctttgacttctcnnnnnnnnnnnnnnnnnnnnnnnnnnnnnnnnnnnnnnnnnnnnnnnnnnnnnnntagtaaacaagaaaaacattatacagtattagtttgtatttaacgcttaattaaacaaaggcatagatacaacaaatcgttatcataattggttcaattaactcatatcagtaattgtattttctatttttcgtagttcccatcatcatgaaatacttatattaatttcaaaaataaactattttacattgcaatttctaaaactatagtctcgaacgagtacgaaagggtcaatgttttgatcttgacctatatttattggaaacgaagacaagaagaaaagaaacggtccgacaccgatcaacttacatcacacgacaaattaaatgctccattctagacgcatatacacgttgtcgctaatcacttcactttcataatcttttcattaccactcttaaatcttaataacatcaccaccaccaatttagcatgtaattttagttttaagttaatatccaggtagctatgaattatccagtgaccatgaatta

SEQ ID NO: 47760 - DNA, 875 bp, Arabidopsis thaliana landsberg
agagatgatcttgcatggaacgagatcgtaatggtaaacttgcggagtgggatttgggaaaaggctgtggaacttttcagagagatgcagttttctggtgctaaagcttatgatagcacaatggttaagcttttgcaagtttgtagcaataaggaaggttttgcagaagggagacagattcatgggtatgttctgagactcgggcttgaatcaaatgtgtctatgtgtaactctttgattgtcatgtattcgaggaatggcaagcttgaattatccaggaaagtttttaactcgatgaaagaccggaatttgtcttcgtggaactcgattttatcgagttatacgaaacttggttatgtagatgatgctatcggtctcctggacgagatggagatatgtggtctgaagccagatatagtgacatggaactctcttttgtcaggttatgcttctaaaggcttatccaaagatgccattgctgtattgaagagaatgcaaattgctggtctgaagccaagcacgagctcaattagtagtcttcttcaagctgtagctgaaccggggcatcttaaacttgggaaagcgatccacggatacatattaagaaatcagctttggtacgatgtgtatgtagaaaccaccttgatcgacatgtatattaaaactggctacttgccttacgcccggatggtttttgatatgatggatgcgaagaacattgttgcttggaattcactcgtctcgggactttcgtacgcttgtcttctaaaggatgctgaagctttgatgattagaatggagaaggaagggatcatacctgatgctattacatggaacagtcttgcttctgggtatgcgactttggggaaacctga

SEQ ID NO: 47761 - DNA, 691 bp, Arabidopsis thaliana landsberg
cagctttgctatagtctcctgagagccaccaaccgtcctgtaatgaacaaaaatgtgtttataataaccttcaatagtagttttaaggttcggaaaagaagttgagaatgttttacttacccttcaaacacaagttccttcttcttctgaagccttaaaatcctttcctccactgtgttctctattatgaatctcacaaccctgtaattccacaaatcagacatgtattgacacattgtttttacccaccaacaatacagagattgaaggagagaactaaagtctaacctgattggcttgcactgtccgatcctatgtattctgtcctgtgcttgcctctcaaccgctgggttccaccacgggtccatcataaacacctatacaatcaaacacccgaatgtcagtgaataaaacatgttctaggagcaactgttttataagttgtacacttcttacatgcgaagcggctgttagatttagagcaacccctccagcttgcaagctcattaataaaactctgcaatctggctcttctttaaaatttttgagtgcagcatctttagctgccttggacatgcttcccaccagttgaacacagataaccccagactgcgttgtacaaaatgagacagtcatttttattcaatgtctcattatgattaaagagaatgttaaaggagcacagatatag

SEQ ID NO: 47762 - DNA, 292 bp, Arabidopsis thaliana landsberg
gagagccttaaatacactcttcctttcttccagataatgaaacccaaacaagcacgaaaatcaatatcgtatcatgcaaaatgtcacctgtgacacttttgtgacactaaacatatagactctcaacacgactcaaaacatgtattcaatttgaaaataaaagccaagtcttccttcgatggatttaaaacacatcaggctattgattacctggccgtatgtgtgtgtaagcatgcatcttaagctgagggaacagactcctctgtttgctttgcttcaacagcttcactct

SEQ ID NO: 47763 - DNA, 875 bp, Arabidopsis thaliana landsberg
  unsure (1)..(875): unsure at all n locations
gattacaaatttggtatcctaggattatctatatagcgccaagcctttttattatccttttaagacgagtttttattggtgaaattgtacacttccatccaaatgacagagagtttgggtttttttcctccataatgtgaacattcatgtagtatctcacgttcaacacccttgctgtatatactagtgaaattgagaattaaatccatcaccaataatgtttagcaagggtgttgaaaccccttgttaagatattcactaaatccatccaaattcactgatttttttgaaagatcgaattcccatccccttcacgtgttaatttacacaatttctccgatgctagtcattgtaggcacacgtactttcctttaaactccaccaatagttcaaaataacacttgttagcttagcactaagctcttaaagaacattaaagcacataagaacatatgtatggcaactccaaataattctttagttggtcctttgttcggtgtaattaatattttcttaccgaacataacccataatatattgaagttgatttttgacctaaagctattccgtatttcccaataatatcgtagaaaacactgtcttttaggtttcccgtccaaacaaaattatagcctaaacgagtcataacaacctctaaacatattcactctatcttgtcatatgctttactgatatcaatcttaataatcaaaaaaacttcttcatacataaactatagaacatttcttgagctatcaagaaattctttgtaataactctgcccgaaaagaatgtcggatgataccgaagaacttttgatctaactntatcactcatgttagaaagaaaaatcggtatgaactntcccatctttt

SEQ ID NO: 47764 - DNA, 1113 bp, Arabidopsis thaliana landsberg
tcatatttaagattaagatcaggccatgatgtatactattttagtatgaaatttaaacattatcatattttctcaatgatatatggttgtactattaaactttcatatctttataaatagataaatatttttttatttaggaccagaatctagaattatcttgcacacttgcaccagctatatcatatggttgtcaaaagacttaattaatataattgatacgtatcttcaaccaatatgaaagtctcattactagctaccacttgtgactatcattttatagagtttttttccacttatttgtgatttatattacgtgaaatcttgaaatgatctgattaaaatctggatctcggaataaaatattctcaatgatcttaaaatagaacaaatatatattcaatgatctattgaagataacgaggatgtccgtgagttggtggaccaccacacaaccaagtcgccagacaccaatcaacaaagccaagcaacccaaaaaataaaaaaaatataagaagttggataatcgatacatctacgcacatctcaattctcatggacaaagttgcgtaaactaggatccaatttgtaaaatatattctaaaataacttctgttaagaaagaagaaatttgtttatcaagagttgacaaaagaaaatagttataaatgaagacaacaaaacaagtaataccaattggtgaatggtaaacatgttagaggcaaacaattgaaatatatatatctcagtttttcttaataccaaccaggacttaaaaaaatggaaaagtttttcagcatagctttgatggaaaagtgaaattaaacaaaattttagaaatatttttcttcataacacaaactaaacgtatcaatagaagaatttctacttctcttcttattttttaatttcctaaaaatactagtcaaatttttatgatttcagaaaaaaaaaatacacccattacgtccaatctcttttagttttggtatgaattatagaatatgaattgaaccaaaatcaaaatgcactaaataatgaaaacagctcaaattttgtttttggtgagcatgaaaacagctcagattagttctacgtataataaaaaaaaat

SEQ ID NO: 47765 - DNA, 975 bp, Arabidopsis thaliana landsberg
tccttcgtaccacctaaagttgaacaagtaaaatgggggggttagacagtcaaagattaatggaatgtgaaagatgaagatgttaagagactcttcagacttgcatgaataatgccaatcagtatcgtatatgtgccggtgaaaagctatcaggatgggaaccttttcatcagttggtatgctagtatcatcctctgtcgtacaaaaaataatattagcagcagaagcatgaagaagaaagatggctctaacataaaagcatttcaaaacagaaatatagcagattttggagaagcctcatcgtatcaaggtaatcttgaaagcaaagttaagagacactaaccaacagtatcaagagctcggagaaccaagtagaacacacacacctacaaaatgaaaaaatgaaaaaaattgaataagaaaatgctgcaagactgaacacagctacactgatagcatgtgatcgaacacacacaccattttttatgtggaaacatatcgaatcatagttcactaaaatacaatctgcatttactgcagctcagaagaaactgcagaatcaattaataagaatctgcataactcatattgaactaagtggaacacaaactctcaaagccatcggattctacagaagaaaccaatcatcgacgacgtcaacaataaatgagtgtcagatatctggattcctccaaaaattgaagacgttgaccaacacatagaccgagagcgagaagaacttacggtgttacggatctcggtgttgagttgctgaataacgagagaaaagcttcgagaaaccttgtggagcatcgaatagcataaaccccagtgtggttcaggagggatctgcttatccgatttatcaatcgctcgtatcatattcaggagcggatatatgtcatccggatatctcatgatctgaccccaagctccccattgtttccagataattttgattcacaaaatggtgga

SEQ ID NO: 47766 - DNA, 1117 bp, Arabidopsis thaliana landsberg
aataataatatctttggcaatctctttcatgtactttttttcacactttgtcaaccaaagatacatgtgggacttggacacatgggaataaacaaaattgaggagtatttcttttgtataccatgcatggattggattatagctatgaaatacattaaatctaagacatttgaatgacatatctttttattaaactaatttttttaaacaaaagtagaagtttgattgaactttataaagtagtgatctcataacacaaaatttaatcaattttaatcgattcataataaataacttgtaatccctaaattagtaattttaaattatgttatagacgacaaaagtacgattgctagggtaattttcttgttgtcatatttcgacaataaaagagagacacgtgaaatcaacgtagaatcaacttttgactactccgaaaactaatgcgcattcggcatctatacataggttacacatataaaaccaaatccgaataactcgcaagcgcataaatatcaaatattcttggaaagttgtgtttcagaatttatttttgttttaatacttttagatcgctagctaattaatattttaaattacaaaattaattaaatctaagttatttgtagaagatatcttcttattaaactaaattgttcaaataacacatagattgaattttaattaaactttatatatcagtaattttgtaacgtgtatatttaattaaattatgaaagatttatatatatataaaaagtcaataacacataatttttagtaaaaataattaaggtatatgaatgaataataacatacttcccatagaatcaaatccaactagttgactaagaaattaagagttaaagttttctaaaccaaaaatgttgcatccaatgggatgtgtatataaacaccctaggttggtcaagggagaagaaaaatatactattgttaaacaaaatcttaaagactaatttatctttttagcaaaaaaaattcgatttttaactataatcccgctccccctcttccccaaacttcaaaaaaaaaaccctaagaccaataacacaacaacagaacccgaaaaaaaagaccacattcgaagtagttgctt

SEQ ID NO: 47767 - DNA, 258 bp, Arabidopsis thaliana landsberg
tggattcattgacaaagaaatatcatagaactactattcacgtgaaggtcacgtggatcattcccttcaactcgacgactattccataataccaaagaataaagtttttaccatgcaaacaacacaacgtgtacaacctcaaaaattatgttccacaatacaatacgatattcactcaataattcagttacacacgaactgtagaatagcaagtaacactgataatacgacagtcacgtcacatatgcatatctgtag

SEQ ID NO: 47768 - DNA, 502 bp, Arabidopsis thaliana landsberg
aacccttcatccggcctccattccctgatgcaaatatgcgggctttccagtttattacctgttttttatggttgtatatgctaaagccttcttttcttactgcttcacaaagtacctgaatacgttcctcttccggaatgtttgccaatggcttgctttcaagaataatatcaccgatgcgtttttcattccgtgcaatgagtactccgttttgtgcatcccaggcaattactttttgttcagccgcaagatgagcaacatcgtccgggctgagtggtgcagccaggaaaattctgccttctgaagtgcctgcatccatgtgcgctatggccaggtaaggttcatggcttaaaggatcatgttcgtttatttttgcaatttttccatttgacaagcggtaacgatggctttgttccctttgttttgcaatcccgtcagggtaccccgcagcaaccagtttacctacttcctgatctacaggtgcagatttgtcggttgggac

SEQ ID NO: 47769 - DNA, 1277 bp, Arabidopsis thaliana landsberg
aattaaaggccccttcctctcttatcttatttatttgcatgtgttatatgatcaaaaatttcaattaattcactacaaaaacaaacctttggcatgtaaataaagtaactacattatcaattagaagtttcatggaaaaaaaaatcatttttaagccagagatctttgtttgtcaacaatattgaaaaagaaacaatatttaataataatgtacttagttgttggatttggaattggcttagcatgaaaatctctcatcacatgcgattgcctcatacttcccacaaaggaacaaccatatgcttaacttctatgtcatgacaaaaatacccctcacttctttgatgggatgtatgagtcgacaccctttactcaatgggtatttccgtcttctctgatttgtttactactaccatattctatattgattatttttttatttttttataaagagatccaaacattttcgttttgcttagcttcatcttatatacaatctcttattaaatcaagatttttttctgtattattgttttatttccgaattagaattgaacgttttatatcaattttgttcaacaaatatttgttttaattacaaataaatttcaaaaactatgcacatataacataaacgttgtgtatttgctggcttctatactttatttaattattattgatgaatatcagctgaggtttgtctttatttgcttaaatatgtgtaagataaaatattaaatctccctctattatatggatggacccttttgctatatctgtgttttgcactgaaacttgaagcattttattattttgtctttttcagttttgttcttatattagctcttagtaaatcaaaatttggcattttcctttctcatttaattccaaatatatattttaaatcttcataaattgttcaatctccattattaatatacgtgtaccttgataatttttgcccatgacacaatatgttctttgttatcttccatttagacactttccattgttttctctaataattcaatcacttttttttttcagataagacatgcaacatgcactacaaatatacaataggacgtgtttaaaagataagttcattttaacctaagaaaatattatgctagttttaaccgttcagaataattatcggcattatatgatctatgaatcaatctatcatccatgatactcatgaaaatgtagtattcgtttgctttcatttatttcttaacccttttatacgatgtgacaagtcaactgtactacca

SEQ ID NO: 47770 - DNA, 458 bp, Arabidopsis thaliana landsberg
cagagtagaatgagtgagaatagcctgtagactaacagtactccagaaggatagatgcagctactggctgctgcagtcggcctgcagggcgatagatcgatcacacacgcatgatgcatggtgcaagaaaaggaaggaaagggaagagagacgaccgagggacgcgggcgaaaagaaaaccactattattatgacggtagggaaagccgagatcaggtagagcgacccgatgccgagcgtgtcccctgcgccggtgtcatggcagagcagctttggcgccgctatcgcaggacgctttgtagcaagtgttctgattgcccgccacctgctggctgcagtgctgcccggcaggccgcctttctttcgttcgttctcacacagagatgggggccggcaccgggcggcgtcgttagatggtagaattatgaagaggaggtagcaaagaacgattcaaaaac

SEQ ID NO: 47771 - DNA, 717 bp, Arabidopsis thaliana landsberg
atactaaagtttgctactaatattccgcttttaaatatcggataaatcagcaccaaagtagaacttggttatgtaagtactagtctctgcctctaattaaaaatactctgtctccagttaattatatttctcattttcaatttctttaaccctcaacgtacgatatgaagtacaacgcaccactgatttttttcttaaaataataaaataacatttcacgagtcccgaacaggactctctagtctcataatgctcattataaataacgacgatccatccgctcaaaacaacaagtcatctttctacttcttcctctctttctgaaacttatcagaaagttgagtgataatcaaagggtgtaatggagaaagtgagagagattgtgagagaagggaggagagtaggtaaagaagatccgagaagagtagtgcatgctttcaaagtgggacttgctcttgctttggtctcttccttctattattatcaacctctctacgacaacttcggtgtcaatgcaatgtgggctgtcatgaccgtcgttgttgtttttgaattctctgtaggtcagtattcgtcatgtgatcagaatcagccactttctaccatttgaatatgtctaatattcagcgataaacattttgtagatttttctgtataaatttggctacaaaaggttgtttaacttttgtttggtgtgtaattaggggccacacttgg

SEQ ID NO: 47772 - DNA, 626 bp, Arabidopsis thaliana landsberg
gggagatacctgattgtctccctgatctgcatttggtggcttctccgacctgtcaccaccaccacatgcaaaaatgtcaccactattgcaaggcgcaattcaactccaactagagttataatcagaaaccaagtaatatagtagggataatccaattcaacaagaggcatttacccaggacccagattcttcagattttccacataattttctatacgacttattaaaggtgccacctccttctgtacaatatgaaattttgtgttagctttcatttatcaattactagattaaagtttctataaagtacagaggttaccttgtacacagagagtatattcaaggccacatccgagaagtaatcttcatgcttctccaattcgtccctaagaaatgccaatggattatttgttgtggtcgagcagcaaagcaagatgtattgcgagaaacagctgagagtagatagaaatacaaagtctgcttatccttcgtttcgatatgtgagcactgaagaagccatgtatcctcaagaaaattaatccacgtcttgataacttctgcttctttcttacaagctacaactgatttggacaggtcatcatcctgcatgcagaatcaacagaagc

SEQ ID NO: 47773 - DNA, 964 bp, Arabidopsis thaliana landsberg
tttcgatactgactcactgtacttagactgtgaaccatgtgattgaaatagaatctaattagtctgatggtgattgtttgtcagtactctctgatttaaccactgttcttccatgtttatgccattcaagtcttgataaattgctcatgtgtttcagaaagtccagaagatgcacccatgcctgtatgatgatagtgctggagctagttacaatctaagagagagactgagttacgaggattacaagaggggaaagactgggaatggctcggatataggcagttcagatgaggaggatagaccatgtgctctagttgggtcaaagtttcaagctaaagtaccggagtggactggcataacccctgaaagtgattcaaagtggttgggcactcggatctggccactgaccaaagaacaaaccaaggctaatcttcttatcgaaagagatcgtattggaaaaggaagacaagatccttgtggctgccataatccaggatctattgaatgtgtcaagtttcatatcactgcaaaacgggataaactgaaacttgaacttggtccagctttctacatgtggtgttttgatgtcatgggtgaatgtactctccagtattggacagacttagaactgaagaagataaagtctttgatgagttctccaccgtcacttagcccagccttcatccatcaggccaagatgattcttccttcgaagagcagaggaaaaattgtgagctacttctacaacgtgacccttttgcagtacagagcaagtcagagtagaataacacctcacgatatagacagtgatactgatcaaatattcctccgcgcaacagagaatgaaaatccagcccccgaagcaaacacatttcagaaacccgccctgctttcgcctaataaaaaaagatgtcgatagagctatcacccggttgagattcaagtaggagcagctctttagttt

SEQ ID NO: 47774 - DNA, 243 bp, Arabidopsis thaliana landsberg
caactcgacacgataggatacctccttcttccccttccacttcccctgctcgtgcggcccagcgcggtgcaacttcaggcacaccggcgcgcggccatagcgcccctgtcgcgtccgctcggcctcgcgcgtcacccccctcgcgcacttcccctgcgcgcggtctgcgcggatcctggtagcattcggtctcgctcggcaaggagtcgattcgattaatgtgcgacccactcacttttcatg

SEQ ID NO: 47775 - DNA, 265 bp, Arabidopsis thaliana landsberg
gcataatctcaaagaatcgacatttcggttttaagcaaacggactcctgcgggggtggagggtatactgtcttgcacactgaatgatccctctgtcgttgggtgacatttgctcacttgattgcaacactaaacagcatccttatgtgagcataggaagaaaacagacgagcgtcttattctcaacactgtaactagatagagtgaaccattctcttcagctaatgaaactcgaattcatggcaggattaacagaccacacacaa

SEQ ID NO: 47776 - DNA, 1132 bp, Arabidopsis thaliana landsberg
ctactgatttcatggatcattgtgattgaagttatgagagttggtgaatcagcaagcttctgttacaggttggtttcagcctctttctctgtttgcatttggtatttctcactgacatttaacaagtagacaaaacattgctaagtttgctaaagtaaatgaatatagaagagtgtgaaaccagcaactagaaatgtttttcatatctacactatttttgctattccttgttattttcatatgtccgtccatttctcttgtttcttccacaagcagtgaacattttccacagttgaaagaagttcctttagctcaaattcttgtttggtggtctttacaagtttagactgcttgtagttgtatctctaagatagaatgactatcatctgttgttcatgggtgcatagtggggtttgcagttccatacgagatgaaacagactttttccctttgattccctggaaagtcttcccttttgaatttaaatagacaattttcatcagatgtaagtggacctatgattagccatctaacctaggaactattggtttcatatgctttcatttcttttagctttttcctcatgtttgcacttgagatgcgaatttgtttgagctagtcattgttacacacatacaaactgcattttctgaaagcacacattttggaactcaatttcttcagaaaagttgtttctgttcgttttcttccctgttctgtattaagtatctagatatatgaatggtcacagtgatgaattctaacatctttgtaatgagtgtccaaggatttcctttaaagttagtgcatgttttgattagtatattatttcttatatcataaaactgtcgatatgtgtactgttgacaagagtaaatctttttggactgtctctaaacagacttgcaggcatgctctctagtcaaattatatagtaggttaattatggtatgagactattgtacgttgactgtgtatatgagaaatgttttaatgtagttattcgtggtgtgcgactaaattttactatgctgctagattttgattcatgatatatgactaaatgttatacataactgctattagcagcgagatgagattcttacatatgttcctttgtaattagatgaaa

SEQ ID NO: 47777 - DNA, 300 bp, Arabidopsis thaliana landsberg
ggcagaacccttccgtgagccattgacccaggagaccccattttttctttttggttttcataccgatacaacatatgcaggtggagggcgttttaacttgctacgctagcaactagccgtaggtggattgctataagacccactattcatcgtgacgtcttgggcatcacctagcatagaattggccaataccacttgcgaaaacgtcacctgcttttcctgagggggattaatagggttctacgtgggatgcacaattgaatggagatcccctataacgccgcacttatgctcatacgt

SEQ ID NO: 47778 - DNA, 593 bp, Arabidopsis thaliana landsberg
ggggtaggggatcttggtggaggggttaatttggtcggagggtgctcgagacggctagtccacagcaaggtggcgggcgcccacggggccggcggtgatcgcgtcgatagcagatcacgggcgaggggagagagctgacaggcggggccgctgtcagaggagaggggtgatcaagagggggagcgggcgcctgatgagtggggtcggccgatcagtgagtcaggaggcgcggcgcgaccggtgcgggcgcgtgggagatgggccgcgtggccgagcggggaacgggcgtgcgggagagagggagagagggttgggccggatccggccgtagctggggggaggatttccgttttcttttttccatttctatttctttcctttttcttttaatctcctttttcttttgaacaacaaaaattatctatattttcttgggtgtcagaatattctatgtgaggtgctactaacaaccatggtgcatgcatatgatgaatgaaatgtcttatgaggtgggggaacttaggagataacaatggagggttaggagttttagggtttctaacttgggtcaaaattgggatgttcactcagat

SEQ ID NO: 47779 - DNA, 366 bp, Arabidopsis thaliana landsberg
actcaaaattggttttataataatcatcgttttagagttttaattcagatgtttggaaaacattttagtttcgcccctattgttttagtgctttgactgataaaaaaattataaatatatgaataaagggcaaaaccgaaaatttaattattttttgaatttatgtgcacaattatgttattttaaaccggatggagtattacatagattctatccaatatccatgttgatccatgcggggtccagttgggcgcataccatattcggttttccctggagataaatcacctttttttgatactcgaggattttatgtctactagaactcaactaaacactcttctggtaaacttgtgtttcaaactc

SEQ ID NO: 47780 - DNA, 789 bp, Arabidopsis thaliana landsberg
gtcatgtttaaattcgtcgtattactataagttctatcaagagaaaagccatgtaaaattacggacttttatccgcgcattttcaaaattaagattagctccgaatagttattctacacacaatggagcagacaatgcgtaccaaaaattataccatgcatttataatgatattgacgacaacatgaattattcaccataaatatacattaaaacgatgtgtatccaacgtagacattaaaagtcaagagcccttgtttgagaaggttcgttctcatattcggaaagaagctaatcactatgttttggctctgtttttaccttaaaactcggatttgttttgacagatttttgccattataacttttggatttggtttacgcagccatacttgtgttgactccaccttcttcttgttaataaatttttgcattttcaataaaaatagaagaagacaaaaatcaagcatctaactaaaactctctctattctttagaaaaaacaatgcacattataagtatacattatatattactgtaaattaatagctaagggagatgtaacatgttagtccatgtgggtttcacgtactgaatgttaggcctcttaggctccacgatgtttttatgtccaacgatcccttttgattgttcctatcaattttggtccattcaaacataatgtgaccaaataagattattcaaatttaaggtattgataaaataatgagaaaagcagccttatgcaatcatgcaataattgaattttgcgatataactatatacatgtt

SEQ ID NO: 47781 - DNA, 845 bp, Arabidopsis thaliana landsberg
gatcatacgtaccgctcaattttaatcatatcaagatataagtctggtttaaatctgtgatccatatggttcaattaaaaattatgagacattttattacatatccactagtccaaaatttcccaaaagctagttattaagcgcgaattattgtcgccaaaaaatggactactggacttagatagttaattattgtcgtccgtacgatcagaagcttctataatcacatgtggttgttacaaatttacaatggtcaacggctacgtattccatacgtcatttatacatcaaaatgggttaatgtccactttttctcactaaaaggaaaaaaaaactatgaaacattataatgaaaaatgagacattgcagaaattactagcgagtagagagactatatcaaataaaataattggacgaccaaatataaatgagcaatgacatcaaatgtttttagaattagtgacttctaatttaaaagttaatttagcctttacccaagctaagttgaatttaagttggtaaatattattagtagtttgttaaacagaagattattaacttatttgaaaaatatatcaagaagtgcaaactactaataaatttgttaaacagctacttttgtgaagtggattgagacttacataaaaaatgcttgtctaaagaacatcatccaatcattcatggttggcccataatattaaatggaaagtggaaatagttttcttataagataagcaaaacaaaaactatatatcaaagaaaacaagaactcttttctaaattaaaatttatagaccaatttagtcagccgtccaaaggaaaaaaattcagataatgtcaattt

SEQ ID NO: 47782 - DNA, 797 bp, Arabidopsis thaliana landsberg
attacattatggacataaacattttgatgtagcttcttcttttttgttttcagatgtgtctttgcgttatgaattgtccattttgttctaaagttttagtgtttttgtttaggttcatcatatgctaataaacatttgggttccaattgctttcaatattttgcagattgtgtgcttagaagaaagggttttgttgaggtgtcatggattccgggacgcagcaatcagagacgggggagccggcacctgatccaaagcctgtggatgtgatccaaaaattcctcattgtagtgaaagatttgcatgagaaagtgaataaagatactgttttaaagacggccaggagcgctggtcctgtcctcagtcaagggactactactattagccagccagagcatgctgtggacaggatgttatcttttcctaatatgagtaccaccaacaaatcagaaggcccgggcgatcatcatattcctaagctgcaacgtaatcttcgtttgcttagggaagatgtggagaagctgcaagaacttcgcactgaagttgcagaggaggtgttcaaacatattcggccacttgaattgctgcttgaaaatgtggctaaagaggagaagaaagaccctacgaaaccccccttgaccaaaggtatgaagaaagatttggacgatatcaacagaagatctttaacttgatgtgtcaagtccccttgttgcccacaagcgtaaaaaagccaaggatttaatgatgcaacggcgataggataacaacggcaagaattgttgctgcccggatcatgc

SEQ ID NO: 47783 - DNA, 723 bp, Arabidopsis thaliana landsberg
ttactatgctaggttaaatatttcagcatcgttctttcatgttgtgctggttatgtgtttccgattaaaatctcttcttttcattttactcaacttgttgaactaaatgaagcagaggctgaaagaattcagtttgacactgcaatatcaaatggaatgtcatcggttgatctgaggtacaaggcggctaatgtcaatgttagcctcggccctagttgtccttcgacgcttctgactgccaaaagaagaggagaagcagaggttcttgatggcgatcaaattctagatgacatagataatattgtaagcatctgaagccaatcttttatctattcctgaaatcagtttggttacttaactgacttgaaatttgcagctagaaaactatatctgggagaatgattcatacctcggagtaataaaacgtagaaaatactcaattggtttggaggagaagccaaaaatcatgtcctcccttgtatttcatcaagtgaatgggtaacgatcggatcaacaagtatcataacatgaatctgtcccttttgacccatctaagttttttttttttggtttgcttactcagatctgacgatcaggatcttttagttgatggtgccggaatcaaaaccggcgaccaattccaagtatacctccctgatctcaaagtggctgaagcagcactaaatgatgtttctgctcaacttagaaatctcaagtctaagc

SEQ ID NO: 47784 - DNA, 722 bp, Arabidopsis thaliana landsberg
tctttcagggtgacagtcagtcttctcggaaaaataaaaatgtagatcaaagctgctcaacctctaaacagcaatccaaagattttcctgccgcaggcagcaatatcaggtcttatttttcttgcaattaagctacacatctggaaaatcatctaaaatatatctcacattgggagttcctcttggcataatagtgagagccagctagatgagcgaagaagaaagaataacgaagaggtttcacacaataacagagtaatgacaagtccatgttgattatgccgtttaatcatgattgcattttgcgtttcattgttgttctataatttttaacattggttatttggcttccttctgtattaacatagtcagctgaggaatcaacttctggtcatggaggtatacgctactttcatttttattaacatacgtgttttcttgttgtatacgatgaattacctttcatttttactagcatgactccagtttttcttgatctgacgctataatttattatcacgtttatctcaatggacaatctatggtggattctgttaaggttgctaaatggaatttagaaatgttcttttttacacaaggagtggtgacctgttatgaaacgtccatctaattaggaaactggttgtcggctttatgtaaatatgtattgtggaatgtagatatcaaagaaggtgcaaaatctggtggtggtgcatcctcgg

SEQ ID NO: 47785 - DNA, 1053 bp, Arabidopsis thaliana landsberg
  unsure (1)..(1053): unsure at all n locations
cctttttttctcctaaatgtgaaaaacataaagaacctaagaatttgtgtaatagctcctttatgttatttcgttcgtcgatggagtatcaactatctcatgtagaacgtaccttacgtaccatcatattaaattaagagtatataaaaaatcgaaaacacaaaaaaaggagtgaaagttgtaaaatactaaaatcttacaaatatgttcgttatgatataaacaccatgcagttgttattattagtcaacgtttgggtcgagtacaatggccctacacgaccgataggacagtggttagaagttagtaaatggttacgtgtttccaaattttcaaagctcataatcaaaataattctccaccatttatgtcatctacacaaatttataaccatgacttgtccgaactccgaatataggaccaaagtcttgtcccgttcgaccctgaaattaatacgtttcataatctttctatacgtaacgtaagtcagcttctaatgatgatcataacatctctataagtctagagtaaaccatcattctccaacttatacaattattgttgtaactagtacgctttttaggcatctacaaagaaattatttgtgtatcttttatacgtcaatggttctttatttcctctctattttaaaaagctaaaattgtaaaatcaagctataaatatgagacaagtagatacttttccaaatactaaaatcaaaagtagaataactttggtacatctcataaggagaaaaataaaagaaacgagagaagttaattcacatattgcaaacttatatgtaaggaacagagtatgcagtacgacacgagtacatatgcggctttgtagtgaaaatgggaaaaactccaaaccataaatgcttttactactttttacattcgttntctataataatattattatttgcttcatttttttaataatatggcctgctgcatacttacacgtgcaagtacgatataaatattaatcatgatttatattgataccttacaaaattaatacatatcatcaaagagcaataatgaa

SEQ ID NO: 47786 - DNA, 1545 bp, Arabidopsis thaliana landsberg
caaccaaattaaattacatatccaaatattttgagctggcccatatacattaattggaataatttttcgtttcaaggattgaaagcgaactttttctgtgtcaatactaacccgggaaccaatatataagaagattcctccattatctattgacgaatgcaagtgtaatgcatcaggatataacatttaccttaagccttttctcgttttctcttttctcggcttcaagtgctttctgtttttcctctaacttctggtaaaactgaaaccagaatatgctgacaattagcagagtgatagatacacgaacaaggaacaataaataggacatctctaatgagagaaacaaagcaatgccatgcttccttaaaacgtttccttataagctacccaaaaaaattacctctcttcgtctctccagtcgcgatgtgctactaaatgttggagcaactccaatcgttatcttgggtttaaaacttcttatggatgtagctgatctatatatggctaaggataaaagtcctttagtggttagatattaaaaataaatgtttctgttttcgtttaactatcacataaaggatacgaggaagcaacagaaaaactatcttcttcatcatggtgcatcttatgatctggtatcctcctagttggtaaaggagagtttagctgaacacaaagaggaaaaaactaattcagtctcatttaacaatcaccagaaaatcccttcagaactaaatcaaagaaaacaagaagtgtgctacaagattcatttcttcaacacgtcacaatgcaaaaaaaaaaaacaggttacataacaccgtgtgcttttgtttacctgtgaaactcttgatgctgaagaagagttatggctagcaccatttcctaatgaattattatcaaccgctgctcttctaggcttttcagccgacagggaaaacggctttggaacagttgttttcgcagtaacacgaggtttaacagaagatttatgggatccaggtgtctcagttatcccttgttgcctcaaacgagcatcatccgcaaccaaattctgctcggtgcattctttcacctctgcagcttcattagtagacggacttgggactttattatcatctgaagatcccgtcgagctagctgtcaaactatacgctttcttatccatgtgtttgtctacaagttctctccccattaccactactacaacaacaacaaaaattgtatacactacataaatgcttaaagccttatatacccacaaaaaaaactcacactttattagccgattcagctaaaaacccaacaaacaaacacattgtgcaattaaaaactatcacgaaacatcaaaagggagaatctaccaaacaaatctttgaatataattttacatttaagacaacaccaacaaggaatatgaaccagcaatttatcgaattttcctgaattaacacaacaaatacaaaactttattttcccaaaaaaaaaaaaacatacatagcatgaacaattcatctttgatagcaatcagcgaaacctaattga

SEQ ID NO: 47787 - DNA, 1420 bp, Arabidopsis thaliana landsberg
cctgtctcttagtaaaattgtggctttgtaggcttgttgtagtcttatagcttatgagccttctctactacaaatgttttaccctacagattgaattcgtcgaaaactagagtttgaaggagactgaatgagaatatttttcacttcactgaactcagaaacgaaacaagacatgaaccaatctcagagaccaaaaacagtaaagagaaaaaaagatccctattgatcaatgagttcatctatctatataccacaaaccaacaaattcccccttcacttttcagatttattgacttctgaataacaaaagggtttcaacgttcccaataacactatctccattctctacagatcaatctatgcggagttcgtcgttttgaggcctgaatttgatgatcatgagatgtgggaacacaacaaggcatgccatgaacaatgtgaactgcatatcatcaaaaaaaaaaaaaaccaatatattcataaccagatgagattgtctacaaggacgagtttattatggactgagatcataccagaagggggagagtcaagaagccccatataggccacagagcaaaggagagcctgcattttgcaaattttgtcacacataactattatgagactcgcgtagttcctgattgactagaaaatgtgatttacttacaggccaaatgaaatgatgccgagtagggtgatgaaaggcagagcagagatactccacagttcccatttctcatcaaaccttctcatgctccaagataacatgcttgcgtagattatgattataatgttcacagctattcccaacatcccgaaatacaaaggcatcctggaaacaaggccaatgaatgcattatgtttattttggttttcagcaagaaccatcatcccaaacaatgttgaaatctcagtaaactacaccaaaccataacaagagaagctacattttcccacaccatttttgacaataaaccatcataaccaagaatattgacttcaaacctctagggccatcttcaagtttaaagtgagccacatatgttttctttttagccatatataacacaagcaataatccaaaaagagcaaagtgaaaagagcccatcaagaaatatgttaccttttgatccgagcatcgtgtaagagaatatgtatcatattagagtgcctgtctccaaaatagacaatgaagacagcagatgcaatccaaagcacattctccaaaatctcaacccaggttttacttctaggattctctaaagaaaaaggctgtggcctagagcaagcatcatcctcaagatcatcaccaccagaagcataaccttggctatgtctttgcctaatgtacccaccaccaccaactggagtttcaccagacatgttcctagaagctaaaagaaccctctagtacacaatc

SEQ ID NO: 47788 - DNA, 780 bp, Arabidopsis thaliana landsberg
aaaatcagctaatgtggctaaaaaatctttttttaaaagacttaaattcttaaataaaattcagtttgcacgagaaattttttttagcatatatggaaaatacataaaatttaacatagtttaatatattcatctacaaaacagttttattttttccaaaaaaaaaatagataatatattcctcaatactaaatatggaagatacttacactaataatataagaaatcaaggagagaacataataaaatttaacaaaactttaagaaaaacagtataataaaccaatgggaacatcggatgggacaacccaacgaaaacatgcagaaaacctctagaggctcgaaaccttttggattcatccactcatgaatatgaaaaatgcttcaatcctatatttgagagcaacttcccgcaaatatttttgaaggaagaacctaatagcctaacctaagaagcatgaagttgaaaaaaattggttttttttaacctatggttttgtaaaaacaattatatatgacagaatgtaaaaatctgacatatgttcaccatcatcgagataataaaaacataaaatattttataaataatatttgtacatagcaaatattatatggtttaatatttccttctccaattttgttatttccaattttgttttttaaaagaaaaaaaaaagttatttccaatttcaaacactgtcagttaagtagttataatgggtctgcacatatacctatttatggacacaaactgccgaataaacctaaataactatcact

SEQ ID NO: 47789 - DNA, 616 bp, Arabidopsis thaliana landsberg
cactctaaacactaattcaaagcatgattaactaaaataaattcaacccatctgtggaccacctcttttttaaataacactctaacgagtaaagccgacaccatattgccattctatctttaacctgctttgtggttatccatctatttttcatgtgttgttaatcagatgttgaggttcgaggcaaagttaggcttgagttatttgtttaggaatgaactaaaaacagaaaatgagcaagaaaaatcaaatgctactgcaattggacaattaataggacaactattagctgctgatcgacgatgagaaaattggctatcaacataacatctgaaaatctgaaacaagcattggaaaaatacgcattcattttcctaactcaagaaaattcagaaggctactaccgagagtgcacagaatattcagtgagactaaagaagcatgtcatgtaagcctagctagcagtcagaaagaatccaaataattgttactcaggcatcctagattttgtgcatttctgcttagagcgtcaacgttaagacacagatactcatccaaattagtttcttgttatagagcctatggtaaatgaattggagggtcttaaaaaatgaat

SEQ ID NO: 47790 - DNA, 862 bp, Arabidopsis thaliana landsberg
ctttagagaatcaccgatttattattaccgaccttttggtatcttctccatatctttcttcttcttacaatgttttttagtctttatatatatatacacaacaaatttaacattccctccaatgtcctactgtctccttctctgtgtgttaccatggttttacttcaccatgtaagtctctctcattatcaaaattcatcttctctgttttcttcctcctttgaatcaatcctttgtttatttcttgtgttgtgtatgtttaatgcagttagagcaagggatgcgtccgatttcacgatgttacaatccaaccgcgtattcgacaacaatgggaagaagtttcttcgcaggtgcagccacaagcagcaagctattctccagaggtttctcagtcacaaagccaaaatctaaaaccgaatctaaagaagttgctgcaaagaaacatagtgacgcagagagaaggagacggcttcggattaattcccagtttgcaactctccgcaccattcttccaaacttagtcaaagtaagtttagctctgcattcaattacacaaaatgtttcaccagagaagtaacactttttgtattatgttcaatgaaactaaacagcaagataaagcatctgtgcttggagagactgtcaggtacttcaatgaattgaaaaagatggttcaagacataccaaccacaccatctttagaagacaacttgagattggaccactgtaataacaacagagacttggcaagagtcgtgttcagttgtagcgacagagcagggctaatgtcggaggttgcagagtcaatgaaagcagtgaaagcaaaggcggtgagagctgagatcatgacagtaggtggaag

SEQ ID NO: 47791 - DNA, 1061 bp, Arabidopsis thaliana landsberg
aatatgagattgtgttttaatagattttacttggattacgatctgatttaagctgagaatgatatataaactatgtaggatatataacaacgcttatataatttttacaattatgacgtcgatgaagttaggttttaagaagtccatttaccttttattgattaaatcaaatatatacatatgtaacgacacagtttctttggcacattcgctaagctttttattttacttttgtaaaaagcaacttttgtcaacttaagacaaattagtaggtgacgaaagattgtgatttatatgcatgcgctcgactgatattgtattgcttttttcatggtagatcgaatctgattaagtcctttcaatttttccgcaattctcaactaccactagactagagttgtatgggccaaagttttcttccactcggttaaggttctcaaactttcataacaatgtatcaaaatattaaagaatgaaatcatatgtcacagttttattaacggacttgtggtttatgtatgatttccaatatttaaagttgatggttaactctcaaatctcatgtatgatgtctttctaagcccaagtcaactctactactaatatgatattgtccgttttgagccaagtggccaagcccgcacggatttatttttgtctcctttccaaaaggtatcactactaattggaattagacatgatttatatattagactgatattttctaatttttcgatgtgagacgttggtttgtctcccaataattatctcctcaaaccaaaccccgaactttaggccctcccctcaagcaaaacattagcacccagctctagcattccttatttgcaaggactacttgaaacactcttattatcgtgtaacattgagaactccttccataccgaacatggagcccaaacccacctctttagatccacttttttttacataggctataatatcaattgttggactcaccaagaccacacctttttttctaatatgatattgtccgctttaaaccaaaaggccaagcccacacaaatttgtttttgaactcg

SEQ ID NO: 47792 - DNA, 605 bp, Arabidopsis thaliana landsberg
cagtatatagggaagcaatggttatgacttatgagtgcaggctccagtactacatacagaggttcacgaacatggtttacgtccacaaatacgagcaacctcacaggctatgaaaaacaacactgattccaagtactaactaccatcaacctcagagtccaatatcgagccagtaacattcaccaagagagtctaaagtcacaactttatattcattttcaaactaaagagtttctcattgttaacaaactctcaacagattcgagactatgaaataagagaatcaacactgatatgagtatctctctacattgctgttacatcaagttgtcttgtagaaatcagtgaagaccatagtcacctaactcagaagagtactctccatgaacaccttcttcttcttgttctccattggttagcactgtgatagaatctaccacatccacctgtttatcttttgttacaatcatctgattaaagtcatgaacagcaatccaatcggtgacatacaaatctggatatatgagtggaactccattgagaagaagtatattagcggacacagaaatctcaatctcataccctcttagaacagtctgcagaat

SEQ ID NO: 47793 - DNA, 637 bp, Arabidopsis thaliana landsberg
  unsure (1)..(637): unsure at all n locations
tgtcctatttgtggaaaagaaacagattgtttctggctcgataagggtgggaagttctgttacttcgattgtcataggtcttttcttcctttgaaccaccccttcaggctccaggcacacgagttcaggaaggacaccattgtcacgaaggaacccccgaagcgtcgcaccgggtgggaaatcgctgaggagctgagtaatctagtgagaaatgaggatggggatgggtttgcaggtttcgggaagaccnnnnnnnnnnnnnnnnnnnnnnnnnnnnnnnagctcccttacatgagggcattgcagctcccgcacaacatcgatgtaatgcaccaagagcgtaacatgtgtgaagcagtatttaacaccgtcatggatttcccagataaaacaaaagacaatttcaaggcccgagtggacttaggtaacatatgtaaccgcccaactctcatgctcagagaaaatggaggcaagcatcgtgctgaatttgccttgagacccaatgaacgaaaagaagtgatgaagtggatgaaagatttaaaatttcccgatggttatggtgcgagggtcagaagatctgtgacttgaaacaatgaagatcaatgggttgaagagtcatgattacgatataatgatg

SEQ ID NO: 47794 - DNA, 1965 bp, Arabidopsis thaliana landsberg
gagagtctatatcgaggttgtgcaccaaatggtaaagacattacagcagtttcaatttttaccacataaccacggctcttggaatgggaagtattacagaccaatctgccgaaaaaagccagattttccactacctacacatataacaaacaaacatctcacatgatcaaactaatgaaatcccttcacaggaaaccaaaacttaaaacattagtgagaaatgatattattacctgccattccaacaacgataataatgataggcttcttcttgaaattagaagatgaactcgcagcactaacacgaagcttgtccaatgagtcaaccagcttttgactctcttcaacaatgtccttttaaaagtaaaaacaacaaatacaatttcatttcagaggttttttcatttgttattttacagtaacttaagctaataaacaccatctaaaacagtaccatgatatcattttgattgtataagcagataaaccaatagtaaaagccattaaagtgacagagatgaactcatcacctgttcactagacgactccataggatccatcagtggcgaaatttgcttttttcttgtatgaatcttttatctgccaataatcccaaatacagcaaattcagtgtctccatctcccaaatcgttgttctatacaaaatctttatatatcacagcaaagacaaagaataaagaatcacaaagacgaatccaattttcacaaacttaacaattccatgtttttttaaagtttcatctatgtgactagtttcaagctcaacatactccagaaaacgtaaagagtttgatagatttttgtaaattggaactagaattgattcgataaccaaatgatatgattattcaacacaagcgtaacatgtggattcgagcatatcagcacacaaattcatacaaaattttcgtcatttttacaggctaaaaaagcagcgaaactccagaaaagaagaagagaatcaagaggaagacgagagcgagagagaaaagaccccagtcgtcgaagaaaacaaaaacagagttagggctgatttgtggagttgtcactgtaaaatcacatataaatattaatgtgagcgaccatttttggaaaatcaggtccaaggcccaataagttatttccagcccatgtaataccgaggtaatgcaaatgattctcaatttaatcattttatgttgtgtaaaccctctttttgcttggttttctcggtttacgtagtttctttcttcactgggacttagttttatggaaaagcttaagtatatacaaatcattaggagaagaagatgtaacagttgacaaaagcataaaggaaaatggagaagagcattcgtttattttttaccaaacataacataacaatcaaccatcgacgcaacaaatgttaaacctcttgtactactgaccagatttttcaaagtagcagaagagcaatttataattttaacagacataaactaccaaaccaaaagtcacggcgggctacaacaactaaaagctgtaaaatcatttatatgaacgtgcattccaaaaactcacgcagattccacaccgatttcttcttcacctttcattttttgccccaaacttttttttaatctttactcttctcttaaacagcatcatactcaccgtgtgagatggttcagtgacaaaggtttctactggatcggatggtattgagctgatactctctttggaggtagctttcggagaatgaagaggactagtgccgatggaagtacttctaccacctgtagttttttttttttcgagttaatgaatgagaataagaaagagaaagaatgaagatgtagtgttacttaccatatagtagattaagttcagaaccggatgatcaagaacatcaagaattaaatccttgtcaaaagctgatacagccacctgatgtttgcatggaatacattaaataacacactg

SEQ ID NO: 47795 - DNA, 831 bp, Arabidopsis thaliana landsberg
taaaccggaaaggaggtcaattccgtaattttaaatttccttaaaccctgtgcctgggtgaaatttccacacttcatcgcctcaaggcagaaccctaatttatctccgcgtcttctttttgctcagtaacaggccatcggagaagttaagaggctaaaatggatatcgacggagaagatgtatctagaagacttcacgttaagttcgtgacgaagcttgactctcccttcaaagttccggtcaactccgtcgcaatcccttctaatgtcactcgtctcggcctctcttccatcgtcaattctattatcgaatccggtagccttttctctccatctctccctgcagtttcgaatgctagtatttattcgtctttgtctttaaatttgtcaaatcctaagtgttacttggaatagtggtctctttctcatacgagagtttgttaggtctgcttaggaacttgtttgtacttatgaattagagagcttacataaaagcatatattattgttctacctgtgattatgcaatattcatcactgagactttttggatgaacagagaatccagagtggaaaactgagccgtttgatttccttattgatggggagcttattcggatgtcactcgaagagtttcttcttgcaaagggaatatcggcggtaatgtgtttcatcttaatcttccactattcacaccagctagtgtacttggaattagtccatagtgctttatcttggaaacatatacttaattaagttcattggttcttacaggagcgtactcttgaaatcgaatacataagggctgtgacaccacggaaggaagaagaacc

SEQ ID NO: 47796 - DNA, 722 bp, Arabidopsis thaliana landsberg
tcgaatgcgtgaagaaatcgacactaatatgaatcttgaatcatgagactgaattggttttgatttcgtttgtttgtttgtttgattatgaaatgcaggttaagaaattttatcagggaaggaagagtgagagaacagtgttggtgcatgtgatcggagagaagattccattatatggaagtggttcgactttacttccaccggctcctccagcaccacttcctaaacccaagaagaagaaaggagctccagtccctattcccgacccgcccgcaccaccagcaccggtaccaatgacgctcagctttgtcgtccgatcacgagcatacgtgttggggaagttagtgcagccaaagttctataagaaaatcgagtgtgacatcaacttcgaacacaagaatcttaataagcatatagtcatcaccaagaattgcaccgtcactacagtttgaaggaaggaacaaaagaaaaagtaacaaactttttagtcggcgcaatacgatgtcgtatagagtaacgtgattttacagctcaacgggcagcattttgggttgttggggcagccacgtggaggtgcccgaagaaaagaagcattgtcggtggctttaatttacttgagtggttcatatttgtctgtggaaaatatataattttataatagtgtgtacgattggactgaaaaacacgaggaatcacattttatttatttgttttttaattca

SEQ ID NO: 47797 - DNA, 410 bp, Arabidopsis thaliana landsberg
aattaggaggtaaagaaggacaattctggttcatgtttggatatgggtaaatggtgttataaccaggtaactccattctgtattcacctagaatttgacagaagtcaagcttcccttcctcggtgttgcaccaactcggtaaccgagtctggttagactcaaataacttcagagtgtacgcatctcggatctgaaaatacgaaagaagataaacgttcatgagtaatgttaatggaaagatttgatattgaaaagaaaaaaagagaaactcacagtgaattcagtgacttgaatgtgatcagcgagagggtcgaatataccagcagctttgtacattgcaaggatgaaagcaacacatgttgtcgatttaccgtcgctataaacccactcatcctgttcagggatggtga

SEQ ID NO: 47798 - DNA, 673 bp, Arabidopsis thaliana landsberg
  unsure (1)..(673): unsure at all n locations
cagttgagtaaaagtcatcaccaaccaccttctgtgtttttactttgcctatatattgtaatccatttattgactgccatgaaactaaaccatattaggaagaaaagttaaatcaaacctaaaagtgatctcaagacccgacacgaaagaaggtgttctttttttgttttatagccaaagaaggatagtgaaagcatttacaaatctaacttaaagacatatttcaaaccaaaaaaaaaactaaaatacataatcaaacctaaccaaaaagtgacctcagaggctcagatacaaatcaatgtactttaaaaataaatctcatctaccagaacaacatcttcacaccattccatgaacctataaagttgcagtgagtcatttgcgactttatgcccaatggtccaaccaaaaactcctcctctcacaacatcgaaaatacttaaagacactaattatacaaagacaaaaacagaaaagaacaacacacacacccttaattttaaggcattagtatttgacaaataataacattttccaaacttatcaatatgggacatgttacattattttttttttccataaacagagtgttttgttcttcgtttttcaaatacatgtgaaggaattatttgtcttntaatttcgcgatgtatactctagaaatccagtatat

SEQ ID NO: 47799 - DNA, 633 bp, Arabidopsis thaliana landsberg
atcccaacaccaattgccatgtcagcttgattgactgcaagtcctcgaccagattttttttttataaggatttcaaattaagcattcgtttttataacctacatggctacattctgagcattttaatttgactcataaccttttgtaagttataactatgttttagtacttttaagttgcgacgagttcaatagttcacaaaacgtacgtaaatcatctatgtcctacactataaatataaagaatgggtgttatttagattttttgtatcttgtcccaagtcctaacataacatttttaaaaaaatttaaattgtgtattccaattatatattttgtccagcagccactgagttaaaatgttcttttcgtgatttcaaaggtcagtacgtagagtagagagaatcacatttctccactagttcaaaacgtcattaagtttctttgaacatgtgtataatcatcaactgaggcaaacacttaaaatattcgaataaattaacaacccaatacagtatttggaatagctagctactaattaaaatagtagattccgcctgattagttgctgctgtgcatgaccaactgacaaataataaaaaagttaggacaatttatacgagaagaatgaatg

SEQ ID NO: 47800 - DNA, 581 bp, Arabidopsis thaliana landsberg
ggccatgttttgtagtgttgtcctgcacatataaaccataatgttcaactatgagaattgtaagctttatatatatatatggacatcatggaagatcaattacactgtttttatgcaaatttaaaaagtatagataatggcaaactaatttaaacaaatgttgtttaaccttcttttcctgaaacatctgaaatagcttcaccagatcgtgaaggaacaaactgttcattttttcagcaacagcatgcataacatcatgtgagaactgagatcatgtcatagttgctgtttgggaagccagtatctcaatgggatcttgagtagtagcatcctcagttactttgaaaccgcaaaatgattttctcctgtccattaacaggagtaatcatggatcaggtcatattttatcatggattcttttgagcacattgcaggtaggttgagagaatgttaagtacagaaaaagcaagtctaatgtttcactttgtctgcctcaaccagtagcaataacacgaggaataaaccacgtgggtgcaaatacatccaaacagacatgtcgcatgacacaagcaaacagagaa

SEQ ID NO: 47801 - DNA, 530 bp, Arabidopsis thaliana landsberg
  unsure (1)..(530): unsure at all n locations
tgactaggtaactggttgtgaagttgcagcactcgttcaactccccatatgtgtctcctttagagcatttcctgagatttgcggacacattgccttacctttttctagaactcatcccgcttttctctccaatccttctgcaagacaaattcatgtacaagacttcagaaatcattatcgcatgccaccatctcaccatagcagacttggttgcagaggcagtatgtcggttcgctnnnnnnnnnnnnnnnnnnnnnnnnnnnnngtggcagtggcagtggcactagcttctgtactaactattaaggacggattgtacctgctggagaagtaacctgaccttcttagttgccctggatgtttgcctgtctggctcaccatagttgcagcaccaagaacctaaacaacatatatgatagaccaaaaacatctatgagaagagcacaacatatataatcgacctgaacatctatgagaagaacatacgataaacagaaatcactataaaaatagagtaaacttgagcacgt

SEQ ID NO: 47802 - DNA, 691 bp, Arabidopsis thaliana landsberg
cccggagactaacgggtacgatcgaacccactcatctcactatcattttttgtaataattggttatgattcgattgtcggcaccatttgagagggggaaaggcttagcttttttttgggttatcactaattgttgttttatcacttttcatttcattttttaatttgttgattaggacagcgttactttattgtcttttgcttttaagttttaacccttcataatagccttatgtagaattagtagttggcctgaaaatcgtttgattagatgctagacctctttaatggtatgaatgatattcttaaggatttgttgtaatggagatgatgatgatgaagtgatttgcttagaggaaacaatgtaaaagttaaaagcaattgacatacaatatgactacttgaaccatagatgttcatatattatacttgcaaaaaaatgactgtaacccatctaccttatgcacatgtttatatctttttttcattttggtcttttctgtaccataaaattgaaactctataatacgataaagaacaaaacaaacggacgaaaatacccctcacctctctcagaagtctatttgctctgttctgatgaagaaaaaaaatattaagaaaaagacctaaaattagagaaggactagcgaggtcttgtgtgagcagcacgaagagtactccgtgcaagactt

SEQ ID NO: 47803 - DNA, 316 bp, Arabidopsis thaliana landsberg
  unsure (1)..(316): unsure at all n locations
gtcaaatnnnnnnnnnnnnnnnnnnnnnnnnnnnnnnnnnnnnnnnnnnnnnnnnnnnnnnnnnnatgtatagagctgccccgggaccttgatgcgatcaaaaccactgaacacctgacagagtcgactcacacatgctataaaccggagggaccacgaaatagcgcacgagcataaggcgactcactgagtcatcacgctccggcttcaccaccgagacatgtaaacgctctctgatcacgaactctatatcggcattaaggtcccaaacgcaagtaacagtcactaagtagagataacagaacgtttaatcagc

SEQ ID NO: 47804 - DNA, 2085 bp, Arabidopsis thaliana landsberg
ttgaaggtcgttcttaactattgctactttcgagtaacatacgctcacaggggatatggtggaattggaactgttcttgtgatcaaggtttgtcactgtctatgattagtctggtttttgtttttttggcgggtcaatcaaatttgcttctgcgttttggtttttaggtctctcctgaatcagccagccaatttggagaattggttgcagatccagttactaatgagctgcttcattacaccgagaaacccgaaacttttgtatgtacatttattactgagatgactcaatctttatagcatcttcaagctttgattcttatgttttattttggaaacacaggtcagtgatcgaattaactgtggtgtttatgtatttacacctgaaatttttaatgccataggagatgtttctactcagaggaaagatagaggtaaagcagtaacaaagatcttacacataatttgtgttttcttgtcttagctttctatctttaaagacttctcatctttttcctctgttttgttgtagcaactctaaaacgtgtttccagcttcgaagctcttcaaccggcaacaaggtttgtcgattgtctccttgtccataattgaaaaccattcgaatcatcttcttaaaatgatcttttaacttctttaaaataggatcccgacagattttgtaagactggatcaagacatcctttcacctctagctgggaagaaacagctatatacttatgagactatggatttctgggagcaaatcaaatctcctgggtatgtattgcttgccttgtgttttcatttctttgaagccgcaaggatacaaaatgtttagcagcagctgaaacagggatagtgtttatggctctgacttatgagttgactttcgcacagaatgtcgttgaggtgttcaggactctatctttcccaattccgcttgacatctccccaactgttggctagtggtgatggaacaaggagtgccattgtgattggtgatgtttacatacatccttctgcaaaagttcacccaactgcaaaggtacttacatatggttttgtccctcgttgaagcaatttcttctgattccacttttatcacaaagcattaagtttcatctattaacagattggtcccaacgtctcaatctctgcaaatgctcgtgttggaccgggcgtcaggcttatgagctgcatcatccttgacgatgttgagatcatggtatgtctacttatacaagacacaaagtgaaaaacggttaaattttctcgaggttgacccttcagtgactctttgcccaggaaaatgcagtggtgactaacgcaattgttgggtggaaatcttctatcgggagatggtcccgtgtccaggcatgtttccctcttctgctcatctcttaagagcctgactcattctttttggaccttgaaatgtttttgtttgattcctttacaatcgtgaacctgaagttgtactttgttgatcacaggctgagggagtctacaattcgaaactcggagttacaattctcggtaaactgttcctccattgtagctccttctctttatatacagaaagcaaaatctctttatagacagataactaacctcaaacataatggttacaggagactcggttgcagttgaagacgaggttgtggtgaccagcagtattgttcttccaaacaagacactgaacgtcagtgttcaagacgagatcattttgtaactgaaaaacggaagttgaaaaatggaaccaacccagtggggagcagccacactatctccctctgattcaatatctactggagaaccacataagcaaatatttgggaactgattcacatgtatcatttatttacaccaagaattttccaacattgtatcaattcattttctatactcacaacacagctactgtaaaaggcactgaatttttgcccagaataataaagcacttgtgtagttttggcattgataagaaactggtcttgcaaaatcctatgaagcctttcctgcgtccagtctctattaactgcaatgatttgctaagggaagtattgattgttgtacatagcaagag

SEQ ID NO: 47805 - DNA, 661 bp, Arabidopsis thaliana landsberg
gtctgtacattattatcgagagaaaaaaaatcggttcagtgtgtaacgctaattacttgcacaaattaagaaaatcaatctcttagtttgggtctttgggaattaatcatgtaaaggccgatagaggcctttggtttgttcgacattttgactcatccatcccctttagttgatattttgtatgtgggcttaaagtgtttcaattcgggctttcatagatttaaagcccattaatccttgcgtgtttaagggattagcattacagtgctgattagtcagcctaatagtctgacaaaagtcattcaacagtcaataacttaaaatgggaaagaataaacttggaagaccggttaaatgctcttcattaatttaaaccctttccatactactcctaaaaaagtgtatcgtttcttaagcaaccattatatacttactaaaaagaattagaagatttgaaatgaccatttactattattcaaacaatatattttcttcagaaattgaaactttgacttggataaaatgtacttaaactatcagataaataacacatgatactgtataatgaatattaaatcattgtcaaacacatacttaattgggttaaaattaagacaaaaaaggtaaaatttcacaaaattcccgagaacctttttttttt

SEQ ID NO: 47806 - DNA, 331 bp, Arabidopsis thaliana landsberg
tcgacatacatcagaccatgtcgcgctcagggacatgaagtgatatctcacaagctttacaaaggcactgagaaggcattacattaccaagttataataagtttattagaggtatattgcagcaacgaactaatggttatcttgatgcagatcttactcatcagaacgaagccgttttcattaacgcatatcatggggaaaaacgaccacatttcacaggaaagcgttgcatatgaacctactgcatggagcgtgctcaatttcactaggtatcctatgacctaaggaacatctgccacaatgtcacttgagacatttcctccatatttaa

SEQ ID NO: 47807 - DNA, 885 bp, Arabidopsis thaliana landsberg
cgccgatttaaatcgaccctaatcaatcttagtttacacaagtcatttttaccatcttgttgttgaaatcgtaaacaagtcatgggagtatttgacacctttgttcttggaaaatttgttgcatttaaacaccgtgtactcagagaaagccctggataattgggccacacaaataaaatattgggctgattaataaataaatttgaatttgtaggagaagggatcaacacattgatgataaaggccaacttggccactaaggccagcttggctactttcgttagaggtgtggatgcatggaatccatttttatcatttaggccctccttcgtcattaatagattctccgaaacaaaaatttctaatgaaagaaaaagaaattggatgtgaaaataaaatcaaataaaatatttgtcaagtgaaaatgatcttaagttttatagagaaaccatacaaattatacatgatcaagtgtgaagagaagtctggaatactttagtagcgccacctatttttgttgtcattgtttttaactagtcaataagccaatctagagatgggcttaataatggccaaacaagttatctcataactgataattatgtatgaagaaatgatcagttcaatgttgggccaactttttacttaagctatctaattggacttaatataaataaactgtgtaaaaagaaatgggcttaaggcctagctcacattggagctccgagagaagtcggatcgggttgaacatgagactcggtctcctttgttattcacgatctttgtgaatcgggttttatggagatatcgtctctcgtaatgttgcctacctctcttggatttgtgggggaatggtggtgattgattccacatcagacctaacac

SEQ ID NO: 47808 - DNA, 843 bp, Arabidopsis thaliana landsberg
tgtaaattagaagttaaatggcctttaatcaaccatttttacattaatttaaaaaaattcagacttttaaaataaaaaagttaaaaatgaaaaaaaaagtaaaagtaaaaaaaagtgctgaccactgaccagattgaaaaggaaaataaaaagaaagccaaaaagagacgaaaaagagaaaaaaaaaagtccacaaaaacaaaaataaacttgtggctaagaatcctcacgtgtgatgacgtggcactctgggcgaatcaaaaggttgtacaattcgaaagatcacaaacccaaaaagcaaaatctgtaaatcttttttctttctctctcgcaaagacaaaaaagcattcccaattaacaaatctagaaatcaaaactcagacaaccaccgataacaagacagtcgtttctctctctcttttaaacaaataaaaattggaacttttttcctctgtcttctcaaaaagtttccgctttttgctcgctggagaagaaagaaagaaagaagtgaaaaggaatcattaccatggctgatccggcgattaagctctttggaaagacgattcctttacctgagcttggtgttgttgattcttcttctagctataccggatttttaagcgaaactcagattcctgttcggttatcagattcgtgtaccggcgatgatgatgatgaagagatgggtgattccggtttaggacgagaagaaggtgatgatgttggtgatggtggaggagagagcgagactgataaaaaggtatagttttttttggaacttgtgaattgattttgatttgttaaatggaaatgattgatgggtttatgttagattggtcgtaa

SEQ ID NO: 47809 - DNA, 1042 bp, Arabidopsis thaliana landsberg
  unsure (1)..(1042): unsure at all n locations
gggacacgcaatggtgaacaccgttcaggcgtgagtacttaaagatttttgttactgttttcctacaataacaatttgtttttctcctaactattgtattgtctgtattgtattttttctgtgttgtgttagtctggattttgagagaaatctggccgatcttgcaacctttacgtccttgataactaggggtgactttgaaggcgtcgtgacttattttggccaatgccagaaggaaagttatgtagcctccttccgaatcttatattacatttggcggcaaatgtgttgggaacttctttctgtgaaagatttctcagtttcttctccttgttctgttttgtgtgttctataacaagttgttcggttttttcttttctttccaatgtaggaatagcagaatgcaagccaaaggcgttttgttccaccacatttatctcatttcacgaatggacccaactttagaacaggagtatgaccaaccgaagattttgatagagtatgtgattatgtgtgtgtggtgtgttgtcttattatgcatgcatcatctctttgtatgctctatgtgttctcatatgtctcttaactcttatttcttcaggagcaacacgatccctacttttaatctagagactcatagggcagttgtcgttaagtatgtgcatcaaataatccaagcaaatgtagatgccaggtccatcttctatccaaccaccattgtggaacaaaatagattacatacaggcccgacccaaagaaaaatgggaccatgagcccaattttaaaaatccgtttatatgtgtattaattttgacatttttaatatattttcagaaaacaggaagttttaaacgaaatttgacaaacaaatagtggatcatgtgcatatgtanccgtggcaccccctctaagccggccgtgactacataccctcctagaacagaggtacaaattntatttcttacttttttttcttctaatctgggttttctcctaacacgtcggtctttgtttttgtagcttaaactagcaacatagaaat

SEQ ID NO: 47810 - DNA, 661 bp, Arabidopsis thaliana landsberg
tgtgcttagatatctgttaacgttggttgtatgtgtgtgcacatggggttcaaatggatatttttattttctttggctctgcttcaagctgcgtattacaggagactgaaatggtcagtactcaaatcccgtaagcttgttctcgacgttgtcaactaatcccgtgaagatcaccttttctctgggtaataatcattaatcttgaaagggataaatggtgaatcccactttttgtctcaaaagacatgtttctttgtttattgtttagaaagtctaatgaggcaaagaagtaaagcttttttaacctcaaagtcacacatgattttgagattatattatttcctttttggtttgttgtctcctaaaccgaactcggtttgtcttaataaaaatgtggttttacaatctctctcctatgtgtatatcacaaaacatgattttgtaacaattaaagttaaaaagttaaaatctgtggtcaatttctgatagaccaaaactccacagaacaaccaatttacctctgttgcgaactcgattttgtaaaactttgaaaaacgtaggcaggattttgacggttaatgtaaaaccagtttcgttaagacattacccaacaaaattacacacattcctacagacaatgaaacaaacatacaggatcggc

SEQ ID NO: 47811 - DNA, 283 bp, Arabidopsis thaliana landsberg
tattgtacgattcgaaacgtagcaatgttacggcgaggagaagtgaaacatgctggcatcacaacttctggtgattccaaacgtagcaatcgggaagacaacagaagtacaagagcaacccggggcttgtgtcttgtttgtgagtccagacggagcaaggtacagtgagcaaggagaagtaagatggggtgagctatgaagatgggtcgagaagtagaacagacatgacagggggaattagagtgacgggagaaaaataccaaagcagaacaagagcaatatg

SEQ ID NO: 47812 - DNA, 852 bp, Arabidopsis thaliana landsberg
acgagcgcaatttttccagattactctcaaccgggataaatcctgacgtattctgttatgttatgtcaaaacgtttcgggttcctaaaacacgttgtgaaaacacacacggagaatgataaattgtctagcacacgataaaacaatgtttttattaaacgggtattcttataataaatataaatatgatttcatggcttttcactagtgaaatacaagtattaagagcgtttgcaagcatactggccgatgcaagcagagcgataatcggggccttcgaggcaaccacccttgccatgtctcttgagtacacatgcaaaggcacatgcgtcgtatttacattcttccggccataggacctctttacactctaccatttcctcaagtggttgtccctttgccatacatatctcccctattacagtaatagttcaaacacattaaaaaacaatctcactttcttatttatatattaaacaaaaaaactattgttttaattcaacgactttttcgtttaattaagtagtttctctaacaaaactacatagtacgacatattttacggtttataaattccagtgacaaaaaaaaaaatacttttgttgcataattgatccttcttatataagagagacaaaactaaagaactttgtttttgttccatgataacttacagagtataggaagcatgaaaacattcaatgatcatattcatgatgtaatatatactggagttttatgaacaactttgataacaaaaatattagaacgaaacataataagtttagaccagttttcgagaggcattatgggtgtatatcaaacataatagccaatctgatatctaaattat

SEQ ID NO: 47813 - DNA, 615 bp, Arabidopsis thaliana landsberg
tgaaggtgaagcaaattcttcatcactatcactatcactagcatcatcaatattaataccattttgtacctttcgttcacccctagccataagcacaggtgagaagtggatgatggcgatggtggtggtgaagagaagtccccggcgatggccgcaactttttcatcatcctcttcttcacttgaagaagatccacttgatgattcgacgtcggtgagccagtcgccaacaatataagcctttccattcttctttttgtggaacctcttttgcttcccatcccttcttttgaagaatttcttttctttcttttcatcatcgctgtcatcttctttcttgcccttgaacttgttcttcttgggcttgttgcattgatgagcaagatgaccaagctcaccacagttgtagcagtccatctcagaaatgggctttcttttgttggaaaagaatttcttctttcttgaatcaaatttgatgccttctctatttagcttcttcaacatcttggtggtcttccttacatcaaggcaatgtttgcatcaagggtcacatcacttgaggattcttctcaacttgatttttgctttccttttctttcagatttgctttgagagc

SEQ ID NO: 47814 - DNA, 596 bp, Arabidopsis thaliana landsberg
ttcttttacgctcttactccgccatttgcaagctattctcaaagctaaacggctcttcaccaccagtttcaaacacaactcctttctcttcctctttcaaattccatggctttgacacatcccattcattagatttcacctatcctctaattccaaacccatccaccacatcttctgcgttaccaaacacaactttctcctctccctgcttcatatcccatcgctcagtctactgccattcattacccctcctctcgcgactagtctcaatcccttgacctacttcaccaccagtatcaaacacaactttatcctcttcctcctttatattccatctcttaggctcctacggccatttcccctctccaccaggtaaaccagatcctgcaactccagaagaaccaaaagaatcatcggaagagaaaggtccagacttatcatcgtttactccagtgaaactccacggaacgtcattccgattacgaccattcccgtcaccatttcctccgccgccgctactgttagtcgaaagcggacgaataaacgaagagaagatctgagaatctgatttcgatgaaactagggttacgaaacgg

SEQ ID NO: 47815 - DNA, 1054 bp, Arabidopsis thaliana landsberg
ggttgcaatctgggagacacaaagtaatctttcaagaactctatcaaggaattgcctgctcatttttctatttctggttccctccaggtaataggcctaccatacatcttctttctatatataaagaaagatactacagttgcctttgctacataaaatctgccaaattactgtcatgaatttcatagtatctttgtaattgcagacattaattttgtcaaggaacaaaattaaagattggccaggtgcaatcttgaaatcacttccccatcttatgtgcttgaagctggataataatcccctgaatcaggtatggtgatgttcaaagagaataaagagttgcttatagcttccaccaagagctaatgcatcacattttttttatgttctcgtaagattccactggatgggttccaagtagtctctgggcttcagattctagacctaagtgttaatgcagtttccttcagagagcatcctaagttttgccacttgccacaactgcgagagctttatttgaggttggttatgatactttatattattcattgtcactatacactgttttaagataccgtataccttatacctcacttgacagtcgaatccagctatctgaagtccctgaagatatcctcaacttatctaacctgattattcttgacttgaaccagaattcacttcaatcgattcccaaggtaatatagctttatattctactttctggtttttactatagaattgctgctgaatctgtggtttgaatttagtgtaacctggcatcaatcagctaatcaactaaagtctccatgtaatgttattatattggatctgttttccccatgcagggtatcaagaacatgacttcactcaaacatctagacatatccaacaacaacatttcaagtcttcctccagaactggtaagtctctgttgcttttttaactgaaacatatacatgtaaaatgtttagtaacaagtcatgtgttgttccttagggtttgcttgagcctcacttgaggttctacgacttgacgggaacccattaagaag

SEQ ID NO: 47816 - DNA, 641 bp, Arabidopsis thaliana landsberg
  unsure (1)..(641): unsure at all n locations
tgaaatccttctcttccatcgatgaaccagatctcgaagaagacgaagagagcgaggatgaagatttcagcgcagaagaatacgaatacgaagacgaagaagaagaagatgagcaggacagtggagtggtggtttccgtgagaggaattgaagattcggaagcatctgaggagatttctgagataggagataaagaggagaaaacagagaatacgaagaagaannnnnnnnnnnnnnnnnnnnnnnnnnnnnnnnnnaaggagaagaaggagttggcttcttacgcgcatagtttgggtgataaattgaaatgtcaactcgttggcaaatctggtgttactgattctgtcgttttctcattcctcgagactctcgagaagaacgagctcttaaaggtatcaactttataatgttttgtgttcaatctttatatctgatagaggtggaagtgaagtaatctcctccaaaattagggatttagagttgagtaagtgtaactttgtggtttatttgactcatgtgttaaaagcgggatgatcctctactcgactagggttttagattatgtggaatcttgatttttgtcttggtcttatgttttgtgaaagaatgttgttgtttgatgatctatgagaatggat

SEQ ID NO: 47817 - DNA, 624 bp, Arabidopsis thaliana landsberg
aatactctacagttatacttttgtagaatgcattgtcacaatcgaaagaatgatgaattaatttgatatcaatattgattgctactttgagaatatatattagcttgaataatctgtcttaaggcatcatcgaacttcaacaacatctataagatcattttattttatcaaccttacagttagattaacggaaaagcctttggttgtcaatgcaagccggggcagtagagttttcaaaaaaagtttcgaagatatctcattttcttcaatgtgacattgtgatttgtgattatatactacatataaatggattcaatgacgtagcgttttatattgtttttttttttgttaaattatagggaaatagatgatttaaattgcagattgtgctcactcgagaatattttcaaatattctcacctcactcgagaatatttagccctagatgattcaaattgtgctctatcgatcttaaaactgcaaagtatatatagaattcttcactatagaaatcagataacgtataaaacgattttgggcccttctcataataatctcaaaagccgataaatctataaacacatgcatctgtgtatatatgtacctaaactatgtacacaaaac

SEQ ID NO: 47818 - DNA, 295 bp, Arabidopsis thaliana landsberg
ccactcatacatatactacgaacgtgtagaggacacattaggtcttatcttccattccttcctcctcgttttttactttttctggaagtatagtcatcgccgtcaccattccaacactggatccctcgaaagagatgaagtgtttgtcccaaagcaaaaatcagcaatcaagtggtacgggaaataccttaacaaccctcttggacgcattatgatgttaagcggccattacgacttcgtgaggccttagtacctaggctttaacttttatggcttaccgacggacggggtcgtt

SEQ ID NO: 47819 - DNA, 1826 bp, Arabidopsis thaliana landsberg
  unsure (1)..(1826): unsure at all n locations
atagatccatgatacagcttgaacggtaagcatatttgatacataatttctggattttagacagactattacactgtagcacttgctgtgatatactaaccatataattactgcatttcctcttgtggtgtagttttgctgttgcattttatggcggtactacacctccgagattggttgctcttgttgctcaggtgagagaactctataaagacctttcttccacataagtatattccatcttgattttaaactttatttcctttttgttttgtgcgttgttaaacaagttactcaaatgtctttttcttaaacccaaacaggatgaaatcgagagtgatggtggtcaagtggagccaccagggataaacatgatatatcttccatatgctaatgatattagagatatcgacgaggcaagaaagaattgcttttgaaaagctacttggttccaacgttattaatgtttgttaaattttgactagttggtggaattttggcagttgcattcaaaaccaggtgtagctgctcctcgcgcatcagatgatcagcttaaaaaagcatcagctctaatgcgacgtctagagttaaaagacttttcggtttgccaatttgctaatcccggtaagttcaactctctattagttgtactgagctcctgatccgtaaactgttcatatatagaatctgaagtcgctctttgttgcagctttgcagagacactatgctatcttacaagccattgcactggatgaaaacgagcttcgtgaaaccagagatgaaacacttcctgacgaagaaggaatgaacaggttttcaacaaactttcatattctcctttttaacattccatcttataaagcaaaagaaaaagaaaaaatgttgggaacttatcgagtgagctctatttctcgttcttgcagacctgcagttgtaaaagcaatagaacaatttaagcagtcgatttatggcgatgaccctgatgaagaaagtgactcaggggcaaaggagaaatcaaaaaagcgaaaagccggtgacgcagatgatggaaaatatgactatatagagcttgcaaaaaccggaaaggtgaaagcaaaattctaagcattaatttagatttctgcttaatgatttcatctttttgtttcattgctttttagatctctacgtttaaataagctatcttcatgttctgttttctttgtttagctgaaggacttgactgtggtcgaactgaagacatatctgactgccaacaatctcctcgtcagcgggaagaaagaagttctgatcaatcggattctgactcacattggtaaataactttaaccgtgagttatataactcctgctagagaagctacgttttagttttattgaaaagcttgtctgtttttgatgggaactggacccatttatcttccgggtcattgttcatcgttttgcctcagctacaaagggttttagatttaactgtaatggtctcttttgggtaatcactaatttgtgatcttggctctaactttatggtggagtttatatttgacgaattccataaggttctttataattctccataggttataaaaaaaagtcttatgaatcttgaacaacaagatagaaacaagagataacaatttgtggtatgagcgtagttttattgatcataggttctttttttatggaaaaattataaaggaacttttggacctttgtaatccatttcacttctcacatatgttctcatatacacangataacatatccaaacaataactaaattaaacacaacatggatttcttagaatgcatacacaagccagcttt

SEQ ID NO: 47820 - DNA, 280 bp, Arabidopsis thaliana landsberg
ggagaaaaggcctaaaccaaattcaatgtactttttaacgtgtagtatacgcatcggattatcgaatccaatgtactcaaccgggtttagaatcatgtagaatttttcttgtaccgatctaaaccaatatttgtccctgagaagaagaccctctagatgaatcagagtgtccgttacagtagtggtaggtaactgagttatccgatataacgaacgcgtcgcaggcaaaacaagcatttgccggaatccaaaggcattggcgtgtagacatgatcactgc

SEQ ID NO: 47821 - DNA, 529 bp, Arabidopsis thaliana landsberg
  unsure (1)..(529): unsure at all n locations
annnnnnnnnnnnnnnnnnnnnnnnnnnnnnnnnnnnnnnnnnnnnnnnnnnnnnnnnnnnnnnnnnnnnnnnnnnnnnnnnnnnnnnnnnnnnnnnnnnnnnnnnnnnnnnnnnnnnnnnnnnnnnnnnnnnnnnnnnnnnnnnnnnnnnnnnnnnnnnnnnnnnnnnnnnnnnnnnnnnnnnnnnnnnnnnnnnnnnnnnnnnnnnnnnnnnnnnnnnnnnnnnnnnnnnnnnnnnnnnnnnnnnnnnnnnnnnnnnnnnnnnnnnnnnnnnnnnnnnnnnnnnnnnnnnnnnnnnnnnnnnnnnnnnnnnntctccattttgagccctaagtacattttctggggattttcgtgatatgtgctatattatggggccccaatttttctctctagcgttgtgttcgcgtatatttcatgcatcacagctcgttatgactatatgtggtatcctacctggcatgtgggactctcggcgaagggttcaccaggacttaaattgttactatttacgattgcattgaatata

SEQ ID NO: 47822 - DNA, 630 bp, Arabidopsis thaliana landsberg
gaaagagctagaaccaatagtccatatattttgtgtacctcgtcatctttgggccgaaggaacaaagaaaacttagcccgattaggatccattcatatatgggcccatataaggcatttagtgtaatagatttttgcatcatcatgtcttgagattttctattagaaaagtcgaaacaatcaaataaaccaagagaaatattgaaagcaatcatgttggcattgagtaaattatgtaagatttgaattctccgaggaacacactacgtttgtatgttgcgttctaactttagaaagattaaaaaccataaaatattggtaatcgagaaaatgaagttagatctttcacatgcaatgatatgcatatgggacagccaagcagtttatatgttgtgttgtgttgtataatataagacaagatgctttataattatgtgaagcgaatattcattggaatagatttccgattccacatttctttctctttttttggttgtatttataagcaatataaaaaaaattattatataaatatatataaagaatatatatataaggttgtcttggcgtaattattgtgagtttatgttatatcgatctacaggtaattagcgcggctaatgatatgata

SEQ ID NO: 47823 - DNA, 455 bp, Arabidopsis thaliana landsberg
aatacctcaaaatcagaatgatcgaaccagtcggttaggtagggctcctcctactcctcctcctcctcctccttcgtcttacacacctgaggagatgaggcctttctcttcgttggctacagaaattgatctgacagaggtttatatgaccggaatctctatgctgccgaatataccggtttacgagaattcgggttttatggaccagaattcgggttttatgtaccagaatgatgaaccgacgatgaatgcgatgccggatggttcagatgtgtacgatgggatcatggaacgcctgtattttaagtttggtgtcaacatgtagacataaaacctttattttcagtccttatcgtcgatgatagacaacagcttgtactgatcatcagcttcatcataaatactgaataaatttttttactttcaaatattgttccactcatttaatttctaac

SEQ ID NO: 47824 - DNA, 996 bp, Arabidopsis thaliana landsberg
catctcctaacaattgttgaattcatctatggtttattgccaattcgcttctttgttcaattgatgtttcaatatgtatggctactcaattcatgttcaacttagctttagattcatagatagaaaggattaaattggtccagtcactttgatgtttatagtcaattaattaccccaattttttgtccatctacggcgtcgatttcttcgtattccggtggctgaggaggttactctttcgtattctccactcttctgtttttcctgttcgagccgatgtctctttatctatggtttattgccaattagcttctttgttcatttctttgacaaataaaaaaaaaacttctttgttcattgatttttcaatatctgtggttactctattcatgttcaattttgctttgttcattgatttctaaaaccctgattcagtatttatttttattttgtgtgattcaaatacgttgtcagatccttaacttgtgtatttctggttttgtctactactcttgaaggaaaatcctgaagaaaccaattgtaacttgtacacgtgggaaaatataagtgttcctgaggagtaaaagaggggaaaaagagaatgagaatagtcgggttaacgggaggcatagcgtctgggaagagtacagtgtctaacctcttcaaggctagtggcattcccgttgttgacgctgatgttgttgctcgagtaaggaacaaacatctctcttttctacttgctggaattcttttgtaactattgtgtcaccgttgctaagagagatgtactcctagatgcaatttagctcaagagaagtttagtaaaagatgtggaaatgtgttgttttactatataggatgtattgaagaaaggaagcggtggatggaaaagagtcgttgcagcttttggtgaggagattctgcttcctagtgagaagtggatcggccaaactcggtcagatgtgttctcgtctgattcaagcgtcacttctaaac

SEQ ID NO: 47825 - DNA, 1196 bp, Arabidopsis thaliana landsberg
  unsure (1)..(1196): unsure at all n locations
aatcaatcttcttcttcttcttcttcttcttcctcagagaaattctgtgttgttgtatacagagagatgttctcatcttctacactcgtttattctctatctctcttcctctctctttctcttctcttcttcctcttcatcctctcaccacacatccttctctcttcctctaccctcatttccaccgccgatgacctagacgacctctctctcttccaccgcgccgtcgtctcttcctccaccaacaacaaccgtcgtctcatctccctctctccaaatccacccccaaagatcgctttcctcttcctaacaaactccgatctaaccttcttacctctctgggaaagcttcttccaaggtcaccaagatctctacaacgtttacatccacgcagatccaacctcctccgtctctcctcttctcgattcttcatcaatcaacgctaagttcatcccggcgagaagaaccgcacgagcttctccgacgttaatctccgccgaacgacgattactagcaaacgcaatcctcgacgatcctaacaatctctatttcgctttaatctcacaacactgtatccctctccattccttctcttacatccacaaccacctcttctccgatcatcatcaacaaagcttcatcgagatcctctccgatgaaccgttccttctgaaacgatacaacgcaagaggagacgacgcgatgcttcctgagatccagtaccaagacttccgtgttggatctcagttcttcgtattagcgaaacgtcatgctctaatggtgatcaaagagagaaagctatggaggaaattcaaattaccatgccttgatgttgaatcttgttaccctgaagaacattattttccgactttgttgtctcttgaggatcctcaaggatgtagtcactttacactcacacgtgttaattggaccggtagtgttggtggtcatcctcacacgtacgatgcctctgagatctcgccgcagctgattcactctctgcggagatctaattcgagtttagactatttcttcgccagaaaattcacgccggagtcattgcaaccgcttatggagattgcagatgctgtgatctttagggattgaattaggtgaaagtaaattaggtataacactgaaatctcaatgtgtanatatgaatacagtttgagacgttagtttcaatttgcttatct

SEQ ID NO: 47826 - DNA, 771 bp, Arabidopsis thaliana landsberg
ccagagaaggaatcaattgggaatttaaacccaagtaaatccaggagccaaaataaaaagaactaaattcatattcgagaaatactaaatggaacaactaaaatgagaactcacaggaggcccatatatgagaatatgtccaggtgatggaatcttgaacttgctaaaccacattccagctgcaggagacaacaacacggtcattcctgcataatagcattgttggctttaggaacagatccgttcataaacattctccagatgcattaaaagacgcaggttaagatcaaccatatatgaacattatcaagcaattttagttgaggtcaaaaaattgcttcaaagacatgtgatatgcaactagaacacatgctataacaaaagctaatacataaaagaacaaaggttaagcaaaatctatgttatcagatatatatgttcgtgtgtgcggcctcataattatacgactcaagcaagatgaagctaagagagtaaacctactcttgataacatccgacacgattgggcccatccacgtcaaggaggatatatctggggaaacacctttattgcagtgtgtctctttagccgactttaaatatataggctcgccaagattcatcttctcaagcactggctcaatatgcaccacattgtcgctcttctcacttctatccaggctaagaatcatacccagcgaatttatcaccaagcaaagactcatcagagcccgtcatgacgtacaaaatttctaaaggagtgtttttatcc

SEQ ID NO: 47827 - DNA, 604 bp, Arabidopsis thaliana landsberg
ttatatatcacacaattcacaaccggacaagtaatcaatcccaagctaaattccaaactcaaattttttaaaaagctaatactagctataatttagtaatttgatagaacgtagtttacaagcttgctcgattaaattgcaattacgacgatttccaacaagaatttgtagttatagcttataaagttaagtacttaaatgcaatgctataaagcatttttagttaaataatttcatgatacatgtacatgaatgaatgttaacttttttttgttttgttagtttcttggaagatatttatttttttgactgtaatgatttagacatgatttttatattatataaaggtcccacatgatcttgagctgctggttttgggttctcttttcaactcacacttcttcaaaagcgaatttgcttgtaacatgttaatataaaattattattaaatctataggattgtccttaatgggccggccttttacgatataaaatttggttcaaataaatgtcgaatacgtcttttcgttcagcccatgaattgactaaacaaaggggattagaatccaaacaatcaaatttcttctatagttagtttagaaca

SEQ ID NO: 47828 - DNA, 1058 bp, Arabidopsis thaliana landsberg
gatgaaaactccaggctggctcgatcttctcctagttttcgatggaaggatattatccaaatcaacctcgggcaagggatcatcggagaaatcgctttcgtcgtcttcatcaaaaccttcgtcatcttcatcatcatcactgtcgtcttcatcatcactttcttccacttcgatcatttttccctttcccttatcctctcgcgaaatccctttacctttcctatcaacaacttcttcttcttcttcttcttcttcttcctcgtcgtcttcctcttcatcttcttcatcctcttgctcctcttcagctccaacatcgccgattacgccattctcaacctcttcagctgctttctccgataaaaccgatgattctgctccaatcgtttcctcggtggaagaattcagattctcgatttggccacttccattagtttctccgtctttggactcagaatcagcagaattcaatgaaggattaagcttctgagccttgtttgtcacattatcctggtcttgacaaaacagatccgattttcgcttcacaggaaacgaagaatcctgttgattctcaacatccgccatagatgaatcaatcttcttacttcagagactcgcgattttggtttgaggacgacgattcagagttagggctttgaagctgaatcaaaacactcgagccaatttagtttgtaaccctagaagtttttgtagggttttaccgtctctgttttttattatttggatctctgaacacatttggcccagtattagcccatttacctatcttctcaaaatatttggttcttaacaaattcaagcctaaccattagtacaattttaattttgatttgtacattttcaaaaaccggactcgaaccaagatcaaattcaaccattgtggcaattttaatggtcgagtctccagtgtgtatgtggcagcaggagaacgtgccgggggatattaaaccggctcaatgctacagtagtaccggtttggttttctactcgttggtatataattaaaaccggttatccaatttgacaggcagagaagaaga

SEQ ID NO: 47829 - DNA, 599 bp, Arabidopsis thaliana landsberg
  unsure (1)..(599): unsure at all n locations
gtgttcaattaagcattgtttcatgtctgcttatgagctcttggtgtcttgatgatgaccatgataaggcactccacaaacatgtatctttttgcatgctctaatttagttaccttgttttgtttctatataatcatgtccaactaatttctgatttggttagctatatatatgtttctgtagctgttgcaaggagacaagggatggagctctctggtactaaatagaagctattcaaaggaaagtcaagatgatcatagtcattgttgtgttaatgttttgggcaagccaagtactattttttgttatgagtatgtcaaacatatgttaaatttgtgaaacatatgttaatgttttgggcatgccaagtacttgctatacacaagtgtttgatttttctatcacaattattaccaaacagcagcagcgacatcttggttgctgactgccaaacaacagcaagggacgggagcccattgtcgttgccacccagggaatctaggtagcagggattttgccttgggtggcggactccctgggttcccgtgcctagctccaatagaggccttagggtangatatagggagattttaccccat

SEQ ID NO: 47830 - DNA, 1033 bp, Arabidopsis thaliana landsberg
agaaggtaagcctaccattttccagtgtctatggaatttaaacagttacttattagcactagtaaccgaaccaaaacttgagaagattcattgcattctttcttaaagtttttgcatgtggtttatatatctgaaagtttctcgtttgataaaatttggtttggtcctctcttgtttgtttgagctcacttctcaatgtttgatgtgacagtgtcaatttttggacaaccatccgacagcacctgttttctctaactacgtcatcagtaagtacaatttgagaaatggagcattttctaaggaagaacatgataggatactgattcctgctgtttccaagtaagaacccttcaacgattatccttacttgattttgtttctctttgtttgtttgctcacatgcatgttgcttccattcttgaaactttgtaaaaatataggcatggctatggtagatgggtggccatcgttgaagacgaagagatagggttccaagaggttgcctgcaaagacctgaatatgcctttccctcctgatactaaatctgctcgtaaaagaatttgtgaccatgtgggaaaacgggttaagaagatggaggatgccataaagtatgagtacgcattacgtaatattttgcgccgactcagaaattttaatcttttgtcttctcatgctactactacattgtgacattggtcatttatattggtactttgttgcccgaaaagatacttgctgaacaagcaaaagctgaaacaaagggaacaagctttgttgatgcataaaaagaaatgcttaagaaagatcccatcagtatgtgtcttgataagtttctacaggtactaatggatatatttctttagaatcttgatctaactgaaaccttttaatcttgcaccttcaataaaaaattcttgcgctggcgttgacaacaaccaggggagacttgaaatggctcaatcatacgatcaggtgaacaaacccattcctattttcggggatatatacgtacattaagaaccccgattaactt

SEQ ID NO: 47831 - DNA, 1296 bp, Arabidopsis thaliana landsberg
cgacgtaacacagtgattattacacaaagtctaatattcttgtgttttactttttagaagccaaagtctaacattctaagttccgatttttttttcttcttttgattacacacataaacgaaaagatgaaacaattgatttggaattttttcttgagaaatcacttagaaaatagctgaaccactttgtcataataatacaattccgtgtgtaacaaaatgattattacacaaagaccaaaaaaaaaggtctaaatcgtttttttactttcaggaagccaagtctaaaaatccaagttcttcttttgattacacacataaaagataagatgaaactaaattaagtttaaagagttgcaaatcaatcatacaagccttcttgctcccacacatccaccaaaaaatccaccatttcctgccacagtttattattaaatcatcaaatccttaatcatgtttatagaatgtgtaaacttgctgagaaaaaaatgcttacagggagtggtattggacgagaaaaccgcttgttcatacccaacaagctctcatatgttgcattccagctgcagtaaacaaaattttaaactcagcaagttcgaataggcgagaactttgatggctaagaatcggaagaatcatctatgaactttctgacttgtaaactgtaataaccttatcttacataacctaaaccgcctaaaggactaaatagaagaatcactagacatcatgtaacagctttttgaatatgcagcttgtcaatgtttggatgacttgctgatgcatatttattgaatcctactactattcttggattaagaagttttaactacaatgtttggtggatgagaaagtcaagttgtgcctttgctttattaccaaaaagatttcataataaagataatactagaaggtgagaaaactattgatggaagcactaatagagctaacaactgaagtcatgatataagtggaagcttctatatgcataaaatgtatacactataaatgcttgaaaagggacgttgaatagcatatgatatctcaaacttgtaagtttgttgctctgtgaatgcacattaataaatatcgcaatcaaattgttttcaacacttatccttgtccatgatagaattaagtgaagagctatattcataaagaattaatgcagatgttgaagagaaaatgatagctagctttcacaaaccttattgtaggttatagaacaaaggcctttttttgagaagattccagtttgcaagcacagcggtgtgccgtagctttggtatccagaggt

SEQ ID NO: 47832 - DNA, 614 bp, Arabidopsis thaliana landsberg
  unsure (1)..(614): unsure at all n locations
gtttgtgactagatatatccacaaatcatgaaaacacacatatacactatatgatatcaaaattagtatatataatctataatttcatcacatatatatgtattagtagctagttgagttattacttcgtctaaaactcttgaatgttaccaagagaatgcaattacagtaattgatcacacgcatagtcacaccgaacaagacctaacattaacaatccctgcctgtatatatatatgtgtgtgagttgtaaaatggtccagacagaaatcagtttgttaacagaaaataaatttatataaatttcatttacttctnnnnnnnnnnnnnnnnnnnnnnnnnnnnnnnnnnncagatcataccttttcaatcttacatagatgaaaaagctcttctttatatttttttaaaaaaataaaaaaaattcagatataatatatatatatatatatatatatatatatataaangaaaaataaaaagtgtatccatttttgtctctgcccatctcctgcaagctgcaaaatctgtttgactaattaagcagcagaaacagcttcagaaaaatgcagcagtaacaggacagcagccatatcaattaactaacaaagtaa

SEQ ID NO: 47833 - DNA, 741 bp, Arabidopsis thaliana landsberg
ggaaacatgaatgtcagggaccgactaatcatctttaatatcagcttgattgcattagtgttgaaactagaacatacctgttgtttgacgtgaaggattttgccttttcaggtcatcatccattgctacctgcaagaaaactatcagaccgtagacaacatactttgatgtcaaaagagagacacttagaacgcaaaactaacctcttcactcctcaagtgggatggatgtgcaaatggaccaacaggagcagaacctggtgttccatgaggaaattgacttggataaagtcctgaaggccgaccaggaaaagaaggtctattctcatcatctaccaaccaaccacccggagaatgcatagacgaggaaggtggctgcataggaattttagccagaatggggggttgattaaagttttggttccttatatctacaccaggcctcatcataaggggtcttccaccatcagaaaaagtgaagccatcccgcctaggagctccaagcaaactaggttctagattgtgattgaagacaagagatagagaacgtcagagacaaacatatacgtgcaaaataactgtacagttcaaaatttaaagttatattaagtcaaaagttcgtactatgagaaggtaacagtgctgctgcagttgccgtgcttgcattatttggtataactgctatctgcggcttaggggtatcaggtttctgctcagcattacttgttcaggaagagtagaa

SEQ ID NO: 47834 - DNA, 649 bp, Arabidopsis thaliana landsberg
  unsure (1)..(649): unsure at all n locations
cccctcaatacactctaatcccctcaatcctcgtagattaggtatgaaacgaacgaagccttactcaagtttacagtgtcggctagcgcgggcctcccaaccatgcaacattcaacccaaccagccgggatgtactgtacgtgcaactcctgtctctcctggtgttgtttgatcacccccgtggcgtgctggtgctgaactagatcaatgggcagcgcaacgcgggtcgcacgttcgtaaagctaggctgtgacgcagccctccgtctccgttgatcaaggcacgcatccggctgctttcccggatttttagttagnnnnnnnnnnnnnnnnnnnnnnnnnnnnnnnnnnnnnnnaacccaataactcctcgccttttgccattattaaaaggggccacgattcacgtgcaatgaatcattgttcatcctacgtgttttttcgtatgatatcgtggagcatatagtagtgcggcgatacatacgtctagctagcgaaccctcttactactcaactactctcaagtcgtggtgggcgcgacgatttgatctcacaagagcacatgatttctgttggccaacnagctgttgctgttggtgactctattataggtcttttatatacatatacgcggtttagtttaaatgact

SEQ ID NO: 47835 - DNA, 192 bp, Arabidopsis thaliana landsberg
  unsure (1)..(192): unsure at all n locations
acaagccaagagnggccacacggcaaacaagcaanagagacagaacagcccaaccaaaaaaaaaaaaaaaaaaaggagggaagcaacacgaggacaacccgggaggccacccaaccgaaaacaacccgcgcacaagcacgccaaacagcggagagccgacgggacccggaagcaaagagccggaaaaaccgc

SEQ ID NO: 47836 - DNA, 1531 bp, Arabidopsis thaliana landsberg
ccgagaaagttgaagagatgtgcctctcatatatacatttcccgtctcattaaagtattacagaccattaagagttttctcgcaacacttaaccaaaacgagcaaagatcttgagaaatgtcagaacgcagactccctgattcagtgataaccattaatgactttaaagcaatagtttctccacctaagaggtatcaaaacccgcatctgctcgatatgcaccgggcacataacccaaaacccgtgcaagaagacatgactaagcttgctctcgagctctatggtccacacacttcacagaaacaagtaatatacttcactcttcttatccagttaattcatttcctctctgattctaatctcgttttctattttaacgacagagctttgatttcctaagtctctcatctgctggagcagcacaatctcatttcccacttccaaactcatttccacagtatcaaatctctgcagcttacaatagccagctctcacctgctacttctagccatcaggtgacctaaatgatctctcttctgagcaagttaatggtttcagttagtagtataacacaaacattctttcttcttgtaggtgcagcagctttctccttatctagccagtcggttccagaccgcttacaacgcaaaccagcagcagcaacaacagcttcaaaaaaggctatgggctgttcagtacagaccaacaaatggaaacaccatgcagtcgaaccaatacagtaaaccaaacctcttcttaacctgactcgtactcaacaacctctccaggtttcttcctccccaaggtacaaccacaatgtatcttaacaacaacatcgtcttatgactgctgctgcagcaatgtcaatgagccatcaacattataatccatcacgggcggtgatgaatagacaagaacaccatttcccacttatatatgaagatacaaggacaccgttgcaactactctgcaatgagcaatcgtgaagctgcctgtttgctttatagttaaatagttctaaggattttaccttgagaaaaaaacagagatcttcgccggaatttgagattctagatggtgatgaaaatccgatgaacaaggattgtgagtgagagatgattgatcacacttgtttgagaaaaccctataaaaatgtcttttaatgtaaatgatccacgagttctcaaaagaggcaaattttgtcgaggactctgttatctgaagtgagagacagtcacagaaaagaaaaagatgatagttttttttcgaatctctttccaagtatattttaaacgcagcatttgagtttcttgtgcagcaagcgaattgaaactcgtaggattataattttagtgtcttacactgtaaatacaaaacagtgtttttggaaaataaaaaataaaactcttaaaacaacccttattatgaagctggtgaaaaaaaaaaatttatatataccaaaaaaactatgaaaaaatagaaaaacaattatttaatttaataaaaaaagaaggtttttaaaaagaaggtg

SEQ ID NO: 47837 - DNA, 1174 bp, Arabidopsis thaliana landsberg
acacatacgataatctgagggaagaaatctctcccaagtgttattggaatccgccgcggagcgaagcaatttggagacagcagagatacggcatgcgtcgtaggggctggtgaacgaaatcacggcggcgatgcattcttctggtaaatcaagaaaattcatctccattgtaataagttgaaaacgtagatatggtgatgatgcgtgtggaacaatcgtttagaaacttatagtctatttaataacgcctctcgatcacctgaaaaagaggtaaaacctttcattttttaatcgttaaaaaaataaaaaaataaaaaaataaattgtgggttcgcttccgagtaaagtttataatctattggcaatatatttgataagattatcataacactcttttccttctttcataagttccttgcaacaagaatccgagacgattttatttccaaaaacttacattttggcctgatcttaacaacacattggatcctatatgtataatgtttttgtttcacttacttccacagcaaatgatggaacgggttcactcgcgttaacaaagatgacaacaataaaaaccaataaaccatagtccatagacatattaagtttccccatcttgaaatatttgtttaatatttagtagtctttgttaagggagggataaaaggaaatttcgattatgttgtgttttcaaatgaaaaatactcagtgtttataaatgtgaatggtactttaattaaaacgaaacatttctttatattcctcgtatcacctagtctattactcaactagcaacaccagctccaacaaatattgctccaaccaaaactgatgtctcattcatccgaaactactcacttattcaaaaagtctactcttatacaatctgcatctgtaaaggatggaaatggttctaccgttgtccaaactttatctgatgtacataaggtaagtaattctaaccctttctctcttttggaagcttgttaagatgtgtcagataattttgttgtgtgcatcattggagaatgaaaataaatataatgatgggacaaaaattgatacaatatgggaataagggattcacctttggatctagaaaccttgcaatatgaggaggaatctgtcccgaggacccgtgtgggaaggcatctaaagacagccctgagag

SEQ ID NO: 47838 - DNA, 979 bp, Arabidopsis thaliana landsberg
gaatcgaccgctctatgttacctgatcagcgctgatgaatagtttgggacccattaagctgaattgaagagaagaacacacaggttctttacgttggaggttactctgttcggaagcccaagctcgagctatttggtaatccaagaagtattgtaaatcttcaataggaggcttatctggtaaaaatatcgagaaatttctatgagaatgtaaccaggtggattcaaatacaaagaagttaaatttttagatacaaactcacattccaagtaaagttcgatagcacgagtcaaatgccgtaaaccaggcacaccttcaaggagagaaacaataggagtaaaagtcatgttgataatgtctggagctgcgggtacagtctcagcccaacgagcatggctttgctcaagatcgtcgcctcctcttcgcctaaatattactgtgatatcctacaggagagagctttttcaactaatatctttatcaaaccataattttataggaaataaaattcattaacaagagtaatctcgccatgcccttaacgttgtactaaccttgtctttgtatttcaaggggccggtaatagattgactctctgcttcatgaaatctgtgctttatcatgtcattcacatagttttctatttcagatactggtaaaggagaagactgatgttgtctgatgtatactacatctcttccaccaatggtcaccgaagttacaatatgagtgccgtaattttcaataaagctgtaccaaaagaagaaacaagtggagaaaccacataagaatcatgatagatgtcatcaagaatcacataaaagtgtagcaaaaggaaaacaaaaggaaactgactctcaattagagtgtgaacctttgaagccatgttcatgtaaacagcgagaacagaacatacagaaaagcagaaaacatggtgtattaaagagagggaatatacctagctagggaagcaggatcc

SEQ ID NO: 47839 - DNA, 450 bp, Arabidopsis thaliana landsberg
tcagattagcaagaaagatctgttgatggtccatttacttcgagtagcttgcacttcccgaggacctttggctgatgcattacctcagataactgatgaactgcatgagcttggtgtaagtcttttggataattgtattttttttatccatcgagggaagtttcttcattttttcccccaaaactatgttaaaccatttcagatattgtctgaagaagtgttggatctagcttccaaatcatcttcagactttaatagaacctttgaacatgcattcaatcaaaacatggtacgtatcccttggcacacttcattgttattatttacttatttgagtttcatgtaatgcatctgattgatgttatctttcaaggcctcaaccagtgttcctcagttttgggagcccccttatgattcttgcgagccaaatgcatctctcccaagctcgcg

SEQ ID NO: 47840 - DNA, 413 bp, Arabidopsis thaliana landsberg
gtataacgacaagatggtatggctatataagtactacaatttaaaccatacaacatgtgagcttttctgttttgccaccaatacttggaaacacataaagatcattcctccttgtcaaatactatcttccgagaggccagtctatgtagacggattactttactggttcatccacggcaatcaagagagggatacggtaatggacatattatgttttgatcttcacaccgaaatatttagtgtaatggcatatagtccggttggcaaaacacttcatccattgatcgagatgagcagtctcgataaccagctctgcgtgtcggtgcagacgtcgacagggctacatatattggtggcaacaaaccatttatggaaaaaggcatatataatccataatcctataggccctggtg

SEQ ID NO: 47841 - DNA, 2163 bp, Arabidopsis thaliana landsberg
ccgatctctacaagaagaagtgagtgtctttttgtgatcctagagaaacaagaaatcttttttgttctagctttttctatgatccaggagaagaaaaattggtgtcaatgttgaatagtagttcattttctttcaacaggtgcaggatcttccgtcttttgggatcggtcattcactgggatctgttattcaccttctgattggtaactaggtttaaatggttgtgaatgtttaaaactgattcagctcattagtttttttattgagttggttttcactagtcattcaggatcaaggtatgctgttcagcgaaatgggaacgtatttatggcattcaacaacaaggtaaattggttttgctatcttaccaaagtcaatcagagttgcaatcagaattgtttggggaaaactgatctaaagtaatacttttttttattgtaaagatattgtgaatcctgttatggaatcacaaaacctgtaaaaagtgatatctttttggaaccctacatttttgcaggaagcaagcttagctattcctttgttctccccagttcttgtcccgatggctcaaagccttggaccactgttgtcacaggtggcaacatccccaacaatccgccttggggtaaggttttgattcatttgctctactctttttaagatgtgcagctcttagctagtttcccaagtgatagtctaacttcttgctgttggtgttgtatatgatcaatttgtttggtaactcaagaaatgctgtcataagtgcacttagtccctatagattttgttctctaattatgtttttaaatggcagtaaatactacctttgaattttgacacatgaagtcataatgctttctaccttgtaatgtctttcatcctttgtcgtttatgttctcctacatgcaggcagagatgacgcgaaagcaattagaaacgcttagccctcccatcatgaagcaaattctgcctttagtggaacagctccctcccttgtacatggacttagtaaagggaagagaagattttgttccaaaaccagaagaaacaagacgccttgtaggtgaaacgcataatgttattgggtttatgtctcatcatggagccttatctcgtcctaataaaccatctatcttattccctcacactaatcgagattcttcctaataatgtacagataagatcctactatggaatctctaggaatctgttgataaaattcgaggatgattcaatagatgaaacatcaatcctagctcaggtgcttggtgtggaatcatccataagctcaaagctagacatgtctatccgtacactgcccggagatcacggtctccctctgcaacaggtaccgagttatgtttaagacaaactattttgcaactgtgatttgagccatcaccatggagatagtcataaacaaaagcagattgaacatgcatccttagttagaatcaatatggagacttttttgttgctttcgataaggtggtaatgttgaaagtgggttatattactgtctggacaggctcttccggatgttccaccaggaatggcagaagcggtgaatcgaggaagtgagtttttagcgaatattgctgtcgggactccgtgggaatctatggctaaagaggttggaggttcgctgggaatggactcgaagatccttcgtgctgacatgtccaaagatcttgcgcagctcgttgatgcaatcacttcttggatgatttcaaatatgggtccaaagcttctgagaccataatgttttctcatgtacacaaaacatacaaaaatctaataacacagggcgattgcatactatttaatgtaatgtaactgtatatattataacatgaagagtttggttatacataaaaactcctgttaattgcatgttttggtactctagataacacaaggatgtcaaaaagaaggaagaaaaaacaaacagatcacggaattgagggtcttgaaaaacagtaaggaaacttgatatgatcggtgaactattcgtggtatagatacaagccgagaccaaatcgagcacatgctctgcagaatgctatttactcaggtgcagtaactggatcctcgatgtgatcataagtcgaaggtactgttctagttgattcacgatgtgcctgcattacataaaacttcaaa

SEQ ID NO: 47842 - DNA, 762 bp, Arabidopsis thaliana landsberg
tgccttttcagtgtaaactcactgacctaacgtgtatacaatttctagacaggaaaaagaaaaagaacgtgtatacaagtatcgttgctgaattttatgcatgctatagtattcgaatatcaaatcatgaacgtcaaagatgctgatatagtagctaaccatatttattaaaactgtaaatatttgttaaaatgtagattttcttttccatagttcacaaaaaaaatatacaaaaaaaaaaaaaaaaaaattccatttgtaaagaaatttcactttaaatataagatggatttttaaaaaaagatctagaaaatctagcgaaatagattttttttttaattggtttaattaagacgctcattttattcacacatgtcgatcacagttgtatgaaatttgtttgcttgttaataatggcatctccattaatggcatctccattgtttttgatgtatctttttttttcatattacgttgggccgagtttgcaatagacatgaacccagttatatggttcaataccaaatatacatgtacccaagatcatgtaattaaccaacatttgaaaccgttttaacccaaccccctcatccaattgcactattaatatctaaaccgagattttacgagaatcctttacaacggctacactttcgaatattttgaccgaaggtatatttaatatttccatcaaaataagttgtagattttaaatcaataaatgaatagttactaaaaattgaattagtcacttccacaagt

SEQ ID NO: 47843 - DNA, 505 bp, Arabidopsis thaliana landsberg
tccctttaaatctggaccgattgagttttagttaatatatttcatttcaaatcatcctttcttttgttattagttctttccaagttttcaagtgaaccttacaagagtgatttaccgaacaaaaagaaaaaacccttacaatattaagcaactagttgttaatatcctttgccatggctatggggttcgacgtccatggagaatatgtggtctacatctatagcagaaatccctttctcacctgcacacatttatatataaacagaaaacatttaacttacaaatattattttggttgttcatgggatatatatatatatatatatatatctttttcagtgcagaaattcacaaggtattttcattttctcgttatatgtgatttgtggtctcaaggctcagcgtagcgctctagatatacgcgtgttccccaattgacactcacacattgggtatagtgtgtttctattcatttaagtgtgtgcatattttcggttttttgttg

SEQ ID NO: 47844 - DNA, 545 bp, Arabidopsis thaliana landsberg
  unsure (1)..(545): unsure at all n locations
ctacagagttgatgctgccgctatgagtatggaaattgattctgctcctgcggttacgcagcagtcgccaacgtttaagttcgttgacgtcggagaagcccaactgctggattcgggatacgctacccagtccgcatcgcccgacaacaagttgacggagtcactctcccctgaatctcccaccgctcgttccggaccgttggcactgaccgaccttgccgaatttgacaagcctgttgacgaacatactctgtctcgcttccgccttgtctacactcagattgagaagccattgctggcttacattcgccggaaaacttttggaaggagataccggccaatttctctacgattaatgatcttaggacggaatgaggctatacagaagacgtactgcggtgtgcctatcattatccgcagcccttcaactccngaccggaggtggacgtttggtggcatcataaagactgtttcgtggaatggagatacagaactatacngnctaaccgtcaaccacattctcttagccgattaaattataacct

SEQ ID NO: 47845 - DNA, 727 bp, Arabidopsis thaliana landsberg
ctccaacctcacattcttgttttcaccgttttggattatttatcctgtttattgcaggtcataataacttaggcatgatttgattttgatatccaccaaatttctctcttcaatgttctgatatggagtttttgtctgaacagagatgttgttgtaaagaatctcacaattttggctcctcttgaatctccaaatacagatggagttgatccaggtgagtttccttgcaaattttactcgtagattcaagatatgtaccttattattatctttggaaattgttctgtttgcagattcatcaactaatgtttgcatagaggattgttacatagttaccggggatgatttggtatcgataaaaagcggatgggatgagtatggaatatcctacgcaagaccgagctccaagatcaagattaatcggttaacaggtcaaactacttcaagctcaggaatagcaataggaagtgaaatgtcgggaggtgtatccgaaatatacattaaagacttacatttgttcaattcgaatactggaatcagaatcaagacttctgctggaagaggcgggtatgttagaaacgttcacatcttgaacgtgaagctcgataatgtaaagaaagcgattaggttcaccgggtagtacggtgaacatcctgatgagaaatacgatcccaaagcactcccagctatagagaaaatcacctttgagaatgtaaatggcgatgga

SEQ ID NO: 47846 - DNA, 662 bp, Arabidopsis thaliana landsberg
taacatactaacacagtcgctgctccagcacaactgtcacggcgtgtgctagggcagtggggccgtcgccaaggacgtgcagcttgtgaagcagtgctggagccttccccatcgccgagcagcccgtgggggcaattcaagcagtctaggcctacaatagcgatccagcgaacgacagccaattcagctcgatcgggaacaacaacggttaaatagatcctaacaatactagggttactccaacaaagaaaatgcataggggctgcaaacgcaaatcttcgatcttatactgactgaaatcaaaacactgtaaaatcaacagacagtaatgacggtttgcacgccctaaattcaagcacaattgacaatcctcagctatataaacaagcacaattgaagatgagaggtccacatcctcagctagtcagctatatatacaagtacaattgacaatcttcgttaacagacagtaacaacgatctgcacgccctaaattgtttccaaagcgtgttacagatctcaactggtggcgtcgtcttctcaaactcgaacttctgtatcttcttcccattcttgtcgacagtatctgattaccagctaaggacttctgcagtgccatgactttttgttgatgttagatgttattgaaagctgatatgaag

SEQ ID NO: 47847 - DNA, 491 bp, Arabidopsis thaliana landsberg
aatgtttatctttaaatacatcaacaccttaaaggttacggtatatccattgcccattcctctgactaggacgacccctttagaacttaatacattcagcctgtggttcacagttctccactctcttatatttagatgttatttttctgttctaccttctcttcataggaactaaagtgaattgagtcagagaaaaagagaaagagagaaggtaacatggatgcttgttttcttacctcaagatcaatctctggtgttaaagagcttgtcccgttcatcaaagcgagaatctttacttgccccaagagaaattctggccaatttgttaccaggaaggttgcttctccgatctctgtaaattgtaagtaagatctctttcatggtcattttgatctataagaatggcctgagtatcgcaataacatgtcttggtttgggaatttgcctgtcttgagtgaaattattgtagctgatgagagcattttggtttg

SEQ ID NO: 47848 - DNA, 790 bp, Arabidopsis thaliana landsberg
tacagggcgagattgctactcctagctagtttcctaatacattttttcaataataagaagagattaatttgattttttaaaaaaggtcataataatagtcaatctcatcctctactccaaaattgtagtgctaatcaaacgtgggattatataacagactacaatgtaaatagtaggatccaccaaactcaaaaatatttgcaacaattttttctgttaaaatggctttcaaactttaaggccgaatcgatgacttatgtatcttattttctggggtctggctagatcatctgttagcacactaaattttgtaatttcctacaaaatgcatgaataatattcacaaaatatcttataaggatcttcagtatctgctaatccattataagatttgagttaacagtttaaaaggtaatctcaaatagtcaaatgtcactgtaagattttgaaagatggaacatgatcttgaaaaagagagattaaagaaaaagatggatttaagttcttcaacactctccttcttcttttcttcttgggcctaaaacaacccaatatctcactcttcaaacgagcccgagattctcaaccttgacaagcccaaagtgaagatagatttttagataaatccaaataggttttatgttttacaagttacatacactcccctatcttgatgattaggaaaatcagactttagatttttggtttcccatatgccaattcagttccatttgattggttgacgagaatcctcactccactcttatattttaaatccatttaattgaca

SEQ ID NO: 47849 - DNA, 1146 bp, Arabidopsis thaliana landsberg
gtgaagctgtaaggaactctggtgggtttgcattattttccatttaacaacacatgcaatttttttttaataataaatataaatttgataattgcattaagtatcaacaaagttaatagtattattgtagtgtaatttttgagttgaaattattggttttattttataaatataacttttgtcaaagtttcaagttttttttcaaagttaatgaataacaaataaaaatctattcgttgaattttactgtcgccaccaccagtttgagtagattccgcaatttgagagattacattaaaaatgataaaattagttgtgatgtggtgtttcacttcgagagaatatgagtacaatgagattatgagagattgattttttttttttttcatttctcaaactttctctaatgcattttgctcatattcgaagatcgcttgtggtgacctttgtgttttataaccaaaaaatcgttgctaaaatcaatactaatattgcatgaaaaaataaacattttacacacaatgtaagtcattttcaactagtataaatatgcattgttattttaataaaagtagttttgttaatcagatattacgatttttatcatggtacataaattttaaaaagaatcaatttgttatgaatggtataccaacgaataacaataattcaatcatatgttaggagtcatttatatgtttacctatatattattttgaagattttcactcaatgcaaagatgaacctcaaaattacttttatcaatgacacatttttaaagagaaaatatataaagatatgaaagtagtcactagggactatgtaatcaattgtgctatttattgtttaaacacactaaaatatatagttttaatgtaattaagtaatcctacaactttcatgtgaaaattcctagtcaaatatttcacgtagtgagttatttaaagtaaaacagaataataggtatgcttatacgggtcgagttgctttattatgaatatgattatatgaatcaaaggatatgaatttatatttatcaagttaccacgttacgaccaaatttgggttatgggtttcaaatcttgaacggttcatggtattccgccgcttttgtcctatcaagtatggacacatttttcaaaagt

SEQ ID NO: 47850 - DNA, 181 bp, Arabidopsis thaliana landsberg
cccccccccccccctctccccccccccccccccccccccccctccccccccccccccgcccccccctcccccccccccccccccctccccccccctctctccctcccccccccccccccccccccctcctccacccccccccctcccccaccttcccccccccctcccctccccccccccc

SEQ ID NO: 47851 - DNA, 677 bp, Arabidopsis thaliana landsberg
cttggtaattttgatgctcggaagcgaatcaacaactattcctcaacctaaagcgcccggttattgcctggagagaagtcttcttgacactgattcttcgtcgagtaaacagcgcgacgatgaatcatggacagtgaaccaaattactgtctcggtccttgatgctcggtaatgtgactgtcaactagccaatcttctatactaagatgactaaattgagcgacaataagaatcaactaggaaagatggtattagttatgtgcatagtattttctctgtacgtctccgttgcaaaggttactacatgattcaattgtcttaattaagcatgtattctgtaattgctttatggataacccaaatagtcctgcagttataggacatcaatgtgatattttgaaagattctcagactttcatattataaattatggctactagaagaggcaaatattgttggttagtagaatttcgggttgtacgttttgagattaggtttgtacatgttgtaatagatttttttttaataagtacatacgttataagaattttttatgatcagcaacacctatttccatcgctaaccatggccaaaatccggtggatttaatttatgggctttaggaagatcatgggggtataatggattttttgtttttaactgatgacagagtaaat

SEQ ID NO: 47852 - DNA, 535 bp, Arabidopsis thaliana landsberg
ctacaatattttattttaattaaaaatttaggtgaaaaaatctatatgattttaggataggagccaaacacatttttaaaaattatttgatcgattttgaaggattatattattaacatgatatcagtaaaattgtggaactttagccccttggaattggccacgaggcaacaccaacctctttggttatgacgtaggagacactaacgacataatttatgttgattcggaaggcacatgctttggtcgatttgtttaaatgattctatgttttgtgatcgacaagccgaaatataaacaaatgcctataaagccaacaaaaaacatactagtgttagtgatgttttaagaaatagattgattggtgtcgtattatcggaccagtcactatcttataccgggtttatgggtagccgtacgtgcattctttgccttttaagtctttattaatccaaaataattctgtaatggattaacttctaatttagttggtgttgatttgttatgagtgatgatgacttatgacttatgaggc

SEQ ID NO: 47853 - DNA, 495 bp, Arabidopsis thaliana landsberg
tgattgttactttgttgccatcggttctggccaccttgattgttttgagctcctcgagctccccctgattggaaacttctatcttggtttccttgagcatctcgttcttgtccgttgaatctcccgctaccacatccgcgactacgtcctcgacctcgtcctcttcctcgaccacgaccgtaaccatatccttggttatttcttctattggtgaatagagcggtctcttctccgttaattggtcggctaagcgtgggtttatctagatcctcctcattgattagcaaattctctagatctgctaaagttggctcggtagcccatccccgagttgccgtgataatactcttgtattccggcttcaaaccatgaatgataattcttttcattctagtctgagtaataccattttcaggatctagtttagaaatctcatcacaaagagatttcactttagaaaaatattgactcacggacatattcttctgggagatt

SEQ ID NO: 47854 - DNA, 425 bp, Arabidopsis thaliana landsberg
  unsure (1)..(425): unsure at all n locations
nnnnnnnnnnnnnnnnnnnnnnnnnnnnnnnnnnnnnnnnnnnnnnnnnnnnnnnnnnnnnnnnnnnnnnnnnnnnnnnnnnnnnnnnnnnnnnnnnattcccacacacagagagacgtttgagtaatttttgtaagatgatgaaaatttgaacatttcttcattgaaagaagcaaagaggcaagcaacaagacaagagtgtccccacgcatgtgagcacctgttaccataatagaaaaagatatgatatcatctacaggtggtgaaaaaatctcattatctgagctaattttgattaatgaaaaaattgatttgtgaaataattttttgaaattttatgaaagacctcacctaacatgtagaagatatattataaaactctcgttactctattttgattaactcttacaagatcactgtttaca

SEQ ID NO: 47855 - DNA, 826 bp, Arabidopsis thaliana landsberg
  unsure (1)..(826): unsure at all n locations
caaggttatcatcattttcagtgtacgtgattcatgtaccgacacatacattatgtaatatggcaaatcacatcttgttctgcaacttgcccgtaccgtcctagagcatggaatatatgtaacaatgcaacgtgttcctcttatnnnnnnnnnnnnnnnnnnnnnnnnnnngatgttttaatggttagtagcctcgttttctaccacgatgttgaacaataacgcccacaactttcttaaatggatagagaagaatttaatatttagttacatctattcaaaatattctttaattaaagatagattgtttaaaaaaagaaaaaaaagatagacagatctgcttcattcatatgatcatatcactaatttacgaaagccgcaggcccgcagcaaaagttttacttgtaactagttaaataagtaaataacatcaaatcctaacatttaaatcctaagattgacttttttttttcttgtaacagacccttattagtgcaagattttttttatataaaaagttagatatttttataggtccattatgtgaaattactcgtatgaaccaattcccatatataattaaggcttaacattccattacctattaaaataataaaaccatatataataaagtaattatttctgcctttagctaaactgaaatatgtatatgctagaaatattttattagatagtattattttctataattgataaaatatttctacgaaccatcaattaacaggttaaacatctggttattcgaactattatgtttagtagtacgttgtctctgaatatatatttgtacgaaggaatcgattga

SEQ ID NO: 47856 - DNA, 536 bp, Arabidopsis thaliana landsberg
tggggctacgcgagagactctagggccgcgcgtggcagcaagagacgacggtgccacgtggagcagcacggggggtagcggggctgcgcatggcacggtgggggtgcaagaagcaagggtgcaagagcgggaaccacatagtctgcctcaaggaaggtgtcgtactaagagggcgaggcaacgaaaggggaaacagagaaggggaagtcagactcatcaaagacggaagacgaggactctgtgggtgaagagtgaaggcaccggtaccccttgtgatcaggagagtattcaaggaagacacgagtggaacgtggagcaagcttgtgagcgacagtggcagagagattaggatagcaagcgcacccgaacacgcgacggtgatcgtaggagggaaaggtgacaaagagtgcaaagtagggggtgaggtgacgaccgccttggtggggaggaattcagcagataggtagaagtggctagccctcggcccagtaacgaacgggtaggtaggcctgaacagcagggggcgcatgacgttg

SEQ ID NO: 47857 - DNA, 585 bp, Arabidopsis thaliana landsberg
tgtcaatgcatctatttgcttgatggaaaaacatttcatgtaggtgtctgtgccttggatggccacccaatcatagggttatcgggccttgtgcaggtggtgggattcccctgagtttcatgccattttcgaaaggaacatgggaaaccgtggtactgagtcgttccacaactacgacggtgaggacatgtacacttggctaagcgaatggtatgtcacagtatgttgtaacttcgaattacatagaaatgtgtcattctaacttgtatgtacaggaagacaaatccgcctgtacgccttcgaatctggaggtgtatatgtaagggcataagggttctgatccacagaatcctgatgttttatgcactaagacaaccaccgaccgtctagtgagtttcaggtactctattatgtgtttgtgcatcaacttggtaatgcacgtatatttggtatgtttgcctccaggctttgtatgggcaggagatggttcagcgccatgggtaggactacgattggaggaacaaccaatcgacccttatgtagcatatgctagtgcaggaggataacccatggacgatgagagta

SEQ ID NO: 47858 - DNA, 542 bp, Arabidopsis thaliana landsberg
tctgcttcgtgctgccggagacgaagggctcttttccggtgacatgtgatgggctggggacaggtcgtgtcgccgcccgatgggacatgggcgattacatggccagcctggagaagctgatggggcgtgacgaccgcgtcttctatccggggcatggcgaggcggtggacaatccggcgcggctggtgcgcgggatgctgggccatcgccgccagcgcgaggggcagatcttgcgccggctgggcgagggcgtctcggcggtgccgacctggtcgcgcgcctctatgcggggctcgacccgcgcctggtgccggcggcggaacggtcggtgctggcgcatctccatgatctgaggaagcggggcctggtggctgaggaaggagcaggatggcggatcgcggcgtagaggcggaacggacgacgggcgcggcgtcgcacccgcgcggggcgcggcatcggtgccttcctggccaagacggcgggcgtgctggtgctgctggtgcttgcggtggtgatcgcgctgttgggcgtgcacgcttatg

SEQ ID NO: 47859 - DNA, 579 bp, Arabidopsis thaliana landsberg
catcgcggcacccaagccgcgatgtttctcggcctcctcgaaagaccgaggcttgccatcatcgcatgcaagattcaactctcctgccagagtacgagacatcaggcccgacaccgatgggtcgatgagaaggcccccaccgtacgataccgcaatggctcaccgtcgtagcacgcgtcgacgcgctcctcgtcgtgggaaagcggggtcacgaactccatcgggtcatgcttgacatgggctggtgtcagagatgacgttcatggagagggtatcatcagtgctggagtacgtggtgacgaagagcttgttgtagacggagcgctggctagattgtgtggtggcgaagagctcgttatagccagagctagagagcgtggtgctagagttggtggagacttgggggctggggtaaactgctcgaagaagagttgcctactcacctagctccctctaagtggacgtactcgatggtgaagtcgtcgtacgttggagtcgtgtcgtcgtccacgccttgtccaggcctatcctcgccttcatcgacactacgtacacgacgtcacacatgtagtgttctgg

SEQ ID NO: 47860 - DNA, 1149 bp, Arabidopsis thaliana landsberg
  unsure (1)..(1149): unsure at all n locations
gatatgattagattaggttctatttataagctagttctttttctgaatgtgaattaaccgaagaacgacctgagaataataaagttctgatgtgtgagagaaaaaagatagcataaatatgaatctaatgcatggaaagtgagtttattttactatggcagcgactagcaggaggagtttcaacatgacaagctttaggcaaagcaagagcttgtgtctcattaacattgatcccaagctgagaacctccaccatcgagaacctgacacaaacactcagaagaataccggacaacatgagccaactggttacaacattgttgagacgggagagaagtgttttgagtgatgaagctgagacacggagccatgctgattagaacatttgtgcaactcgactgagcagaaacaatcgacattactctcattaaagcaataaacaagattaaacacattctaggtttcatgtttttcttgtgttccaagaatctctcaagatttttttttaatttagttgtttgatcgattaatggtttgtgttggagtcttttcttttgtggttacgtaaataaataagaagttgaggccgcagaaaaagacgaaaataaggatgtggctcaatttgcatgaccaacttttgcaacaccttatggtgaagtttgtgaaaagaatatgattacgtttggtttaaggatatgtttgttgaattattttttgtgattatataaagtttttgagtttcacctgattgaaatttgattgctgaccttttcaatgaaaaaaacaagaaaaaaaaaagatacgtagataaatttgtagaaaccattaaaattataagcaaaaccaaacacttacttgtgaattgttcattttaatatggttgtttgagtttattggtttaatttgtgttggagtctttttgggagttcgtaaataaatagaaactgatatatgtcgcataaaaaaaaaagaaaaaaaagaaggatgtcaggatgtggcttaatctgcatgatctaacttctctatttgataaagagcatgaccaacttttgcaatataaatatggtaaagtttgcgttcttattcagaaactgagatntcgatatgctccaccatacgtaaaccattattagcccacactttacgatct

SEQ ID NO: 47861 - DNA, 691 bp, Arabidopsis thaliana landsberg
tgtatacatcctttatagtaatttgatagacttctgaatgcaaagaataccataagcttatgcttcttcttcttcttcctttggtaatcaagggttccataatcaaagattgatctaatcaatctttgaaatctataaagaacatgaatattcgagtcatatatagtcatgcatgattgaaatttcatagaatattcaaactcttatcggcattcatcgaaacatactttactttgtaattgcttgtgtcgacaataatagaattatatcacaatcaaaatttaaaagcgttgacggacgaatcatgttcatgcgtgccgaacggctgaaactaatggcgacaccaaggctttgctggtgtttccgtccgttgactttcttttgcatgagaacaaaaatctagaaaacgatttatatataaacaaaaacgaaactaattaactataaaatacgttacgacttgattagttgttgtcaccaaactcatagtactactaactaagcttaacacacaaattgataattgaatattcgatctactaaacaattattagcctttttcttctttccttttcaatcattagagcctttaatggcacaagaagtagagaacagtaaaatctgctatgtggtaagtgtttggacttcatatgaaattagttaatacctgaataaaagtcccaatttttta

SEQ ID NO: 47862 - DNA, 1034 bp, Arabidopsis thaliana landsberg
aaaaatcaacaagtaatcaagtaaagaatgatagtgatttcaactttatgtcattaaatatagtatgagagattgtattggactatagtaatgagtgattagatctgaacccgtgttgtggttaaacacttaggcggcgggattagtggggacaaaagtcacaaaatagattatggagtgtgtattcaaagcattccatttagataggtgggacgatgattcctaaactctaaactaatggatagttttaaaaataaaaactgaaaatttgacaatagtctaaatttattatgtaaattaattttaatatatagccgaaaaagttttgaaataacaacctaccttagaatttaaaatcgttaatcccaaaattttaggcaaaacatcctaattttctaagttttcatttgaaacattggatgtgcctagatgacataatttggcttaaaagaaagcagctgcaataaaattttgttgagttcctctactttcaatcaatcagatttgaataaatataaactaatgtcaacctataaattgtcgaagtttatgtcgcatttgtttttgtacggttataaattgtcgaagtttattgaatatattttggaaaacaatttcagcttttatgtagtagtgcgacttaattgaaagtttactctctttttttttttttttgacaaagtattgaacgtttgctaagagctaatacttcgatcactttatgtggttacaatagtttcgctagaatctgtttaatcatatatttgtagttgttttaaatatgtttaatcaaatagctaaatatagagggtttgattgttagaaagaaaaagaaaaggaattttgtaaaactacaataaaaacaatgatttttgaaacatagaccacttcccaattttttaaaaaattaattaactatttaattgttaatttacaaatgtatccccttatggttaaaactaacttaattaattacttaaaccatcttttccgaatcatatatattatcgtatgatgtattttgcatatcacaa

SEQ ID NO: 47863 - DNA, 1272 bp, Arabidopsis thaliana landsberg
taacacactttattaacaaaaaaacgttttctaaaatagtgttttctcttttcaattcagtaattttgtttaatctaaatttgacaaatttagcatcttaataatgctcgaaacctccaaccgtcaacaaataccgttggaacaataacagtgatataattaagtgataatttaatttaatgatgaaataataccttcttcaataagtgatttaagtgataattaagttgcaagatagaacagccacgtgagaacgaaagcatcacgtgatctcaggcgcaatttgctgcaagtgggaaattggactttacgttggcgtcgcctcgaaattaagactcacgcgtgtgattttttgtcccaattaatctctcttttcttttgcttacacaccatttttaacctaaaacatcaataatagtacaattcacaaatcttatatttacggacggttgcggtgctaacttttaaaatcaataatagacatttcaaaagtttcggaccattctaaaccattcaaatcgatgaattttaaaagttcttttttgtaaacatttgcgattatagacagttagcaaaaaagaaaaagaacaaaaaaaagtcatttaaacaacaaataaataaatattatcaaatcatatatatattaatgttcattctcaaaattttaaatactttttcctactaatatcagtgtatcaatcccaactgaagaaagataataaataaaagtagtattgtaataatattgtcaatttggaaggtttatgaattagtttgtcatatttctatgaaatttacaaatagagctgtgcttataaaaaagaggcggatgcctcaaaccccaaattttctattgaatattaaggctccaatttcagatatataggtagttcaattggtcaaaactttgtatattttagtgtctcgttttaagtttgagttcataatgattcccaatatttggtcataatatgttttttccttacgtttaagaaataacatcgtttcttttataaatgttcagttttttctatattattattttttatatcatttatataatgtatattatttttatttctgtattctttatcaaattttgaaaattagacaaattgtctttaaataaacaattctgtattttatttatgatccagtaaaccattagttttcttttactaaacaaactaaaattgtaaatctctaattctttagaacactataatagattttcataattttctatttatattttttttccaatgtaagaat

SEQ ID NO: 47864 - DNA, 1073 bp, Arabidopsis thaliana landsberg
ttaggttctttggtttagggtttcattctttgtagttaaatctgtttaaaagatttcattttgagattagttaaaaaactttgagattgttgcctttttaagtagctaaaggtcctctttatactaaaagttttacatcattactaatcctttccttaaaagttgtattagtaaccccattagaaaaaagctgattagtaccaaaaaaaaaaaggcacaagtgagtttcagtttttgttttgccttatcttcattgtacagttgaaaaaaagaattcttccttcttgtctctttgtgtatgattaataatattctaaaatggtgaagcatgattttgtcttcttccattgttcattgttgcatagtggttgttttgttgcatattagctgataatgaagaacaaacctaagtttaaaattttgattttgctgttagcttttttactttatgagttaaaaattattttaattgactttgactgtaaaatctttaatgtgtaattaattttctatgcagggacaagatggttggtgtatttaatatcatctgattaagaaggagaaacttgtttttttggcgataaagatagaaaagaacttggcttttgttcttctctctggttcaacaaaagaattcaaaagagaagaaaggatgatgctgataagaagaaggttggcttgctgtagcagggagagggagattagtatcgatttcgatgaacatgaccaagatagtaagttactgatttaaccaatctctattcttgcattcttacacttacgatgcttacttaaagtatgaatctatagctccaatggtgacctttttagcttttaggtattgcatttatgggcatgatatggaatatttagactataactgttgggtgtatagttttcaaacaaaagtgagtggtcttgtgaccggtttaggttttggtatgggaccaatattcagaccctttaaagatctacaccagccaggtcattcatgtaataaataaggcgtaaagtctgtagctttccacgagacatcaatgccttaatttaatatgatgcgagagcattttatg

SEQ ID NO: 47865 - DNA, 510 bp, Arabidopsis thaliana landsberg
ttgcacgcacaaccgttcgtcgtggtctcgaatgttacataaaaaatgtctatccttaattattattttaccaacgacaatcgacaaaaggagagccaagtgttatggagataggtgcatattatgacgatcgttcgtagagtcgttaagtataatcacatatatcgcatggagatatatatgatagattgatcatcatgcataataggattcacaaatatatatatgctaaatatccatgatgataatgtagcatcgaccaaaacaaaattgatttttcatagaaataagttaatgtaagaaaaaaaagttaatgtgacttgtctgaaacaacgaatatttgaaggcggaacttgatttacgctaaataaataacgagatacaagcttaacagttaacgtttgaacaataatatggacaagatgatacgaaagtattattttggaacattagcaaaaatttaagagatgcgtaatgagaaaaaatattattttctaaaactatattagc

SEQ ID NO: 47866 - DNA, 526 bp, Arabidopsis thaliana landsberg
atattttcacattcccaagcttttctttcttttttttccacattcccaagcttttctttcatcccaactttattttgttgttccgtctctgcaaaaacccttgctattctcagaatcataaacaaccgccatagtgtccattccttctgcatttcacatttggtcgaatcggataaaaaggtcttctctttgtgttggagtaacgatgaacaagagaagtgaatcttatctagaagaagaaagatgagatctctgagcagtgtgggacttgctctaagcatagtctttggttgcttgctattagctcttctcgctgagctttattacttgctttggtgtaagaagaggtcgacgacgagaagacctgattttcgaaatgactattctacccctggaaccagagagcttctcttcatcttctgttgcagtagtagcacaaacccttcttcttcttctccttcttcttcctctttctcaaaccctaaacccattgacactcaacaacaatgtcctcttaataatgggt

SEQ ID NO: 47867 - DNA, 602 bp, Arabidopsis thaliana landsberg
  unsure (1)..(602): unsure at all n locations
ccctaacacgtgcaagtataaggaaatgactactacttttagctttatccaatagactatctttgaaggagtgaaatacacaaaccgtaagacttatttggaatcaagggtaatatagggaattgagggggctagattcccctactattcaattttaaatagtgaaggattttagtccccttaatctcctctatttcacttgctcccaaacaagccctaagaattaatctagtggtagtgggcatagttgatgaccattttagtgaatctaccaaaatatacggttacaaaaaaagtaagaattgacctgacaaaaccaagccaattcacttttgcatccacaattttcatttgccaaaagcagcgcatgtnnnnnnnnnnnnnnnnnnnnnnnnngcaaacataagtatgaaagagttctttttcaataaccaagtcagtatgtcgcttttgcaaatctattgccacgacaagccaagtgttaacatgaagaaaaaatgggatgttcacgctccaacttaggcatttggatatggagccacgtagaagtctaatggctttatactgcaacagataccaatgaagcaatgaaggagagattg

SEQ ID NO: 47868 - DNA, 504 bp, Arabidopsis thaliana landsberg
agattctttaggtttagtgagtgcatgttcaaaattcttagagaatctttagtggggacatcaaaattggcgtgtggataaaagatgatggaagcaaactttatagtacatgacatgataccactaattgtccccaaaaaaaacaaaaactttaagaagaaagcaaacttcattttcttcctaagtgcgaaacccattgtgatgaatatattggtaccacactaccacggacagtacctcttatgagtgttaggtactgtatgtactaatttccatatgttagtggtacaatgattatgaaaccatagtcacactgaggtaagaaaattgataagcaatttcgttctttcaagattttcaatagtaatggataacattgcagaatttgatgtgatgtccttccatttccatagattggctttggagacatatccattatcctacaactagaggaacagtcctagtaattctttttatggaatatgagatcacccatttttcttt

SEQ ID NO: 47869 - DNA, 592 bp, Arabidopsis thaliana landsberg
caaaataaccttaaaaaaattattttgttgcttaggcccccaatttcgtcagaccggccctgccatagtgccttgaatccatgatccatcaaacgtacatgtaataatactaggtcgtatgacagacacttttcactgcttaaaaaagatgaccatatgataaaaatatagttgggcctaatgggctgaattaaagatccatggattcaataacccaacccgtaaatccatttacccaaaaaagttttttttttttttaaatgttcaattagggttttaacaaaaggttttagatttctggattgctgctctttctcccctgtgccgtcctgtggaaaacatcgttctttcaccaacaatggcgaagaagcgagatcgaattgtcaacactcaaccttttatctccgatgacgcctccctcgcttcttccaggaaacgatcaaaggttccaaaaacccatcagaaacaggaaaaggtgagtttcgtcattttttcaaatttcaagctttttagaatgtttcaattgattgataatttggggattttggcagttgattgaagctggtatgagcgagaagatcatgaaacaagc

SEQ ID NO: 47870 - DNA, 986 bp, Arabidopsis thaliana landsberg
cgtacggtcaccttggatcggatacagttaaatgaaaaacgaaatcaagaaaacgtgaagaaatattttccctaaggagtatattttatacataatatatgaagttgaagatttagacattgagatttttaaagctaattagtttcgatactacacatatttcaacatgagaatgtttaagtacactgtgcgtatagctagcaaataaagacattcttcctttaatcgaaggaatgctcaaccataaattggctaaaactgaaatcatggcccgtaacaaactagcaatattctaattctagttgtaaaattacaataagtttatggaaaagattttagatgaatttacaataagttaaatgcaagggaaatgcagttaggcgacccttttaagaaaagagaataatttatctttggttccacttctaatttactcttcttctttttttttttctttcttattatatgttgggttacaatagaaagccaaaagggacttacagaaaatcaggaaaaagtgtaaaagttaaaaagcatactatgtaaagtcttagaaagactataaaacgaatcagccatatgcatggctcctctaatctatgtacgtgtacgagaatgtaaatgtattgaatatttcgatatataatatacaagtaatttcatcaactggaagtataacttgatgagttgattaatatataattttacaatcgataaatattttgtcttgaaggtaaatttaccgctactgagaagaaaaaaaagattattttctctaaaactcctggttacatgttgataatgtatatgttctccatactcacttattacaattatctaatgaatagattattattacaaaagcaacggtcgaggttagtgaatttcaaaattcaaatccagcagaattcagcagctaaccgtgagctgatgaatttatctcaaatacactagagtattaatattatcctatcaagtaagtagta

SEQ ID NO: 47871 - DNA, 617 bp, Arabidopsis thaliana landsberg
  unsure (1)..(617): unsure at all n locations
tgtgtattggtctctcgagttgttgtatgcacatgttgtagccgcacatcgtggaatgtaactactggacgagcgatacacatctgactatgtaagaacaatccataacatagcttaaacgaaacaatgataannnnnnnnnnnnnnnnnnnnnnnnnnnnnnnnnnngatcgaccaaaataaggtagatcatcgcatggtcctgatgcaatctattgtataccacatcagggcagtatgacacttactcttataaaaggatgacgatgcatcgaagatatgagaaatcacacgctacttgggaatgtctgacttctttttattaacgatgagaaatgtatattttatagacactattaactgactctatctgaccagtacttatctacagatacatgacccacagtaccattttgccacactagctcgattgactactagataaactatttagcccatcgaccaactttctgttggcccactccagtcaagatttggcagcaacacatgcctaagaccccagttttggtaatacatgtgtattcgaaactaaatcataacttttactgatttagttttggtagtatgtttcaaaactaaatgatagttttggtaat

SEQ ID NO: 47872 - DNA, 423 bp, Arabidopsis thaliana landsberg
  unsure (1)..(423): unsure at all n locations
aaaatctgtctgataatcatggctctttcatgtggacaggctcattgtcaaataagtatgtgtcatagtaatcggtctcaattgaaacacaggtgtcatttcatacactgagcctacacacgataggcgttatttgcaagacgtgttacnnnnnnnnnnnnnnnnnnnnnnnnnnnnnnnnnnnnnnnnnnnnnnnnnnnnnnnnnnnnnnnnnnnnnnnnnnnnnnnnnnnnnnnnnnnnnnnnnnnnnnnnnnnnnnnnnnnnnnnnnnnnnnnnnnnnnnnnnnnnnnnnnnnnnnnnnnnnnnnnnnnnnnnnnnnnnnnnnnnnnnnnnnnnnnnnnnnnnnnnnnnnnnnnnnnnnnnnnnnnnnnnnnnnnnnnnnnnnnnnnnnnnnnnnnnnnnnnnnnnnnnnnnnnnnnnnn

SEQ ID NO: 47873 - DNA, 184 bp, Arabidopsis thaliana landsberg
aaaaaaaaaaaaaaaagaagaatgagaaaataataaaatagaaaaaaaaaaaataaataaaaaaaaaaaaagagaaaaaaaaaaaaaaaaaataaaaaaaagaaagaaaaaaagaaaaaagaaaaaaaaaaaaatagaaaaaaaaaaaagaaaagaaaaaaaaagaaaaaaaaaaaaaaaaaaa

SEQ ID NO: 47874 - DNA, 171 bp, Arabidopsis thaliana landsberg
  unsure (1)..(171): unsure at all n locations
ggtgagcgcatggntacaatataggacgagattatctttgacgaaaaagaaatgatgatttttagacttctaccaaaactagcagaatatgacataaaaaagtatatgcgagaagcacctaataaacagcgaagagtattaataaaagcccgatcaaaaagcaccaaaaat

SEQ ID NO: 47875 - DNA, 511 bp, Arabidopsis thaliana landsberg
gcgtcggtccaaaaaaaacctacaactatttatattattttacagtttctttatgaaaagaaaacaaagaaaccctaattttctaaaggctacgttttcttgtcttgcccgcacacacacacctcgatgaatcgagcaaaagccagccctgcccttgccccaatcgattcatcaaactatttacaccatatatattatattcctcagtgttcttttttctttcttgcgaataaaatgtattgactggatagatatttacagagttctgttttttttgttaatggttaattaaaaaaaaaaactttccaaatgattgttttaatattgagatgcagttacaatccatgagagtaagtatagagtttggccttggcatttgaaaggaggggaagactctagtggtgtaagagagtttaaggagatggagtacaaaagaaagtagcagcgagtgggcatttaaattaacaaaatttaaataaatgcaagtctgtttttttcagtatacaattac

SEQ ID NO: 47876 - DNA, 518 bp, Arabidopsis thaliana landsberg
  unsure (1)..(518): unsure at all n locations
attgtcgccatgnnnnnnnnnnnnnnnnnnnnnnnnnnnnnnnnnnnnnnnnnnnnnnnnnnnnnnnnnnntgctgccacctctgctactgccagtcctgctgctgtgggtccaactgctgctagaccacctgctacaataacagctgccactgacacacctattcctgacaaacatgttctcatatgtcttgctctggagcatgttcaaccactcttgtcccctacagcaccaaatcaacctaatgaaggtcacttgtactcaagaccctgaaaggccattccacaaagtctgctgaaacaggtaattctttggtccaaaagatatgctgccccacaccttgctttttttctcttaaaaagttcacattcctcaatctttctctgcacttgggaaactttcatatggaacccataaaaccttggggcttttgccatggctttgaaaactggggatctccccctctataaataaatgtgactttggtaccaacccccaactacatgtgtcatgaatct

SEQ ID NO: 47877 - DNA, 207 bp, Arabidopsis thaliana landsberg
gcgacaactctggcatcctctgtcgcgtgggccccgttcgccaggttcttcttcctctgctaggtgccgcggcggctgtattccaaatccccgaacaactccacgcaaatccgaagggagcgccaacaaactcaaccgtgaatgccgccagctacgggatcctttcggaatccgcacgctccctgtttgctcgcccgtaaccgcttg

SEQ ID NO: 47878 - DNA, 1016 bp, Arabidopsis thaliana landsberg
aatcttaccttacttaacatacggtgagcctgcagcgatggaagcactcatagagcattttagcccttacctgcaaaactggtctgaatttgatcagcttcagcaacgtcatgaggaggaccccaaggatgacagcattgctcagcaagcggcgaagcagaggtttactgtggagaattttgtaagagtgtcagaatctctcaagacaagttcatgtggagagaggttaaaagacatagttttggagaatggtatcatagctgttgctgtcaaacacataaaggaaatttttgcaatcacgggacagactgggttcaaatctagcaaggaatggcttttggctcttaaacttccgtcagtgcctcttattttgtcaatgctaagaggattgtcgatgggtcatttgcctacccaaacatgcatagacgagggaggaattttaaccctactttttgccttataaggagtctctggagaaaacgacatcggtgcatgggctgaaaatttgctagatacacttgccgataaagaaggaaaaggagatggatttcttggagagaaagtccgtgcattacgagatgccaccaaagatgaaatgagacgccgtgcattaagaaagagagaggagctcctgcaggtaaatataataatgattctctctcaaggaaactaaatgtgtaatttggtcttgtgacaatatttaccaagtttctcttttgaaacagggacttggaatgcgtcaagagctatcttctgatggtggtgaaaggattgtggtttctcaaccaattcttgaaggttttgaggatgtagaggaagaagaagatggattggcttgcatggtgtgtagagaaggctacaagctcaaaccttctgatttattaggagtctactcttaccagcaacgggtgaatctcggtgttggcaattctggaagcgcacgtggtgaatgcgtttacactacagtgagctacttcaacataattcatttttaatgtcatcaagaggcaaaagag

SEQ ID NO: 47879 - DNA, 747 bp, Arabidopsis thaliana landsberg
actaaaccctaaaatggcttaaaacaaattataaattgcagtaaaccacatgaatatcttgttaatgtttagtctaaactttggctataaaacatactttgagaactaaaaaattattcgaatatgatcaatgggctaaagactttaaaaaaatccacttggatatctaaagaacatcaatagtgttagaatctaaatttaattgtataacttttctaataaactcctaagtatacatattaatatatgttttgtataatttcataagaaaacgaaaataagaattctgtatttatgatattttatatgataaatgttgcttggttgaaaatataacatataaattattgaagtgttcagctttatggttgagaggaaaaggaatagtagtttgtgccaaactcttgcttgtgaccatttcttatgttaaatattcgttaggcttccctttcacctataaagctctttgtttctccttccttcttctattccgtaactcagtaccgcccatgtctctctcctatcacgtttcgacacgtgtccttgatggttcccgacaactacgtgagtaagtgagcatcacgcaatcatcgccgtaccatgttccgcctaactcaactcttttcagatggattaaagtgcgacggaacaacgttatttcttttatctgtatcaatttttcgattcttgttaaaaaaaagaattagtttccatttaaagtaaacataattgtattctataagtaca

SEQ ID NO: 47880 - DNA, 1015 bp, Arabidopsis thaliana landsberg
caaatgacttgactgcttttaacactactaattttttattactgttgacaactactaaaatggtatatgtcttaccatcatttaccactcaaaacttttatttttcttctttcaattttttgtagaataataagaaatacaactagattttctttgaaataaaaaggaatacaactagatttggtcatggataaaagtagagtaagtcccggctatatttggtcaatggtgaactagctaggtgatacatattactgtttgtttcttaggtgatacacattatgacttaatcgagagtttgattcaaaataatatgatgataaaatactgcatttgaaaattgggaattggaaatgttaacaattcctactttatattctaatattttttaagatttttaaataaaagatttgtttacataattgttttttctttccagttttaatcttcttagtatagcttctctaattatttgtagaaaggctatgcccatagtatatcactagaaaacatgttcctggatatgataaaagatagaagaataaacgggaggaagatttgactaaatctcaaccaatgacatgcttaagtgtgttataagaacagtgatgtgatattaataatgagaatgatgcttcaatgttgagaaaggagagcatatcaatgataataagtatagaggtgttgatatggaggtgaacatggaacaatgtgagtataaataacttgacacccatgaacggttcaagtcagcatcctgcatcaggcgggacaaaatttatcctcaatttttttgtctatgataaatccaaattcgtggagactatgactcctgccatttcacgagatgatcgagctctcttatacttttcacttaatgtacatgtattatttttttgtaggcttacacttgaagagacgtataatgatttgtttgttagtagtttaaatttgatttgaatttcataactttacacttttgaaaattaatcgacaatgtttaagtcataacaag

SEQ ID NO: 47881 - DNA, 1001 bp, Arabidopsis thaliana landsberg
agggacacactttttttagccttgggggtcacagaatgttgggtcaaccttcaagacatacaaggaaaccagatgcagcaaaatcagactctttatcatcagtgtcggttccgctaacatcaatacatcattatgaagtaaaaataccaacatcttcttaaattttgatcggcacttcttttgtgaagatacatttgtagaagcactgagataagccttcccaaccaaagcttgacgtaaagccctgagacgcatggtgataatttaagattttataaccaaagtcaagaaaagcaaggacatgcatttaatataacatgctaaagtgacaacaaaaattgaacatcaagactatcttatgatttaggaaaatgtagattctcatgcaatgattgatgaagatgcaaaatacataacaaaacaaaaagcaacaaaatggtaccaactttcttgttatctttcgagtgctatttccaagtgatgacataaatactggtgatattgacgtggattctgatggcctgaaaaggcaaaacaagacagcacataaatgaatatttatactcatgcatgatgcccaaagaaaatcatttttcgctgcacataagatgtaaacctaaacaggagaaaagacaccttatgacaacgagtacaaagaataaaggttaccaactttcttgttatcttcaatctactcttaaccggagatgttatgcacgcaggagcactagttgaggtccaagtcgcagcaaggctggcatgagaagtttctacctccgagcatgacttacacagaaaccctctatggccaagagaggagaaagggaagggacctaggcagcgcaggtaataaagttcgatttaaccagatcgatgaagtcgacaaatattagaacaagttagggagagacagacccacctttgacatcaaatacaggtaaaacgtttctctttagatgcataatcagcagcatccagaattgttgcaaggacgctatagg

SEQ ID NO: 47882 - DNA, 956 bp, Arabidopsis thaliana landsberg
ttgggggatgaccaataaattcatggtacggatctatgtatagatttggtaatagggtacttgtagaatcctaattgggtaacaaaataatgagctggttctcattatggtatcgacacttgttcgaagaatagtggcttctcaagattgtttccgtgattgaggaagtctagctagtaaaaaaaaattatgattgacgaggctaatgataatgcatatgctacatggttaactatagagtctataagtacatgaaataaaatatttagaatcaaaacacccacaaaaagtaagaagtgactgttgtcaagcatataatagagatccacatactatttatatccacacgcacatgttcaagcagagacaaagatatagaaaacatacacatagaagagcaaattaagcaacagtcttacacagacagaagttgtagaattgatttgtgagtgaaaaactatttaagactgaacaagtatgcttgattggggagttcaaggtcatcatcaaaagcatgatcatgatatttatcaacaacaacatcaacaacaaggatgtaggaagggaccatggacacttgaagaagacaagcttctcgcagagtatgttacttcgcatggtgaaggaagatggagcactgtagctaagtgtgcaggtaactattttgattcaatcatggcttctaaaaacacataagttttactaatctaatctttataatctcgtagacatattagtaagcgaatcaccaaattataccaaagatcttgatcttctttctgtttgagtctttttttcaatgaaagtaagatttaattataatagttatatatacatctatataattaaataacacatgcttttatgacgattaatatagataagtgtgagatcatataagtgtatatggggcatctgtttccttatattttctttcttttcatttttttttttct

SEQ ID NO: 47883 - DNA, 642 bp, Arabidopsis thaliana landsberg
tgagtattttcaactccaaattagtttcaatattcctaagccaaacttttctctagcctcgatcaagtttataaaaattgattgaatattttcaactccaacttagtttcaataaatgattaagcactagcgttcagaagaatggatgctttcttagcaatatgcttttacctgtttgttacattagttccagacaagcagttaacatgtaatcgccgagttggaacataaggaaggtagaaggcaacactatacaacatcagtggaagctaagaaccagggcaataggcacatcacgtagcaacaatacaatggattaagggaaaatggtacatactaacagcagggaacatgaaacaaagcatgtacctcctcagtgccgttgacaaaaaaaactggaaacgttttgtgtttggaagtaaagtattttaaaatcatggttttggaatactacggttttaatttgtcatgacacaaccatagtatttttacatcacttttagcactacgtgtttagagacaaagtatctcaaattatggtaacgagtgtacatgtgcaagactagtcatagacaaaaactttgggttggaatagaattttaaatactctaaaaataccgtagtatctacaaaaccatagta

SEQ ID NO: 47884 - DNA, 711 bp, Arabidopsis thaliana landsberg
ctcacatctaaacttatgtatgataatggaaaaaattatatacacacctgtaattggagacaagagaacttgaacgcttgatgggacaaatggagtaaggaatggacctgaaacagttgttgtaatgactgaaacaagatccattcctctctctttcgcatatcgaaatgcttcttcctctgatacgagcttcgataatacataaatctgtaaccatatgaagttaaccttgttaatgacgcagaacaatgaattttgtaaggcattttactgaaattatactattgttatagtagttacccatccacttgcttgtgttttaaggacatgatcaacatgagccttgcaagtttcatccacgaaagatctcatcagttcattctcatctttagcagtgagagtgctgatggatgatgtgaagacaactcttttgactgactttgactttagacaagaactaagtacattccgtacgccttttagcgccggttctatgactttgctctgtacataactctctgcggttcaatccaacaaaacccggtttttattggttaacttctaatactatccggttgagagcggtttagatattgtgctatgaaaaaggaggaccggtgcaacgaaaaggtcgtaccgagattaacgtgatctgatgagatatcaaactccatggaagcggcgacatggaagacgccgtcacaaccctta

SEQ ID NO: 47885 - DNA, 695 bp, Arabidopsis thaliana landsberg
tgttttcagttttattgaggatatgcctaaattggtggaagcaagtgttagagttaaactgtcaaagaatgagaagcttccgaaagttcttacttcagttgagcatctttcgctagatctatatccttcaatggtaacatctttcttctctcgcaagctaggttttgtttatctttgaagatagcatttgctttaaactttgagtttttgcgtgcaggtttttcaccttgatgatagattcatctccaagcagcttcttcatctgaaattagacatttacgacaactttcagtcgaatcttcttctgagtttgttgaaagatttacctaatctacaatctctcaagctcaaccatgtaaactcacaatttccattgatattaatctgttttgagagttatgaattgatctaacccaatgtcttttatgtttctcagtcacatcccagctataatgtcgaagatcaaccgtgttcagtctctgaaccaagctctgttcctgaatgcttgagcttccatctcgagacttttcaatggataggctacgcaggaacatttgaagagatagcagctgcggtttacgttctgaaaaacgctcgttgtttaaagaatgctacaatctaactgtattaaaggggcacagagaatggtttgatgatgattaaggagttggaatctatgtctaaggtcaagcatg

SEQ ID NO: 47886 - DNA, 1071 bp, Arabidopsis thaliana landsberg
ttgctaatatatattcgctaatgaaaattgtcatctttgtactcatatctcacatccataacacagtccacgtataaataaacagtacaaaaccttacactatctcttctatcttccgaatataccaattatccctctaggaattggaacatgtattaacgttaataacaagaactacttagaaacaaattttctcttaagaaatttttaatataggatggttgcaaataaactatcttggaagataatttgtcaggtttagcaagagattagtgacatataactgtttgacaagtggacacggtaacgttgcttgcgtgataaaagaaaaagtaacggacaaaacttgtaacataattggagctttgaggagaacagggcacgtgttcgtgtcgtatagactccgaaacgatcaaccttttctcgatttccaaaggcacaaaataatttaaagagtaaaatgattactaaggactaagacaggacaaaaattgttaattaaagttctaaaaccgcattattctaaataattacaggaagaaacattctgaaacttcgacgagtcattgcattctgatttttccaaaagcgtagttttagttgtcgttgtatattaatgttgcgtaatgcaaacattcaggaaacgtgagatatgtattacctttaacaaaaagtattttgttcaatattagtcattgatattttccgtagagatatttttatatactttgttttcattttcttccaacagctggattattcaaaaggattataatttggaaaaaatattcaaattaccacaaaagtaaaataattaaaagtctatattataatatcaaaaatttaacagccgaccatttgaaattgtaaactaatataccgctaaaaatgtttttttgtttgttttgttttgccttcagcgatacaaacaacttgtaatagcacggataaacataaaaatattatattttgtgtagtaaaattctactaaaaacagaaatttgtactaaaagaacatagaattccatatttgacgtaaggtttcatatatcgaatgttaagtataaaaat

SEQ ID NO: 47887 - DNA, 1293 bp, Arabidopsis thaliana landsberg
aaaaatgatatcaatataattagaaagacagaggtttcttgaaagaaatttgaaccacaccaaaagaaacttttctcaccagctccccatcaaagtcatctgaaatgaaaactcgtttaacatagagccttatgttctttgtcttttgattgactatgtcatccttccccgatggtgaaacaggtggcacatataggatagacctaaactcgacttcgccctgagcattgccaacaagagaatcaaagagcattatatttcagtggatcgtctaacaaagacgatctaattcagctgtttaatggaaatatccaattcaataaatgtgttcctttgaaagtacctctgtcgtgaaatgggatgaagccaatgggtccaaatactcattgaaagcttttctgtaaaactcattgtattctgctgttgtcacctccttagggttacgcagctgcaataaataaaatacactgttaaattgattcagagtgcactcaagatacattgacaagtccttacccaaatcggttgtgtctcatttgtaagctcccaatcccagtatctctcaacaaccttcttggtcttcttctttttctgttacaagaaaaatagtccccaatcctaagccaacttttcttacacatctagctatcttctgatgctgattaagatatttccagaagctgatcaaggtatttcttagaacaggtaaagagacgcaggtatatatacctcagtttggtcatcttggtcatctttttttgtttcagttggatcatcttcaacctcaacctgcaagagagagagccaaatatacaaagccagttaataaggtaagaatattagttgcatctgacacaaaagtacatatgtttaagttcacaaatctgctaactctggtgatcatacctcttttgtgtatcctttttcctgccaagtgtaaatagggaaagaaacaaactgggaatagtttttcacgagcttctgaatccgctcaggatctgcaaagtttttggcttcttgctgtattggggaaagaaataatagagataatttagtatgtcatgtcttctgaaggaacaaatactcagaattgatctacaaattaaatatcaaagcataacgaaccttaagatgcaaagtaatacgagttcctctaggaatgagagattgtgggtcagtatcttcctgaatggtaaaactgcttgaatttgcttctccttcccatacatattgtttatcagacttagggcaaatgagatactcaattccttcaaagatagaagatgttctttg

SEQ ID NO: 47888 - DNA, 368 bp, Arabidopsis thaliana landsberg
atttagttgaactcataggtcagagtcacagatatggattaactcttttaaacacctttttttaatggtgtctctctttgttatctccgataatcttttgcgaggttattattattaattattaatcaaaaagataaattcttagagaaaatcccaaactgacttgttaactagtgagacatatcttatttattctctgcttatctaaaaagaaaatgaaaaagaaaaaaaagagagtctattttacaagattaatataaaataaaaatgtaaaagaagattatcatcaaaaatccttgtttcaaaagaaaagtttactaaaagaaaaactttttgttcattttctactaaagctgaaaggaaaatga

SEQ ID NO: 47889 - DNA, 614 bp, Arabidopsis thaliana landsberg
  unsure (1)..(614): unsure at all n locations
gcccaaatacatacaatacatttttctgcaggttcttctttcttccaggatgatacgaggttgcgcgctctttggatgacgggtttcaatagatcatcaacatacaattcttaatttcttatcaaacaaaacattagggaaacagagggatcacaattcaccaaactcgccatctcacctcgcttcttgtgtgggcgcttcctatcagagtcgtacccttcctccctgccaccgctgccctccgtgataggtttagatattcttttatttatttccaactttccatacaggaagtgccacatgctgatagcaaccaaacattatgggatctgggtagatgtgtcggtttaattgaacatatgcaggttccaatagcttcaatgatgtgatatgtagtaaaacaaaatgatgctcaaataaataaaagaatggtgccttgatcagaagaagatagaatggatcacagtattgaacatactttatatcgaagaactcgggaatcaaaatcctntcacatatctgataatgccttcaaaaactctatcttctgcatatcgctcttctaaaaggaatggtgcttaaaatttagggcattgttaggtactaaattgtgt

SEQ ID NO: 47890 - DNA, 993 bp, Arabidopsis thaliana landsberg
  unsure (1)..(993): unsure at all n locations
tacttcaaatatgctcatacatttcagatcacctgaggcaaatttaaagatatgccccttaccatcataaggatatgccccttaacatcataatatttttttttaggcttcttcttttaagaaaaacatttggtgcccctttggtataacaaaaaaaaagtatgccccttttatataagtttgtgccctttttgtgtatacaattttgttttgtgccctaaaaatttatgtatatggggcggtcgcactgccatcacctatagttaagccgacattgagtctataacgacgcgannnnnnnnnnnnnnnnnnntgtcaaagtctgggacataagaagaaaccattaatcatactcgttttatgcctccatcctccttgtaaacagttcctttaattcttggatttcttacaagtttggtgcccaagaatctgaattttctagtttggagagtaccatcttaccgtaaggagcatgaaatcactttagttgtttcatgtggattttatggttcttacggaatgataggattataaagatcttgctaaaaatacaaaattgttgagcttttgtttttggattgcaatctgaagacacttccacaatcagttctggagtgtcatctcactgacaaacattaagggaagaatagaaaggtagatcttctagcaaggaaagtttgggataataattctcttttcttgtataggaacttttattcttattggttttgatgtatttctataataagtaatgcaatgtgttcgtaaaaaaaatagattctaataactttccctaaaattccagcaatttagacaatcatggtgccaaaaagataatagaaacaatgccatagattttcccaaaatacaataggtttcagattatctctttactatactgtattcatatctctaccgctttcatctataagtcccatcaactgagtcgagtacaacattaattgagtccagccgtacataataccacacata

SEQ ID NO: 47891 - DNA, 487 bp, Arabidopsis thaliana landsberg
aactatacattctggtgtatccatttgcagaggtaaatagaagcaatagtagtttctgaatcaccagattacagcagatatgtgacacctctctcgaggattttttaaccacaacagccacctccctgagagatcgtaccatctcttcctccagctgcaccttgagtacgcccgtaaccaatcttgatacctgatgactgcaaaatttagagagaccaagggaattgaatcacattgtaacacaatcgagggattagagaacaccagaagactaagtatattgccagattcaacaaggaaattacctcgttggatacatcaaagacaccatcctgaatgttctggaggatcttggcagcagtctctatgaaggcctgttggaatccagaaaaagaagacaaaagtcttcatgtgattacagccaaataacaggatggggaaaaagagttgcaaggaagaaatgtcaccttctcaacgttttgagcag

SEQ ID NO: 47892 - DNA, 737 bp, Arabidopsis thaliana landsberg
gttgtttagaaactctaggtgtcctctgttatcttctggaagtttcttcacgtaaactgcgtctatctttctaatctcctctctcatctgatccacaagagaagccttttcttcatcattttcattgattatcatcatagggacagtaacagagaaccgcatgatgttcccgaacatgggctctggtatatctggatctgcttgtctacgcaagttcactggatgaatcagtgtatagatctttccggttttatcatcatggtttgttgaagccatgaaacggctccatatgaataccgataagacctcaacacgtgtcgcgcggatcttcttgtttccgctgaatctttctcttaaagactcaacagaagatctcaagaacacgaagcgtctggttactatgttctccttcgtgatacctgtagccatgtttaagttttctatgtcgcacggaggaaacatcttggcgagatcaaaagaaggagtaatgatttcatcagtctggccacgagcaaaagctgcccaactgttgacgaagatgagaccagacagtgcatcacacagtttatgagaaaggcctattccgagtgctaagaagccacattcaaagaaagtgagctgtaccgtgagaggcacgtcactcactttatggaattcgaatggatgaagcttgttaagtccgttaggagtcgggtttgctatattctttgacatgttgatatcgatctcttcttcac

SEQ ID NO: 47893 - DNA, 374 bp, Arabidopsis thaliana landsberg
aatcatttcaatctaaaaaaatactgaactaatgtcattggtgctatttataatttgacatataattttatttaatggtaaaatttaaattataatctttctatacaaaatttaaacaaaaatgtaattaatctcgtttaattggtaaaatctaaattcaaactcttatttataaacacataatttatatttaaattttgtttaattaaaagtaaatagattttgaatatttaaactaatatgaatatttttaagatgcacatactttctctaggtatctagtaatttattccttcaacgtctgaatcggcctcaaattttctgatttgggcttagtttggtccaagtgggcttaatcaaagcatatcataact

SEQ ID NO: 47894 - DNA, 651 bp, Arabidopsis thaliana landsberg
tgaggttggtgaggctggtgaggttggtgaggaatcgctgatgattggtaaggtccacttgctgacccactcgcagtgttcccaagattcatcgttgactgtcaacaatttagataaattcagtgttacaatttgaggagtctaagttggaccatatactacgctgaagataattcaagaacctagaaggctagaactaatagaaagccctcctgccattagtcgtataagatgctgtcatggtgaagatgatagtgtgagtgtgtaacagaagctttagaaacttacgctaaagaagttgacaaaagcaggatcatcaggggcatccctagcagttgatgatggttcaagaggaccatccataactgccattgtaggcttagcttccaattcctcaaactcactgcagtacatagaaaatctaacttaatttaacaagcaagagatataacagcgggaaaaatgatttagattatcaagtttccacctcatagaaaacacatccaagaaacaactaatggtgtactaactaaatctaatcatgaaaatagcacctctctgaagatgaggcctttggcttctggttaaccttggaatatgcactgagtattctgtcatgccaaggaaccattacgcagagatacaacgagt

SEQ ID NO: 47895 - DNA, 631 bp, Arabidopsis thaliana landsberg
tgataccaaatttcgtgacattattagtgcctagtttgtccaaaaccgatatatgtataaatagatcttgatcaagataattgtcatcgtcatgcatgtggtaatggagcgagtcaaaggtcaaagaatgaagacatgagtgtttcgaagctggtccagcttcgtcctctcctacctcgtttttgttttcatccattaagtatctctgtttcgaaggctaaatcggttagattctgaaatattttcatcgatttaagaagagcggtttggtccattatcccttagatatactattttgataactcattgcaaatcgtgattgttccacttctacattacctatgaatattatgatgattttgtcttttagcccttgctacatatttctacgagtaagttcacacaaacataatattatatacgacatactcacatacgtagctgtagtgtaatgagagtcaattaggtaatgcttgattataaaatcttttattccaagtaaagtcatggagaatttgttcatttgctcgacacgtatcctctatccacttgtagtgaagaaatgagtgtaccacaagaattttaatacactttttagaaagataaaaagggtttttaataatatatatat

SEQ ID NO: 47896 - DNA, 545 bp, Arabidopsis thaliana landsberg
aaggaaactatcaatggagtattagccatctttactcagacaagaaattttcacacacataaaacaaaacaaagattaactctctctttattaagctggagaattagcaacagaaatgcatgaaaaatgggataagcatttaacaaaatccctaacttgtagtaaaaactcagtacaaacttttgactgtaacaaacctccaatttagggacctaattatatcaacagaaataaatctttgtcacacacaacgtaccaaattctctgttttttaagtaaaagttttagtctttcttacttagttgcagaaactgaaaaatccgatttgaacaaatcttatgaaaagagattaatcattagttcaagactcaagagtcactatacagagcaaattctatacatttttaaaccctaaaagagacattatcaaaactctatgattagggttttcaaatccctccattgtgcattaactagggacccaacagctcaagtacttgactgtcctcagcgattcttcagctggcttggtcttgttggtataa

SEQ ID NO: 47897 - DNA, 569 bp, Arabidopsis thaliana landsberg
cgatgcagcaggggccgggcctccgggattatacacattactttttcacaggcagtggatattttcgggccggttttctgaacatggaagaatattttcgtcaaccgcttaacatttccgtaatgtaggtgaggacacgtacaacgaaaattataaccgcataaaccccgaccagcaatgtctaaccctcgctctgccaaaggcctttctttcagccgccgatttaccaaagaaggggtaagtcccttcgatatgttcgagtatgattaccgcgacagcgtgatcaagaacccgaatggtgaaaaagtttttgaaatgaacaacgtggaagtgcctaaacagtggagccagattgccaccgacatcctggcccagaaatacttccgcaaggcaggcgtgccccagcccgatggctctgtgggccgcgaaacgagcgtaaaacaggtagcacaccgtatggccaattgctggcgcgtatggggcgagcggtatggctatttaaaatcatccaaagatgcggaggtgttttatgatgagctggtatacagtattcttaaccaggcatgtgt

SEQ ID NO: 47898 - DNA, 429 bp, Arabidopsis thaliana landsberg
ctgtcgtccaggtccaacttttagtctagaggcctcaagtcgcgacggcgcatgcaaattgccaaggaccgaactcacaagtctagaggccttttgaaccgccctacgccgacgagcaagctatagcctgaactggcgcgccccccactttcgttttcccaaggaatggatctgtctggtaagatctgccgcgtacacggtccgcgcatacatccgtcaaaaaggcccatacttgatccagccagcgtagtacatacagtatcgtcgctctccagctttacccgatggtaataatgatgagtgcgctccagtaatgacgacctcttgactcctgttcactgcactgtggtagtgtggtgtgggagcgagcagccggccggtccgcgagagtgtcagacgtgggcagtcgaacgtgcatgcagtcgagac

SEQ ID NO: 47899 - DNA, 1159 bp, Arabidopsis thaliana landsberg
  unsure (1)..(1159): unsure at all n locations
atcatcagtattaagtgtatattgagatgtatttttaaatcgatctcttagaatgttatttatagtgcatggtcaaggcaatttgttttgtgaccatgagatcagagaagatgatcagctcctattcttttgcatataggaacatatatggcccaataggatcagagatgtgatttttggatttagcccacctccataatatgatgctagattgctagtatgggaattttggatttagcccaccattataggataacaacaattctgaaacttaagtacaattcgcaaattgagataagagacaagctgtttgtccaaaaaactagttcatactaaaaaggtatctagaccttgaaatcaagcttaatccacttggtcatcttcaaactttgtccgtaattattatttacctcctagttaatacttaatacccaaaagatctaataattagtaactacttgaacttgttccatcagaaagtccagtccttggagaaatccatgtctgaaggcaaatgataatgacactcctctttctgttgctgctcctgcgttgtagaagtcatcactcctcttttttctttggtcataaactccttctcactttgattccgattcctttgatctgctttcgacaagtaaacaaaaaaaggtcagattttttttccattttgtgtactaacctaaaacatgcaaagagctagtctcagtaactaaagagaatttcaagacaagaaaacaaaaccaaaccaaaccttattttaaacataaaagaaggttttggaagaagacaagtgaagtagcttactatgcttcttcacagggtcaaaagtcttgaaagttggacgctgaagagggtgaaaaacgccggttcctacagattccttcaaaacgttaccgtttcggtgaaccaaacctctcttctgtagccgtgcctcttgtctctgtaaaaccttagctctatcttgctgtgactgcaatcaccaactcaaaataaaaaacatcaaacggtgcataaaggagagacaaaagagagtagtaagaaaagtttgcattttgactacctctntgcggatccttgaaagatgaagttcataaaaaagttcaagcttgagcctttctcggtacaatctctgataagctttaacaccattaggcct

SEQ ID NO: 47900 - DNA, 527 bp, Arabidopsis thaliana landsberg
  unsure (1)..(527): unsure at all n locations
atccatgaataagacgggcggaatgcgatccttacccggtaaatgtttcccggttcggttctgatgtatttatcgaggtcgagcaggaacctgttctttttatgcaggtccagtgttttgtcttcatccagtttcactgttgcctccaccagcggccgcgccacttccctgatataaccggatgcattgttgaggtcattgttctgcagatactggggaatattgttctcgtatatcttcacaacagagatatcaacggctttcaggttaaccgcttcaaacggcaannnnnnnnnnnnnnnnnnnnnnnnnagcagtgcccctttaccatatatcttaacagagggcagccggttctcaaaaaacaggttcgatgtaaatgctttctccagcctggcgccccattcattgctgatgccttcatgaatggaaacggtatagttaccttcataacgggccgagctgtacacttttacctggttacccgataccgtaaagcccgggttttcggtattgcttaccgcgat

SEQ ID NO: 47901 - DNA, 501 bp, Arabidopsis thaliana landsberg
ttctaaacaaggccgacttgtttttcttgtgaatccaccgaagctcaacaatcttagtcctgtgttgcgtcctgttgatttcttactggtatgattcatgttttccttttcatatcttgtttgttttaacaatttggatctcactggattcgctttgattacaacagcgtgaaatgagtccattggactttgcaagggaatggtctgaaaattccaaacttgccaaaattatgaacgaggggatgtcttatcacatagttgtggcagatatgaagtcaaaatcaatgttttatatctcgtaagggtctgcaaaggattcacatgtccatatggaagaagtagactttggtgtgcatacccttacttcttccggactcgatatccaattttccgaggtaattctatagaacaatctgtaacacatcaagttgatagtatattcaaatcaaacactttttttggtatacatgcattacttctgaaaacattttcctgtgagat

SEQ ID NO: 47902 - DNA, 741 bp, Arabidopsis thaliana landsberg
tttcattttccaaattcgggttccttgccaagaacaatctcgttttacaaaattgaatttcaaaataaattggaaaaagctccatttggttcttccttcatcaatccaatcctttaaaccggacaagaaaaaactgattaatgctaaatttttaattttgtaaatccaaattaaaccggcatccaaatcaaaactaaaaccacatcaaaccatttcattatattttacaaaccgaagagtccaaagctacaccaaaccggagaagaagaaaaaaacgaaggaaaaacaacggtatcgtcgtcgtcttctagctctgctttctacccagaaaatttgcagtttctttttctccaccttatctttctaccatttttcttcgatggcattgatacaaaatcctgttcaaggaactacttccgcgtacgccaatgagatcgcacaacttggtttttctcggtaacattctcatatttcatacaatcatactgttttgaattttacgtttctttaattcttcagttgtgtttatattaaatctatctttctctgtttctcattcttgcagaagcgtggttcagcaacatatatcttcccctgtttattttcggtgtataccaactatttcaataacgcccacaatgtgttcgacaaaggtccccaacgaacgtacagagaaaatgaattctggtttgatctcaacaagacaccaagtagatcctaagaaagaattgtctcggattc

SEQ ID NO: 47903 - DNA, 790 bp, Arabidopsis thaliana landsberg
tgcaggtcgactctagaggatcccctacattaaagaaatatatacaaaaactggtatattgtgctggcaacaatctagtacatatatataaaagattttacagatgagatttggatggacaaaatttactcgaaataggaaattagctaattctagtgttatttttatttgtgagtattcctaattttactcgcatcctctatgattctctcaatacggattttttttgctgtagattacctttttccaacttgtcgccttcctcctccacctcctcagtttctccagttttatttttacgtttgtcttataataacacaagagatatgtcttttcctttcctctttcctctctcattgagcaatctaatttcataaaatcccgtaaagttttcctttccaccctctcccctcctccgccatgacccatcatcaccggagagagtccttctcggttactccctctaccatgggaggttccgtcgtgctttgtcctaataccgaccttctttggccatttgggaagcttgaagggcttgatcgagatgatattcgtgagacggcttatgaaatcttcttcacggcttgccggtcttcaccgggttttggtggtaggactgctctcacgttttactctaaccacaatagccatgaccatcatggagacggaggaggaggaataggatctggcggctcaactggtgctgggtctgggtttggctcttctgggaggaaagaggaggcgacgacccctacaagccgtgtgaaacgggcttttagtttgaagatgc

SEQ ID NO: 47904 - DNA, 1020 bp, Arabidopsis thaliana landsberg
ttctgcttcagtgtggaaattttgatggttctctttgtcttttttttttttttaattttttttcttttacttgaacgtgagaaaaaaaatatatcattatttcaaagtcatctagatgcgaaagactactcgccaactagaatattaaaccagcttggatatgcttctcatggtatagagttgatgttaacaaaactctataccgattggtaaaacaatattttttgtggagatatgcattccaagtaggtagcatcatataaaatttaaaaagaaaagtggtgaggaagagagaacacgatccactagcaattattattatttgtgaacagaaatgaaaattgtttgcctggaagagatagactaatttctctgccttgcttctggggacaaaaacttactggggaaacaagacaaaagcaaatcatatatatatatattaaataaataaatatacaaacaaaagctgccttatcaactatcttcactattttcttctttcctatccattcttcttctggaccgtggcgaaaaaactgtatatataaataacaaaagcttgagttgttactgtaaaaaaacacttatccaaaatatatctcaactttatattcttaagaattttgtttcgtcataaattatgtagaataatatgctatcaagtacataatatttaggaaaaaagattacccgctttacgaattatagcagaatatatgatcatgtcaagtatattattgtatatttagctacacgaagtattctcctataattcgtgtagctaacaatattttttttctaatatttacatataatttaaaaaacattagcgtaacaaaaaagaattaaatttatttatttagaatttttgcttccatcatttaaaaaacaaaatgaccatttctgcacttgtttgattaaacaatggtttttttttttttttgaattttaaacatttgtttcctattggagacttgcaaaacatgtttggaagagaatcgataatgatcattagaaaat

SEQ ID NO: 47905 - DNA, 501 bp, Arabidopsis thaliana landsberg
gtttgggttccgattttattcgtttatatattataacttgttttatataatctctatagttcaaagttattgaaaacaataacgaaaactaatccagtaaatccaagcttatcacgactctaaaaaaagctctatataggtcaacttttacacttgacctctacgtcacacgattggggatagataaaagataaacagagcaaagtcactgactactcaattcagtctatacaacatacaacactttatatcattttgcttcatcatcaagattcttcttctccggatcagacctcgtcggacagtttaggggagcaagaatccacggcctcagccaccgtcagaaagattttgtcgtgtcctatcaagtccgcaaagagagaaacatgtagctcatttatgaccggcggtcctggattcgctagaaccaactgttctggcacacaaccaaaagaagtgctagtctgcttcataataacttctttagaatctaggcttagc

SEQ ID NO: 47906 - DNA, 797 bp, Arabidopsis thaliana landsberg
  unsure (1)..(797): unsure at all n locations
tttacttgttaatgcggtcttctgaaacagcattcaactagaaccctcatgatctctctgtcctgttttcctggcaaatccaatctaagaagtttctcgaatgcatcgatgtagtcctcactactcatgatcacacaaaatattgcttttctggaatctgtattcatcctctgtgcctcagctagctttaacattttttgggcctcaacaacctctgcatccattgtttctgctatatcttcagcggtgtttgagtcaaccaccaaatcgccagaaagccaccactgacccttcttctcggggtcaagcagcttgctccatgtaagccctcttaataacacttcttctactctcaactgggtaaattataaaaaaaatggacaaaaacaaatgcattttagtcaaaacttactaatccaaaagccacctaataagcagaagcatacatgtttataattgtcatgatggaatccattttctaacatttcgaggaatagagcgctaaaatattaccttttgaagccacttctttacccttgtgttctggacggaatcctctttggctctcaacttgttgttctttattgcggaaatggtttcaagcatcttttccatctgcaaattcattgtacaaacaactttaaaaaaaatcatagtataacattttcttcccgagacaatttttcatagaattcataccatcatgttattcattngtgtctggccatcggaggaggtttcacttcatttgcctcgtctggatgctgatgatgaatgtttcatagccagaggatcat

SEQ ID NO: 47907 - DNA, 1046 bp, Arabidopsis thaliana landsberg
acagggtgaggtaaataacaattctgacaaagggctgatccctatttcccccttgccggttaaatggacccatgaaaatggacttaaaaagtctttcaaccatcaatgtgcaggttatcaaagacatcttgttcaattccgctcgtcagtccaagaagtctgctgacgactcatcagatccagagcccatgattacatcgtgaagttggtctattcttttgttttttggctgcggaaattgactatcggtttgacccggtttatgaggcaatgcccattgttccctatatctctagtgtagtatctgcttcagacaaagatctttgggttattaaatgacattaacataaatcgatcattatgtttttgcgtttgactatcttgatttagtggtattaaaaaccaaattccagatacacacttgatgtcacagtaatcatgtgcctgttacggaaccatgtgcaagaaattgacacaagcatacaaatgttctccaacgattgaagcaacaatgattctagaccctcttttctttctgttcttcatcacatgaaattcatcaggatgttgtttttcacatttatgtttgaacagcatttcttttgttaaaagggaacaaattctattctaaaaccgaaattgtcattacaacaagaccacgatttaaaggtactaaaagcggattaagatttctgcattcgaacaaactgactactaaacgaacatcaggccgagaaaacagtcggtaggaagagataacgtgtgaagttacttgagtaggattaagagtaaggtagtagtaattgatagaagctgcgtggggcctaatcaataatgacatcctcacttaaccagcattactggaaaacaagaataagaaaccacatgatgatgtcaaagactttttgggccttcgcgtatccctaaatgggcctatttacggcctaatacttgtctaatgtatagttgggtagaacaagaaggttcgagagttcgaagcttaagccattctatcttttctggggatctaaaagacccaaatgatc

SEQ ID NO: 47908 - DNA, 1127 bp, Arabidopsis thaliana landsberg
ctctgactttgataaaactttcttcaatctctctttttttccctttttgtttccattttctttattctccatgcttttctcttttaaagattcttattcctctcttaaaattgcaattttatagctggccagaatatatataattacaattactaatcatttgctcaatcctttgattggaaaaactgtaccaaacttttagtccgaaaatattatgggtcaaatggtcccgaatctacctttatttacatatgttaaaagagtcccatgaagcattatcagtaaatatgatccaatcacatttttccatggagttattagtttctttactttataataattttctaataaaataaattttgtagcctaaaaaatatagtaaaagatcataaatatggtagtaaaacaatttggtaagaaaaatacttttaatcttaaactccaacatagtatgatattatagcaaactagaaaacaattttactgatatagatatacattttaatattacaaaaacttgaatgttgaaaccgaccggtacaggggtgaaatcggtggaggtgaaccggaaacagagccggataacggtgaacggacacgtggacccaaacaaggtgttgaagagagtgaagagcaccggtaaaaaggctgagttttggccttacatacctcaacatatggtctattacccttttgctcctggcatgtacgataaacgtgcacctgcaggccacatccgtaatcccactcaatcgtttccaacagcaaacgctcccgaggaaaattacgtttccctcttcagcgacgacaacgtccacgccgcttgctccatcatgtgagccaaccaaccaaaagattactcataatctccattttgtaatcagtatacttttgttaaaatcaaaaggtaatgtaggaactttgtgatacaattatagagacaacaccggaatctatttgatggtttatgtttcgaacaatactttttgtccaagacgaagtcaaatcaataaccataagctatgtagaatcttaaaagtgaaaaataggtataatggaccaattacgcaaccaatgtttgtctaatttctataggacatgaatgacacttcgacaataatcataca

SEQ ID NO: 47909 - DNA, 457 bp, Arabidopsis thaliana landsberg
tatgatcttgaaattgacccatctatcaaggaggcgctcgatataattaagattgctaatgatgctattgacgaagctgtcgacaagctgctgaacaaagctaccgacaaagtcctaaaggaagaatgaagctttgtatttttgatagtttagtgtcctggtacataactcttggttttagtaagaaacacttataaacaatttgcatgtatgttgatgtaatatatttctttgtgaagcgtggaaccttcgtacatactgtttttaagccggtggaaaaaaatacattccctttttttcacgcttcagaaagaaatcgcccttttttgctaaagcaactgtatgattcttgccatagacattgctcgacggggacttggtcgatcgctcctgcactcaggcttgctcggcggggacttggtcagtcgctctatcttgtaggtttgcgaggcgggga

SEQ ID NO: 47910 - DNA, 476 bp, Arabidopsis thaliana landsberg
ttcatagtttgtctaaaatccgtagctgatcaagatctagctcttgatcgaattcatccaagttttcatgtaaaacattgttcttgtcagaaatcattagcatcgtatccttgtcgtccatatcagacacgtggatattgtcctcatccatatttttgtgaacaaccaattctctatcttcaacagtttcagaagcagagacggggttttgattcgtggtcaccacagagacatcgtccatgtccaagttcatcgatagagcttcagctgttgacacataatcaaatatttcatcaagatcaaattcttcagtgttcttgttaaacccatcgaaattcacagaacatgattcaggattaaaggtttgcttttgatgagttccgcgtaaaacacccttcttctttacgtcctcctcacaatctcgttgattctgctaatccttcagatctttcaacatcttcgacatcgagtccatt

SEQ ID NO: 47911 - DNA, 2067 bp, Arabidopsis thaliana landsberg
aagatagatctttcgtgacaatcatcaaagattcaagctaagagaaagcaatcaaagcaataaaatttattaacctctttggttcggtcatcttcaaaatctccagcaacttttttctttgtttcgatcgcaagtttataagacctgttgtgttcttgattaaagaagatacgagggtcaactaaagatgcaacagaaaccgtccgtttgtttgacttttatcactgttgcatccagattccgccacgtggattacttcaaacccgttcgattgatcaagcgcgtgcagacttgagtaagggtagtttcggaaatacactttagaagtttttttttttttcctttttcctgagaacgatcgaatcgaagacggagtgtgcaaaagccaaagctttgatctttcattaattcttctcaagatcttcagagtctgtaagtatttttggaatcttatttttcttgtttctcaatcgatgtaaaataaaattcagttgttgatgattttaccatgtttcgggagcttgtgttgatctagttcttcgctctcactaggctaattttgatcttcctgatgtgcacaatgtgaatgggtcttaggtattagtgatttatcggctttttatttgatccattatctatccaaagatctaattttttctgttttgctgaagttgtaaattggaacccttttgtgaattgcgtggtttttttagtttggtattgcatagctggtttctctgaaactgtgaattatatctgagaatggcgtcttgtgatctccaattacttgtgcgatgcttatgttatgcttactcaaattatgataaggaagcaaagttatgttgatgctgatgataataagctcttctcttatttttggttcatgtgaaagacaagggaagatcaaagtaattaaataagctgaagtaagaggaagtgatgttttctcttatgtctggactatggagttacatgtttagcaagactgagtttaatgtgcttattcttggtatcgacaaagctgggaagacggtaatgctttctttttaatcttttctgttacacgaatctgaaatgttgaggatacacctctcatgtacttgcccttacttcaatgtcgtagacatttttggagaaactgaagacgatatactcaatctcggaaggtcttcctcatgatcgaattgttcctactgtggggcttaatattggtcgcattgaagtctccaatgctaaaattgtgttctgggatctgggaggtcaggtgagttagagatgccttagctcatatcattgatctctcttctttgtacctaattatgtgttcctacaagtcacctataccaccaaagagaatatgcttgtaagttgatatgagaaatataggatacaaggaagatccctttgaactccttccctctctaagtttatgcgtgagccttttttgctttatagattgtttcgtcctgttgaaaactactatcggttgttttgatttacaaaccctgattgtgaacaaggatcagtctttctaatcaaataactgtggcttttcccctttatggcagcctggtttgcggtctatttgggagaaatactatgaagaagcacacgcgttgatatatttgattgatgcagcttgcccaacccgctttgaagattctaaatctgctttaggtaagtctccgaacacaagttgactccaaacagcattatgaagctaaagctaaaatataaattgtcttcaccagaaaaagccctgcggcatgaggatttgcaaggagcccctcttttaatattggcaaacaagcaagtaggaatttgtattgcgtcatttgtttcacttaaattcttcaaatatatgttgttactgatagtctttgaatctgtaaccaatgagcaggacctcacaaatgctgtatcggctgaggaactggaccgataccttgatttaaagaaattggatgaaagagtgtacatgtttgaagcagtttctggatatgatgggtaaagtaatctaacgtaagctacacacaggatccttatagcgccaatcgaaacaccttt

SEQ ID NO: 47912 - DNA, 609 bp, Arabidopsis thaliana landsberg
tttgctgtcttcagcttcacattctctatgacaatgagaattgtagaacttcaagtatctgagatcatccattttgttgaacgtgtcactgtctaagcccatttcctttacctcgaacatgtcaaggtaaactcctctgaccttggttgcttcctgggaaaatgtaaaatagtaataagtgaagtggcaaaaaaagataagagtttggttgcgacttagtggagtgtgctatactcttaacagatttgtgttggtaataacatagagcttaaacttactaaccgctttgttcatgagaacatcaacaatctcagagtgctttgagagcctacgctcacttgttgtattttcagaggatgcttgcgaattcagacctatcgcgaaagtatacaacagatcattcatctcgacacgatcgccactaatgtcgatcaaaaacttatcggctagatcagttatttcactcgcatctgcgtgagccgaagaaccaagcaatctcctcacgtaactctcattctcaaacctgaagaaataggcaatgtcgaggaacacgatcttgtgctgctccttaagctcgtcataaggtattctcaaaacatcttgaatcgt

SEQ ID NO: 47913 - DNA, 1011 bp, Arabidopsis thaliana landsberg
aatgatttagaaatcttgtcactaacattatatgattcttttgtagaaaataacactttagtcatcagcaatttgaatatttgctaagtttctattatcatcaaaaggggaactagtcctgtgatatgataaatttatactattataatttataccaaaagatatctgtatcagaaaataaccaaaattgggtaatattaaatgttaaatttgaatttcggctacaatagaggaaccgttgagctaaagttgatgaactaaattagaacaggtattccgctgaattcatggcgatcagtcaaaatcattatcatattaggatggacaaagactaattttcaaactcatcttttgaatttaatttatccattttgtgtttaacgacactatattatacgtttcatcaagacaaagtattttaaaatatcagaaaaaaattccatgcagatgactgacttaatgaggtttgttaaactgtcactgtcagttaaaacccctaactcaagaaatgtgtactcgcttaagtaaaatttgagaaatccttgttgtaaaattctggcattcacctgtgaatgtgattagattttaatcatcaaataacttattcattaacaaaaaattaaaatataagcacatttatactatagagactagatcaagcggctatagataaatgaggtggcatatcggagggtcaaaacagattggtgtggtcctatttattcaagaaaggactgtatcgacagaagaagggtttaaagaagacaaagaaattaaaggagaaaaatcgatcacgatggatattcgtagtgatgatgcaaaaaaacctatgatgatgtggttcttagggatgctgttgttttccatggtggccgagtcaaatgctcaactgtcagagaattattacgcctcgacatgtcctagcgtaacctcacgcttagcaggcggttactcaaaattcaaacaaactgtcacacggctcctgcaacgttgcggatgttcttccggcta

SEQ ID NO: 47914 - DNA, 482 bp, Arabidopsis thaliana landsberg
agcggatcccgaccaacttgcagacatccttacgaaggctctggcgaaggtgcgattccaagaccttcgggggaggattggtgtaatcaaactgcagtcgactctgaactaagggggagattgttagttagttgcagcgtcgtagctagtttgtttacatttctgcattagtgaataaaaccgtggctgagttcagggacttgtcctgatcgccagaaacagagcgtgcttacgtgagcgatcgtgcccggtcttctcgctcccggacggtgcgcgcgtcgtgctggtcatggcgccgttcgcggtagaagcgggttgatcgggcggcggactgaataattatataaatagaaaagaccaaaaaggcggcggtgctctgggcaaattgtggttcagaccgtccaaaattacatcgcgtgtgtgcttctgtgtccctattcatcttctcggatcgagctcccgtcgatcctatgctttaggga

SEQ ID NO: 47915 - DNA, 1447 bp, Arabidopsis thaliana landsberg
gtaagttgattcatgccttaggaaactgtttgttgacatataaagagtataaggagagttgggaagggcttcagagaagaggaatgacacaggatttgagttgggataatgctgcagagaagtacgaagaagttcttgttgctgctaagtatcattggtgagttaaataaaagttaccttttttactgtctataaagaacatgtctttggaattgttaagaagcttagttgtgtagatttggtgataaagctacattggagcttggcaaattctcatgccatgtaagctccttgtggtaaaggatcaagcttgttaatctcttgctctctcactcttagtaattttaaagtgatattacgatttgacaaagtaaaacaatacttacaaatggtgaaaaccctaacttgaagaaatcaagaagatgggaataaaacaggagagaaagttttagagatcttgtcaccattaatgtgaatgttgtcgagcttgtgttgacaccacttgaggtgagaagatgagaccaaagacatgtgtaaaaccctagatacgagctttaaatctattgttatgcatctcactaacataaaatgctcatctttctcaatcttatcttcatccatgttgaaagatttcttcttgaaccaaatcttcttcttgttcccttgcatttccttcaacaattgttccttcttcacaaatcaaaatattaattaatattcttaatagaaagtttaaagtctttaattgactgtaataggaaattaccttttggagtgaaatttttaggtcaagaaagagcctaaagtctctaggatcttccaattccataagaggagaattaaccaaagagttttgaagtctttcccacatcaaaggttttttaatgtctactttcacaaagtcataaaagacttcaatgcatgtctctattgctttcaacacttgtttgccctgtctttctttttctccttcatgaggtccctctctattatatccttttgagaaaaaaaagtagatacggaaagtctataaattagttaaaaaaatgcgtaaaacaaagctacaatgtcatgagaaatcgaccaaaaaatgacttcacaatggataaatcattgtaacctctaaatttgaaatttcttttgagtttcgtcgtaagcacatttgtttcttggtcaacatatagagttgacaatttgcaagagtataattgattaaaaagcattgtagataaggttgttcctgtgacttgtgagttgtgtgacttatctaccaatttacgtcgacagattctgtcgacacataacccgttagagaccaaaacttgactgtttctttagaattacaaacaacaattgcaaattataaggtattttatttgtttttggttaaaaataataatcgatagagtactcgtatctaaaatgaaatatgtcgggatttaaaatg

SEQ ID NO: 47916 - DNA, 815 bp, Arabidopsis thaliana landsberg
ggatagacccataactcatcttggtgaattggaaatttagaacatatcaaaacattttttgtttaagaataataaaatgacaaaataaaatagtcatatactataagaattaaatgtgaatgatgcatagtcacgacacttacataaattactacgttacttttttatattaaaataaaaaatcataccaaaaaattactaagctaaaactggcaattatatctttgcattactatatattatgttcagaatataagaatagtaaagaaccaaaaaatgggtgcatgaatgtagtcagttttggcgatgaagagactaaaagagtggtggggtttcacaacgcatatcacatggcctgtcctccaattccaaaataaaggagacaacaacgtttgtcttctcttgctcccaaaaacactctcaccatttttggcttttttcaccttattattatataaatatccgttttggattacaatgtggataaaaaaaagttacattagaatttgccagtggtgaagaagaagccacagtagccgacactgatgcaattgttggcaacctgttactatattattcaattgtgtttgaccaaacaaattataagagaatatactttctacatgaaagcaaagaagataacttatattataagataaatgctttttataaccctataaatatggctaagccatgtgtttttcttatgatattgattattgaattgagttgactagagaacaaccaacaaaaatgacagacttaacacttaagagaaaaagagaagaaggagaggagtcccctatggttcatga

SEQ ID NO: 47917 - DNA, 1631 bp, Arabidopsis thaliana landsberg
gaccgtgcatttttaataggatttttcgctggagctgaaactatgttaacaatgatgcttatattgcgctgtctttttcatgtagatgaactatgaagacttctgtcacattgcctctgtatgcactgaacaaatcggtcccaaatgtcgccggttttttagcccatccaatttcatgaaatttgagaaggatgaggctgggaggattgccattttaccgttttatctttatgtgatgcgcacggtgagtatccttatgtttttataatgtcatgtctttgggtatcatttttgttcattggctgaatatcatctgtcgccataagctaaatattctttggtactgtgtttgagtgacaccagctttgctagttttggatgtttgtttttcaagtttttttaatttggcgtgtcttttacttaaacaactatagttaatacttgttttgattaatcatatgttcaacactattcaggtgtcgcttacacaagctaggattgatatgagtgagcttgacgaagactctgatggtttccttcattctgatgtaagtactcaagtggctctaaagctttaactttagaattggctcaagattctttaggtagtcgtcctacctgcaaatgtcaaatggtgttgacttttatgtcaagttccttacagttagtctacttgctgttgttattataggaaatggagtcctatattggtggtctaatccctaatctggcacaactgagagacatgcctccggcctttaatcaaatgtattgccgcatagcttcacaaaagtttttcttcttctgtgatccccataggcgaggtaagtgaaagaaaatattattattattaggcaattagaaatttctttgacccagtattcaatcgctcgtaaatgtgatattttttgcgtacaggaagagcctgcattaaaaagatactgctcagtaactgtctgcaggaactaatggaattgcatcaggtaagtttagttgaaggatgtatgacatacagcttcgtcaccgtataactttccactttcataagctacttgcttgtgttttctgattgttccttggttactcaacgttaggaaagcgaggaggaagtcacagacactgaacaggcagaaaattggttctctttgacttcagcccaacgcatatgtggtgggtgtgctattttgtcttaatagctgcagagaactggaaacaactctcgttatgtcatattaagaactaaaatggagattgatctagagtttctctttcttctgtagatatgttcctcgcacttgataaagatatgagtggatcgctgtgcaaacaagaacttaaagaatatgctgatgggaccctaactgagattttcattgaaagaggtaaatttaagcccttttggtgattgtaggctcgtggtactgatcgagacacgcttagtatactaattcccctttgtttttttagtgttcgatgagcatgtccgccgtggtaaaatcgtggcaggcaattcccgggaaatggactttgacagtttcctcgattttgttcttgctttggagaacaaagatactccagagggtttgacgaatttaatccgttgccttgatctccaagggagaggctttctc

SEQ ID NO: 47918 - DNA, 552 bp, Arabidopsis thaliana landsberg
ctgctttctccgcaccaagatggacctactcgtgctcggagactggctgtttgagcgtcgggcccagagctgacgagccgatgggcgctacgcggagcagtgggaacaggggaggacttcaagcaatgtttgcgatcgaagcgccgcacggcggcaccgtcgagattcccaacacgtcggacgacgagcgtatccaatatccaacgctcgagcagccgagcgagctccagcgctactacgacgagcatggttacgtggtggtgcgaggcctgatcccggctgacgcttgcgatcgcatgcggcagaccttcgaggccgaggtgaaaccgttcgatggcttcatctaccgccaagccacggccaatccggaacgtcacacgctgaccaagcacggatacatgctcaattccattctcaacatccacgcagtggacccacgccgctttcccacgttccgtcgtgaaggggcgcagctgatcaccagcgcgcggatgcagcgcgcgatgaagacgctcatgggagaactcgggcaggtggtccagagcatgtact

SEQ ID NO: 47919 - DNA, 632 bp, Arabidopsis thaliana landsberg
taggaaaattcgcataaatagttatactcttaattttctctggtcaaataatattaagaacacgctacagtaggacagtgcagtagttaatgttgtcatgtcggtccgagtacattgagaatttaatgttccgatataaatttccttgttttttcccaattttgaaaagtccgttaaattttcatatttattcaacgagacactgtactttcagtttccaccgaaaaataattcattactcatcatttattcaatgttcgataatttcttggaagcagacagcatttgggcctcgagatttaaattggcccaaggtccacgtttacttgggtcaatcacagtcaaaacgtttttccggggtttctctcaatttttttgtcaaagtctctcaacttttaaaaatacaaacactgggatcctccacggcatgcaaaaggatattataatgaagatgaaatcaaattggtataaaaagttggagaaaggtataaacactatgtatgtggctaaaaatagctagaaacttataatttacgtgaaagaagatttgagtaacgtcgatgctgttatataataagatgaaataatgacaagaaatctgaaataatatgcgaatatgccaccgacgggag

SEQ ID NO: 47920 - DNA, 675 bp, Arabidopsis thaliana landsberg
tcgtctacttcttcatcgacctatatcaaaaacaaacttttttagatgtaacaagtactaaagatgcatgtttacccgaatgaaagaaagagcataagcataaatttacctcctcctcttcttcttcaattggaggaacccaaagaggtcgacctcgagatttgtttattctccttgctttttggacacgctggtaaagcacatttcttgttccatcaattggcaaaccctgagcttcgagttcttcctttaactctgatacaaccatcttgcttgctgctttcggcttcaaaagattcagtgcaggaccttttattatgttccgtaatctctccaccactctcatgtaatcagattctgatgcatctcctagaactggaagaccttcactctgtaaggttctcaagagcttcctatggtgaactttccaatcttcaaggcatctctgtttaaaggatgtttcaatagggtttgagtatataaaaccagaagcatcgggatctaaaggagttttccctcttcgaggtacccaacgcttgcgttcaccagtaagtccccttcctctatgtacctgaaaatgtttacagaatgtgaacttagtatacaagacacatgtaaaaaagcactatcttctttctgacattagacagagcatagtgtatactgtaatgggag

SEQ ID NO: 47921 - DNA, 740 bp, Arabidopsis thaliana landsberg
tccgatgattgtgattttggatgcaaagattggtaggtagatttgaatatccggtttacaatttcaaatatgttttgatccgatccaactacaaaatgtacttcaaaaaataacgtgtgattcaaaaactcaaatttttgttgcagcgatgaaattcttgatgcaccttcaccggattactgatcagtattataacatgagaccttaaatagtaatgttgtacataatgtaaatattatctcttgtgttctccaagttaatctgtatgaaaacaaatccaacagctgaaaatgaccgtgtaaattgcctgtttttcttacgggccttctgaattggggccataataggcttcttcctacaaaaaccttcagacaaaggagtgtcagatttgtatcttatttacgaccaacatttggtaaaattttcattaaaaagatactcaataatcaaatatgtaacagttaaaaacttaaaataacatcctacggaaacagttttagcatcatagaatagaacatattatcttatgctttgatgattgttcattgttggctagattttgacctcaccagtctcggtgatttcattattgtgacgttaccattaaaattggtaacatcaaaaattcaaaatgatatttaaaaatacaacgaaaactattaaaacattggattagggaattaagatacttgtaagtctcaaatctatgattacttgattctattaacatattacattat

SEQ ID NO: 47922 - DNA, 526 bp, Arabidopsis thaliana landsberg
tgcagccaaaccaggtaaaagactccaaactggtatctttaatccaacaactgtaaccctaaagttgattcctttactttgaatttccttcggattttcggaaacttcccctgagcaaaccaaacactcttcatctttctcctcctcctcttcttgaatcgcatcagaatgagacccaaaggtcgtaaatttccaccgctcaacgatatgcaaagctgacccaataccagcattcgaagcagagaaaccaacatgcatatactctttaactttaccagagagatcaatctgtgttgataaaacaggactagtaggcttaacacgagaatacccaacccaaaccctaatcagtttaagaacatcactatactcaatccaagccatcatctctttcccacttttaagatcaaaccctttcgaaatcgcatcaacggaagaaacagagaagattgaactaacatcgattccaacatggttatcgttgatgtcaccgtgaacccgggcaaatctagtatcaaactcaacg

SEQ ID NO: 47923 - DNA, 988 bp, Arabidopsis thaliana landsberg
ggtatatatatctccattggccacatctttctacaatgttaatccccaaatgacataatttccttgtatagatgagatttgagcaacaaagaatcgaagcaactcaaactccacaagtagagaacatcacatcttcgcctcctctttcatattaagaagccaatgatggagtcaatgcttctcaaatgcataatggaacatcagacgccatgggatatttcttaggagaggttggtgtactttaaaatgtcatcattttatggtcgcaagagcttgattaatctcttgagttgcctatctttttccgcacaggtcatgtttccatatcaagctgattcagattttgagctcagcttatcagttggagactatgttgttatcagagaggttagcattcaaatcaaagcatataagataccattctttcgcggctcaggacatcgaataacggaaagaatcttaaaactcttttttttttaatctctgtggactcattcacatgtctttatgatgttccaggtagtgagtagcgtgtgggcagaaggagaatgtaaaggcaacgcgggttggtttacttacatctacatcgaaagaagggatcgtgtcttcgcaactaaggtcatcgaggtcttctagtggcttcttttggtgtgtttcggtgacttttgttgccattgttgttctgtatctaactttttttttttttttttggtcaaaaattctgtatctagctagatttctttttcttcctctctttacttatacacaagatctgatcattgaagcaaaataaatctcatctccgatgatctaacaataatttccataattcaaatgctttcagaaaggatttctcaatacaggttaaaaatatcaatctaatctttgcaaactcattaaactaatttagttactttccttaactttaagaaaacaaatctcaaattttgtggctataccaccattttcattgaaactaactactcaa

SEQ ID NO: 47924 - DNA, 947 bp, Arabidopsis thaliana landsberg
actgaaattttaaccgaaaaatctaaaaacatccactgcaatatgctaattaattatatagtcatagatgtcataaactaatggtgatagcgagagaacacagtattattaacaacattaacggcgatagcccaactaattaagctgacatagatgcaaatttgcaatgaagttgcaagattatattagtggggactatgaaattatttaagtctatttcaattgtttgtgcaaggtgttgtaggaaattttacgttgtatatatttttctttttgacgtgtataacattgaaatagtttggatggaacagtttaaatgcgaaagggctttccatttctattcgaacaaattggttatcaattaatcgaagttcatactagccaaaactttagaagttcaatcaaaatccaatgtgaattgttcctgcatgcatgcatgcatgtgtttttggtcaaacaatgatttgatttctattacctttaattcaaaaaacaaacaacgttctggagctacaagagctctcttccaccaaaacattagctaaacgaggaacgtaaacggaagacatagagatatttgtaaaacgccatgtagatatcattgtgtgactcctccaagttgataagattaaccaatttgagtggggtcagacttgaaaaactctgatatgtacgcatctaaatttcaatttcaatcaacataaccaaaacgtactgtatattgaataagcatttagctaattccatactcattgtacttttaatcctcctagtggctattttatttcgttttttttcaatactataaattattagaatagaagacataagaacacaagttcatgttctctcccgtaagttagtgtctttaacccgaaccaaaaccaagttaaaaaaaggcaactcacatttataccaaccacccaacctgtcttctttatttttct

SEQ ID NO: 47925 - DNA, 421 bp, Arabidopsis thaliana landsberg
acccatcagagagagctagatttttgccctttctctctcgactgctaacaattttataatctccgatcatcttcttcttcttctctcttctccgttattcctcccgattctgcgatttctcagcttacatgatgactggaaacccgatcccagtcaatctctctaaggagggttcttcgtctccaggtatttataaaattccttcttgagctaggattttgtttgattcatcgctttctgtgtttgattttttacatatttcctgctctctatagctttatttcatcatcggtctctggtgtcgaatttgtttccggctcttgtcaagtagtttgggaccttaataccttcaaatccgttatctcgtagggattacaaagaaatcacaacgagctgatttagaagaattcgattgaataaa

SEQ ID NO: 47926 - DNA, 801 bp, Arabidopsis thaliana landsberg
aaataaaaaacaaagatcttaggagaagtatcagcataattattccgttcgagttccctaacctagctagaaatcatgttaaagcgtatacatctctacataatgaccgcctagtataacctaattttaccgaacctagaagacaatattattagttgaaatagattgaaattcagtttcttacttggctggtggttttacgaccttctccttcatattctctaaatcgactttggaaactgaatccatagccgtcgatgaaagattcagtttgagatcaacagtctcagaaaatcctcttttaccattattttttccagccatttctcctccgtgattcccacccggtagccctaatctcagctccgtggcctcaaaattaatcatatttctcgatataatgattatcaacgagtaataagttaggtgatccgatcgacaacgagtaggagattcttcggcttctagggtttttcttttacttcttttgatatttttttggggaactaaaacgtttgaagagagagagagatagggggatgtgagatgtgtgtagagaaacaaagggctaaatattggatcgtgtgtggtataaaattatatatggaattgatcattgaggatgattatttgaacggaggcgatgttgccaggtggatgctgggattggttggaccgtaaggagtgttgtcgggagagaatgatgtcacgaatggcgtcattttcctgagaataattgcggccaagccagtgggcaaaggccaacttggcacagtctctccttttctgtggcgaatttat

SEQ ID NO: 47927 - DNA, 621 bp, Arabidopsis thaliana landsberg
gacatatttaagcttggtttaatctattaccttttcacaatgcttactatcactctttttcttatccaacaaatatactatcttgtcttttcctgtaaaatatgttttcacttttttttacttgccagttttcaataacgatgatatttgtttgtctatattattgaagttaattttttaatttttttttaagagatgtagtgctttttgaaaactcgcatttgtttacatatacaagttattgtaatggtatagtgagtattataatgggtctttcgatcttggtcattctgtttatgaagcttttcacaatcttacaaagggaaattcggattgagctatacgaattgacgtgaaggagaagtcaacagcttgtgaaatgataaaaagggtttgaataatggtgatcaatacattataagttgagaaagagaagaaaaaaaaactaggcctttttacacgcctgtgacttgggttataagcaatcaacatttcgtttatctcaagccaatgggaatatcattattgctacatccgtccaatttgaggatcggtctttgttgcttgaccttctactcgatcgtctttaaagaaaggagcaataaaagctttttttctcct

SEQ ID NO: 47928 - DNA, 413 bp, Arabidopsis thaliana landsberg
  unsure (1)..(413): unsure at all n locations
gtaatttactggtggacctacacaatgatgctgtatccgatacgtattagcaaactataagaatatacgtatcaaatccgaaattttagaaaacctactagctaggtcaagggaaaaaaattaagagtatatgacaaaactttttaatcttatgaaaaaagtgggtgaaagatatgaggttaaattttatttttggtcaattagacaaaacattgtagagcatccaatggtttgtactaatactnnnnnnnnnnnnnnnnnnatattcaagatttgcgagatgtggtatatatggcttattaacccacatatatggatgacaagttcttaatatattgcatagagtctggtcaaatccgagctagttaagtttagctcaatactactatactagaggatatgggcttgcatac

SEQ ID NO: 47929 - DNA, 571 bp, Arabidopsis thaliana landsberg
aaccatccatcatcatcatggttgttctctcctggcagtatctgacagacggtgtcagagcctatcattattctgtgattggccaatcttgccatccacgtctggctatttgtacatagcctctccgcaatcaaaattgattaacgcggagaagcttcccgctgcagtcagaaatgtcttagagaaaattggtggcaaaatattaaacaacaatattaaagttgaacattcagacttgtcctcctttgtttcggatgcaagttacacaggtgtcttggagtccatttttgatgctgcttcatcagatttggatggggttcaaaatttaatttatgatttgaatgctcaagagaaggacgaacttcgtagttttcttttggatccaaaatggcacataggacatcagattggtgacctatacctcagaatctgcaagattttgcccattcatcgtatttatggagaaaccagtgctcaagaatccaagtattctgatcttgttaatcctcataagcatttacctccattagatgtgccagcctgtcttctaggatgtgaggttattctgggt

SEQ ID NO: 47930 - DNA, 569 bp, Arabidopsis thaliana landsberg
atctggtttgtatactacttagacgaattctttgactgttaatattcaaatatatttgcattctctgttatttcattcatatccaataaatatatatattatttattatagtatgatataaactaacacataatatatacatagatatatttcgtttaaagatgtggtgtcaatcgtattttttatagagcaaaatttcgaggtaaattagttttttcaaacatctacagtttgtacatggcattggacttaaataaaatattgtcatgtagctatcgacaaaaagaaaagcatctgatgtagctatgaaatttacaaccactgctaaacaaattgtccacttaataaatagtttatagataatttgggaataaagctgacaatgactgtgtcggatatcgtcattcgccgaagctaacattcatataaacgaataatgttttttttttttttggcgaaataaacgaataatgtataaaatgaaattttgtttagaccaaaaaaagttcaccggaaacaagaaaaaaaacttagtgctctgaattaaaagagtaaattaatcatcacaa

SEQ ID NO: 47931 - DNA, 902 bp, Arabidopsis thaliana landsberg
gagtgtgtgaagctctctctagcatgcaacatcactcctgtcatcactctactgggttttaattcctctctctctctcctcttttttaatactgttttacctttccgtaatccttataaacgcgcaaacatatctgtacctatgtactctctaacgggattaatgatatgtataaattatggagctatcatcatattatgataccatcatttagaatttgatcatgtaatatgtacttaattagctacagataggatctagcgtgatggatcgatcttcaatatttctattcatataagtgctcatccataatcaaattaatgattatatacactgacttgactacctggcgactagaacttatacatatacaaaaaaagccaaagaaaatataaaaatccttgcaacatatatatccggcctatatattttgttatcataatattaatgaattggaacaaaaaaaatgacagtgtggaaggagctggagaaagagaacaaggaattcttcaaggcgtatgaggagaggcaaagcaaacaagagcaaatgtcggaggaagagacaaaccagatgatccagaagattatctcggattcatctaaagaatccgacgactgatcgcgatgttcgatcgttagatttcgaaaaccttatagtttatatatatgaatctcatgaaaacgatttatccctgacgcatgcatgtttataagtaaatcgttttttcatcttagcatcggtccaacaagcaagacagcaaaaaaaggagtgatgacactctttttggtacgttatacgtacgtggtccacataatattgcctctgtttaattatatataatgaaacggacgctagctcatacatggatcgatggggtggggttttaattgaatgtatcgtg

SEQ ID NO: 47932 - DNA, 504 bp, Arabidopsis thaliana landsberg
tgaacaaagaagatattggtgaatatctgagaagaagaatccagtgtttttgatcctctccagatgacttcaagtgatttctcggcctttcgcttttctctgtcttggtaatcgattctcgcgaaatgcacagaacccaaccctaactgcacccccaccaaattaaaacacactcataaggaaataaagaaataaatagattagaagggacctctgctccaaggaggtaagcttgaacagaggaatgaccaaagggatcgatttgccaagcagcacgtggagttgtgttgaactgttgctttataaaccgatgcccctttgtggtttggtctatcatatctatgtaatggcacgttgcttcatcattcatagcccatcctccatttctgcacattgattgtgtgaattgtatcaacgctaggtagccaaaatgatcaaattaaggtcgtgacctacttacacaaactctagttgcccggatttcactagtctcctcacttgctc

SEQ ID NO: 47933 - DNA, 940 bp, Arabidopsis thaliana landsberg
attggcttagtcacttagtagatctctcatagaagaaagattaatccgtttaaaaagtctatagctggaactagatcccatcttttagattttcaggctatatttcataactgtgtggatctttttgtataggattatagttgagttgcaatctcagttagctaaccgacaaaacttagcttgtttaatgtagagtgggaggagttaaatatggtaaacagaagatgataagcattgggaaattgagttgagagagcagggatgctgtaaaattaatctctgaagttctttgtttggttgatcctcggttcccagtggaaaagttaaagagaaacacgttttgaattttatcagtgcactgcatttgtaggtcttgagtcgtcaattatatcttcctgcaaagtcctcagctgagtcaaagtaagtttctcttccaccatcgtttttctttagttgttttaatctgctagttagtaatccactatttgacaaggttgaactgatttgttactgttgaaacactatgcagagatggggatcttcctcttatagtagccatcgatttgcagcctatggctccaattgaaggtgtcatccaggttcaaggggacataactaatgctcggactgctgaagtggtaaaatttctcgactcctatctcataaatttttctacatctctttcttcctctttaattatgcttcaagtttgtgtttgtttccatggcttaccttttccggtgttttttttcaaggtcattagacactttgacggctgcaaagcggacctggttgtctgtgatggtgctccagatggtaaaacagtagataaagtgtctctctcgccgttcaatatatacgttatgctataaaaaacgcaatttacaatttggtttgcagttactggtttgcattacatggattaatttgtcaagtccca

SEQ ID NO: 47934 - DNA, 332 bp, Arabidopsis thaliana landsberg
  unsure (1)..(332): unsure at all n locations
ggacggcatgccggaaaaagaaggccaaccccgcatttgaaagttaaggcccaacacaagccgccgcgagccaggggggcccccagccgggaggcccccacacgacgagcaagaaagccacgaaaaaacgaaaaaacacgagggcacgagcgagcaaaagagacaggcacngagagaaccagaaggcgangacagagcgacaaagaaacacccgaccaacaggggcagcaaaacgcagacgaaagcaaaggaaaacacaagcggggcacggaagaaaaaaccgcaccaaggcggaccccccacagacggaacagcgagggacacggagaagc

SEQ ID NO: 47935 - DNA, 771 bp, Arabidopsis thaliana landsberg
atccccagtccgttgttcttcgcgtcgctccgtgatcgacccgccggttatctgaacactccgttgacggtagttgcagccgggctatcgaaatggctcgatatatacagtggtgttctgatggtcagagttttgctcagttggttcccaaacattccatgggatcgtcagcctttgtcagccattagagatctgtgtgatccttatcttaatctcttcaggaacattatccctccagtctttgatacgcttgacgttagccctttgcttgctttcgccgttttgggaactctaggttcgattctcaacaacagcagaggatagtcaatagccactacttactctgctttgagtgatgatgcaaaggttatggatcgtattccgtttatctttggcgtttatattgtctatagttatagcatttggaagtatttataaggtaatgatgtattagactcttaagtttcagtctttacttctgttatgtgttatttatgtaaatgcacgaatatggtttcaataatagaactggagtttcgaggatatacaaagcttggggattgtattgacttgtgtcaattagattgtagtgttcagactgttacagcagacgcatttgatcaacataggatggtcattatgttagttttaatgcaattcgtgaaaacaaagttgaaactttgagacactcaggaatccacatgtgaggtctatgccgaagcgagcaagtaggcagctagttctcctaaagcattctcttttatttatatc

SEQ ID NO: 47936 - DNA, 388 bp, Arabidopsis thaliana landsberg
tatctatccttactttcacatgaacacagatccttagcgtggataagacatgcagaccgtttgggggaacacttgcagcttgaagcagacatatgcgaatcatagaagcacaagaagcactcccgacctctcttattgacgaaatcaccctccatctttcgcaagctaaaaccatcttgaaggtgatttagactttcttcttccatctgcacacgcttctgctaaccacagctatgttagggccattgaagatgtttgtttcaatcttatcaaaaatcaggtggactagtacactattacttcagaggatagttgtcaatctatgaaatgtaacatatagcctatgcttttttgagtgtgtattggacatgcatgcacacagaaaaaa

SEQ ID NO: 47937 - DNA, 454 bp, Arabidopsis thaliana landsberg
tgataaggtcccgagagcccaatcttgagtcagaaacttgtagcccagacgccgcacactgtacggagcaggatcttctcgtcccagcgctggcggccgagtcgcaaatgcgtcgtgattgcgtagccaatgtgaatctcctcgtataaatagcaaatgttcctagtactacttctcagtgtgtacgaagtaaataaacaggactgaaatgtacaaagtcgtagaatgaacctacgggggtttggttcgcgaccgtgcgacccaacccggctccagatactctagccgacgaataaactgccatcgatacctagtctccactacaacttgcggcactcgttgcccaaatgggatagaaattagcgcatgcttgactggaggggacatgccagtcctgaaacgctgaaatgagcgttagcttaatttgattggtctgttcgtttccagaagttct

SEQ ID NO: 47938 - DNA, 658 bp, Arabidopsis thaliana landsberg
tcacaatctatagatatggcccattcaaaaacctcagataatccctaatctatcatttgatattgagagaaatcactacgtagatcgaatcgaaaatgagctgtgatataaacgacgaaaaggagagaagaagcttacagttgcggtagtagcaaacgtgcaccatattttggtctccttactgcaaattcggcgatctgaataactagggcacgcagagaggaacgaaagagacgaatgaactaatttataggatttcttaaaaccctaacgctacactctcactttctttattgggcctttacgaattaaggctttatattgggcctttacgaattatggctttatattgggcccgttttgagatgtcgatttatttttgagtcttgcgcttgggctcgaatttattttcttaatcataaaattatttttatgcactgaatagtggtacctagaaatgtcatttgaacaaaaaaaaaaatgtcattttacatgtcttttggcatttagattatatcattaagaaagttgatgaaaaaaaaaagattctatcgtgcaaacaaatcattgcaatattttgttgagatgttttaccagacttgccttaatagaacagcaagaatatattataagtgagtggtgtctccaatcatattaa

SEQ ID NO: 47939 - DNA, 597 bp, Arabidopsis thaliana landsberg
  unsure (1)..(597): unsure at all n locations
gcgttcgttggcgtgtgtgtcgatgtgcctccctagagggaccactgcctatttatacacgaaggggagtgtccgtagtgatgtcgagtgttgtattcgaaggagggacgccctgacgtctacaagccgacgtgacgacgaactgtgttattgattcgcgcctgttgatttctcgtagagagccgaggcaaagaccgaggggttggccgtacgcccaagcccctgagggagaggtcgcccatgccgttgttgtaacagcgccagaatatcagccaaaggtgcttacggggtgcgtcattgtcctggcgcgtgatgacctcgagattctctgaatgcgtttgttagggggttaattcgggtgtccctaattattgttccgacacatatgcttcttccattcttgtataaatgtgtacatagatcaatacaaagatacacttcttccattctctactttcactttacatttcaattctcaacacttgtgtcatgtctcactttccaactgcacaaaatttggcgggggagatgcacacaaagtgaacaaatagaccntnttcttcgtccccaaaaattttttgggcccttttttttttt

SEQ ID NO: 47940 - DNA, 801 bp, Arabidopsis thaliana landsberg
ctcccaaacaaaagaaacttaaagacttgcgcaagtcttaagaatgtatcaaactttgggagctaataatagcgcaaatacggcagcaattatattggttgacctatgtactttgtggactaaatggtgtctcgactcaaaacctcattttttacttttcttggtgagatcccaaaatgaagctatgggcttgtatgtactatgtagtccagtaaatcattaggaccggctttgaacggatgatcgcagtgcaagcaaactaaaaatgaggtttttcttctttcccaactacggctctttagaactaaagactctaggtgtttcctcttaggctcttagcttgggccgacacaaacaaagaagcaatgcaaagattgaaattgggcttcattcataggcttgggccttttcttgttgcttactcgtaattactttgtcagaaaagagtcaaaagctaaaaataaaataatataataatgtaatgaagcctagagaaagagaagtctagtgactagtgactagagtagtagtgacccacgaaatcaccaaagtatctaaagtgtattaatgttaataaaaaaattagggtcatggagatacatacacctatgcacgaaccattcattgagttttattaactctgctcaacacataatctaaacgcgtgtgacttgctctcttccttcttacacgacacgagatcatcgaatttggaccgtaaaagagacaagcaacttcataatcaaaccatcatcattatcatcatgttgacgaacacgatctaatttttccttttacata

SEQ ID NO: 47941 - DNA, 670 bp, Arabidopsis thaliana landsberg
taactactcggaggcagtataaaagcgataccatcaatccagcacttatttataagaaatctttccaagaagcaatagacactaatgcagataaacagacttagaaagtgcagtgacatacgcattccaccagaaagatgcatcctcttctctccaaagcacgtgagatagagaggcaaaattccaataatctttggcagcctggcgaacaataggagtagctcgctctcctgtttgtgagaataaaatgactttcacctattgagcaaggggaagataaggaaaaggacaaaaataagggtgtaggtagtagatgtgatgcggaaaactattacatgtctgattagtatttccttaatttcataggataaaagaacgctagataaaggatattctaaagagaaatagaaaaacgctaaacaaaccttattaggtggaactttggagaggaacttagatacctgtatgcgaaaaaatatatttctaattaatacacaaaataaataaatttagactccagaaaattttgcaacacacagcagctaaacaaatgaaattgaagaaaatatttaagtaaaacagtctcactcttacaaaccatgacatggaaataattcaggtactaaaaggcctgcaaagctctgcagctttgcagtacagctttgcagta

SEQ ID NO: 47942 - DNA, 834 bp, Arabidopsis thaliana landsberg
aagtcattactgtatattatagtcattttacgaagcatcatcacaatgtcatcactgtatatgaatgtttacttacaggaatcaagcgacctaaacttcagagactcaaatacctgaaaataatcgcttactgttcataagctccacacaaaagcaacagatgtaacagttaattcgaaataccaaagataatctgtataaaacacggtgttttttagcaaacgttgatcagaaaatccaacaaatataccggaaaacactcaccgttaagctacaaaaatgcaaacctgtacggacgttgcttccgataaaacaaaagcagctcaacgttactaaaaatcaaacagaaacgacgatttaaagaccatggaagagaggagaagctataccggaagctgaatcgtcgatcggaagagaatccgtacaatgcagaacaaacgaagacctatagatgcaatgaacgacgtgaaaagtgaaaacgacaaggaggaagagaaaccgtttcgtcgaacgattttaggtcaccggagctgtttcgcggcaacgatcgagggtttcgagaggagaaaacagaccggaacgggtttttgaaggcttttgcgaaaataagaaaaaatgtgacttgaagatgctgacgatggatgctgcttcatggaattttttggacttagcttaattccgaattaactactgtaattagtaagttttaaactaatcttgacgtctctgtttctttgacgcacgtcttttactctttaatctttaacacgttacatttacttgacccattaccctatattaccgtagcttgtaaaattaggaagctgtcatttt

SEQ ID NO: 47943 - DNA, 730 bp, Arabidopsis thaliana landsberg
tgaaaatgaccaaacccagcaaaaaaacagagagaatgattattccacaacttctgagtaattccaccaaaaaggcttaggatttttgattcagatcttattcaaagacattaaatctgacccagaaaaacaaaaaccaatcataaaagagataaagaagaagaagaagaagaagctcacgttattgcctttccagcctttataagttctgatcagctcatcaccaccactaacaccgccgctactactcggagctccatgacgccgatctgacggctgcaaatctaacatcggaagaaacccagaaaaaaaatcgcgtttttttttgctacacaaacaaagtcttcagagcaataaatttggtttagaaaataaaaatcaaaaaaggaattattgacttgagggaacagagaaagagaattatgttttttgtttcttaataatgcagctttccctttttacgagtcaactaatttcaaagatatcagtttctaatggagtttatggtaattagttaatgattttttttttctttctgttacagaataattgatgtgtaatagattcagtaaggttttttttttttttttaggaatcagtcttgacattacacgtttataattttctatatcttttaaatctaattaggtaaatgacaatgaaacagattgaaattaataagtatatagtttttggggtgacatattgctgttgtatttgataaaattat

SEQ ID NO: 47944 - DNA, 764 bp, Arabidopsis thaliana landsberg
ccaaacccaggaagatttctttgaagacgaacgcacgacacgcacccatgtatttctatacccggaacatacgcgtctgaaagtttgacctgggcagttcaacagctaagtataaaattagtcacaaactcaatccaatacggtaaactgcataactgtatgaagtaagaactaatagggaatcacaaataccttgatatttttccaaccaacatcatgattaagtctaaggtgtacataatattgcagcgcaatagacagaacacccatgaattccgttccaggtgtaataacattagaatcaaacacttgagagtccactttaggagggagtcttctaccctccctctcaaactcctctcgtagcctttcttcttcagcagcctgtaagattaacaatgtcaacagatttccattgtaaaggtacgagactcattaacagaatgaaaaaaaaaagaacacgtaaggaaacgaaatcaagaacacaacaaacattagaaggcatgtctagatgaaagtaaagaggcaaataaagtttgtctggctgaggaaactacacagtagaaaccccaagccagtatggggtaaataagaacatactgcatccgatgcatctttagcagatctaaaccgtctagacctctgttgattcattttagctcttggagcaacaccatctaagacccaaatatataaaaagtattaagcttaagcatactattctaaaacttaatgttggctgataaagaatacttaccaatagc

SEQ ID NO: 47945 - DNA, 1257 bp, Arabidopsis thaliana landsberg
gattacttggttcttcgtatatgttcttttaaagtttagacattttggtgggctgatacaaaatactatagcagtccaaatcagattaaaaaaacattccatgtttaatttagtgatgaaagccccaccacgacaatattttaaaatgcgcaaataggaagaaaagaactataaaggaaaccaccacaaagacaaaactcaaaacaagttggaggaaaaagagagacaaaactcacaacaacatcaaggttttaactaaatttaattttgtcataactattcatatatagtcaaatggctaacaaagctctcattcatctcctcgtcatcttcttcttggctctatcacacatcttcttcttcccttcccatgcttcgagtaaaatcttcatctctcttaaaatcgtattttatgtatttacatcatatgttttaacttatatcatctatattttgtacgtatacaggacttgggagtttgatggagaagccaaaaattgttcgacctcaacaagatacactaatggttagttatttagctatttatctgtgttcttgagaggttaaaattaggttattaaagattttaatttggttttgttttacataatcaatgctattaggatgtgaaggaggaggtcgaagaaaggatggtgatggagttaaacgactatccaggttcgggtgcaaacaatcgccatttgccacgacaacgaggctgcgtcgttgattgctgatcgatatataaaatgacgaaaaacgaattaatatgattatagctagtatcgataaattgatgtataagtaagatacgtctaattatttttcagaatatgaattgagttagtttaacattggagtctatagacgattagactatatacttgtctactctacggagaaaagcatagttttatttatgtagttcagttggtaaatcaatagatgctattgttaataaaccatatatatggatgatatgtacaagcctttaatttcaatttggtgataggacataattggtttactgccaactaatagagattagactgacgtaaagtttttcaaaataaagataagtcactactctccttttcacttatatttaccaaaaattgagttagttaacttcttattcaaatttatattttgctgatatatcttatatactcgtcatgttttacgccacggatcaatataaaataaagatttaaaactaaaaactgatgtggaaaaagagtggtttaataaagtaaa

SEQ ID NO: 47946 - DNA, 1325 bp, Arabidopsis thaliana landsberg
tgttgttcttgtgatgcacaaagaagacaagagagagtgaatcaagttccaagatgaaattgccaaacatggaaggtttctatgtttctcttaccctctttctttttttccattctctcactacttacctatctatcactctcattctttgcttctcatcattatttcttgcctttcctcacattacttcttggatttaatccacacatacctattttaaggcccatatacaaggaatatacacaatggcccattaacttcaagtatctctctattaactaaaggcttttgaaacatctatgttggaggcccacatatcaattgatacctctacagttccttcttgttgtctctcaatcttgtctctctcactttaaagtttaaagtcactctatagcaaaaagtattaaccaattgggtagaatgaatctactttttatttatatatttaggaatttatgatacatatggaattgtgaggaaaaaatgttatactcacaacaacgaaaataaaatagtaacttacacgatcaatcgaatctacatttttactacttatttagcatgaatgtttatatattataatttagagattcaaatctgtttaacaaaaacaagtggttagtcaaaataagaaacgtttgcttgaaattgaagcaatcctacatttaattttacctttggtggctcaaaaagtagtcttgctttctctggtaagcatattccaagcccattggctctaagttacctcttctcacacacaattacagacatgttcacattcacttttcacttaatgactcttcatcatttcattacttatttggttttatttaaatgtaggtaactttgtaacacatttttctttgattacatttgaaaaccaaggcatgatgcttcgattaaaagcaaagaaggacatgtttatggtaatatgtgtttttgtgtgggaaagaggagaaacttagattgccttaatcgatgttgtctttttctggattttacattggaagatggtgcacaatgcacatgtgacttgtctttgaccttctccaccatttttctctattgtttattttacaattgataggatgcacagaacaaatctaccataaaagctttgtatattcaatcattacaatgttcacaaatataaacccatgttatgtccacactctgccaatattttgtcatttattacattgaacctttttgttggcacacatactacatgattttctttttcaacgattacattagatcgaatttgtgtgttgtgacacaacgacgttttaacacaaaaccattatattgcttgttttggt

SEQ ID NO: 47947 - DNA, 520 bp, Arabidopsis thaliana landsberg
  unsure (1)..(520): unsure at all n locations
cgcgtgtgtgaatatttttttttcttcttggagcgannnnnnnnnnnnnnnnnnnnnnnnnnnnnnnnnnnnnnnnnnnnnnnnnngcattttttttgttagattttgctgcaggccagatgaggaaatgggaatgccggatggtggtggttagcgattgtttggttcagagcggttggatagcagacgtggagctgaaggtgttcgcctcttcgcagtcgccacacgcagacaccctgctccgccgcggcttttttttttgtctcgccgtgggcatgccgttgatggttagctgcgttccatgccccccctctcgacggttcagaaaatggtgatctacgtatagaatcagcgtcagtgccggctcctcctgagtggattaggcggaggcgcatcatggcgcggacctaacagctctcgtgatctccgtcagttggtcaatacggttgggcttctttaatttgacgattatatgtggtggtcgtcgtctggacgtgctcgtcaatttttaggaaatgga

SEQ ID NO: 47948 - DNA, 474 bp, Arabidopsis thaliana landsberg
aaaaacaagctagattataataaccctccatacttacagatattgtttcttttcctgggctgacactctttatcacgagagggcggggattttgtagaggatacaaaatctccaaaagctgaaccatcaaatacacacagcctgagaaaaaaacagaatggttatcagaacgcgaagatcttgcaattgtatcaaaagacagcttgcagggactgggctattttaccttctcattggactcttcagtaatagagattaactttcttacatgattgtgatttgcagcagaaaatatccaccattttcttcctcgctctcatcataaaggaatatgatccctctgtatacttgccttacaactccttgtttaccctaaatttataatttatgcatgaaaactaataagtttttacacaaaattgttcacataattatgtgaaagaagagtgcaacagaaacaaacaaccccctgaa

SEQ ID NO: 47949 - DNA, 649 bp, Arabidopsis thaliana landsberg
tacgtcactgtgttaaaactttgttttggttaagatttgtaacagaatttagaacaaaataaaataaaataaaaaggtataactatttttggtagttgttaatttgttatagcttacaaagccagtttgtaatttttgggatcgttagatgcctttggagtgtgtggtctttaaaaagtgaaactgatggagaatgaaaaagggaaactgaattacatgaaaataggttatattgattgcattgaattgctcattgctcgttgttatcgtgttagcatacatgctagaatgaccattttcactaatactcacgcctctttttcgggtgtaggtgaagagtagttgtttaaaattgtgtgtgccaagactaatgagactataagagattaattttgatttttaaattatttgaataaaacggtagcatagctttagatattaatctgcttttctatcggactatcaataacaaactttcgtattttattcataattttgttgttttattcgttataacagttttaaattcaaataatttcgaaagaaaaccacttgacactgggccagccagttctcaacgtgaatttagcgcgtgtgtagtcctaattcctaaccaatgtcttgagcggtttatatcatatctaccaac

SEQ ID NO: 47950 - DNA, 953 bp, Arabidopsis thaliana landsberg
gacccataattgtcacctctgatcatctagcctcttcccatcacatgccattaatggacctatgcggtgctgatagtaacgtatatccatgacgacgtctgagactcagaggatcttactctaacataattaaaaacataaacttgcactagtgaatttgtaatttcatataaggaaacattttggagcaataaacattatatccttttttcctttccctgtatattgccacatttatgcacataaaatcagctcatatccatcgatcggtccccaatttttcaatgattagtcaattttttcttccttttgataaccgctgtggtccaataagacaagtgaatagggtccatttagggctagcgtacgtggtacatcgcatgttcactatcacttatgagcgcatgcaagtgaaattacatgtcaaaaaaccttacgctatatataagtgtatatggtatctgtcaacattactatacaaaacaaatcttttatttttattgatcacatattttgtcaaaaagtatttggtttgtatcattaggcccaaagaatgtttttgtgtcagctgtcttttcctaataaaacagaagaaataaacaataagatgcaacttttcacaggtaatacagtatttgtaaaaattctgaacaacagattttcaaaactacgacatttaaaattagaacgaagattaacacgcattactgagtatcaaacgaattcaaaaacttatgtgaatataccaagaatatgtgattataattaactaaacatttttaatttttaaattaaaatgttaaatttcaatgctatttagaacattgtggttatgattattaaaatcgtgacacgatggatagtaactaaatgaaagaacaaataggttgaaagctatagggaaataaataaatgaacggtttatagtaacatctttatcataaagctggact

SEQ ID NO: 47951 - DNA, 570 bp, Arabidopsis thaliana landsberg
  unsure (1)..(570): unsure at all n locations
gcctctgtacggagggaagtcgaacattctttgacacaangagcttctgccttcgatcaagaaagcncncagctgccactgtgatggatgtgacgctaaagccgcccataatccccatactactagctctattcctccaatcccgaatataactttccagtgaagccctgcaatatagctcatatgcatttcaagaaacccgtgttttcgtttcgtaatgtaaagtatatccctaaagaaccataccttcatcgaggttgtagaaattaaggtagagaatatgagttgcaacaaccgcaagaataggtgcagtaaccatgattttgacagattgatcttgaatactgaaggaccggagtattgctagaataagcgaaaatccggctaatacagcagctgaagagtaatctagcctctccgtcaattcaacatctctatataacatagttcatagcaaaaaaggaaaacatataagtgagaattatttgacgaacaaccttggtatagaaataggaatgttacctgctttgacatatactactccagaggagtgaattcattacaatgatg

SEQ ID NO: 47952 - DNA, 570 bp, Arabidopsis thaliana landsberg
tgtatgtataaagctttttgttataatttgtaaacaaatgaatttgcatatgtttaatattccgggaagggattcattttgtggaaaatatcttgattcttgagcaaatgtgaagtatcaaatatagttagtttaatgaaatatctaatattaaaagtaacttttttacttgattatacggattattctttgacaagactagttttcaacatttattctccataatgtacaaattcatccaaaaggcaaaaacttacaagaccattgaaaagataacaactaaacaaattcagaatgatattaatcagttatagagacgatcaatttttcttttgacatagatacttcttcacttatgaattatagatacaaaaactaactacatatacaatttggtgaaacattaaaaaaagattaaaattaggagaaccaagggttttaacataataatagccaatcatgcttggtgtttgccgacacatactattgcatcaatcgcgctacttgggaccaatggaacaccaaggctactatatatcacggatctcaaaaggaacctttttatctttt

SEQ ID NO: 47953 - DNA, 715 bp, Arabidopsis thaliana landsberg
gttgaaaatatatctgtatatataaagttcattctgaacttgcaaataaccagttacattctaaattgtttcaaagctcttataagaaaccaatattttaatactgaaccaataacaacgtcttgaattgataaacataatttacagaacccaattaaaaaccttaggactctgaacacacctatttaccccttgaggcaaaggatgagatgttctgttcgtttgatcagcaggatttggtatcagagtctggctgacctggtgttgtgattgctgaggttgttgttgttgttgctgctgcaagttacctgattcttgtggctggccttgcattggaacttgcccctgaggtctatcttgtagctgtggagcaacattccttgcttgatagagcctatttgtcccataattgtatgttgtcaattgttgtatcttctgaagaacttcctcaactggtggtggaggtccaggaagctttgcatgcctgtaccgacaatcaggaccattgggacaaaaccccagcttgtacctacaaaatataatcacaagataagtaataaatctaaccagtcttagaatcaacacaaactcaatcatcaagttcaatctaaactgacaaaacatgaaactgaaaaccgaatttatgtaacatacatattgcattctttgatatcttcattggtatgtttatacacacaatcctgctctcgacatt

SEQ ID NO: 47954 - DNA, 520 bp, Arabidopsis thaliana landsberg
tcccgctaccctcggccaccatcgccgttgcccgcgagagggagagagaaacccgttgttacccgtgaaagagaaaggggagagaatcgtgtagccagcaacatcgaccgcggatgcacctcgcctaggctttgggcgccgctcgggatcttctctggggcgtgcgcgaaggaagcttctggacgccagggtattgcgcctcgccgtgatccacacgccgcggccggtcagctctgcttccatccacggtgagaactcctgtaccagtctcgcaggcctctgctcttcgttttgcggtggctggagtgaagtttttaggcgggactcgagctttaagtgcggccggtaatggcttggccgtgtctggcgaacgacgtggctgggtgttcggtcgggtgatgagcgaggtagatgacgatcgctggaccgttagatctccgtaaaaggctgagatttgatccttggtgggacacgttttagcagttggatagagtctatgcggtggagatttggtggctgt

SEQ ID NO: 47955 - DNA, 686 bp, Arabidopsis thaliana landsberg
agaaacccatacctataggtcctctggtctacggcatatatattgtcgtaaatttgtaaaaatactccataacgatccacaattgtgtttaggtatgtatctgaaacttgacttaagaaacaaggaaatgaatacgaaaagatcgtaaaaggtattggtttaaaaggaatcaaaatcaaatacgccgattccatgcctatactttaggatatacaagcaaactaataataaatagtcaagcagaaaaaatcccatattttggatggataatgaatgtatcccacaatccaagttcactaagataaacaaataatactttcacatgcagaaaagataaacaaacttcatttcctaattcgcatgtataatttgacagaaattgaattgaacatttactagttacccgtttggaaaatgaaattgcaaacttattagatgatgtaacgaactaaatatataacatatcatcgtaaatattgtaaatatgttcacttttatagcttgattaatggtaaaatgaaaatttgatctaaagaaaaggcaatcttatctagatgtgaaaacgcaaagtgtcgtttttcacgtgtgagaatactgattgactggactagtacgtagtaatatggagatgccgtgcggttgaaatgtccgtttaaaaacatttcagcaccccattccttaccaac

SEQ ID NO: 47956 - DNA, 114 bp, Arabidopsis thaliana landsberg
tgcaccacaatcgactttgggtcacactacgctctgacccatgagccctcatggcccagccgcaagcctgaatgcatgggctcaagatagaggcttatgcccctgacaatagtg

SEQ ID NO: 47957 - DNA, 1347 bp, Arabidopsis thaliana landsberg
acatgtcccatatatgttatgttgctttgttttaataagataaacttttacgtacgacgtatactactgtttcttcttgtccatatttgtctgcaaaactccaacacaacacaaacgattatttgaaaatagagaatcggaggaatatgttatagtatttcataaaaactgcttataataaagagtattcagcttatacataaaagagagctagctacataacacaatctccgacttaattatataccaaagagatttacctagctaattcaactttaaaaaacgaggtcttgtgttgacatctttgaatttttatttattgtacttaggctcggctacaatgtaaaaaacaggcggtttcggagaagaataccaaatgtatgtttccaccaaaattatgtcaatttacaagactgatatctagaatgttcatgctgatcagctagttatgtggttattcaaaaaatatctatagatatcccaattccaagatttgtaaattatgttaatataaacaaaactgttacttctatggagtttgaaccagcgtggcaaaaatttcctgcacccatattaatattaaattatctcaagctagtatctgatgttagatttgtactgtgtatcacactgtacgtatgcttgcttacttattactctattacaacagatatttgtgtgttttcattgttaaataatgtaacagaaatttgtgggtttgactgttctttttactgaatttctcactacttgaagtctaactagaataacatgtgactgttttataatttatagttcgaggttgattcagaaaagtcgtaaaaatctctcataaatgtattaccgtatggctctatattgcatatatgggcccaatgtctcaagtctcaaccatgttttaaattttcagtactaagcaatgcatatgtttttgttagacacaatttttcttctttttttgataaaatgtgagtttttttttttttttgaaatgtgattaattaccaaaatggaaacattgttacttgcaaaaatctttgggacaaatagcttctaagacaatttgttttttaaaaagcctcagaaactaataaacgcaaagattacaaatagagaactattacgagctaggcatgggaaaaccattgagagagcagtcaccgcggcctttgcggtaccttcgagccaggagagtgtctctaattaatgtgctcctgtcgatttgcttaaagacagaggcaaatctgttatggagactgtttgtacttgtcaaactatgggccatcagtcgaccgcagccattgttagacacaattaactatgtgcgccatctattatggagactga

SEQ ID NO: 47958 - DNA, 314 bp, Arabidopsis thaliana landsberg
ggataacgacacatcgacttgtaatagcttgcataagccaaaacataccgcttatttagcttgacttatatgggacctggttttgagtactgttccacttatgctaatattatgtaccaaaatatcaagaaatggacgcaagatctttcaaagaatacataagtcaacaatggaacaccggagtggtaagatatttcatatatgctctagatccattggatcctcaagccagagatatatgtaaacacattctgagattacaacaacaggcgcaaacaatgccatatggaacctacgaaaagcacaactgatac

SEQ ID NO: 47959 - DNA, 780 bp, Arabidopsis thaliana landsberg
  unsure (1)..(780): unsure at all n locations
ctccactgagcatttaaaccatgaagcttgcacgcaacatatctatggtccaccaaatcatatgcctgctgaaaatgcataacatcatattactgcaaaataattctcacatgtaaaagaatgtagtatctatcaatgttctgaccttatagacttcactaaatccgcctttaccaagaagatttagaagagcatagcggctattcaaaactgggaaatggttgaaacgagaaccatcttcatctcgtatgcgtttcatctccctcataagtagccccttctctaatgtgtacctttctctctcacgcaaaacagcttcctcttcctgaaaggtaaaaccaataaatgtatgatacgtaaccagaaccgaatcaacttataggaaacaagaagctgagatgatgcataaagaacatacccgcttaatactagtaagacgagacttgtaaacctcgtcagggatgatatcttcctcctgtgctcctgattctgtgtcagttccgtcatttttatctacacgcaaatggaaaaaccaagggtgccaaacatcataacaatttgcccaaggaaaaaatcacaagatatattacaggagattgcggattcactgacaaacaaaaaaatactgggataacataccaccattntgtcgtttcttagtaactttctttgtctctcaatagcctncttggtttccagcaattgtctctttttcgtgcaaatttatagaaanatcagtacagttacttcaaaagctatgggtattagtttgataaaaat

SEQ ID NO: 47960 - DNA, 560 bp, Arabidopsis thaliana landsberg
atcaaatctgaacctattctaatcctatccgctggctagagaatcaacggcaaccatgccatcatttcctagatccaatcccaggcgtcggctggggatcccacggccacaaccacatctccctctcttgctagcaaacctggtggcgtcgccaccacccgcgacggcgaaaccccggcgacccgccaccactaggtgctaacgccccataggctacacagattggtgctaagcacagcgaacgccaattcgaatgcaataggggaaaccttaccgactattaagcccgcgtggatggctgcacacgcgatacggcgggctcacggcaaaactccatcaccggcgacgaattccctatcacactctgatcctatgtgctaccgatctcccccaatggatttgtaatggtccagcgattccatagagccaccaatcgaagctcccgtgatgccctttcgcgaggatgtggtcggtggcggtcggggctcttgtgctatgtctcaccgagattgggttccagcaatggggaaaagggatggggacccgcgattgttttatag

SEQ ID NO: 47961 - DNA, 774 bp, Arabidopsis thaliana landsberg
tgattatttggggtttaaggtcgtttactaatgagttccctcggcagcactgaacgagcaactgaaaaaggaagttgagaggctgaaattcgccacgggagaagtctcacccgcggatgcttataacctcggaatggcacacatgcaatatcagcaacaaccacaacaatccttctttcaacatcatcatcagcaacaaaccgatgctcaaaacctgcaacaaatgactcatcagtttcatctcttccagcctaacaacaaccagaaccaatcttctcgcacaaaccctcccaccgctcatcagcttatgcatcacgctacttctaatgccccggctcaatctcattcctattcagaggcaatgcatgaagaccatcttggccggttacaggggcttgacattagcagctgtggcagaggctcaaactttggtaggtctgacaccgtcagtgaaagcagcagcactatgtgaggctgcctttcccagattcccctttgtcgataaacctattctttcgccctcccttgaaatctttagctaaaaagtaacatcttcgtgacagtcggattcattttttattctgtaaaactggttttttggggggttttggggtttcaactttagagaccacagttgttttaacttgtctgatttctcatttcctgattcatcttgttctcctggggagctactgaattataaacagatcatatttctgtttctttatgttgtcatgattccctagttgctttcgtcaatcatccctatgatag

SEQ ID NO: 47962 - DNA, 533 bp, Arabidopsis thaliana landsberg
ctgacctccgtgaactacgcagcagcagctaatccactggacttcgcgcggttcggtgagagcacgtctgtctcggagcgggattcgcggcccatgcaactacctatcctccctgcgcgtatagctataagtacgagccccgtgaccgccccgctcccttgcctgacctagtgaccgaggcgccgagggagctccgtgccctgcaccaccgtacccgattcgcctgcaacacctcgggccaccaccggaatttctcgcgccgtgaacgcactgcttgcggcgtttggaccaggaaccttgtctctttgcggggagtgcctgtgtggtgtcgtagcgactggggagccgtctgggcgctcgtaatcgcatcgtcggcgtccttcttccgtcgcatcccgtggatagctgccctcgcgccaccagtcaccagcgggtaactcactcacttgccaatcattgccgtcgctatggtgacccggttcgaattgaagcctgggcgtggcatcgggtgttagcgtattccaccatggcgg

SEQ ID NO: 47963 - DNA, 631 bp, Arabidopsis thaliana landsberg
  unsure (1)..(631): unsure at all n locations
gattgcaagttttggatgtcaggtacaatatgagaacctagctagtcacccccctaaagcgaaccaaatgaggaggagcaagaggtctacaaaaaccagtccggccaacagaacatagacttctgaaccgaagtagtagtgatcttggcacgagatgcacaaagaattgcatcatcatcagtagcaacggaggaaaatctggcgaaatgtaacaagaatcgcgccacggggaatatgaccatcaagtttcagtagcaacggtgtaaaagatttgcgaaaccgacagattccatgaactatcctcaaatcaacgcgaagaattgcaaggagagtagagtaggggacggcgagctcacgtcagttgggaggtgaatgactggtggttctggtctcacgggaatttcctcaaccgtccaatgtatagtggtgccgtaattgaccgggtgatagatgtcgccgacgacgaaggcgtgtccgaagaggagcatgttcgaggggctggagcggaggacacggtaagnnnnnnnnnnnnnnnnnnnntggaggttgtcgcacaggcaatcacccagagacgtcgtctgcatcggggtctcgtagagccctggaacgtgtggtcacttggtactatgac

SEQ ID NO: 47964 - DNA, 1520 bp, Arabidopsis thaliana landsberg
aaatgctacatggatcttttttcagagggatgtaccagcgcggtatctacttcgtttgggtcaaggtgaacaagatcttgccactgatcttgactttagcagacaaggccgtgtcaatgccatgcttgttcggcgtctggaactcctcagtgaggttgagagactagcaagatctcttcagcttccagaggatgtaggatatacttgtgaaacagctggatatttctggttgcttcatgtatactcgcgttgggagctgtttctcgcagcttgtgcaggaaatgaagacaatcaatcttttgtgcgagatcgcttcccgttcaaagatttcttctcagacacccctaaacctgtttttaatggggagtcatttgagaaagacatgagggcagctaaaggttgtttctctcatctcaagactgtgttccaagagctagaagagtgtagggcctttgaactactcaagtcaactgctgatagagcaaattatctgatgaccaaacaagcaaagattgtagcaatgacgtgtactcatgctgcattaaagaggagagattttcttcagttagggttcaaatatgataacttattgatggaagaaagtgctcagattttggaaattgagactttcataccaatgctgcttcagaggcaagaagatggtcatgcacgactcaagcgctgtatattgattggggatcaccaccagctgcctcccgtggtgaagaatatggctttccagaaatatagtcacatggatcagagtttgtttacgaggtttgttcgtcttggtattccttatattgagctcaatgctcaaggaagagccaggccaagtttagccaaactctacaactggagatacagagatttaggagacctttccattgttaaggaagcaccgatcttccaaagagcaaatgctggattctcatatgaatatcagttggtgaatgtgcctgattatgaggggagaggagaatcaacaccatctccatggttttatcaaaatcagggagaagctgaatatatcgtcagtgtctatatatacatgagattgttaggatatcctgcgaataagatatcaatattgacaacatataatggtcagaagctcttaatccgtgatgttatcaaccgacgatgtgttccgtatcctttcattggcccgccgagcaaggtaaaatatcctgctcaaagttgtttttgttagttgctgatatggtatggattgtattgagagctacctgtataaataaatttcggtttggtttcgatctaggcatttaggtttcgattttggttttttggtatgcaatacccccctaagaaagttatcacagagttagttttgtgttttgactgttctaattttatttcctcaggtgactacagtggacaagttccaaggacaacagaatgatttcatattgctctctcttgtaaggacacacatcgtaggtcatctacgtgatgtaagaaggttggtagttgcaatgtcacgtgctcggctaggtttg

SEQ ID NO: 47965 - DNA, 280 bp, Arabidopsis thaliana landsberg
tggtggtgagttgttcggtggagatgttggtgaagaaggcggcagtgttgttgttggtggaggcgaaggtggtgtagttggaggacgcactggtggagtcacacgtcgtgtatttggtgcaaccgatactggagtttgtcgtagtgtgtctggagaagtttccgctagatctattcgcaggagcctatagaggtgttctcggtgcaagcattgctgaactaaatgctagactgtgtggtaaaagcgtagtcccagaaaccagctggtctgttaaaaaaaa

SEQ ID NO: 47966 - DNA, 579 bp, Arabidopsis thaliana landsberg
aatttcattgaaagtaatcattctcgcgtaacccgatccgccctatgtatatataaccagaacttatttaaaagaacaagaaaaagaaacacatgtaaggtgactgaaacatgagagtttaataagaaaattcaaaagtacctgccaagttttgatccgagctccattcatagttcctctaaagttacagttttggacacatacattctccactgtagctgtctctccatcttttcccaagcttcctatgctatacattttacaatatacatggtttatctatatatatgtaaaacatagataacattttgtagtacatttttaatttggttaaccttatcccatggcctggtccgcaatctataccggaaatgtggatgttagacgtccccgaattaatcgcaatgcaatcatcacctgtcaatgatgataatcagtaaattccaaatgacattatttggataggacatttggtggaccgtctattttgacatgtaaagattgcattcatacatcaaacccgttccaaaacttgcttttgtttttcaataatgtatataaattgagccaatactaact

SEQ ID NO: 47967 - DNA, 1065 bp, Arabidopsis thaliana landsberg
  unsure (1)..(1065): unsure at all n locations
cctgttctctgcagctggaaaacaaacatccactatttaataagattggggttacaagcacaccaatcattattgagctaaagtataaagatgctaacccattttagagaggttttctattctctttgaagtcctcacagcaaatctctggaaagcatggctgccacaacagaaaataaacaaattggagatccgtcagtgagtatgcaaggggagtcactgagacttcacatcaagtaaatcaaaagaagatcataaagataaacaaacaaacaaataacagcctcagtctcttagattcacgtttaacgtcatgtctttgttcaggacaagcctacgaaaatcatcaccggcagtaatccacacaaaaaaaaacatattgaaatatcgaaaatcaatacaaagtaaaacacgagttatctcaaaactcatgtgaacaaagctcaagacaaaatgttctcttacaaattatcgaatagctttgagcagaagcaaaaggaatgaacaaattgcatacaccaaaagatgcagagcatgaggctcaagaaactaaaacaaaacaaaaaccaaactctatttcagagagaaaaaacaaaatgtctcaaacttcctacgctgcagcgtatggtaaattacgtagcaaaccagctgaagttgagattaatcttgcttcaatattgaacgagccgataaggaacatattttcaatccaatcagccagagaaagaagcttactttttgagatctacccaattcatcattaaaaagtacaaaccctaaatcgattataaggaatgaaagtacctgtttgccaaaccattaactatgaactcgttcgcaacgtatgagatcactctcgcaataaaagttccttcttccggcattcttggtctttcctatcaaaaacgaaacccaaatgtcaataattatctaccaaatcgcaacaatttctagagaaaactaaatcgaaaaggaaaataagagacagaaactcgaaaaatcacagctttacaaacaaaatcaaacaacaaagattgataaaacctcagatgaantcagagatcg

SEQ ID NO: 47968 - DNA, 1051 bp, Arabidopsis thaliana landsberg
attaagtaagacattacaaaatatttcactataaaacttagaataaaaagaagagagagataaaaaatttcttgaaaaacatgtgaattataatggcaaaaaactcttcctataagaagatttcaggaaacttgcacatgaaatcgtcatggtgtggttggatcataatgctaaaaccaaaaggatgtggagaatggcctgatgtaataaatatagaagtttgaaaggccaagaaacatcttgttatgatgtcacttgctatggaagccggcgaacgtgaaacatatatggttcttgaattctgctctttctaaatgttctagataatagcttgagtaaggagcactgtgatgagtctgaaatctttagatgggaagagatgagtttctttgagagtgtgtgcagaaacaaatagtttttggaaaagtttatggaaatccctctaagtaagcctatttctaattttatataataaaagtttaaatgtgcctattttcagtagtgttataaaaaattgtcaattgtttttgacattattggaatggacaagtcgcataattcaatctctattatgcatgataacgcaataacgggaattcgaactttggtaagatatgccgcaaaatgattttcttttttactaatgcaattccccatatacattttttgtataaatcctatttatgaaattacaatccatattgagtctatcgactatgaccaagtcctagatttagaatccacaaataaggtcacagccaaggtcatactccatatgggtcacaaccaaagataaaagaatttaccaaagccatatatgaacccatagatttgcaattgatatatggtttttgtattattttatttttggggggaaatgtttgtaatcaaagctgtgagaataacaatgattcactctggttctagaagattattggcaagtacacatccctgcactttcaacttaagataggaacaacattattataattaatttaaaagctaattccaaagtatcgtgcacactttatttttaatcgacaaagaaagt

SEQ ID NO: 47969 - DNA, 556 bp, Arabidopsis thaliana landsberg
acatgatgttatgttttgcaagggttcgaacccttctcccttcatttcaactcattaaaacatggccaaacttttttctctttgttgccaattaaatattaggaacggttctgattgtaacctctcgtagatcaatctacattctcataaatcttggattttctaaatgttctacataattcaaaaaaaaaacttgaataatatgaatttgtttgtgtttgctcaaacaaaattttataaaaagaaacccgcgctacgcgcgggtactcatctagtatataataaacggaagttggtttagctataatggagctgacttcaacttatagtcttatacaaccaataatacctccttaattctaacaaaattatgtccaaaataaaaaataacattaaagttatttataaaaattttatcaaaaattaaataacatctttaccaaaaaaaacactatatatgtaatgggtcttttttttttcttctctgaaaagacattgtaatgtgccttcatacattcttggagtttattaaattatacattatcttgggagttaa

SEQ ID NO: 47970 - DNA, 1090 bp, Arabidopsis thaliana landsberg
gtctcttcttcctcttctgtactttcttcgcttccatagttttcaatccaagcttttccaatttcctttaccaatcagcctcaggactagagtctaggtctctaggagctcgaaatatcaaaagcgtgaacctttaaacgagcctagtcttcccgagtcgcacgaatcgagtctagacgcgttggaacttatttttgcaaatttggctgtgtaccgcagataaaaagaagttccaagtttttaggttctgtctgcaaaaacatatcgcgaaccaacttaaaaggcttactttgactgtagcctgtgggcctagagttagaagtcgaaaaatctcgcttttagattcgttcaggcatttcgtcgagcaccttctctgcattactctcccctacttctctctattcattctttcaatgataagtcctaactaaactccgagagaacactaaaccctaaacccattttgcactctcaattacagatcatccacatttcgcgctttcgtcaaatctctttagatgttcgtcaaatcacaaagctttctcttttcggtgagtaagctgtttcaccagcatcaacaatggcgaggaatgggtgcaatgacaaaggtgagactgaagtgggtgaagaacaagaacctggatcacgtcattgatactgagaccgatctcaaagcagcttgtatcctcaaagacgccataaagcgatctcccactggtttcctcaccgcaaaatccgtcgccgattggcaaaaactccttggtctcaccgtccctgttctccgcttcttgcgcaggtatcacaatcagagaaaatttcaattgttactggaacaaacggtttagaaagaaatcaattttgtaagaatggtaatgaaagtcttgacatttttgcaggtatccgactctgtttcacgaatttcctcatgctcgttacgcaagcctaccatgtttcaagctaacggacacagcactaatgcttgactcacaagaagagattatttcatataacccccaggctgaacagtggtagactctgttgagtctgatgatgatagatcaaaactgtcttttagatccctacattcttt

SEQ ID NO: 47971 - DNA, 143 bp, Arabidopsis thaliana landsberg
aaatctatattgttgctgatggtacaaaagccctaagctttaaactttcaatttatcaaaagataatcactgttggtgttatgtcatagtagatgtcactcccacaaaatcaagatccctaactacaagctgacgaataccaa

SEQ ID NO: 47972 - DNA, 443 bp, Arabidopsis thaliana landsberg
gtcgactcgatctagagcatcacaattacttttcttaagttactcggtacttagtatgtatttattacttgttctttcttctaactcgagattggttactgtgacattccagattttgctgtagttccaatgattcttggcctctgttttaggctttcataagtagccatccgtgtatatacatacatatatatactgtacacacagttaaaattaagactgttttaaaaaaacaaacccttaataataatcagtcaattaagctgtttaaaatttgtatgaatttatttcagctggttaagccatataaaaatccaactaatgtgtcaacgtttttttttttggttttttgtcgttgatgcaaaatataatatctttggaaatataataaaagaagcaaaacaaaagatggtctactaaaagcagttgaatcaaaagtgaag

SEQ ID NO: 47973 - DNA, 1289 bp, Arabidopsis thaliana landsberg
tctaacccaccaagccaaaagctaaagccaaatcagtaagtagtttgattggttctatatttctcgttgttttcattatctgcattttctatcaactcatacctttaaattattctgcaactcactatggtaagcaactttgtcttttgcagatcatccaagacaccttttgctatctacgcagatgcagtttcagacaccacatcagggaatcaaccagagtcagacaagtcaagaccagagtttggtagttggctcatgcttggaggcagagcagagaggaacaaagaaaacaattctttacctagaaaatgggcatcattcaaggttttccctctaccctcctaaacaaaactatctcacttggctcatactatctctataaattgatcactaactgcatttatatttattgtcacaggttcctcagaaacccattgtgagaactgttgcagcagcatctgcttccacctttgaggtttttgtcgatgaagaagaatgtacagagtaagtttgactaatttttcagaagttttctgaacaaaacatgtttccaccattaacatgattctgaaatgcagagaggaagaagaaaagaagaagaatgatgaaactatctcatcatcatcaaacgttctgccccttaatggcggccgtgagataaaaaagtaagcaaaaaaattcccctaaagattcattcaccaaacaaatattatatcatgacttggtagagatctaacaatggttacttaaaaaaatgcagagaaacagagctgctacgacagaaccctttaagacatttgccacccaacagcttcctacgatgatgatattggactttcttctctacacgatcttatggtttgagatttgagcttttgtctataaagctccttgtgtgtttttgcctatttggatttgtttttgtgatgtactgggatatactatcctactatgtaccatgatgtgcctttcatgttttgaaattaatgtgacttgtcttgtttcaatccttatatgatttgtttctcctaaagtaatcattctacaaaaaaaaactttatatcaatttccactaattaacctagattaccacttatgattaaacttaaggaatcattctaataatgccctaaatgtggccaagtcattggtttatatggcaagtgactttgtgatcccaataatattttggtctagtcgtctaggcaactagcgtacctttgttttagaaaaattctagagatttattgtaaatcaatggatacgtatggatgggtacaaactag

SEQ ID NO: 47974 - DNA, 1339 bp, Arabidopsis thaliana landsberg
ttgatttctcgagggattgagataattcttcagtgactacatgctcaatgttcttcgaactatcagacaacgtttggaatgttctgacagaaccttgaggaccaaactttatcttaatattgggtatcgcaaccattcttacaagaacaaataaaaacctgtaagcaaacataaaaagcgactgaaattagggtttatctacgcgacatcacaagactcgaaattagggtttatacgtcaagaacaaatcgacaaaacaatcagatacccaacaaaattccgactaaataccgactaatttcgttacaaatttctaacgatggaagaagatgaagaaggagtgaattagggtttatcaatttcgcgatcgattaaaaaaaaaacttgaaaaaggtactttgagaaacgaattcaatgaaatatatagcgaaaagagtattattttacagagataaaagcttaccagaggaagaatcaatggaacagtatgagagattttggagtatcgagtgtgagagtcagagtgaggaggaggaggaggaggaagccaaagcggcgatagaagtttcttttttcttattgagggtttgtgtgttaaaaatacttgagataaaacgcgtattttgtggttaaaaacacttatatatttcactattttgaaaatactacttaaaattatctcaaacgatgtcaaaattaaaatatgacaacaaaatctgttgaataaaaagtgatttaataaaaaaagctttctttaatcaattatttccttttttttttaataatatatacacgaatttttttctctttttttctttacaagtagcggtattactcgtactactttattaccgataattttttctcttatcatattatttatactcactaaatcttaaaactttgcgaacctcatacttgaatttctttttcttctctttttcttataaacctgctttttacgtaccataaaccattgatgatttctaaacatcgacaattttaccttcaaccaatttttttttagatcgttaagatctcttttgatttaccaaaaatggggattgagaatgaatgctggtcaaaaaaataactcttttataaaatatcagcaaacaacaactcaatgataggataagcctaagaatactatttataataacatctcgaaaccctaatttttttttaataatatagattatttaattaaaagataatttcattagatatttggataaattcgaaatatcatattttttaggttgccaaaaataagacctactctttatattagattaggtctaccatcaaattctttttgaaatagaaacagggaaat

SEQ ID NO: 47975 - DNA, 827 bp, Arabidopsis thaliana landsberg
tttggccctttttaagtcgacttatctctatctatttttgtcgtcgggatttgttttttaatcacatttttccttaatttcaaagataattaggatattaaaaaaaacaattcgtcttgttcgaattctgattcgttttttttgttaatcaaaatggccatgcatgaccgccttggaatctacaaattcagtataatttagtttaatttggtcttgtctaattttctaaataattttgcgttacattgcggcctgatttgagtctattgtagggtaaacttttatatacattttatgcatgtaattgatgcacatcttgtggcaggtgaccaaacttttcttacaacaattttagatatattaatatttccctccatgcaaaatgacctttttgataatgacaggtaaccaaatttgaatgtggaggatttatcttagggatggcaatgtcacatgcaatgtgcgatgggtatggagaaggtcatatcatgtgtgccttgacggatttggctggcgggaagaagaagccgatggtgacaccgatttgggaaagagaaagactcgtggggaagccggaagatgatcaacctccatttgttcccggcgacgacacggctgcttcgccttacttaccaacggatggttgggtatgtgtgcacataacaagatcctcatgtcctttatttcccacaatatatatttttactctaaaatattatttaaactctattccattcttataaatgtacataggtacctgaaaaaataaatattagagccaatagcataagaagattgaaagaagctacattgaaagagtcgagctt

SEQ ID NO: 47976 - DNA, 566 bp, Arabidopsis thaliana landsberg
  unsure (1)..(566): unsure at all n locations
tttgntagtttttatgacccaggtaaaaaagtgtatgtgttagccaaggtatatatgtttgttnttttgtttatgnnnnnnnnnatgttagattatttgtttttacttccatcttttgttctttttgcttttatcgaatatcttttggatagtataaaaccaaatgcgacagtctcataaatatactgcaccacaacaatcatctaaaatattaagtatttacaaaatttgtacataatttttttccatcaataaatgatttatcctaagagattagtatctcttcttttgtcctttgcccaattattggacaaagagttagtgatctatcttaggtgagtttatgtaaaacctctatatattaataatcgagaaaataataatctctttaaatcaataaatttctcggttccgagtcggaaaaatgtaaaaaaaaatgatacatttggataaaaaaaaccaactataaattttattatatatttagttttgaaaccttgaatttctctacttcgattccaataccgcaggaaaatcaagatcagatatataataaaggtgagttt

SEQ ID NO: 47977 - DNA, 131 bp, Arabidopsis thaliana landsberg
aagcaatatatatatatatatatgtattaccatatgtatacataaaagttgactcttgaattctttattgataaattgatgggggaacaaaagatgtgagcccttataaaaagaaaacagattccttgaac

SEQ ID NO: 47978 - DNA, 1286 bp, Arabidopsis thaliana landsberg
agcaaaaccccgagcagatcaaaattctgaaatcaatacactaacttttttatatctccataaataactaatgttcggggagtggttaaattattacaaacaactctatcactaataatttactacttctttcaatttttttattaaaatataaatttaattatcaacgtctctttaaaacaaaacattatcttagtatacattaagtaaacttttccattcacatacatcaatcctgtccaagttagtaagttccatgcgtcgtccaactaatataatatctattcaggccaataacctttatacactcaattaataatgaattaaagaagacaatcagaagaggatgaaacattcagttgaactgaacatgttttgcttcttcacttgttatggtagttagatcaacatacttatattaatatatatatattaaaagttaagtagtggctaaaatgttaattattctcaattttctttcttataatcgtaaaaagataaagccatacattgataagaaaatgaaaattgtgatcttatgcttttatagtattccaaatttaaggaaaacgatttataatcttcaaatgaacgctagagagttgaccttattatgttctacctatgtttaagtctaagctagtccttttttatacgaacattggtgtaatcataattgtagctaaaagattctccattgcaatttaagcaactccgctttaaatgaaagcagagccataactttataacttgagcataagatagtccatacacaaaaaataacgatggtcgatgagtatgtaatttcacaaatttatacatacctgcatagtggttctctaggattggcgcaaataaaagtgacgagagttaggccgatgggaatgcaaatttggacaacctaacaatagtttcacttaaataagtaaaaatgttaggcttgacttctaaaactcaaagagagttttagaagaatcaattatatctctgtcaaagtggcatgcattgttttttttacttcattaactactcgacaatattctgaccacaattatttgacgtatccaaatacaccaatagactcacctgtatatctaaacgccattaactcaatcgatttaagaatttgtatatgcatgtttctattgcacgctttgcagccaaattcaaatacgatgtttacacttcaaaaataaacttggcatggtactatataactcattttgtccctatccacgacatatataatgacaggagaaaaatattacattatatcttttttttat

SEQ ID NO: 47979 - DNA, 588 bp, Arabidopsis thaliana landsberg
caatagagaagattatatagacatatgacatgcatatgcttcaattgttcgtgtgcgtttacgttgatttgattagtatattcaaatgaatccaaaattttaaaatctttaaactagtttaattgttattgtagaaataagttaactaaaatggaaggattatacgttcactaatctacaaaaatttgggttttctttcaaaatatgactttaaagacatataaatgcaggaattgcatttgagtcaatcgagatcgtcatttttttttctgtcgacaattaaggccattatacgcaaagaaataagtacataaaataagtacataaaattatatcttcttgactcttgatattgaatttcttgagatctttcgtattagaatctgtacttacaggccgatactgatcactttggctcgatcaaaaccgctgaaacgccagctgtcacggcggcagctgaggccgagatagagccacagaagaagaggacaacacttgcggagcttttcatggaggaccacgcaaaggttatgacacgtggcattgcaaaaaccaaaaatacccctaatcttgacggtgaggcggtta

SEQ ID NO: 47980 - DNA, 574 bp, Arabidopsis thaliana landsberg
tgtaaatgtttttaaacctaaaaaaaatcagctgaagcagaaaggccatgcagatccaagtgaacttgagttatttaatgtcaaaatggatgataaaccaatcaactgaataccaagtgctagatactactgactatgcaggtagaaactgacacccaaacagggacataccgttctttgctgttcaggattagcatttgcaagggcagaagtcagagtcccaatttgggcagccggggataaggcagcatccctcacagggaagccgcccatatcgtatgcctgcatcatacctccagcaacccctggcatcgccggagcttcaggcatgttgcgaccagttgggtaacggtacatccgtcctcttggaacaatctgagaatcatgacaagatacatcacttcacttcccccatggaacaaaagcccaaactctaccaatcaaaggacagaacaactggccaacaatgtaagtgaatcacatgtcctaccatgttaaccaatttccactagaagtagcaccctaccaccaacgtcagtatacagtggaatttgatgaaaatactgctgctgaa

SEQ ID NO: 47981 - DNA, 277 bp, Arabidopsis thaliana landsberg
gtactatgttaataacgaaccttcactgaggcagtcgactgcgtcctcggcggcgaccttgcaagcggccacggcgccacgccgacgaagctgcggacagcacggatggccacaacgacaggcttgggcaggcctcccccagctccgctttcgtaactgcatataatacaacaattcaagcgcttaaaaagattcgtctaataatttagatcttatttattgaaatgcattccacgatcggtcgatatcgattgatccacggcgcgtacgtctgatg

SEQ ID NO: 47982 - DNA, 327 bp, Arabidopsis thaliana landsberg
tatactatcctttaaatttaaccaaattctttttgtgtaattcagaattttctttttacagttgtagctattcatgaattacaaatattttcaatcatttggttacgtgatggactaatatataaaccaatcaaccatgtgcttgtcgtcatttcttttgtctattaattgtgtctattaacacatatataataagtatgtgtttattctattgttaacacaacgtttatcatgcaatgcaagtcttagtctacgtttagtttattaacggaagatataatagatgattactattagaaaagaggatacgaccgacgaattttgaat

SEQ ID NO: 47983 - DNA, 550 bp, Arabidopsis thaliana landsberg
  unsure (1)..(550): unsure at all n locations
tgaaagcatctgcttcttacatgataacaaagatagaaagctccattttttgaccaagatctgttcatgtcttttacctcgaggagagtctctggtgtaaatcttctgccaatgcttgcctcaaactctccccgtaatagtaaaactgcctctcactctccaaaactcttgcaggcggtccagcttcatctggatccttccaaatctccggttcaggttctctagcaatctgacaaagattatgcaacacacaacaagccacaatagtctgaggagcatggttcaaccaacattcaaactctgannnnnnnnnnnnnnnnnnnnnnnnnnnnnnnnnnnttccaccaccactgaccttcctttcatcaacattccatcgaatagattctccggtggcgtaccagagccatttggtgaaaatggagtcatcaggaatgagagaagaggataacaccaatctccaacaatgtatggtctcacatggtgacctctaatattgatactttctccaaacaatgtctcctgaagtaagctcttatatagaagacta

SEQ ID NO: 47984 - DNA, 399 bp, Arabidopsis thaliana landsberg
agagagtatccagaaaaatccgacaggcctggagagttgtataataagatgataatccacagtcgtgttcttccaaatcatggaagacagatattaagaacatccctttctcttttcatttggctgtctccattttttccaggaaaaagattcagattccattcacaatgtgccacaaagcaaatcataaaaacccattcctaagtcacaaaacttacagtaacagagagctattaatatttcaaattcggaaaaacttgcttctcaagattccataatccatatcaatagaagtcatacatttcattttcaaaaggtgttacagaacaaaccataaacccattcctaagttacaaaactgacagttgggatggcttggcaacaaagtcaggtttttaa

SEQ ID NO: 47985 - DNA, 646 bp, Arabidopsis thaliana landsberg
  unsure (1)..(646): unsure at all n locations
tcgtacgaagttgtacgactccctataaataggtgaacagtgtcttgcataaagtacctttttggtaggcgatagagttgctctgtaattctctttccatggcatccctattgtaattctttctgcaatcttcgaatgtatacttgtaaagttattttaagttaagaggaatatatcaggaagacatcttgatcaagtcattgtatttaaactcttttgtgttctttgtacgttcatttattcatttaacaattaccttcgttatcgaaggggttacctcgaagagctaactcctctgtgaccaagattaactatctctttaatattgtgttgccttattttttattgtgtatagcgattgaaaacaagtgaacaccatatatctctatgtatgtatatatgtagagagagagagggtgaggatattaggagccctgtacttctaataggatacaggaagcccagccacccctcacacggctacaccaccggaccagcctagctgctagcccccctcccgcatgcatccatttcttgcatgacgcattttgttccatttgcatggcgagaaattaggaagtgtatcattaactgttcatgcatgaaacaanaaaataatttgaatgcttattccgtcataatatag

SEQ ID NO: 47986 - DNA, 578 bp, Arabidopsis thaliana landsberg
aaaaggcttaaccatattatttatgcaaattttagcggaccaaaaacaggttagagttaattcagaactgagctaatttagaatcaggtcgagttggccttaaaagttaaaacccttttgaacatccttaactattccataatcaatttgctattatactatgtcaattattctttctacaaggagagcgatctagaagaaatccacattatccatgtaatgggttttacatctaataatgattatttgaagtacatttggttattgaatatttctttgaaatagtccatacttttagtgcacaagatataatctgtgatatcgcataattcgacgaagcatttacattttaatacatttgaaggctatacgaggttctgtcgtatggctaacgtatatcagattttagaatacatgtgatcctttaataaatatgcatattttgtaaccctcttttatttattttttatttatgctctattactttccacttaagatgggtttttaatttgggtaaactttctacttaagaagaataaagtagaaaacaaaaagtaaacaaaagaaagtaaaaaacg

SEQ ID NO: 47987 - DNA, 928 bp, Arabidopsis thaliana landsberg
cccctcttcttttctttgctttcattttttttcagattcatgttccatcatctcaacattagaaccctatccttctttcacattacgtttcatcaccaagaaaaaaaacggaaaaaaatcatttattacgtcttccacatttcttgattttgtgttggtgtacaaaaatggaagagatgaaaaaggtttgatacgattcgaatattcttatgctactcctagcttccagatattttcttctttttgattttgtttcatttactggtgatttgattttattattgaggacaaggtaacgtgtaaaaagtgaaattttttgtgggtcttaattttttttcttttgattcgataatcttttgagaaacaattcgaaagatcctagattttgtatagtcgcagctgtttcttgtgacattgtttggttcttttgtttatatgttaagatttgtctttttccttgcttctatctctctgtttcggtgtaaatctacttgtgcgtcatttgtctggttatcgaatattctgccacaaagaatttttgaaaactcaaattttttattttgttttcagaacatgattggtgaggcaattgctaaaattaaatagtacatatgtgttttatgttgattttttttaattataatgtggatatttagtctgattcttatttgtttgtgtttttgttttttgtagacgcaataagctatcttcagcctaaactttctggaaattttcatcattagcaacctgaaattatcttaatttgtatataagcaaagctataaatattagtaaagatggaggagatgtcacctgataatatacatggagtcgggttagctgcgtcttagagtacactcatacgttctagcttcatcatcaagaaagagggtctatagaaggccggtgttagcggccccagaccccc

SEQ ID NO: 47988 - DNA, 708 bp, Arabidopsis thaliana landsberg
atctctcggcaaaactctgttgtccaagatgtaagcttttcagctatcaatcatgatttcttgcctagcaagcaagcaaccctttttagggtttctccttaattatcatttatttgttgtctgatcatccttaatgcttgtttttcagatatgggtttatggagacagcttcaaatctatgcttgtcgcggtggttgttcccaacccagaaaccgtcaacaggtgggctaaagatctcggttttactaaaccattcgtagaactctgttctttcccggagcttaaagaacacatcatttcagaactgaagtccacggcagaaaagaacaaggtttgtttgactttgtctgaatcaaaattcttcaattttattctaaaataaatactaaaagaaatattcatggatgtgagaaatatagctaagaaagtttgagtacatcaaagcggtggcagtggagacaaaacctttcgacgtagagagagacttagtgactgcgacgctcaagaatcggaggaacaatcttctcaaatattatcaggtttaattttatagattagtgtttttattatttcctttatagatagtaaatgttgaatttagatatttgcagccattctatccgctaacgttccattatacaggtgcaaatcgacgaaatgtaccgcaaattggcctcaaagaaaatctgaaagtattgcgatgatgtg

SEQ ID NO: 47989 - DNA, 2121 bp, Arabidopsis thaliana landsberg
  unsure (1)..(2121): unsure at all n locations
acaatatactttctgaaaaaataaaatttagaagaaaagaaaagaaaatggatttagggttttaggtgaaatataaatacttcatatgcttactgacagaagcaatccctcatgctctcttcgacacacccactctctatttacttccatccatcaatctcaatctattttttcttgactttttttacttttgctctttttatactatccaaagtttgtgatcatataaataattttctttgctaaatattctggttatatagttgtttacatcaaattacactgaatctctctgctacaaccttttcgattacttaacatacaatacaaagaaggtgactatacaaactataagaattttttaatttacttttcgtagaatattcaagagatgtgactggaccaagtatatattgaaggacactagaaaattgctagaaaaaaaatatagatgactataattatattgtaacgaactaacagaaaattaatgttttaataggaactccataagatatgtaaaggagaagacaagactctggttttcgggtgtttggtttgcgaaaccgacacgtgaagttaattcaggtaacattagtccttaatgtgtaagtatgtgaataaataaaaataaatgggtatcttgttattcataattaactaactaattaatgagaccacttaaccaatcacaaattaaattaatcttctgaaagttggcttggttttgctccaaattttaagggtatgttgccatttgctcaagctaatatatataggcactttaaacgtacatattctttactaattgttttggttaaaacttaataactattatgaatcacatggttttggtgctttatgcttgttactaatgcaagtaaagataataatacatttcttggaattagtttaactttcacaagtttacaatcaaattttttaaaaggtttaaataaaattacacatcctactgaatcatgtttctgaacgattttatacaatacatgaactagtgagacaatgagttcttcagtggcgttgtggcgtgtggaattcccaaccatcagagcatccaagctcacatccatcgaagcacaacgtgagccacggcctctgtccacaaatcatagctgtaaccgtctcttttcgacccgcgaatcgtgtttgtcccattccgagccaatgcagacccgcaaaagacggcttgcttaaccatctcagtgctccagtagttaagctcacacagttatggacattgagcttcctcaattgtttgcttcctccctctgcttgtctttcccatgtagccagggactctatcgaagaatctgttacgtgaaagcaactcctgatactcagctctgttaaagccttgcaacagtgtgtgattgtgtggatggctctgtctgagattcctggcatatgaccgagatcaagtgttgacaatgttttgctgattgttccttcattgttcaacagataggatattcctctgtcactgactctcctacagccgcggagagacagttgcgtgatgggaacatctgacttaccaagtgcaagcatgccactatcggttacatcagctccagcgagattcagagaagttaactttctgagggctgaaacagagttgaggcaagaatctgatatacttttgcagctgcccaagtcgagcacctcaagattgccacacaaccccagtttcttcacagcttcacttgttatgagagggcacgtcgagagtctgacctcttgaagagaacaggaagaccctgtgacatcatgaaatgccaaatcagacaacaggaaggcacctcgaacttcaaactttttcaagttccgacatgagtgaaggagcgaagcaaaaccagcgtcgctgacttttgggaacccaccgagtctcacagactctaaacccttgcaagcctcggagagaagaaatatacccatatcgtttattctcttgaatgatatcttgcggttgtaacaagttcgaaccaaagagaggcgtgtgagttgctgacaaanaccgagagcctgaagcccagtgtaagtcaagtcattgtcgggaaaatggctctttttcagggacgatcttcaagggtccagttttga

SEQ ID NO: 47990 - DNA, 616 bp, Arabidopsis thaliana landsberg
caataatcttttaccaagtaaagatctagagaccaagaaaccaacaatgtgttttctgaccaacaatgaatttgtcatatttgatatttcaaccacaattcacgttccctcatcagttatgcagtgtcattgatgtgtaaattcagatgatatgtatattgcaccaatattgttttggctgaacttacatattcgatgaaaggaacatgaattgtagctgaacaatgagaaacacgtcgttggtcccatcccattgacttattttgtgtgcatgtttgtattagtaatcgttttgtgggttaagcaaccatcctttcttaaaatattattccttttaggagcttggcaatttcaacatcaggttttaaaatgtgatctaataaccacacatcgatataatcatctatatacattagtaatattataaaatcgcatgaattcaactgtatgaaattacaatgaaccaatcacagattggcagacaaaagtcccaacaaaaatcccatcaaatacaaaaattgaaacaaaacaaaaattatataataggtaaattgtgtataataataacagtaatcaatcatatggttacataagcaaaaaaacaaatcgaccaagc

SEQ ID NO: 47991 - DNA, 810 bp, Arabidopsis thaliana landsberg
  unsure (1)..(810): unsure at all n locations
aatgggagatttgaaacgtaatatgtgtttgtaaaattaatcttttgcttctagaatggaaatcagacctctctaaatagatacattccctaaccagagtttttaaattgatattatgtatagtcgtgtgatctaaaagacccactataacttactttagacaatgataaaacaagtgaactattttgtgcgatttgtatgtttttggtatcaagtttaaaaaaaaaaacttaatcaccccaacaacaatcgtgatatataggtccatcctgaagatctataacctaatccaccctaaaaacaaacttgtagactttatttgcgggaattagacatcctaatgaaaaaatttggataagtttggtacggagtcattaccaccantcctaatgtcagggattagggacaaagaagattttgtacttggtctttgggaggctaaattggtcaacgttttggttatagtcaacgtggatagactgaaaaagaaaagagtgataatattaggtgacagaaatatcttaaatctttttcttatttttcattttgaatagtgtggaacatctcaaaaatcaagtccaactgtatataattaaaaatttgcccctacttattttattaaattacttaaaaactttagctgtatcccaaactccaagacttttgttaggaaaggagtgtaaatttttgaattttctaattaagccattattacaatattttagaattacacttttctcgtttctctctccttttttttttttgattttttccttttaataaaacaaccttttattttatttctataaa

SEQ ID NO: 47992 - DNA, 725 bp, Arabidopsis thaliana landsberg
ttggacctatgcacccttcggggtttgttcacgataaaccttttgattaatttaaaataccacgtttctatcaaattggtattttagtataccattttactgactttgttccatcccaaatctttatcaaatcttgaacgcttaattagtctttagtattctgctgtcactttgcttcagaaaacatattagtacacacttgactttttgaaatattaatgctttcatacgtacgttgatgcaaagataacttaaaagtatttaaccgtgatttgtagttaactgatttaaaaaggtacatctttgtgtttggtttatctgtctcgactcccgagtctcttctttttcttaaacaagtttttattctttgaccaaacaaatgcatgtaccaaaacaccaaaccaaaacgtaatggttcaattattaatttttttttttcatgcaggttttaatttaataacgagaaatgaatagatgattcggtatcataaaaaaatgatgactaataatcaatgtaaatttaattaatcctcttaataattaattaaattattataaataatcaactatgataattgtaactaagaagagccagcgcaacatattacatctgtatgtaaacccttaattaaggcttaatctgaatcacaacaacacaatgctttaaacgaaaacaaaaatcacaagaaccaaaatataaaaggtaattagcaaatcacattttg

SEQ ID NO: 47993 - DNA, 722 bp, Arabidopsis thaliana landsberg
ttgaggatgataatgatggtttcgactttactggactcgaatccgatgagggggagatggctgagcatagcctgatccgggctggtccacgtgttgattccttcgacgtggaaccgcttgaagttcctggtgctccgagaaatgattacgaggtgattgatagtttcgtgtattagtgcatttcatatcaacatatatagtgatggactagcatgatgtgtgtcttcttaggttcttaaacagtacagtcactttttagctgtttttgccagagctcggatatcaactagaaagggccactgaatagggaagtaccataagagatcaagtcaaaattagtttagcaatatgtggaaattatggattaggaacaggaatcaggaatgctttgtgactagctagtgtgcgattcttccaagttgcagtgatggagatgggctcataaatctattttgtttgggatgttgttttgatctgttttccttaatgatggttgtgtcctgggatggaaacctgcaagggatgcacggtctgagagcagtggatatttgttttctgattctaaagcgtaactacggctactactttttgcaagttctgcagataaataatgatggatgatcttagatctaagatctatgactcgtatctgggagccagtactttttcttgcataattaaccaaaactttttttttgtgtatatactgtgctaggacttga

SEQ ID NO: 47994 - DNA, 945 bp, Arabidopsis thaliana landsberg
atctctttcttcctgactttaagcttatgaacttttgtggattgttttcgctcatgtcaaccgttccagcgctttgggaaatgagtcacatgaccctagaactggtatgactctaatgggaacatatatgtctaatacataattgagtaagcatgatatccctttagatcttaatcgacttcgacctgcattcgagaaacggctagtggcattgagttggtgagaccaaaaaagattttgaaatgctaaggattttttttctctcttaacagaaactcactatttaagacccaccttggacataatttattcttgagttttctatagcaaaaaaaatccaaacgagttgattttgtttgtcgaataaaccacacatatatatatatatatatatcttaaaaattcgtccaaaaacattttttatctatctaaaacatatatgacattgataaaaatcagaattttaaattattttattgagaaataaaaaatcttcccttttttatgttatcactgatactaatacaaatcattatttaattagtcaacatgaatagctttgtatatcatcatgaattagtttccgaaacatctaagtactactacgctagatatatcatatatctatcatttattggttcatttgggtcagcattttggaatcacacgcttcaaatctttttaatattcatgaccaaaaaaatttatcatatgataatgataatgcaatctcaatgcgtgcatatgttgcggcgcgcatgagagccgccccaacttgtagatgggaaaggaacgccgccaattacaaattcaatgtttaagcaagagacttaggtttctctatatagcttaatatttacatatttatcagatcaggccatatatatctaactttataaaatcatcttaagttctaagttagcgcaaacctatttctatttcaaa

SEQ ID NO: 47995 - DNA, 523 bp, Arabidopsis thaliana landsberg
  unsure (1)..(523): unsure at all n locations
caccggcactcgattccaagtctgacttttatttgataattgatatgtgtgtgtgtgcctatatataaaacatagtagaagagttcagcatagagcatctatctcctttcctggtagattgagaaaagtgaatagggacacgnnnnnnnnnnnnnnnnnnnnnnnnnnnnnnnnnnctttatacatatgcagggaccttaacgtacattttgagagggaatgatttagactttctaaacctacttggcctctaatatgtgtaaatgtgcactaaagttttacaaaggaaaactttagacctctaccataaaagagttatgcagcgtagtttccaatcatatatatatatatatatatacactagcataacaagttaaattacaaatgtaagcatgtaacctacaaaagcatcaatgagatagaaatgatgtagacccacatcgaggacgacgattttaatcgaggtatcgagaagctcatggttttcctaatcttcattggacccctagcaaggatgccatgc

SEQ ID NO: 47996 - DNA, 693 bp, Arabidopsis thaliana landsberg
taaattacaaattacaaatatataatgaaccaaaaactttcattttaatatattaaaaaaaaaattttaatccaagttataaggatagtcttgtcgacatagtgcaaactgcaaaccaatcacaactcacaagatccacaacacgattgataatagtctttacatataatcccaaaagtattatgtatcatcattataaaccaagtggtataaaactaataactttatttttatagatcgatatcgaaagttccgagaggatacattttaaagaaatggtttggtaatgcgagcagtataattacaaacatacataacggtaattccctgaccaggaaaacgagaccgacaaactttgctggtgaaaaaacaatatcacaagagacatacaaataaaaatatgataaatcgtggtggatttttaaaaaagatttcgtggtggttataatgacacctaaatgattatgacaaagaaaaagcttaactgaaattgaaatgaaggcagcaaaattttgccgacgtatagtatgttctcaagttatagtagtagctacacgaagttgctataaatgacattaaacttaaatcaggtttaattgctcggtttggtccggtttttattggtccacatatgaactcaatcggtggtaataggcaaacaattcaaaagataataggttctagataccaaga

SEQ ID NO: 47997 - DNA, 1121 bp, Arabidopsis thaliana landsberg
tgactttttattatgtatagacacaaatacaagaaaagaaaggtatttggtaaagaacgataatgaaacatgtgttggagagaggagatgagttggcttatggctgtcttgtgagatattattatgaattgagacccaattgcaacacaaagcttcaagctttttgactttttctatgtgatcattgatcatattcaatcggtgacttatcttttttattccccttcaaacttgtaaattagctgtataaactctaaacaaaacagtaataccatttcaaccacttaaacaagtcttaggtctaaatatgataatacaatagagtggattatttgcttttcttttttaacaaagaacgcacttcacttcataataatgttgaattgttgaaatgataagagggccggcaataacacactagaagaaccacctactactcgtctcccattcatatacccttagcttaccggtcttccatgtttagaccgtttaagaaagctcatgttatacaaatacatggacactaattcttaaaaaaggcccttcaatataagtgaaatcactactaattgcaaaaaagtcttacaaaggtttttgataataattaattggtattttttttttgaaaaatatggtctgcaattacaagtaacttgagaacagagtgcataatagcgaattgactaagcttagtcagaaaacttgtgtagactccttatttcttctcttctgttaaaggagctgtgatattaaaaaaccaggttttaaattgcaatcgtgagggaaaagttacctgtcgattattactaaataaccagttagttcgtaccttgagcggctgctgactcctcctgtggtggcctcattgccgggaagaaaagaacctcctgtaacaacatattccatatcatgagtgcagtcaaaacgaatagattattcactgaagtgtaaatttggaggtaagagagtgaccttgatgttcagtgagtcggtcaaaagcatagagagtctgtctattcctaatccccagccacctgtaggagccaacccatattctaaagcattacaaaatgtttcatctaaagccatcgcttcatcgtctccagactgtcgatccttga

SEQ ID NO: 47998 - DNA, 609 bp, Arabidopsis thaliana landsberg
ttaacattggagccatcatcatcggagtggtttgatctatgtctgattgtgaaaatgacagtgttgattatagcgattaagatgataacgccgatgaacacactacaacaacaacatcttgaccttggtttcgccaccattttgttctaaaaagaaaaacagagctagatagatctcaaaatgtcaatggagatacattttagagatggcaaaagttttggctagatctagagattcgagaatgacgacgattcaagagagggaagtaacagattttgtctaaataaggaaattgtgattaggacaccgacactgatcaatcaaaccaacgcgggacgagatctgtttcttttatggtgttttcgtaattacggaagtaaccttgcctgggaaggaagcaatgtggagagtacaaggtccctattggtagttgtggtgatgtttaatccttttttgggtaatacttacctgtaaaattcattacgaatcattcattagtcaactccaactaccacgtcttttatttaattgttatgggaaacagatatttacttcctataaatataccaatattcagattataaactagatactaggattgtgatagtc

SEQ ID NO: 47999 - DNA, 995 bp, Arabidopsis thaliana landsberg
gcatgagacatactcacctgaccacaggaatccaaactctgttcttcgaccacctactcaactgcattaagaattggcccgacctgcaaaggggaaagcgtttcagtcagaacgattttgaaaaaatctcttacttcccacgcgtgtgatcacaaaccaactaagatgtacctgagtttcgtgacattgctcatcaaacttttcctgtcacaatgatcaaaacataactaacagtttttaattcatcacaccatgaatagccaaaaaatcccaaaaattcatgttttaatataaaaacaacaacttgagaaaacttcacagcaacgggttactacctctattgtctgatgcaaattcacaacaacctagaaacatgtcagataaagaaagatacatgagaaaacacaaaacaaatgaaaccaatggatcgaaagagaatgataaagagagatacatacccgagtatacaactgaaaaagcagttcttgctcagccccactgaatttcgagaaaatgtcaacaaaatcctacatagtgatggttcacataaaaacggttactattagttagttagtacactacacataaacccgaaacaaaatcaacaagacactgctatagatagatagacagttctcaaaccagaaacaaaatcaaaaaccaaattcaattctaattaactcaggatccaatcatcgagaacacttaaaccctaaaacttcaattttacctaaatcagacagaacaaaacccaaattgcgatttaaaaaaaaaaaaaaaacaatggaaaatgattatgacattgaagcatatacctgtttggagcaagcagtgagaagatgtcgaagagtggatttgaatgatttcttcagatgggttcgtcttgaacccgcaatatccgtttcatgacccggtttctccatcttaacccgaatgataacttttttttgttggtttaaagattccggaagaagaagttgctaactggttaaaag

SEQ ID NO: 48000 - DNA, 671 bp, Arabidopsis thaliana landsberg
  unsure (1)..(671): unsure at all n locations
caagaatagttttatgtttaatagacaaaatggacatggcgtccaaatcatgttaacaattttgacaaatcgcatatcttccaaactgcatcattcttccagatcagtgatcgaaacaaatgttagtttggtcaatgatatcatcaatcacatgtaatttgagatatcattatacatccatcttaagctttaaaaactgttatgctgaactcgcgccttgtttttatatttttccacatgattgacgattaacaagataatatttcttttgggtataatttatagttatttagaattttttttactaacaccgaaactagaagaaaaacatgcatacactagaaagatgttgcgaattcctctatttagatgcttaaaaaggaattcgcacatcttatttgttaaacaaaaacatcaacttagaaaagctttataatatgccatcataagtttatgaaattatgaatgatcgtttgatggttaagagcaaattaggttaatagatatgattttgcgcctaaactgtatgccttttaaggtttttttaaaaacagctgtcaaacaataaattcatttggcaattgaaacaaaagtcactggtagagatacctcaaaatgtcnccaagtaaagtaaagtcttgcaaattactatttaccataaggtattagag

SEQ ID NO: 48001 - DNA, 585 bp, Arabidopsis thaliana landsberg
  unsure (1)..(585): unsure at all n locations
caacaattcataatcaacactaattggaaaaaaaatctgaccattcaaacaaagctccggcggttaggaatgccagtccaaaaagggggcagaagcagagagataccattctcctgttgaaatgagcctgcacggcctcctgcggcacgtcggcgaaatagtgcttcacccagctcactgccgtcacgcgtcgcggcgccaccttccttcctgggagagggtcctgccctgcggggaacggcggcagtgagagcaactgccgcggcctcggccggggcttgggcgcccccaagcgcgcgacgttgttggcgtcgacgcgaaccaccaccgggtcggcaggcgcaggcgcaggcggtgccagccgggacagccgccgcagcgccgtcggccaccgccacagccccggacggcgtcggcgcggcacagcatcccgcaggcnngtaggcactagtcgtccgtattgtttccagtcgacccgcgtgccgccgttttcaggtttggttggaggacttcaccttctctccgtttcgactggtgggccgggtctaccggagcatctgcggtgcacgtttataccggtagaga

SEQ ID NO: 48002 - DNA, 852 bp, Arabidopsis thaliana landsberg
tattaagtatggttttaacatgcggttgtttctttctatttcttctcttcttaggaagtgatgatttaagctctagactctagtatagactagactttgattatataggcggtgaatttttttcttcattgcaaaaaaaaaaaaaggaacaagaagaatttggttagccataggcgaatacaatgctgtggaatcatcaatgtccgaaggtaatataattccatctcatactaaaacaccaaggccttcaatttaattccaagcaactcttgcattcaggggaggctcacgattccagcaacgtttatccaaaatgcgtgcctcatcactatcctaaactaccctcgctcgtcttcttccattcttcatatgcttctttgatatatatccagtaatgagcacagcacatggggtaagtagaaacctgcaagacatataggagggagaagtcagatgattcttctgcaaacaaacacgcatagcaccatcaataggtagagaatccgaattttgattaaggatcaactagctagcttcaccctttccaaatccaaacaaacactgacttttcacggtcttgagttcacattaaaagttcggaaccttataaatcttaccagtcaaaactatcttcaaactatttcatagttatgagagcctgcagattcttttggatcgcccacccttgtggataagggacatccagggcatccaagtgaagatgccagttcagtatactcgagcaagctggtggaacaccttgcatctcgctttcatcagccaccacctgctctataaatgatgtctcctgcttggcaacacacgatgtcatgtataagaaaagggttgact

SEQ ID NO: 48003 - DNA, 1134 bp, Arabidopsis thaliana landsberg
aagatgtaaaagcttgtgtcttgttcattaccaaattaagattctaacaaagaaataggccaaacatacgaggcctcaggtatgagcctaacaaacacatccatgcctccatctcacccacataatttgatatgaaggtttcattatacctttattaataaaaatacttaattcattaacatgttcacaaatcatgtcattggtgatatgtgcaagcaaataatcttatcagttatcacatttggtttcttaacaccagttatggaaggttgttataagttacacaatgtcttataattagggtgatggcccatcactgatgggtgatgttttatctatatataaaaaaatcttatattaatttggctatatacaaacattgaaccagattcagagggttgctaggcgtatgatatgtctgaagtgattaattcgactttaagaaatttgtagcctaatgcaaaaatactttgtcggatttagaaggcctaacaattaggaacaacacctaatgcaagacgttccaaccacctgattatttatttaagttaaatgtcactaaatttctaaactgctccgcaagttttagggttcacacagagttgacactttttgcattgcattttgggccttcatagagagatgttttggtttagtgaatttccaatagtgaccaggctcagctgaggagtaattactaattagctttgttttccgataaaacttgtgaagaaatgaaaatgatatttaacaaagttgataagtatatgtctaagaaaatcaccaaagcttgagacaattgatctcatcctaaaaatatctcacattatgcaacaaaatgtctccacatgttatatttacaaaatcatgagtaacttggagacgacattgcaaattaacatcattgacatcagtagatactccatcgcaaattgtcaaaaatcacagctccatattttcaggcctaaaattaaccatcgaccatacattccgtattcttaatatcgatattgattttaaatgaaaggaactcatcgcttaagacaaaaaaaaaacaaaaaaaaaaacaagaaagaaattcgaaagtatggtttcctcgatcagaacaagtattaaatttgcattaaaaatggt

SEQ ID NO: 48004 - DNA, 949 bp, Arabidopsis thaliana landsberg
acactggccaaacaagccttattccaagccttgtcacttgaccaaccatcttcattgatccctcccgatcctgactcaccaaaacctcatcatcattctaccaccacttatgcctcaagcacagataacatctctaaattactccagaactggacaagctcatcatcgtcaaagcctaacactgtatcaggctccaacaaccggagctcaagccccggtgaaggaggactttttgatcatcactctttgttctcatcgaattcagaatctggatcagttgatgagaagctgaatttgatgtccgagacaagcatgttcaaaggtgagagcaagccagacatagacatggaagctacacctactactactactactgatgatcaaggctcgttgtcattgatcgagaaatggttgtttgatgatcaaggcttggttcagtgtgatgatagtcaagaagatctcatcgacgtgtctttagaggagttaaaataatgataacaacagtcaagatttgttctataagaaaataaaacgtatagaacaacgataaagctagctaggtttattaatttttctttcttttgtcttttctctatgatctttagttacattttattttactgtgtggcttgcttgtggtcaagtcgatgaagatcaaactgtgatatactatttatatgtaagtactataaagttaagagtagttgaataaactaaagtttttcggttgggtcaaaaacaaagaggacaaaaacaactaatttcttgcgttttgttgaatcatgtatctttcagaattaaatttgtaacgtagcaaattttattaatgatgacatggcgatatcactggtcaaattcatccgatgattaattactttacatgaactgccgaagatctttctctcctgtcattgaccaaggtatatgatgtatggatttattatattta

SEQ ID NO: 48005 - DNA, 209 bp, Arabidopsis thaliana landsberg
gaagggcaggttccgcactatccactgataattaatgtgtggccttcagtcctttttttctaccgggtcttcgataaagggcggttctatatcttccttttttttcgacattatcttatttataatcttctcaatattttatttcttctttctctgcaatcctcaacttggcgctccgcgacctcggattgtccctgatttctgtggcc

SEQ ID NO: 48006 - DNA, 584 bp, Arabidopsis thaliana landsberg
  unsure (1)..(584): unsure at all n locations
ttatataattcagaggtgcactaaatgttgtgatgggcaatgctcctgagataggtgatgcattactgcagagtacacaggtctgtttcctcccatcttgtcttgcatctgtacttttctttgtctttataatatgtcaagtaggaatactagtggttgacactataatataactnnnnnnnnnnnnnnnnnnnnnnnnnnnnnnnnnnnnnnnnnnnnnnnnnnnnnnnnnnnnnnnnnnnnnnnnnnnnnnnnnnnnnnngtgtagtgaagagttccttaacgaaagtttcttatgcaatgtttatagctctcttcctgtaaaaaacatgattatcacacattgtgtaacttttattcatgaaatcatactatgactatccttgtgtttaattaacctgtaagaaatctgtgcagagagtttatacaaacagtgataatcatccaattaccaccaggtttttttccagactagccctggttaccctttctttttttggggttgttttaggtcctgtatccgttgagtgtctgttactgtttaatgtacttgtacaatcatcaaatcttggaaaaagggataa

SEQ ID NO: 48007 - DNA, 519 bp, Arabidopsis thaliana landsberg
aaagtttatgccattcctgaccaaaaccgcaagccacaggttaccaaactcagtccgagtcaccttgaggacatgcaacattatccctccaagccaagatgaggtcatgaggcctgcattgtcaattgacattagcaatgcaaagaacgtcccttcaattccgtgaggacaaagctttgaagtgaggacaagcagcggcatccatttcaagcgtccgatcatctgagaaactatctcgtccactactatgaagagataatccggtaaaccaaattttaagttgagacgtaacacaagaatgaggtcaagcattcccgatagagcaaagagaagttgagtccacaaacaaagtccgcggaacggatgatcctttaggactagttggtataacgttgctgctagaatcgatccgattgaaccaatggagagaatgaaaccaactgtttcctaaaacagaccaggtaggttctctcagcatattacttattttggggtgaagtttgaaaatagaaactattt

SEQ ID NO: 48008 - DNA, 1258 bp, Arabidopsis thaliana landsberg
gtccttttatgtgtaattttcttacaatttctttgaaaaaagaggccaataatatataaaatgggtctgagcccaatatgcgtttctgaagtctgcaaagatattctattgtggacaactaagctacaagacaatagtttcatacatgttaaacgagatctcaatttagcagcacatttactagccaaaacaatttccacaaatgttcagtatccctcaagttgtttttttattccacctaattgattaacagatactttacatggagactatgtaatttcacaatcaaaatatatagctttgtaggaacaaaaaacatatatattgggatttagaaaaatataagaaagtcataagtcagcatcagaaaaatgaatatcatatagtgagtgacactgaactcacttatttctatatttgccctttcaatctttcaatttttctttttctttttcttaaaactgtgaagtatacactatcaatagatataagaaaacttattagtttctaatattaatcttgatacattaattaaaaggtactcccaaagtataaagtggaagctgacttggtttaagtggacttgttgtatccaccaatatcacttgataatcaacattcaaccctaattttgaagggggaaaaaacataaaatttattcttaattagtgaaatccacatattacaaggaaacttggctcattgagtgcttcacagctaaaaggctggatcgaaccagtgatgtctcagtttaaatgaatctgtctatctcactaagtaactatgcatgcaaataaaaaagagttgtctttaaacatctaaaatgaagttggatctgtgcggctaatgttgttcgatgttggaatattgactttgttatgagccactaatttattattttgactcgtggattcggattaaacattgtataaactcaatttcctaagctaatattagtattatacctttttactctgctaaaaaagttaatgaacaaactattttctcaataaattcaaaatatatattataatttcactaatattcgatgaacaaagattaataatatatatataaagaattaaggtagtttatttcactgtaattacttcatgagtcgatgtaatttgccaattctatctaggatgatataaatgctttgagctatttgagtcaaatgatcaactcatatgtatttctttctatatgtataacctgattatgaagaataatctccacatatttttaccaaaaaaaa

SEQ ID NO: 48009 - DNA, 313 bp, Arabidopsis thaliana landsberg
atcagtgagcctaggtctgttgcgtcggccatgacggcccaatggtagcgttcttgcaatgttgccgaggaacgttcgcatgtgcgtggatatgctgtactgtttcagtgatcgtgtctctgagaagagtttattacagctcttagtatggcaaggatgcattctatatgtgctcggtgccccatcgagaccaggcaattccgatgtggtgcctagtctcatgatctagttcagtgtgtcaagtctttatgactatgtgccagactgtacagtttggtgttgttaagctgtatggcatacagattctgccaat

SEQ ID NO: 48010 - DNA, 962 bp, Arabidopsis thaliana landsberg
cgttttgtctgttatgatgaacatttaattgaactatacttttataataacttggaccagaaagggtgttttaaagtccaaacaaatcattacaaagatcattgaaaactagtcgaataaaatctatctaagattgtcttttaagatttggaggatttcgttttgattagtattagttgtcatatctgacttcaaataagttcgtggggctgtctgaatctaaaaactccttgcggctcaggttgcaacattctgtttgcaaatttagataattcaaagtactgtaatatatttgctagtttctaaatacatttagaagattatggtttatctattttatttactcaaaattaaatgtataaatgagaaatcattggtgttttgtctttttcattttgaaatcaattcctgtttttaaatgataaactaaacgtgcataggataataggataatcatgtaaacataacacaaaacagaaaaacttgaaaacatcaaatttcatacattaacgatcaagcatcaaagactcgtttttagacggcttaggaatttaagttgcctcctaaaccaccggttaagcatcgtacgtagtcagttagaccatcaagacgtctaggcaactttgtatgtagagttataagctacattgatggttttcagtctacaaactatttttactacgtactaatgactaactttatgtttaatattgaaatatattaaaattattgtatcattttattaatagttatataaaaatttaggattaaaatatggttacaaatgtaggtaagtatggtgctaccattctttaatatatataaacaacatgttatagaataccaacaaaacatgtttacttaattattggactttctacttgttactcattttaattatgaattgatttgtcttcgtacatatgatccactaaaaactgctgtttcatttcctttacgac

SEQ ID NO: 48011 - DNA, 605 bp, Arabidopsis thaliana landsberg
gtgaaacttaatcctatccaactccaaataaattaaaagtttaaaacctattatttcattttcagtatctttgtaagatttttggaccagaaaaagtatcaaaatttgtagctagcttcaaacgagcgtcaagccaatcttaaaccaagtaatttaaaacttacttgtgtggacaagcgataagatcgttgcattctgtccacgaagatagatcgtcgtgccataatccctaatatatgataaccattataaagattcttaaaattatagtaaaatatgaataaattagtgtctattacattggtgatgttcttctcaagatcctcttggagaagatccaagttcttgtcgtagttttcttttagagccgtgagaatgatctctctatcccatacctacatattttgtttccttcgttaattttttttttgttttcatgatgaaatttaaagttgaaagagacaaaagaagaagcttacatgatgtagattggatttgtgtttgtaccaacgtaaatctatcgtgtttcctccttcatcacttgtgaatcccacatgcatcggctttttaaggaaaacaaaaaaaaacaaccatgttaattaaat

SEQ ID NO: 48012 - DNA, 1264 bp, Arabidopsis thaliana landsberg
ttggattcatgcttggacttccatcttcctttacttttgctaatggattacacacacctcttcatttttaaaaactaatattcatattccaacttttattatttctcctcgcattaactttacatatttgtgctattaaagtgagatccattgtataggtaagcacgatgacgatatcagcaaaacaacagtagaattacgattcagaaagagagaaaaacatcaaaaatataaatattttaccgtaactaggcaatttaaaattcacttataaatgttttggacaaaatgttgtcaataaactagtggagaatgcttagatgacctaaccaaatgtatttggttcttcttccattatgaatacacacacatattataatatgttggatctgatgtctaactgttcccacacatgatagaaaaggacataacatacaataagcttgtctacatgataaatcagatttgtcttctttgcaagaattacgccacgcaattttagtttactttaatcttgatttattagcaccattaatcataaataaacatgttaactaacattcatatttctgataacaaaattaccccaaaatgcctgtgaaagaaagaacttttggtacattgtcacattacctgtatttttttttttaactccaaaagagatcaatcaaaacacaaaagtgactgtgcacaaactcaatgatctctaactatcgacagtagtaaagtttcacagaaaatataaatgaaaacgcgttcttagattttttaaccaattcaactctacaatcttgagcttatccctcttttcaaggtagggatgtgcgatgttactaatatatagtaagagtatccttcagccaagttttctagataagtttcttcttgtggaaatacctcttcagatacagtatctgtgaacccgcaaccacaacgcaaaccccgagtgacattatactgaaccaagccactcttgagttggttgtttcactcacttctcgcatctccgcttccctgcatccaaagttttcgttttatcactatgttcttgtttcccgaagttcaatagataccacttaatcgcagcaaggcgaaagaaacacacctgtcttttatatagtttaagttctcacgaatcgacagcaccaacccttcaagtctcctcaactgaagctcaacaccctgcagatacacattcacaagagttgagttttcacatcagagagggaaagatgtttacatagaagtgaaaagaagacttgcc

SEQ ID NO: 48013 - DNA, 592 bp, Arabidopsis thaliana landsberg
  unsure (1)..(592): unsure at all n locations
aatacattttctagattattctcattcaaacttgtcaaatttattagtttaagaaatccatttcatgtctcgatataccgtggaatctttgttcccaccatagatgtatgtgtgtgaaaaaagaaattcacctaattaaatcaaattttctctatcacctacgtctgctggtgcgtgccggttggcacttgatctactaggctgtcggatatctatgtaaaaatcaagcataaacattgtaaactaattaattaaacttgattaacagaaaaataaatcagaacaagtactagattcatatgctaactaatgtattggctacaaataccacttaatttgaatctataactaacccacggtgtagtaaatacttggtttcattatagtttcccaaagtctaagtgaaagttgtggtgtctatactatttgttctcaaagtctccaagtatggtgtctatatgttctcaaagtctctcaattctcagatattttgttgttgtactaacgaaaaacaaaactaattattctattgactacgtagagaatgattctaataaataattttgttttttntttttttttttttaataat

SEQ ID NO: 48014 - DNA, 1727 bp, Arabidopsis thaliana landsberg
caattttatcacaaaatgtaacagactatatataaattaatcgtattatcttcacttttgagactaatgtaacaaacgtgctcttatcatatagtgattgaaacatttaaggagcaattaaaccccctcgttaacacgaaaagctgcaatggccattggcattgcacgaagaacaacttaccgtcccagaacacactagagccgctgccgcgctttctcacatttgcgaatatatataattttgatcaattattttgacgtaacagttaattacattaatacaaattggtattgtagtcgtagttacgtgatttatcccaattcaaagtggatgtaggtaatagctgggaaaggtaaaaactgaaaaatcttggccaacaaacacatgcatgcatggctatacattgtaaattacatatgtcagcagcatcgtgtcgtgagctaagctaaatagctgtggaaatgttcatatatgtaacaatagtttaaaactgcaacgatgtggtcgctcactctataatgtatttttgcgagatattattatatgtctattatcatatgacccaagatgaccgatgggcttagcttgcagtactgatgaataaatcattacagactgtttctggaaatttgttgtttgttgcccagttatttcatggcacatggattaggcactcatatcaactatgtagtactttttctacaatgttgtcgtgttgacttgataaaagtatacagtcaatctaggtcaatatctactagttctttcttataccgtttttggtggatagcgggaatggaattgctaattctaacttacaaggtatggtttacgaatattgtaagtgtttttttttagaatgccaattcagatattcaaaaaacggagaacatgtactagtcattaaatatagagtaatagagttaaaaatctataaattttgaccgaatacatataaaaatataaaaaattagaataatcaccaagtatttctcggtgcttattaatataagaagatagaatttaaaaatggctaccaaaaacaaaaataataaaaatatttattaaaataagcaaattgttaattagataattcaacagatttgaaatttataatcggccacttgttttttcttttataattagagactctcaaaccaaaatctaaagtaatttacacgatatgtatatataaagtcaggtctaaaccactgaatttagagatccgatccgttgatgggaaaactcaacccacattatcaattctgtggaaaaaagattgtgatttatttatattttttgtgtggaacacatgtatgtactataactgtgtagtacatgcatatgtaatttcaagtactcgttaaagaaaacagaccagcaaattgtcttagtaacatttttccacataccatctaatcgttcatgacatcgttttgcttatgtcacgtttatgacgcttgtatgaatgtgttcggctgttggtgtaccaaatatacgacaaatgcgaaacataagagaaaaagataagttaaacgttatacctaaggaaacaaatttggagtcttcacttttggtcgtcctcagcaaacaaatttggtgtatataataatcaaaataggcgaagtcctataaattgtttgccaacagaatataaattgtcaacctagtattcgccacagatgcactttttgagttaaaattgaatcacgtgtgaagaagttgt

SEQ ID NO: 48015 - DNA, 1973 bp, Arabidopsis thaliana landsberg
accgccagtgcctgctgtgtaataggagaacctgacatgacattgcaagatcagctacaataaacatatcatgttgcaataataaaacaacagtttcactaacgataataaacatcaacaaacgttctttgcgttacctcaatttctctggttttcctttatcttcgcttcttgctgcagcgaccatttcagctgccatcactataagaaagacaaacatgttgttaaatctattggaacaaacaatatcaagcataaaagatagagggactagcattcaggtttgaacaccattgctaactcctggatatattccagctgttgttaacgccggaatattcgcagcaattgcctcagcttcaagagattttgcacggaaagcatagcttgtgtcatcacaaacatcgagatatgcagtctgtttcaaatataaacacataaaaatctctgtaagactcgagaacaatgcatcgaggagcttgtgtgtggaagactggtgacattagaaactgttattaccttatcctcaccttggtctttatggcagcttcaagaacagtgcatcgaggtgcttgttggaatggtccagcggcatggactacaagatcaacgtctggattcacacatttcacggtgagtactcaaaataataaattcattagagatgtcaatttagtccctaacaattgtccaaattcatatagaaattcaaacatatttgacaattgacaatgataagctctttgggaaagtgaaacaaacctcttaaacttgtctcaagcatcttagcatcattgatatctacttgagaaaattcagaattctctcccagcttagccaccattgcttcacctttctctctgcgcacagagaatgattcatattcaatgaatttcaaatttttcgacatttccatggaaattgaataagaaatttttcgcaaacctgttgcgtccaccgacgacgatttttagctcaggacatagcttagaaagagcagtagcagtagacccaccgacccgacccgttccacccaacaccaagacccgatagttccggctaggatccgagaacttaacctccggaacgccgtcgtattgcgtttccctagatgaagctgctcgcaccgtcgctctgtacggttgcagcagcagagctcgagtcattctctctccctcccctcactcacctcatctccttttgcagttttatcgtagacgatgatgacgtgtaagaatttgaacgggataacttagttgggctttatatctgggcctaataaataaatatctgggccttataaatcgtggttccaaaagaggaaatataatataaggcccgtcaagtttttcactcatttgtaaattgtttgttattcttatcttgagttttatatacatcagacaatacaagtcgggtgtttaaatataaatgtagctcaaatctgtaactattcaacaccgtggataaaaatttgattaaaattaaatgcaatcaatcataaacttaaatgcgaaattaaataagatgagaaaaagaaaaaacgttgtaatggtggaaactggaaaggcaaagagagaggcgttgcgtcagcgaagggtaagcaggtgacgtgtcaagtcacgtgaccacaatctgagagagagaccaaaacgcggagaacctctagggttatagaggtggaggacgaagtagacccctactagggtcaaactagtaaatattatgaaacctatgggtcctactgttgagtggcagcgagctgtcaaactggggaagagcgaattttttcattttcatttttttttcttcttcaacttttttttttggttattgcttcttcttcttaaattgcaacgtgcgttttcatgggctctgacgctatttgtccctcaccatttgtagatattttaatttcccaacaatttaaacatttcttttcctttaaaaacaaacaaaattgatattaaaaa

SEQ ID NO: 48016 - DNA, 821 bp, Arabidopsis thaliana landsberg
gcataaaatcttaattaattttgtagcactagtttgaaacggtttttaaataattattttggtcaactaaacaaattcaatcacagtttttttttcattttcttaaactattaaataaaaaataacaagtgacaatcgtagtacaattctaggtatgcgcttaattacgtacctttacccacaaacaagaaaagaaatgggaatggtggcactacacgcgtttgttagatttgttggagatcacattatctatcactatctaccaccaaaagtatatcacaatttgaataatttctttaatattcaaaagaaatagagatctaaattctcgggattctttaacaatattatctcaatcaacaactgaatttaagcagataatttaacttcttgttcaggtaaaaggtaaaatatcagttaatttatccacttttacaagttaaaaaatgaatagataagcaaaagttaaacacacactctcatgaaaacataattgaattatttctcatgctcaatcattttgcctcccatcgtctatttcttccttatttccttgtcttttcttcttctttgggtttagtttcaatttcagtgtaattacaatcattgactattaataatgagttttggccgaacatagatttttaaggacagctaaagatcataacaaaatcttgtcttgtccatacatgctttgtccaagaacttattatgtgtctattgctaaatttttatttaaatcaatttctaattagcatcgaaaatcatacattcatttgatagcaacacatacaacacaaacgtttttgatatatacatct

SEQ ID NO: 48017 - DNA, 542 bp, Arabidopsis thaliana landsberg
ctctaacgcacttttggctgtgcacgtgacgatattccagacatgtatatggtaatttcatacatcttaatttgtctcccatcctaactatgtgttcgaattaagcttttatagccgtttatgaattttgtataggttagatccctagtcgaggacatcagagatgtacggcttcacaaacttgagactaacttaggatcatttcaaggtacatctgcagtaaaggtaattgttttttattgctacttcttgacattagctttttctcattacctctaaagagtgatttttaacaataacaatatctctaatttgagaatgtagatctctaatgtatcggcaatggaagtaaacatagtacgcccatttgtgataagagccttagaagcattttataagcatgacaagccagaggctgatgtagacagagacaccagaagtagtagacaacagcgtgaaaccaacaatgaaccaagggtaaggctcttcagtcttcacacttctcactcgatttttccccctttttttttaagacaaataca

SEQ ID NO: 48018 - DNA, 491 bp, Arabidopsis thaliana landsberg
tgacggcgatcggcaatacgatcggcagcaccacgaggtggtcggaccaagcggtctcggcggtggcggtcaggacggaggcggtcatcggcaacggatcatcagggggccgcgctcatgctgggaaagcggatcacgggtgcggagtcccgggttgcggctcggcctgggagggctcgcgaccatccacgtggtcgctgccggtgatgccgcgggcagccagcaggacgacgaggaagagcgcggtcacgatatgccgatcaccagggcggtgaggaccagggcctggggcaccggatcgtcgacggagaccacctcggcgccggccccgagcacgggcggcgcccgatccgtcagccgccccatggcgaagatgaagagatttacggcgtacgtcaggagcgagatgccgagggcgacctggaaggtgcgcgggccgacatcagccagatactggagcggcgaagacggaattcccagggacaggacga

SEQ ID NO: 48019 - DNA, 629 bp, Arabidopsis thaliana landsberg
ccattgggtggggtttagaatacagatggtcaaagaatatcattttccaatatttgtattggttagtcccgtaaactagttattggtcgaaagattgtttcgaaaagtttggagggtttcaaagccaatgtaaacttgtaaaaggcgatggtcactattcactaagccatgagtgattgtcatgcactttccttataggttgattcaattttttttcttttgctttctcgcattgtatattggtcactttcaaattgtaagatttcagcttttgctttatcattcactttgaactaagttttggattcaacctcatatattcttcaaacaagtgtactatcattggacaaacttgatttcaatcacttaaattttcatcaatatattgaccttttgtttagaaatcttatctagtggacactaaatcttccacagacaccttcaaatgtcattttgagagacaaaatttcattcaaatcttcatcaattactttattcttggtaggttcacataaatctcaatagtttattcattcactattgaaaaattaagataatagtttttacctcataaaatcgcgttaatatccctcatatataatataaatattatatatatacttaacaat

SEQ ID NO: 48020 - DNA, 895 bp, Arabidopsis thaliana landsberg
  unsure (1)..(895): unsure at all n locations
aaaaaaaaaaaaaaaaaaaaataaaaaaaaaaaaaaaaaaaaatacgaagaaaaaaaaatataaaaaaaaaaaatagaaaaataaaaaaataaagaaaaaaaataaaaaaaacaaggaaagaactcatacgtagacncaaaagaaaaaaagaaaaaaaaaaaaaaaaagaaaaaaaaaaagaaaaaaaaaaaaaaaaaaaaaaataagaaaaaaaaaaaaaaaaaaaaagaaaagaaaaaaaagaaagaaaaaaaaaaaaaaaaaaaaaaaaaaaaaaanaaaaaaaaaaaaaaaaaaaaaagaaaaaagaaaaaataaaaaataaaaaaaaaaaaaaaaaaaaaaaaataaaaaaaaataaaaaaagaaaaaaagaaaaaaaaaataaaaaaaaaaaaaaaaaaaaaaaaaaaaaagaaaaaaagaaaaaagaggaaaaaagaaaaaaaaagaaaaaaagaaaaaaaaaaaaaataaaaaaaaaaaaaaaagaagaaaaaaaagaaataagaaaataaatagaaaagaaaataaaaaaaatgaaaaaaaaaaaaaaaaagatgaaaaagaagaaaaggaaaaaaaaaaaagaaaaaagaaaaaaaaaaaaaaaaaagaataaaaaaaaaaaaaagaaaaaaaatggaaaagaaaaagaaaagaagaagaaaagaaaaaaaaaaaaaaagaaagaaaaaaaaaaagaaaagagaaaaaaaaaaaagaagaaaaaaaaaaagaaagaaaaagaaaagaaagaaagaaaaaaaaaaaaaaagaagaaaagaaagaaaaaaaaagaaaaaaaaaaaaaaagaagaaagaaagaaaaaggaaaaaaaaatgagaaaaaaaaaaaaaaaaaaaaaagaaaagaaaaaaaaaaagaaaaaa

SEQ ID NO: 48021 - DNA, 598 bp, Arabidopsis thaliana landsberg
  unsure (1)..(598): unsure at all n locations
caaactatatttgtaggttaattatgaatatatttttaattaaaacgaattatattttgaaatagagggaatatttgtttgtgtctaggtagcattgcttgaggttagtgttgannnnnnnnnnnnnnnnnnnnnnnnnnnnnnnngattagggataaaataggctcgcccagcctggcaaggtttgccttgcacagcaaggtaaggcaaagcaggctggcaaccgaaccaaacgcgtagttcatgtatgaagacatctcgtgtggaaaattttatttctcccaaacgcgtcagacgagaaacgaccgcgccacancacgtgcacacgacacgactgggcaaacgcgaaacaagccgagcccgtagatcggcagacgcggatagatgctttcttgatcgagtaatcgtcttgtgattgtttatagagtaaagtttgaaagaaaataggtaaactattgtccgctagagatagtttaatgaagtgtttagtttatagggactaatttttagtctatatattttattacattttagtttgtacattatcaaatatgaaatattttagtttacatatttagcaatctagagactaaaatat

SEQ ID NO: 48022 - DNA, 431 bp, Arabidopsis thaliana landsberg
agttttgcaggtttctctggcataaaccagaataaaacagaagaatgatgcgtgcttcagaggagaaaaccaaccaaggagcatagtttgctgtactggatgaaaatccatgctcttaatggcagaaccctgactcaaaatcctgctaacgtttttgggcaagtcatcagtagaataagttgcatgagcatggctttgccctggatatgtgactggcaagacattgactggaagattattaacctgtaaaatgttcaaagaaagttgtgacttctaagaaaagttgagaacttaagctgaaaaacgaacaagcagccgttaataccccatctgaaataccaaaaggtctgggtctcttcaacacactttcagaatctgccgtctgataatccattgataggctattagttggaggactctgggacgctcac

SEQ ID NO: 48023 - DNA, 621 bp, Arabidopsis thaliana landsberg
  unsure (1)..(621): unsure at all n locations
aagatataacgtttgtgtacagaaaaatatatagtggaatgctttgaaaatatcaattaatttgcttgccgagtcaacaatgaaccgactaaatgtttcattatcacgaattatctatatatgatgttcccaggtattgaattggcaacacttctaataatgtatggttagcttgggcgttgactttgacattataatcatctagaaacagttttaatccgtattcaaatcacaaatattagtgaattattagcaactaaacatataatttattttttagtcaacttatcaactaaagattctagacgtgcaaagtcaaacaataatagccactttggttaattactaaatttaatatgttggcaaaaaatgtcaataaaaacacacaaacacacaatagggtcttctttaaatatatgtgcagtaggcagacgaatgtcttttagacaaaaacaaaaacaagcttctcttctctcttctcttcttctctttagacatctcaaccaccatgagtcaccagcagccgccgagctatgccaccgagccaaacaccatgttcgttcaagcagacccctctaatttccngtacatcgtccaaaagctcactggagcaccacccga

SEQ ID NO: 48024 - DNA, 865 bp, Arabidopsis thaliana landsberg
ctgggatactcccattttcaattgtccaataatgtgttgcaaactcaatattgttagtgattactagttatcatcctcaggtaaacgctgaatgtcaaccaaacgtatataccacaacatctttatatacatcatatattgtaaacaagactccatatgatttagcactgcagccagtcaatatggtacgtacaaccatgcaattattacaaacagtgcaattcctttgattcgttttaataaagctagcatacactttattacaatagcaaatgcaattgatgctatatgtttcttatagtggtgcaattagtacagtcactgcctttggtatgtatgctacttatggtggctgtatatattccatttttttgttgtacatattccctcacgttgacaatcttgtgaaaagatgcctttgatgacactatttatcactatttttattttttaaggaataatttatctcttcacttaatactttattgcttgacattcactttgtttgccaatattccttaattaattatccacacactgctgataaatccttagttttgtaaaagtacgagacctatattgtgataataattttggatggtttctacatacgatatgaacattagacttgtttggtttttcaatatatcaattagtcccaaaatgctaattggttcatgtgaagggtaacatcataagcaagcaaagaccactttaactatcaacaaaggaactgttagtctgctaaaaaccctcatataacaaatcaataattgaaccacacgcgttctcacatagtattaattgatttcctctatctacttaatccttattaattaattaaaaatattcactttaatattta

SEQ ID NO: 48025 - DNA, 380 bp, Arabidopsis thaliana landsberg
ctgatcgtccgcaagtcgaaccccgacttcctgctggtcgccgccgtctacgacaccaccgaccgcacgaccaatcgcgacgtgtcggactatctcacctcctcgctccaggacccgctcggccgcacgccggggtcgcgacaccaatgtcttcggctcgcaatatgcgatgcggatctggctcgatcccaacaagctcaacgcctatcagctcatcccctcggacgtggtccaggcgatccagacccagaataccgaggtcgcggggtgctacttgggcaggcacctccggggcggcaacaagattctgaacgctgtcgtcaccgcccaggtcgcggctccagacgcccgagtagttctgcaacatcctgctcaagacc

SEQ ID NO: 48026 - DNA, 1008 bp, Arabidopsis thaliana landsberg
  unsure (1)..(1008): unsure at all n locations
tgcaattctttaataaggaagagaagttattaaaaggataacgttttgatgtttaatatggatatttgccccttccacttccaaatggggattttagatttaaatgcaaaacgtaaaacgaagaaaaatacttgtacatctgaatctaccacctattctattgtacatgtgaagagagcgagttgtctttaataatattaaaaaaaactaaaattataaaatattaataattaaatatgaaggtgttttaaattaaaatcatccttctcaaaagtgtttctaacaagacatttaagacatagtgttttcggtttgccgatacacgaacattaaagtaatatatatattttatgtatttattttagttgggaaaacggccaaatcaactcaactattttcatgcggttttttcgaatccaaactttaattctctgtatttatccatccgaactcacttaactgttaaataacaaatctgaatttaaacatatatttattattaaataatgtaacaaatctgaactatataactgttagctaattataaaaagaataattcagatacgaagaacatataattacgacttaacaattataattgacattaaaaagtataaaaaaactatgttgaaattaattgattaagggttacatcgtttaagtttataatttaaaaattattctggattcggattgataaatgcagagaattagaatttaagttaaaaaaagccgcgtaaaataatttgtattgattgtggtcgttttccttattttaattgtgggaagacagcgatgaagaatggagatggtctagtagacttcaattagctacattctacgaacgtcgtaatacctagtttgtgctttaaaaaaaacaatgcaatacctagttgcagttttttttgtttacgtcatttttacgtccacatattgttttgcaaactttacatccaaatgcacaaccgagttcaacgagatagctatattcgattntcgaaaataaat

SEQ ID NO: 48027 - DNA, 486 bp, Arabidopsis thaliana landsberg
  unsure (1)..(486): unsure at all n locations
gtgatctagtacatgggatagtggcactacgagtaagctgcatcaagacatcacgtccgtgggtgaccaaggtgacgatgccaggtggtagaagacgttgtggcagcaaaagcagcaactttggcaggtgacgaagacgaataagatgtagcgtgcggaacgcgaagggtgtagagggggccggtgctgtcacatctgaggaggggcgccgagttgccgagtccttcacagtaagactagaggagtcaaactcgacagaacaagaattatcagcagtaaaacgacgaatagaaagaagattgtggaccaaagaaggagcaacaagnnnnnnnnnnnnnnnnnnnnnnnnnggagggccgcgcacccacagatgtgacaggaagacacgtgccattcgtcaccatgatggacgaaggaagagaggaaggagggcgatcaaaggtgagtataccagggtcagaagtgaatgtggtaggtagcaccggt

SEQ ID NO: 48028 - DNA, 683 bp, Arabidopsis thaliana landsberg
tcatcacaattagaacaatggtttggccgtttgggagttataagttatatgaccatttgaatattctgtccagaagaaccacaacgatcactgaagagggactcgacgacgcctacaagccaaaatgaccttcatgattttatggtttagggttgatgtatattgcattgtcgacttctgttatatattccgctatattatacatctttttactcatatggagtattttatgcatatatgtattcattgcgtgaattagacaaacagcttatgaagtaattttggaaagtatataggtctagtaagctacatatttggcatgaccaattggaagccagtatgtttgaaaaatggcaaccaagactaacccattcgataactggtttagaaaaagacttaacttctgacgtgtttggaacacaaatcaatgcaatcaaaggcccaaagtgtttgccccttatctttgtctataattctgaggtgctttgacccgaattagtgccacaaccgaaccatgacacagaaactcgttagtattcccaagcattgaagaacaatagacaacttcgaattaaactagaactcttttaagttttaaccaacagaagatagtacaaagttctaaagaacactggtgaaaatcaataacaggggacagagcggtttttcctaatcaaaactac

SEQ ID NO: 48029 - DNA, 852 bp, Arabidopsis thaliana landsberg
actcgcgatttgaccgtgcgttgattgttcattctccatggcttttcttctttttctctcttaaacaatagatgcttggagaagaagaaactgtaatctgtatttcttgctcaagacttttcgatttcactcatcattttaaagaatagaaaagtaaatgagctaatgacaagtgtcctattggcgctggatccaatagcatcaaatctgttttgaaggtttcaggttgatttggtgagagttggcaaagatcgtcaccatgatcctctgtttattagtcaaacctaatatttgaaggtgttgtctctttgcttttgacagttgtagcatttgttgtgctagcaacaactcacctaaagaatttagaagttgggccaagtgaatacttgaattgatcatttgtagctcaaaattgaagttttcgatagatgtatgaaattattattcattggacatataaaaatattaaagaaaacactacaaaatctctcgagggaagtggtcaattcgtgacaaaaatgttatttagatggttgacaaaaagatatctgattctataaggattaactggttcacagtttgattaacatgttttagactttgagggctctcgattggattagacacaatgagtgttggtacgagttagagagtttgtgatagcatttggttacaattacaacttacaagagtcccatatttagagcatagagatcctttttgagggtcatgttgggagaaccaaaccattattatgtcacacacttacggacccaacccccgtagagaaacacacttgaggatgaataaatggacaacaaagagggcaaacatccacaaattgaaaagttg

SEQ ID NO: 48030 - DNA, 771 bp, Arabidopsis thaliana landsberg
ttctgatctgcgaacgagataaaaatgttaggggcagattacaggttacccaaaaagcacatacttttctgcggggaccagtgtctgtcaataaaatggctgcttcggaggaaaggaaattcgacacctgcacagtgggcaaaagaaaaatttccttttgctctcgcaatgcaatacatgctttctgtttctcaagtacatcagaggatgcatcaggccgtatgatcgatacttcccttcgaatgctatggatcagaaaatgcaccttcccaacacactgactttcagatgtaacagagcaatatgtagtagtcaaggagaccttcactgattcgatagataaagcctttttaactccataacttaatttatcaaaaattcctgttaggcgtaccgccttgcctccttcaagctcttctgaccattcacttcccagagacttctcaccctcaaacaaagtttcgaaagattcaggtctgaaagagagtgaaaaattacctgccatttaatgtgcaaaatcaatcagattaccattaacaacaataactgtggttgattatcctgtacgctaagagaaactagacttctgatattacctctagaactaatgtaaataaatataggaacttacaatcatttaatacacagaaagacaaactgatggaaacctagttgcatactttattgtgatgaggggccatataaaacttgctcgaatgtttcaagttatatatattgtagcaggaaaccaaaatactaccagtgaaacct

SEQ ID NO: 48031 - DNA, 105 bp, Arabidopsis thaliana landsberg
acacaatatcaacaagagccaactaagctatgaaaccaatctccacaatttcataggaaatcacctctccatataaaggtttcccccaagtcacacttggatatg

SEQ ID NO: 48032 - DNA, 1326 bp, Arabidopsis thaliana landsberg
tctcgacacttgaagacggtgttgattctggagtgagatctgctactcaggaagctgcttctcacttagaagcattgggttgtgtattgacagaggtttttttcacttttccctttgtctcagtttttctgtttcgtttgtgtgtaaaatttctgagatttgttgccaaaatttacaggtctcccttccttcattctctcttgggctaccagcttactacgttattgcctcatcggagtcatcttcgaatttatcacgttatgatggtgtcaggtaatctcggtattatgacttgactcacaatatgattgcatcatggatatataaaatgatattttttcttgtgttggaaatgaagatatggaaatcaagttatggctgaagaactcaataagctgtatgaatgttcccgtggagaaggatttgggggagaggtatggtttcagaaattactccatctgatttaatcaacaaatgtttgattagaatcaatgacaattttgattttaaggtgaaaatgagaattttaatggggacatatgcactttctgcgggttactacgatgcttactacaagcgagctcaacaggtaagccgcatcttcaaatgcagtcaatagaaatagaacctgttttgattgataaatgtatgctttttttgtttggttgttaatacaggtgaggacactaattcgaaaagacttcaaagcagcgttagaacagaacgatatccttatttctccggcagctccatctgctgcatacaagattggtgaaaagaaagatgatccactggcaatgtatgctggagacattatgacggtaaaaatgtttcgtagtttctttctctatttaatcgtcgttacacgaaacatagtttgtatcatatgaggtttgttgcaggtcaatgtaaatcttgcaggacttcctgcaatggtattaccttgtggattagtcgaaggtggtccctcgggtcttcctgttggtcttcaaatgatcggagcagcgtttgatgaggtttgttataaactctgtctctttgctttactctaaaagattagattaagattcacatgatgatttgttgattggttttaggagaaattgctgaaagtgggtcacatatttgagcagactcttaaaggatcaagctttgttcctccattgttagccaatgtagcctaaccatgaaacccaccaaggctctttttgcgtttacatttcatgcttggtttaagcaacaaatttaccaattgtaattgtacttcaattctttaataaataaatgtagaaacacaccatgggccacgtacgtattctttggtct

SEQ ID NO: 48033 - DNA, 712 bp, Arabidopsis thaliana landsberg
  unsure (1)..(712): unsure at all n locations
gataacaatagtctctcacttctctcaaatctctacgactctgtctctcatcttttcaacgattcaccttcttcacttctagtccctcatcactctttcttcactcaccttcttgatctctcccttttacaccttgacttgtgttccaagctaagagacatcacttgccgcatcaaggattgcctccgcgacctccgttctgctttcagacggaggagacacagtggagattctaccattcggtgtcacgtcaaagcttttatccgctctaggaaagcggttcataaggacattgctaagctactcttgttgctcaaacaaaccggcctatcctcatctgagtcctctcatcccttgatcacactgctccaacaagtttgttcccaaacatgtcaaacctttaggacagtcttgttgtccctatccacagctgtacctaagcccaggccttccaaatgggccctggtcacnnnnnnnnnnnnnnnnnnnnnnnnnnnnnnnnnnnnncaagttaggactggacacagaaacgaattccagatgatggacgaagaactgcgaagattcagcatggcagaagagataaagaaggatcggatcaagtctatgatcaccaacttggataaagtagatgtagcggttgaaaatctggaggagtcgctcgaaagattgtacagacgtatgatccaagctagagtttctttattgaacc

SEQ ID NO: 48034 - DNA, 473 bp, Arabidopsis thaliana landsberg
taaaatacatttatgtaaaaataataaaatagtttcttatttttttttaatgattttagctaaaacattttcttatgtaaaatatgattttcatagttggtaactcaagtgtttgcaacacatcatgtgtcaaatctaattttgttaatatttaaaacaaaaaatatagaaaatttctaaccctatggaagaatgaaaatacatacaaaaatcacaaaaagttatatttctattcataaatttttaagtaataagatttagaataagttaatgggatgtaacattgctaagagttagattactttctctttatttttggggtaaagttgtagaataattaattagttacaaaaaaaagttttaaattttttgaagtaaagttgtagactatttaattatttacaaattttttttaatttttttgggagtaagttgtagattaattaattgtcacaaaaataagttttaaattt

SEQ ID NO: 48035 - DNA, 881 bp, Arabidopsis thaliana landsberg
cattcgtgactgactttctaaacgcatttaacaccacgaatattagaaacttgtctcactaaaagtggacattatgggttagtctgatgcataccggttaatttgttattttttcaaaaagattagtttatgataaaacgaaatgattcaaaataaaacaactcactgcttgttgagctggagagtcggttttcgtggtggaggggaggcggaattcatgcatcatccaatcggttttggtgcctttaccggctgaaccaagatagtaaaccagagatttcttgagaccaacacagtcaagattggagtaaaccggtttatcaataccagtggctttccagaaacctgaaccggtcactcggattggtcgaacgctattcctgtatttcctacctctcatgcagaagaagtaccactccttttctccgacgctgctcactcctaataaaatccacagtaactgctcatattaatttcgtggaaaattgtttagagaaaatcaaaactaaataaaataccctttcattacatagttcgtgttctatatcttcatgcgatgatgataaaggcgcactatgcgatatttctgtgtaagtatactaaattttattttatttgacctgatcttcgtatggatggatggtcccatatcataagtatatggaaatgtactaacttatcgcattcaaaatacaaattttttttttatcgttttgattcgaacaagatctcaaagtggacgtccctaatttcttgataaaatcagtagaaaaaacaataaaaacaactatatgtaatgagttgatcataatatacgatgctgatatttatagaggggatgatccaataattaagaagacttacttggaagatcccaagga

SEQ ID NO: 48036 - DNA, 1000 bp, Arabidopsis thaliana landsberg
ggcttggggtacaatggctcgaggtcagtcttttctctctgaagttggtttgcagtctagaatctagatggatatttggaattgtagaaattgcaaataagctggtagactattgactatcagtaatgaatgtaacttatgttagcgttcaaatcttacatcgttcatcatcttgattgatacacattttgttaaaaagttggtaccttaagtctttttgttttttgactgcagctggtcccagcttttggagacccttccccttccaaatgtgagttataagctttaagtgatatccattgtattttaacagcactcggttaatctacctttacggatactaaaccattgtatttgacatgtagatcaaatggatttgcccgactgctccttctcaaccaataagtttatttggtggttttccctccacagcttgtaagtatatttgctacataggattcgcctttcatttgtttaagcggaatctattcctaatgtaaataggcagataggttaaagtgaatagattaaatttaatcatgttcatgcagaagaatttgccatgggccaattattcaacaattatggttttaaaattcgtaagctagtaagcaaagtagtcaatcaagtggttggggataagctcactattagagatcaaattcttttacacgtctgtagctttgtaggaagctcatcttagcttttagtttagagtagtaaacaacacatcattggttcggctccacatcactagaccaaagaaacattcttctgttcttgctaaaatttgggaatttctatgcaaaaattaatcttctgctatgctacataagggacaaggttgttcagtcaacaatatagtttacctttaaccgaaaaatagactttacttctctccttggaggcaatatttggtacaacagatagagccttctttacctttctttatatagacactatcatcagacttgtgcacaaatgtctattactatgagta

SEQ ID NO: 48037 - DNA, 473 bp, Arabidopsis thaliana landsberg
aaaaaaaatgaacaacactaatttatacctacctgccattgctgttttactctaataaattagttagggctaaatgttatagaacaaaactaaaccggccaaaactgttataaaacaaaactaaaaggatcataatataaattgtaaacaatgctggaagcggaggcacggtgggaccaagcgagccacctcgaaatcaccgacgtggcttgacgatgtctcggctctccttcccatctactccgtctgtcaattcccgttaactccgacacacttctaccgtaaattacatatctgacaccctccgccgcagctaatttccggcaatcgctgagtatcatctttgatcgtaaatacaaaagatccgacggacttacttcgctccacctatgatcgtctcgattcccgccggagataattatacggtgctcaaatctaccatcaaagctctcccgatttggaatcaacaacaa

SEQ ID NO: 48038 - DNA, 306 bp, Arabidopsis thaliana landsberg
  unsure (1)..(306): unsure at all n locations
tacaaacagaatgaactcaaacgagatcgagactaatattttaaactatatttaatttgacttaaaatcagataacttcacctaccaatcgaacacttgatcgctctgtcatagatgatttattggagaatcaaatctcaattaaaaactctcggatgtgatgtaatctcggttagcgagcaatgactaaattattttacacctaaaattttagtcgtcgacttcttataaatttttgtnnnnnnnnnnnnnnnnnnnnnnnnnnnnnnnnnnnnnnnnnnnnnnaatcatccgattgggtcgggc

SEQ ID NO: 48039 - DNA, 773 bp, Arabidopsis thaliana landsberg
gacggtattattaatattatcaaatacttagtatttcgaatcattttgactggaactataggaatgtgcgaaatgggacatgatccaacaaatatcatacgtggtggattaacttgcttcacatataatttgtgctgaagtccaaataataatatacatggattctggaagtattatagttgggtataaagtcttgttgcatttgcatttatttcttgtacgcaatgcggctaagcaactttcattatccttaccataaaaagaacaaaaacaatcgtatcatattctcactctgcacgaaaagtcaagtcacgtaaattgttaaaagattggggatttgaatattgtatcagaaaaatgttatttaatctacaattttaaactatattaaaacacataattaactaagaaatcctttgtaatctcttaaagtcactaaaaatctaatgcttaaaatatttccaatcacaatgaattttaaagttttttttaccaaatcaattgttctatattactatattttataactttttaaaactctatggttgaataacataatattttgttttaacacaaatcattttaaatggtagattgaatacacttccttagttttgaaaaaatacactaaaagtatgaaatgatgttttttttttaattacaaaacgataactcgaaaacgatggtttaatgaaattatttgatgaaataaagttatcataaacatccttaatctcttcttatacatgtcaactttgaccatgacatgaatg

SEQ ID NO: 48040 - DNA, 591 bp, Arabidopsis thaliana landsberg
ctgcgttcgtttctcttctcgacggggacgaccgccagagccgccgccttacgtccagctgccacggtacttcatcgggccctttgccggtgcaggcgggcacacccaccgcaccaggtatggcccaccccttctcccccctttctgcgttgcaaaattgagcaaccgaaccctaactcgagctatttggttatttgtattcggatctgatcgaatctcagtgtatacgtgtgttatgactactaacttcgattttctttatcggctgtacacccatgcccatcaccgggttcacctgtgtgtgtgtgtgaatcggacatgttccagtgaactgcagtatactttggttgcttatttgttggaatatgcataaacgtaagagccatggggcagagggtctggaatttgcatagaaagcttcgagggcgaggaactaacacatgttgttgtctatgaggcatgagggttaaggatgaaatccttggcttggttcatcccagagttttagcaagagacttgaacgatgggtgtatgccgtatgggttaactgtgaaactgatgagcatgacttcgcattgcacttttttgagt

SEQ ID NO: 48041 - DNA, 1240 bp, Arabidopsis thaliana landsberg
ttccataattatccgatggtagaaaaatcatatgagattctattttcatctaatcatctggctttcaaatagacacccattatcacaataaccatccaaattgaatctcttatcgctctattatctcattacacattttcttataattttctcatattctcttttttttgtctaattataattatttgtttcattgatttatcacaagagtcttcgaacaagagaaagaaaaagaatcccatttttttgtactaaagtcaattacctatcatttgattttgatcttgtacaaaataaatggcaaattgcagaactccacgaccgtgcgttggcaagctcagccgcggcgtggtttgggaaaactccggttttcggtctaaacctccaggttcttggggatgtccgaagcaaatgagacacaatcacgtgtcttcttcgacagggcatcaacgacgaagctggaccgacgccaacggtatagaaacaaagagccattccaattttggagactccggtgggattgttgcggtggaggaagcggagttagtggcggtgctgagggaggctcatccgtacgtaaagttacatagagacagtaaatttgtcgtaatgttgtcggcggagcttcttgactccggttcgaccctcgacggcattctcaaggtcattactatttactcttttcacattactagattgcaaaaaagacaaaacgcgtgactcgtgagcaagaaatgcatcactcaaataatttctaacataatatcatagtaatagtacatagatttggcccaaaaacgaagaaaaaaagtaataatacatagataaacaatacatttttgtctcaccaattagattcataatggtttttgtatgctagtgtagtagtgttttctaatcattacatttttcttttgggcatcgtattattacttgaattattgtactcaaagtaggaatattgttgacccaaaaaaagaaagaataacacgtttgcaatgcatttcacagctttacgaaattaaccaatcagaaaatggtaataattcaatttcaacatcaaaggtgggccgtgacggtggatattttttgcatctctcttgtctgctcctgaacagagacaaagtgcaaataccggttcacgagtataaatcaaaccgacaattgaaccgtgctcaatttttcaataaccgaaattacatacacgcgtccactctaactctaagctccttcctcagaa

SEQ ID NO: 48042 - DNA, 1614 bp, Arabidopsis thaliana landsberg
aagagaagtagcttccgagccttatacgtaacttccctacggtacatatatttatgtctttcttttatttgttttaatatcatgatcttctaggaaactagtttaattattgggtgtctctatatctttccggaattatttaaacgtgattagctcgactaacgactattaaggtggaaaagtaatctactctaacgtctatccactttttcatgcaataatttctgtccaaatttttgacgctaatggttactataaaagctaaaagagactcatgaaacgacaaaaaaaaatacataaatatatatgttgtgtatatatataaatatatatattatattagtttttcctatcttcccattcaaaattttaaaaagttagatatacattaaaagtttatgatcaacgcaattaagaagtatgtcgaagtaattcaatgaaaagcttatttataatgcatggttttacagctatttgcgtgcaagtaaacttgtaaaacaaggaattttacatatactgtgaagtgttaaactgaggacgtggtatggccacacaaagaacaaaggtataattggtgggataccaaaatttacatttagatagatatgaaaagaaaaatcaaaataactattagttgactttaaaaaattgaaatcgccaagtatgtttttttttttttggtatgttttaatgtttaactgaatcaaatgtatgtttaactgagtttatacataccaaacaaaatatgacaataaggctacggcattactttagtttactaacagtttttttttttgggtaattaaatcgaccaaatctcaaattagtcataactcacaaccctatagaacggtagaaattttgtgtttcttccgtttagaaggggaaataaaagtcagtggtgatggatgcatgtagatgatgagattctatcctaaaccgaagactagctatatccacaaaacaaaactttaaattactaattaagcggataaacggaatgaattgacctataatatatattgattaacagtttggcatattgcagattgtattgactgcgtagtactatcaccttattgctgctgttaactaaaaacaaaaaaagttttagcatttgacggagaaaaggtagaatatatatatataaggttgttggtcgaccataatttttatgatcaaatctactgtttaagtgtatactacaggttgctacatatataatatcccaaacaaacaaaaatgattcagttttaaccataattacaaaagcttgatagaatatattaaatgtaaaatctacatgatgcgccaaagattcaatgagaacattgagaagcacatcgcataatttatggaaaatgcttacttattcatacttgcatgaatcttgaaagatcacctagagacagcatattaaaggattaaaaccgttatagggtttatcactatgttcttttaacatggttgaaagatttccatgttgtcacttgtcaataatagggtcttttttttttttttttttttgtcgtctgaaagtttattatagagattccagtgaaatacaagggtgaaatacaaagccggcggttaacaagtaaccccagaaagctc

SEQ ID NO: 48043 - DNA, 592 bp, Arabidopsis thaliana landsberg
tgaaatagtggttcatgatactttcattactgtgtgaccttccacatttcgtaatttgtataatgcatgttgttattttacaaaaaatcactaaaagttagatcaactatttaaatttgaatcaagagctttaattagtgttcactgtaaacaagagaaaatattacgtatgaaaatgttatgtatacagtatttaatacttaaaggtatcttaaataaatttacaagaaaaaggttagctaatgattttctgttagcaacctccagattaagaatctagcgactttacgggtttttaaatccagaatccagtggtttgaaaaatgcggaaaccggcaagcttagggtgaaaaagaaagcgcgtgaaaaaattgtaagaccaaaagttgcaaaaaaatatccctttccataattccttccatgtgccccatttgtaggatcttcttcatccataataacttcactctctcccccccccaacactgttcatgtgacgacgatacactctttcactgacttacccctgacgtaaaaatcacttcttcttcatcgctcagtcaggaattgcctactactggttttgaattgagat

SEQ ID NO: 48044 - DNA, 803 bp, Arabidopsis thaliana landsberg
gttttctttaaagattttacactattaaccaacaatttaatctattggtcgtaggttttatgatttatttttgggtgtcattcgaaaaaataggttaactgtaaaaagaaagaaaatacacaacattacaagacaccatgctgcttctttcctctgtcgtctctttcagccatttggatctatttgaagaaaaatgaggccatgagggacaacctggacaatggacgtaccaacgggataaagtttcaaattcaaataatttgcgtcatattcaaaatgtgataagtaaattgtgataacctctcacgagaatcagattcatggttcaaaatatgaaagcagctgatctctattattgatgatatatcgtcttatcaatctatttatcttgttcgttttagttttaaaggttaatatcatgatttatctcatgtctttatcactttataattaattttattttatggataaccaagttagcaagttgcatgactttcgttaaccatagtatcaccaattattttcaatagaaacatagatcaaatctttatcagccacataaaagtcgtctaatcgttggtattcaccataactttttgtttcatttgaattatttagatgaagtaatcatacaccaaactaacctaaatgggtgaccaaacacactcacctactaaaaatttttctctgttctctctcttagtagctgaaattagaaataacaaatcgccgtttgttcgccgtcccttttcagctgggcttaagaacttctccctctattgcactcttgttttggagcagag

SEQ ID NO: 48045 - DNA, 404 bp, Arabidopsis thaliana landsberg
atggctttcggcctcccaacaaaggagattgggtgatgacataatacctctgttttattaagggaatgaggttatacaaataggtgacagaatcggcaattgatagattagagatacagattagtatgtgtatgaacgatcaagttacctgatttcaggcggaattggtaaagacgatcagcttcaaggagctcgtgacaggaatcgagcttattttgacatcctcctaatgcccgtagtgtccactgcagattgtttccatattatcaaacaaaaagatatgctataatgaatgctttcacaaggtttgagatcacaaacctgcctatgtgaccaagcatgataatgtttggcatcaagtgaaagtactctacgggtaaattcaagttctttccctgcaacat

SEQ ID NO: 48046 - DNA, 1224 bp, Arabidopsis thaliana landsberg
atccccgtaatgattgatgtcacgggtctgaaaattttgacaccggcactagatttcataacttttaagcggtgttggtggggcgtgggatattattattaaaattgaagtttctagtagtaaaaaagttcacagagagatcttttctttttgtctgtatctacctacttacttcagaattcagatgataatcctttatacatagagaaagagatcatctactatatgattattatatggtgtttatatggataatatccaagattactgaaaaatctgttgttttgttctgtttcacatctgttctagagaacttcaatatatatccatatatggtgtcattggtctgtgagccatatcctaagaactaaactagctagctctcttactatggaggagaggaaactgaacttgagcgtacctcttctttcaacaagacggatgcagaagacagcaggagtctctgtgcgtagaaccaagagtaataacttcactgattatgactctaagacaagtgaatgtccttctgttccagttcttgttccatatatgatgggtttagatgatgaggttactgaacctgcctctgttcctttcacttgggaacaagctcctggaagattaaagggcaatgatttcaaaccccaagtttgtgttttgatgaaagaagaagaacaagtttttacaccatgtcttccaccgggtaaagccgttgatgcaaacatgacaagattgcagagttcaaagggtaaacaagttgaagaatcagatgatgatgaagatgatgtgttttctgatgctcttgacactctctctccaaaggactcgttttcttttaacaatagcattagtggtgtgagtgaatatggtggcgttgagaccaagaaaccactggatgctcaatctcgggatttcatgatgagtcgttttttaccagctgccaaagctatgactgtggagcagtctcattatgcttcgaatcgaaaaccatccacttttatggctgaaccaacgatacagataagagagttagtaccgggggagaagcagcaaactcctaatagatatgatgtgtctatagtcccatcttactattaccaccaagacattgatgatgaagaaagcaaggtgggtgaggaagatgatgaagtttctgagtacgcctatctttcaagagaggttgtggaatgttgcccaattgtgcttttagactctctcgcatgc

SEQ ID NO: 48047 - DNA, 1210 bp, Arabidopsis thaliana landsberg
  unsure (1)..(1210): unsure at all n locations
ctattatcttcatcttcatcttcaacttcttcctctgtctcaacagcttcaactgaaacttgactccttagttcattaccaagaacgagactagtgaacatgcaaggaggtggtggaggaagagagtagaataagaagaanctctgtaagtatatgcttgttctgtgtttattatgttatatatatgtgacatataaacacagagatatataaaaatgaatcttggttttatatggatgtagtgatcaaagagtatgtagggttacatgttctaagaaaaaaagaaataaacaagatcttggaagtatttgagaaatttcttaagacattgaacatgtgaagagagaatgtgttttcttcacaattacaactaatccaaaaatgtgttcggtgttttaaaattaattaagtcaactattgatttgctgtatcgtgatttgtgaatgtgccatagatagcttaagcttaaactaatactaatataattactattttttatacatacacttggtgtgtggcatagaggtagcttatgcttaacttcattctaattcagcttttgtagaatgtctttatctattttcccacctttttccttttgtgtcttttaacgcttgccttctaaggaagaaaaacaaaaaatataccattagctcttagcaatattcgattacattacatattaatgatgaatcagtgattatattgtaaatctcgtatttaggatatagccaccgaggtgaacgttcgaagcatataagaatgggtgacctgcacatgtgatgaagaagaacagatgatcctattaccctatgctctgcagcatatttaaatatcagataggtccaaataaatttcattattaattaaaatcagcaataatgaagatattcccacgatcgatcttcacgtttcttcttaccccttttgaatttcgaaaagcttctttctatttggttggttaaaaaaaattaagatcgagcccactcatggccattatacgtgaaaacatatttctttagttcaatcatacttaccttgatgcgtaacaaaagtgtgaatactataatgtatgccactgcagagagtgcaggcttgttactgttctttcgtttgcatgattgattagataagaatctttccatgttacagatttatggcagtgtaaatataggtatagtataatattgttgataatatcacaagtaaa

SEQ ID NO: 48048 - DNA, 570 bp, Arabidopsis thaliana landsberg
catcagtttatgatatgctcaaaaaccaaaaaaaattgtttaaccaaattattgccaagcaatgattatataacaatttaacacatattttcaaaatttacgaccaaaaaatatgagtagatatgtcatcctaattctagcttttggacagaaccaaatttaatgatttggagagtagtacagaaattggactggtatcaatccaattgataatatgctattaatgcaataataaatgctctacaccaaacattatcatgatgactctgttctaccattaacttcaaaatgatcctttatttttgtttttgtagcataaattaccttcaagttaccctattagaattttcatgcacagtatcactgaatttgtagatgatattcatgataaattcctgtttcagaaaaatgaaactgtatatacaaaaataaagtataatattggaagggtgccttcaaagcaatatttggtaaatctggaaatacaatttatataccaaaactagacgctgaactacacctagaaactactccactgtcacatggatggccttaaaagcaatatattga

SEQ ID NO: 48049 - DNA, 973 bp, Arabidopsis thaliana landsberg
ctatatataataaacgaatttagtttacgaatctgtagtttaagaaagagacacatgtgccatggggtaaggactatgttggtctgagacaacagactccctcttcacttcgacgtcatgtggttatctcccgatctttggcgtgcagaataaaagcttcatctttataccctattcttaaatctacattgtcgaatgagaaaaattacaaacagtgggctaagttaaccatgaataatattcgaaccaagcgaaaaacttggtttgatcgatggaaccttagacaatcttccagcagagtcctcattatcacatatggctagttgtgaactttatgttggttgggtggctagatgccagcaactattcgaagacaagcatgttgtgtcttttgtcgaaattaagtgctagagcaacaggggcggaggcagagtattaataggagggtcacgctgcacccctactaatttgcaaattatactatactatgttttcaacattaatcatcttgaccaccattaaaacttttgtttgaccccattgacccaactaatttaaatacaagaaatgcaaaggcctaatatctttaaaaattacactcattttaaaaaacaaaacccaaaaagttagtgcaatctttataatttacatgggttaataaaaaaatcattcaaattaattaattttataccaaataaacaaaacaaacaaacaatttttttttgtctgttccgttacctaaaatttaaattatttattcgctaactcaaaaaatttttattttttttttgccttctacttgtataaaaactctaaaatgttaatttttaccctctcctcctaactcaaaatatatacaatgtttttttgtagtttttttttttgttgctattttatagattaatttatttagtatacttttttgactctgatatttctggctctgccactatagagcaatatggagggtaca

SEQ ID NO: 48050 - DNA, 387 bp, Arabidopsis thaliana landsberg
tcagcacccatggggactatgtcacacatctacacactgctttgcaagaatatggcttttccctatgacgagcccaataacttgcggaaagaaatactctttggctgtgccaataacttggaacttttatgtgagagacgcccagtagaactttggcgtcactactggacattatacttctagcaaagactcatttccaaaggaaattggatggaaacgacaggattgacccatttgaaagactgcttcacaacttggatactgtttactgtaagcctccagaaactattacctctaaggacgatggggttagttcctctctagaattcaggcagttatcatttcacgtggaagaaccttctgttcaaaaagatcagtggtctgttt

SEQ ID NO: 48051 - DNA, 382 bp, Arabidopsis thaliana landsberg
atgtacaagtttagcaatctaacctatttgttgatgatgtttacctaaatggacataaaatttggctcctgcgaatgtttaatacttttgctttttcagttttgctcagagaatatgttaaagaccttcacatctattatagtcttgcacttttgcaaacacacaaagaatggatagggcatttaccatccatggacagtgcactgtgaaccataaagtggttcagtctttctgcttctcttctctgctcttcactgcttggatcaaacataatacatgtgtgaaagtttccatctccggcatgagcaataacggtactgaaagtagaacaacaatagtcagcatacactttataggacgttaaagcttagtactgattgat

SEQ ID NO: 48052 - DNA, 310 bp, Arabidopsis thaliana landsberg
  unsure (1)..(310): unsure at all n locations
nnnnnnnnnnnnnnnnnnnnnnnnnnnnnnnnnnnnnnnnnnnnnnnnnnnnnnnnnnnnnnnnnnnnnnnnnnnnnnnnnnnnnnnnnnnnnnnnnnnnnnnnnnnnnnnnnnnnnnnnnnnnnnnnnnnnnnnnnnnnnnnnnngatccactggagggacatgtgtgggctatcaacggcggatagatttgtttccctaaatctaatggggtgatcacgattaaagcctcttcccgtgatcaatctagagtttttagaaatgcttagccccagcaacgggtgacaccctataggactcggggcgatct

SEQ ID NO: 48053 - DNA, 1187 bp, Arabidopsis thaliana landsberg
aaaaacacttttttgtttgtttgtttgcttatgatttcttgttcttgcttttcaggctgttagtgtttgacaacattgaaaatggaagtttaaaagaacacctcaatggtagaaaactcccaatacataatcatcaagacataatcctttattgaacctttgtctctttcttgatagatccgcttaagactcctttaaattggaagactcgcattcagatagctattggagtcgcagctgcattagtaagttgttttaaaaaatcatggacagtaatatgagtattcttgcttattcaacacaagaagattatgatccgctctttgactgcaggaatacttgctagtcttcagcagtaatgatgcacagatatatgatgtttcagtgaactcatgtaacatcatgttggatgaaaacttcacccccaaagtaagttcgaagatacaaagttcagtgcagacaaaaccaaatttcaataactgaaatcttcctctcacagatttcagatatccgcgtcaacagacatccaaaaaaccatccgaaagcaacccatgattcttgttctgaaggtaaaactaaaatttcttctttccaagatcaatggtattctgctttacttaaggtttgagaatttgatatgtaggatcatgtgcggatgaggaatgtggaaacgtgatattccaactaggagtgttgatgttggagctgatcacaggacaatcatcagacagacaaggcaatgacttgatcgaatgggtacaagactcgtgtattgcaaactcaattgataagatgattgatccagatttaggtaacaactatagctctagagaactccagaaagtcttagccgtggctcgactctgcataaaaacgaggtatgagcctccttcattctcaattacacatgtataccggtatctacagaagaagatcgatgttgcaacttgaatactagtttgttttttgtgaattgaattgggtttgatggttgaaattgagatgacatgtggtttatcatccttatttagtcttttgcctattttacaccattctagatgtaataacagcttatagtgtagtagcattgtacttgtcttgatataacttttgatatttgtagctgatggcaattgatttctttcttaccttatttgaaaaacactctttaccaagtactggtgaga

SEQ ID NO: 48054 - DNA, 493 bp, Arabidopsis thaliana landsberg
tatggatgagttgttttgagatttaggcgattgcatcgttagaaaaatcaagtttttttttgtgggatataaagagtttttttaagaatttgtgaatcttaaattagattaaggagcgctagtgtcttaaacattaggtgtacctccatgaaattaaatctactaaaacatttgccattaacaaatctccgaacttagtatgttgctgagaatatatttgcatcgtagaaaaatatgttcaaaaagtttgcaaaacaataaagaaatataccaaaacaaattagtctatacaaattttttgtggtaaattaaatctctcatagttacatttaaaaacttctttcacttatttgtaatttcaaaataaatagcaaaatcaagttcgtaaataacataatttacatgaaacgcatagaacgcatcaaatcaatggttttctactttgttttattaatcatttagagaatttatttttaaaaacagatatgtaatt

SEQ ID NO: 48055 - DNA, 3165 bp, Arabidopsis thaliana landsberg
cggtcacactttcaataagcaagcttggaacgagatgcttactgttttcaattccaaattcgggtcacagtatgataaagacgttttaaaagccggtatactaatctttggaaacagtataatgatgtcaaatgtcttcttgatcatggtggttttgtttgggatcagactcatcaaactgtgattggtgatgatagtctttggagtttgtatcttaaggtataaaaaaagttcagagttttctacgttttcgttatatgattctgactggtggtttgtgatttttataggctcatcctgaagcgcgtgtttataagacaaaaccggtgttgaattttagtgatttgtgtttgatttacgggtatactgttgctgatgggagatatagtatgtcaagtcatgatttagagattgaagatgagatcaatggtgtgtttttaccaaaactattgtttaatgcttacttagtttttggattggttggtaacaatgaaagttttttttgtaggtgaaagtgttgttttatcgggtaaaaaaagctcgaaaactgagtggactttggaaatggatcaatactttgttgagattatggttgatcaaatcggtagaggtaacaagactggtaatgcttttagtaaacaagcatggatagatatgcttgttttgttcaatgctagatttagtggtcagtatgggaaaagggtgttgaggcaccggtacaataagttgttgaagtactataaagatatggaagctattttgaaagaagacgggttttcgtgggatgaaactcggctaatgatatctgcggatgatgccgtttgggattcttacatcaaggttaggctaatatatctcttcttcaagaagttttgatcttcactaaattagttttaatctagatgtggtgatgcaggatcacccgcttgcgagaacttataggatgaaatctttaccgagctacaacgatttggacacaatatttgcctgtcaagctgagcaagggacagatcacagagatgatggttcggctgcacaaacaagtgagactaaggccagccaagagcagaattctgaccgtacaaggacattttggacaccgccaatggactaccatctaattgacttattagtggagcaagtgaacaatgggaatagagtagggcagactttcataacgagtgcttggaatgaaatggttacagctttcaatgccaaattcggatctcaacacaacaaagacgttttgaagaatcggtacaaacatttgaggaggttatacaacgacataaagtttcttcttgagcaaaatgggttctcatgggatgcaaggagagatatggttattgcagatgatgacatttggaatacttatatacaggcatgccactttctttttctttttaagatatcagttatatgtttatgcttacaaatgaagcatgtgcaggcacatccagaagctagatcatatcgagttaaaactattccaagttatccaaatctttgcttcatatttgggaaggaaacgtcggatggaagatacacacgtttggctcaagcttttgatcctagtcccgcagaaactgtgcgaatgaacggtaagcttctcttttgcattgtctttgagatatgatatttttgtatgtaactctatttatatgaatccttctcagaaagtggaagcacagatggatttaaagatactcgcagtttccagaaggtggtctataccagcaatgagaaaaatgattacccgtgtagtaatatcggtcctccttgtatagaatggacacgggttatggaccactgtcttattgatcttatgctagagcaggtgagtagagggaataagattggtgagacattcacagagcaagcttgggctgacatggcagaatccttcaatgcaaagttcgggttgcagactgacatgttcatgctggagaatcgttatatattgttgatgaaagagcgtgacgacattaacaatattctcaaccttgatggctttacttgggatgtggagaagcaaaccattgttgcagaagatgaatattgggaagcatatatcaaggtaaagatgttacaccgaacattatagggatgttttgttatgaagtcattttaagtgattagtgtctgatgttgcaggagcatccagatgcaaccatatataaaggtaagaccttggatagttatggcaatttgtgcaagctaaatgaacatctctcccaagaaagtttcaattgtgagaatcttatgatcgagttggaaaattatggcaatgagatggaaatagttgatgactttagttcaccccacaagcagcagaataagcgacccaacccaataactccgccgttggggatagtagtatgcaaggctcagaaaaccggagtagagacgaggaagcctttgtgtgaaacagaaggtgatgatgatgattgcaccaaacccatgcctcagatcgaaatttactcgagaataggaaatgcccttgatgcattgcaagctttgcctgacatggatgatgagcttctgctggatgcttgtgatcttttggaagatgagaggaaagcaaagacgttcttggccttggatgtctcgttacgtaggaaatggcttgtaagaaagcttcgtccttcggctaacgtttgagctgatgggtctatgtttgaagccaaacaatcgagcaagataaaaacaagttttgagcacaacatgagaatagttttgtgatgtaacgtattgtaaagttatgcattaatcttagatacaaaaatctgaagtacagtatggtagtgtaggtcttaacataaccatgaacaatgaatatcatcaattggtatgacaaatagctgagaaaagcatcttattgatgtcttctttatctgcgtcctctgtttctcccactgtatcagaaacaaaaaaagcataatttaggaatataacacaacactacaacagttttaaatacatatcacagtttcatttacacgagcagtacctgttctggatctaacttgcattgtccactcgtcaatgatctgttgaaaaacaagaaacgaaaagcaaagagatcatgtcctttgttatatgtagaattttggattgttttgcattagtaatgttcttgccgctatccaatagtatcagtagata

SEQ ID NO: 48056 - DNA, 1142 bp, Arabidopsis thaliana landsberg
  unsure (1)..(1142): unsure at all n locations
aaacttgaaaaagaaactatttctatgtctcctgacttttgtggtacttgattcctcaggtgtgactggaggttggtcaaataaaccttgatattcaactaacagtcaactcgtcctatctgaaacctcggattgaagatctctccaagatattctccaaggagctcgatgtcaaatcttcacaggtgagccaaactgataaacacacaacaacttgtaagccttaagcactattttcgccaatattgagtgaaaatgtgtctgtnnnnnnnnnnnnnnnnnnnnnnnnnnnccaaaggaaacgagtctctcgtcagaatggttgtcctcccacctgaaccttctacttggttttcaaatgtcacagcaacggtaatgattacacaaaagacttctccttacattgctcaatattttatcttctcacatgacatattccattatgcttcttgtagaatatagtttctcggtttacaaatcatcaaataaagcttcctgaaatcttcggaaactatcagctggttaattacaaactcgagcctccaagaaaacggtaatcgccattcattctcaaccgtagctaaaagattatcattccattgtctcaaaaagaaaattcttttccattcgttttttaggacgaataacaacattgtcgtgatcgcgattggaatcatcgctgtaatcgtcgggttatcagcttatggagcttggttgatatggaaacggaaacaaacatcaattccatacaagcctgttgatgaagctatagtagctgagcaagaacttcaacctatataaaggatttggtacctagttttattttctcctttttttcatacacaaaactgaaaaagcaaagctgtttggtcttattaaaaaaaaaaaacagaatcccaactgtctgaatgatctttattgtttagtaaataatgcctacttttcgttttaatttatgaaactactccttttgtttaggcttgttattactattatatttggtatatttgatgaaccacttcaacctctagaatatatcaagaactattacaactttggtctattttactaaccgttgcaacatttgcccgttatgaaaattttttaccagcactgatgaaaaatatatttgttcatataaa

SEQ ID NO: 48057 - DNA, 179 bp, Arabidopsis thaliana landsberg
tccggaatctgcgggtctggccaagctcattttgaggcattgggtacgggcttctagatgctggagccttgccggtcttgaactcaattacaaactctagctcccttgctggtggcagtccgggcaagtcctcggcaaacacatcgtgaaactcagatacgaccggagtatccttgggg

SEQ ID NO: 48058 - DNA, 993 bp, Arabidopsis thaliana landsberg
gtcaccttacatgttactttaaacggttgaacgcggtattataagatgtattatttgatcaataatctcttcaaaccttatcgtaaatatatatccggttagttacattattcacagagacatttctagaatttatccaacctaatgtgcggtgtctaatgcaaatcataatagaaatttgtataacccatttttttcaaaagaaaaatgattttctccatatcctattacataaaggattgttgtgtatttcttcttatatatagagaccattgttaataaaaacatcattgcataccctttaacgtaacttgttagtccatgtctcaccctaacgatagagaaacaaagatatatgtggcaggttcgccttggattacaagaaccgaaggtctcataagttacttcgaacgatttggagaaatcgtttatgctaaagtagtttgtgatggagcaacacaaagatcaaagggatttggttttgtaagcatttaaacaacatataatatgtagagtaattatttgatataaattattatttttaatcatgactttgagtcaatattattaggtcacgtttagagaagttgaatctgcaacgagagcatgcgagaatccaaatcacaccatagacggacgaacagtcaattgcaaacttgcttatcttggtgctagggttcacaattaccaaccaaaccaatacggttattaatctcaattctctttttggtttctttccaattcaattttttttgcagtgataaatattcattataatctttaatcttgtatatataagattacttcgctcctttgctctctttgctccttagctgaagagtccagggatcatctgctcctcacttgctcctactctgcgcaggtatggcttcaaatacttgcacgtatcgatcccaacaggctttattcatctcgtggggggaactcctttcttggtttcgtgcattctctgtttcggttccgtcaattctc

SEQ ID NO: 48059 - DNA, 952 bp, Arabidopsis thaliana landsberg
tcattcgatgtcaacaagtatagcatcattatatatgtgtatatattactgtagatgataaagaggatgttgaagaagaagatccatccagatgtcgatgcaactaaggctttaaagaaggacgttctatacaagccaactcggaactgtgaagctctcgagtcacattgtcttcttaaaattcaaggtttgtatttcttaattattttggtttaggggttcgatatgatttatttctttcatttgctcgtatatatatgctttgtggacagattgcgtggcctagaagtctaagaacgacgacatcgtacaagagcaatctctggatctattgttctactccctataatatatgtgatttttttgttcttatttcagaatgtgttggtattgttatgactgttgagatgtattgctttcttcttacaaacattactaagttgttactatttgttcctgttatgcatattgtattttattactatgtcatatgttttcttatttatacgtatatcaatgcatcgttctaaaatcgtggattgtcgtgaatctgtgatagtattccatcatgtctgctatagcttggtcagttttgaagaaatttcaaacctaaagtcataaactgataaaggactaaattatcctactcaaaacagaaagccctttagtgcgttattgggcctaatcagaaaagtgattttgaaaaagggcctagacacaaaagcgattttgaggctttataaacgtataaaggtcacaaatgaaaattgaggcttgacttttctttcttttattgactcgttctcttttttcctttttcttataagagaaaactatggcgtgcaagagcttccccagccttatgtcgctgaccacttggaggcattctcagctaccacatccattaactgacaaactacatattcttcacgttgtactataggaggcacct

SEQ ID NO: 48060 - DNA, 573 bp, Arabidopsis thaliana landsberg
cgttactctccatagtttttgagatgttttgtctgataatatcctttgtggctcaccattttcttctcttgctccaactttgtcaacatctcaaaattttccattacatttttaacttctgaattcgatggccagacttcagggtttgagttgaacggactataaatcactgcacatgcttcgattccgcagagaacggaaagctcgtggatttttttcacaagccctttctttctcttattgaatgttgcttttctcattgactcattggtgatgtaagataggtttagcttcttcctcgtcatggtaatgacaacaataaaaaggaatttgtatgtctagtatcaaatatgttttgtattgttgtatgttgtgtattgtttttatcatgagtttgtttatatggaacaatcaactgttcaagtgatgatctcacaaatagctggcaattaaaaatattgtaattaaattcaccaaagttcttaattaatatgaaataatgcatagttatgccactcggtacaaataacaaaaattattggccaaagtttttgagttggctacatcaagatt

SEQ ID NO: 48061 - DNA, 909 bp, Arabidopsis thaliana landsberg
  unsure (1)..(909): unsure at all n locations
gagttggtatttctagaaatccccttcttacaagcggccacaggtagtagaccctcctttgcctggaagagcattctccatggcagatcacttttggagaaaggtctgcggctttgtattggtgatggggagtcaacaagtgtttggtcaggtcaatggctttttgatggaagaatgagagctccgcttatgaaaaacatttttgttgacttggatttaaaggtctttcaattgattgatcctcactcaaaaacctgggacccggatatccttcaagatctcttcttccagaatgacattgatatcatctctgcgataaagccggtagtttcagggtctgacttttggtgttggttacacaataaaagtggcgattactcggtcagatccggttattggctgggctcgaaggatcataacagtgatatattccggaatgcttcagccttaccgtccatcaatcccatcaaagatttgatttggaacactttggctccttcaaaaatcaaaatctttatgtggaaggctatcagcggtgcaatccccgtggcagacaagttggcctctagagggatacacacggatcagcgatgtcaactttgtggtcatgaaggtgaaaccataaatcatatcctttttgtttgcacattggctaggcaaatttgggcattatctgacattccttccccggaaaatggttttggtgggcactctttgctgcataacttccatttcatcttaatcttatccaagtctccatctattctgagagaaaanagaagatcaatcccttggattttatggattctttggaagaatcgaaaccacattgtctctgaagggctggcatttcttgtgcaggaatggttggtaacgattcaagaggatgcctctcaatgggtttctagc

SEQ ID NO: 48062 - DNA, 899 bp, Arabidopsis thaliana landsberg
cggtcggatttccctccggataaagagagaagactttcatgtttggaggatagaatcggcgataacggggtggggaggtgtggaagagttctggattgaacaagagccattttggaaatcgatttctgcttcaaaatgatttcagttttagcttttgaggggttttagacgataaggcaattgaactggacatatacttttgtacttgtacttcgacatatactaatagttcattagttctcgtctttttacaatttacttgctcaggtaaagtcaaattcataataatttattgctgttttatgtatactttacttcataattcaaataaagattcgagtctttataactcgaagataaacccttccttaggtttgacaaaaaaaaaaaaaacctttcctcaggaaatcagacaccaaacatattaagaccaaaaaagggtttatggtttcaattttttaaccgacatacaaactgttgtcaacacaaaaacaaaagactccactgtaagtttttataaccctccaaaatttaaaaacaacacaaaggtcgactcacgaccggtgtaccagtcatttcaaaaaaatagccctggacaatgaaccaaacactttctcagacgcagtacttttaaaccgaccagccggtacaaacctctgagaccagaccagaccagacctggagtataaccatggcagtgaaactagactctgactgactctgacctctcacgattctcaagttgcaagcttccaagtccaatcctgtgggtgtatatttcagatcttgcatatcagattttgcatgttctcatcaagagacgtcgttagaaatttcagaatttatacttttatatagcttcagctgaagttgaatctccggatggtactggagcttga

SEQ ID NO: 48063 - DNA, 636 bp, Arabidopsis thaliana landsberg
tttaaccaaataaagcatgcaatattgcaatagcctcaaacgcaggcttaagcccaataacaagttggaatgtgtacgatctgtcacacataaaaaacaacgtcccgttttctatattcataaaaactacacctcgttagtttgttttaaagaaacgtcaagtagttttattcgcttagccacgtcggacgttgacgatagccgatagggttcaacgacgatttacctctgatgataatttcgaactttgagtgagttgcagaaaaaaatcagtagagctttagtaaggatacaaaaatggcggtgacgatttcgacgaatgctttcgtaaatgcatcgcttttagatgaaagtcggaattctttctggagaccattgtttcatcagccatactataattgccgacgagtcgttcgtcttaattcgaggaaattgaattcaaaggtaatgttttgcttgaatttgaacacgaaggaggttggtttgcaaaaacccggtgataaaggttttgaattcaaacccagttttgatcagtacctgcaaatcatggaatcggttaaaacagcaaggaagaagaagaaattcgacagattgaaagttgaggaagatgatggtggaggtgggaatggtgatagt

SEQ ID NO: 48064 - DNA, 693 bp, Arabidopsis thaliana landsberg
  unsure (1)..(693): unsure at all n locations
tcaaaccaaacacattaatttgtagtatcagatgttcatgtacacgtggatggttttcgatgtaaaccactcgcgatgttatttgatctgatcgttggttcttattgaagaaacaagaatgggatcagcggtaatggaaggtcatcgtatcctatttctggtgctataatctctactaacttattaaggctgcaagagtagtctacaattccgtgttctgccaccattcccttatccccgcatgttatgtcattccttgttctgcctttctcattctccctccccgcaaaactcattccaattctcattcccacgtacaacccacgtctagctattccgtgttctgccaccattccctcctccccgcatgttctgtcattctttgttctgcttttctcattccccctccccgcaaagctcattcgaattctcattcctacgtacaacccacgtctagctaaaattaaaaaacacaaatgaccctaaggagattcaaacccgcgacctctcagacaaatgcgagcagtagctactcctacatcacatgtgtgtttatgtctacatctatgacaggaaaacatctactacatctnccccaagcctaccntacgtaccttgcacaatgcgtagtagtagataagtatcacgagatcttgacatatatttctagatgaatgagtagtattttaagag

SEQ ID NO: 48065 - DNA, 449 bp, Arabidopsis thaliana landsberg
ctattagaacctctccatagacattgttcttatggctatgtcaatgtattcgagaatagaccctgggagttgaagtctttcgacacgagtaagaaagttggaagcagttgtaagttttctttccactttgctcattatgaagccaaaatgatcaacgttaggcttggtgtccattggtagtcccagataagtgaaagacaaaatttcaagtttgtagtaaaaaataccagcaagtttagggaagaggtttagaggggacatacatgatttcttgtagtaaacttgaatgccaatgacaaggagaaagattatagtagccctttaaagtaaagacctctagttgggaagcttccatgataagaataatatcatcaacatattgaataatctagggtattgagcaatttcataagaaggaattgggagcttcaacaaacctatcgaaggtg

SEQ ID NO: 48066 - DNA, 1068 bp, Arabidopsis thaliana landsberg
aaatggcttttttcttttgacactatgcattgttaatctttataataacttttgttttttttatgtaggtatgggacatgggccaaccgttattacgaacacttggaacatcttcacgtaactcttctatgttgtacttgtttttgagcctttaaccaaactctttttttttttttcgcaccaaaaaaacaaaccttagtgttttgagaagaaatgattaaaggaatggatacaaaaataataacgatcttaatttaaataaaaaacggcaaattattttgagcataaatataaattatactttcaactataaaaacaaaaaaaaatattcgacattaatttctattataaacagtttttaaaccattcaaaatttgattttgtattagcattgtttttttgttaccataaaaattcaatctcgcatattacatgttggcgatatattaatttacaatcctttgctaaaaacaaaaaaatttaccattaaaaatatattcagctttattataataaaatgaatgaaagtaataaataataacgatcgtaatttaaatagaagacgacaattttttttatttgtttaacatgaatctaaattatacttgagactatagaaacaaatagaatttatacaagaaaaatgtacttaccaaaaaaaaaatatatatccaagaaaaatgttgaaacaattactacatactttgaagattgatctaagcaaatattgatcggatcatagtaatgaattcgaaatctaagaccatacaaaacatgccataggaagagctttaaaaatccaaaaagaataaaaatctgaaaaatcccaaaaaaggaaataaaaatggattcacaagacgaaacccttgttgcatagcatagcatagcatccaccatcatgtcaaaaatagtctaataaataaaatactattttacccatttagcccctaggagcttaggcaagagaacgcaaggacagaatcggaaatataaaccagaaaaggttaagattttcttaccagaacagtgtgtgttagatcgaaattcgatcgatcaatcgcaaaaaaa

SEQ ID NO: 48067 - DNA, 953 bp, Arabidopsis thaliana landsberg
agttattgtaatcggacattagtataagtagagccaaaatcagattttaatatctttagtcttaagacatgaaacaagattaagaaaataccttgttttcaaagaaaacggttataaaaaggaggatttgagtttttgacattcagacgataaaattattgaactaggtctagtcacgtggtcgacgcgtgagagtttccggcgtgaactgcaagtaaaatcatgtagagcatgtgattgacttgaccaaagagtccaaacccaccaactacaaaaaaaaatcaagatataaataactaactctcactagtcactaatataatttttcattacaattcatatatgatctactaacaattgttgtggttatacaaacaaaaaatttatttttcgtaagacggaaattttgaaatcaaattcctcaacactcaaatgaatattcagtagtagtttatcaatgactagattagatatttcttaacgccagtcaaattttggaattatgtggaggacgtacgtttatacatgtgcagactacaacataccaaatgttttattaaaccaaattacaatgttgcaaattggtctattcttttgaataatctgatacattttatctcatagctttcttcctttttatttgaattcaatcaaataatattcttcacatgcccaaccttctttttttttttgcatgactaagtaggttaaggtcaacatttttcataagaagttgcttagaaatagccttggttcaaataaaatacacatgattttaccgtgtccaccaataaatcccaatggattttaatactgaaacggaaatcaatgcgaaactattggagtaagaccaatttattcatcttaatctaccaaattccgataccatatgtttaatacaagggagattgatgctagcaaaacacaaccatcttaattttttttattccttc

SEQ ID NO: 48068 - DNA, 1502 bp, Arabidopsis thaliana landsberg
ttcaagttatacatatgaaacctatttggtagctgtatatcttaatacctcaatcttgtcaagcatcgctgcattggatctcccagtccttatggagttgaaactcgtccgaagcgtttcaatggtcttctccatctttgatttctggattgcacaaaccaaaaaacaagaatcacatccaaatcgtttccactaaacagtaaccaaaaaagatataaagaacgtacaacatcagtctcaatagcagacttctctgcttctatttcttcaatagtagcagaccttatcaccaatctgtggaattttccaaacaaagaacatccggattagagacattcagcaaaccctaaaactcccaaatcatgagtggaacctgcctcttctgtagagagcgcttgacaacggggccaccggagagattgacgccggcaccgagcggaagcttgtctgtctttaacgaacacgcaattaagcgtgtagagggagatatcgccgaagagattatcctcaaacacgaatctatccaagggtattaaagcaacaacgatttggagccaaatggataatagaggacagtgaagaaacaaaattcgaacctgggagagagaggagaggcttggagtagttggctctgaatcgaagaaccggtgtcgtgggagcagtggaagagaaagaagccgccatggcagtagccgtagaagtgaagtgactagactagaaaagacctttcgttggttcgtctacgaaaattgaaagggagggagacgaagcagaccgaattgttcgggataagaaggaaagcttgctctgtttggatggacagctaactataatcccttcagatatatcttttctgtgggccttaatgggccgtaatatcccatttgctatttacatggtagcccatattgaaatgggtttgagccaacaaaatttgtattgggtcgaagaaggtacggtgatcaatggtctgatttgtaccagaagaaaagtaaaactaaaaggtttaaattctaacatatttatgtcatggtccaaatcaaagggtaaattgtcaaagggtattcaaaaatatatattaaatgaaatggtgcattgatatcatcattcataaactatttatatacttttgccggttcgtcgtcgattccacgtccttcatttatgatggataggagatatataaagaagagttaattagcattaaataaaaagatactagtagattagtaagaagaggcaacaatgtgattagcgggagccgagccggtaaggcagccgaggttcgcgcttactccttgaccttcatactgacatgcctactcacacgtgcgagaacagtcctaccaccccatcaatgtttttttgtttagtaaaattctgattatactttgattttttttcctgtcaagtatacctttgatttatgttcttttattccgtgaattacttatattatgtgtctagaatacgttaaggctttaaaaatagataattttcct

SEQ ID NO: 48069 - DNA, 847 bp, Arabidopsis thaliana landsberg
  unsure (1)..(847): unsure at all n locations
aacttggagggttttttggtgaacctgtgaacagaaataagctctgatgaatacaaagaaacgagactttggtttttaatgttttggtgttataaggaacttacccattctagatgttgtgctgttatcccggaggcattacccgagtatatacttcccagtacctatcaagattggatttaaacatcacataaaaaagtggtcaatgttctctattactatcatctgttgaacataggggatcgaggaatgttggaaacatacctttgtgacagtttctagaaacattcctggtcttactggtaacggttttcttcctgtaacgcttccctgagatcgcatcaagtaggcaaagtaagaaaagaagacatatctttggttcagagcctactgaaaagtcttctcttttaacaaaacaatgtgtaacttgatcatacttacccttccttttaatccacttggttttcttccttcggtagaagaatcggattctttgctaagattatctgcgccttcatctttcccttgcattacattcnnnnnnnnnnnnnnnnnagtctttccaggtttcagagctaccaatttggctaagaaattcacctgtttgacgatcaagcaacaagtcactgtatctcaatgtttaaaaaatgttcacaaacacagcatcatggacataatagtttgtcacacaaacctctgattcaggaagagtagtgaaacctcggtcatttctttcatcaagtatacctcctcccatcatgttccgggcttcctctctatcaaaacaagcctcgctagtaggtttcgatccggatagctggccttgtttcatagtctgcaaaatcct

SEQ ID NO: 48070 - DNA, 689 bp, Arabidopsis thaliana landsberg
agtccattcgtctttgaaagaatttgtttaaatctgttttatttatttgatccttattctactgttatggtaagggaaatctctagatgatcacaaagttttttcagaagtgtcaaattccaattagaatgtgcaaatctaagatttttttatcagcatttgtggaaaattgaggtctactttttcctgaagagaatgtatttaccttttgaagtgctaggcaaaagtcagagtaggttagtgaatcactgtgattttttgccccaagaaaagtaaaggcatcgtcctcggctatggaagctttgtgtagttgatactggaagaaaccatcaagagaaatcagaaatagacaaaatgaacatgaaaatatcgtttaggaaaaagtaaatttggaaagaatgagacaagacatggtaagtatgatgtgactttaacattttgtaaaggtatagtgcttaatatcttagttttccgaatatctcaccttgataatgctgaaaacagcttccacccaacttgttctcaatggttttcttgaatcactagggttacagagccatatgaaatcaactccgcaaatatttcccctgtggtttctgtggctaacccactgaagaaataaatggaagaatgacggctaaggatgtgtctttttcaatatgacgtgttcttattacagaacgctggag

SEQ ID NO: 48071 - DNA, 1996 bp, Arabidopsis thaliana landsberg
  unsure (1)..(1996): unsure at all n locations
cttttctctgttgtcgagagatctatcaacaagtaaattgatagctgaagaagtatgatcttcgactccttctgtcatcaagccagagatttccacaagtctcctcacaatttcctccttctccaacgaacctcgctctgcagtttcctccatttttttcaaactgaaacttaaatcatccagttcctttctaatgttacttttctcctccatttctgctgaaagagacatgcttacactttcaatccggttttgcaaggcattaacttcatcttttccctggagaaaagattctctaagccaagctaggcgactttctaagctggattgggacatctcctctggtaagtcaatggaaacgatcaaatcttttagtctgttgtattcctgggaaacatttgtgagctctttcctctcttctgcaagtgaccttactttttcaacgatatcaaaagagtgaccttcttcaggtgtatatatgtttgacaggatagtttcaatattttcaatgatagagttcctcaccgataacatttcctgatatgatgcaaccatagcatcggattttgctaactcgcctttgtcgagttcagattgatccaatgctgttgacatctcttgtagtttcgtcaaacactcttcaagttcttttgttttttcagccagagactgttccaactccttctttgttagctcatatgcttccagggatacggacctatcattcaattcagcatagcatttctcaagttcatccgtcttttcggttaacgattgttccagctgccccttcattacttcagaactttcaagggcaatctccttctcttgtaattcagtcaacctattcgcaagctctgttgttttttcagacaattgatgcttcagagcatcccggttctgaactaacgccttcccctttgttacggccatgctgagcttttcttttgtgttagtacacttagtcttttctagctcaagctctgccttcaatttttcaaattctgttctcattgactcactcatttctttctctctgttcacttgttcaacaaagttcctattctcatcttctagatgactaagtctttcaaaaaaggctgcttccttctgtttgagctcaaatagctcagaacaagcagcaccaagagctgaaccaaaatcctcttggaaactaagatccaacacatcactagccaaacacttccttaactgatcagcaccatagtaaaactcagtatactttgcacctaaaaacgaaactcggttctccagatgagcaagcttttcagagatagaagaaccatactgcaactccccttccccaaatacattactaagagaaaccataatcctatccgatgcagcctcaaggtgctccaagttctgtgcctgatcacccatttcggaaaccggctgcgacgaagaaagctcagagatttttgtggtgagatcagcaatctcatcgtccctcccactaataaccccgtgaagctccttgagtgcaacctcatgctgaatccgctcttccttggcagtttttaagaacttcgagaagcgactgacaatatccacagtagtgttcccatcttcacctgtcaaatcattctcaccagtcaacagcttaaactgctcctgaagccctgcaagttcattctcccaatcccccttctcaatctatatgcagaaaacaaacaaaagaaaagatctttcaataaattttcgaggaaactcaactaaaaatttagactttagaaagaatcataaaaaaaataacagacattgaaatgagttccaaggtcatcattatcatcgtcatctgtggtaagagcttccttgctaggtgtatcaaaattcaactcttcaggagcatcaacaaacatatcttccttactatcaacgaaagctgttccctgcaaaataccaatccccacaatttcagcatacgaaacacanaccacataaacgattcagagccatgggtgaatagaaatct

SEQ ID NO: 48072 - DNA, 397 bp, Arabidopsis thaliana landsberg
  unsure (1)..(397): unsure at all n locations
aaagaaggaaaaagaaaaaagaaaagaaagaaaaaatagaaaaaaagaaaaaaaaaaaaagaaaaaaaaaaaaaaagaggaagagagaaccgatacggaaanncaagaggaaaaaggaaaaaagaaaaaaaaaaaaaaaaaaaaaaaaaaaaaaaaaaagaaaaaaaagaaataaaaaaaataagaaaaaaataaagaaaaaaaagaagaagaaaaaaaaagaaaacaaaaaaaagaaaagaagaaaaaaaaaaaaaaaaaaaaaaaaaagaaagagaaaaaaaagaaaaaataaaaaaaaaaaagaaaaaaaataaaaaggaaaagaaaaaaaaaagaaaaaaagaaaaaaaagaagaaagaaaagaaaaaaaaaagaaagaaaaaaaataaaaaa

SEQ ID NO: 48073 - DNA, 1424 bp, Arabidopsis thaliana landsberg
gatgatccacatgtaaatgcgtaagtatattaatgataaagagattttttacaacgaaaaaaataatatagatacggagagtgacgcaaaaaaaaatttcttccaaattatcaaaatgtgaagtcttgaatttgagaaaaaaaaaagtgtatggtaatgagttcaaaaatgtaaatgttattaataatgtacaaattattattaaagtcagtaagttgattcagaagagaaatgtatagtttcttcttaaattttctgatgagaattgtaggaaatcaaattactactatttaaccattttagaattatgatccatttgaatatatttttcaacatatcataaactttataaaagaattttggaagaggtatttatggttggcccagttatatctgtttcacacaaagcccataaacacataattttcgaacatgcatatttatgtttggcccatttctctgtttcacacaaagcccataaacacatattctggaacagatatttattgtttaatgctttaattctaaaatttcctctttgaaaacaacacgtgacaatcgcgttttgtaagtaccgaaaggcgttagcgtgtaatataatcggacctaaaattgacccgtcccaatcctaaattaacgggttcaaaacccgacccgataacacacacacagatatcaccaccattagtctcacttcgaagaagcaaaacaaaatccccaaattttcaacaaggataagagccggaagctcatcgccggtgaacggaactagggtttcattcatccccaaattgataacaagaaaatggctcatgcttgcgtctctacatcggcttcttctctcagattcacagctggattcgtctccgctagtcccaatggctcctctttcgattctcccaagctttctcttcctttcgagcctctccgttcaaggtttttttgccattttccacttttcttcactctcgaaactatggattctttagattaacttagggattgtgtttgcaggaagacgaataagttagttagcgatagaaagaattggaagaattcaactccgaaagctgtatattccggcaatctctggacaccggagattccgtctcctcaaggagtttggtccattaggtgaaacttgagcttttaaccatgttcttgaactgtgtgattttgaactctttttgatggtcaagtctggataaatttgttactttgcagagatgatttacaagtcccttcttcgccgtattttcctgcttatgctcaaggacaaggaccacctcctatggtgcaagaacgtttccagagtatcattagtcagctcttccaatatgtaaacttatgaaatctactctttctttaagattgattatcatagtttctagcttagtgttaatgaatggtttcgtttgtttata

SEQ ID NO: 48074 - DNA, 714 bp, Arabidopsis thaliana landsberg
atacttttcttttactatttcttttcttgttttttttttaaataagtgtttacgaatttattgtttttcaaactttgtttggaaatttatttgatttataaattttatataatatagaaagtatgaaaaaaaaaatgcgtagataatatcttgtcagacgcaagaaggttccaaatgacattaatggcaaaatccagagtaaagacagtcaaagaatccaaatttgctatgaactctactttcgtggataacactctaccataataccatttcaacgtcaattgcgtcatatcttacgtcatatttttctaacacattatctcaagattacatatacccatactagctagtcagagaaaattgctaataaagcacatcacgactttgatgtcctcaaaagtttaaaatgtgaagaccatttattagtgcaacatcgatcgattgaactatagagaatgtgacatttccaacgaccaaactcataaaaaaaacaaaaatcacaaatgcaaataagatcttaactaaaattcataaatagataataaaataattaagtcgagaaaaagttgcagtgcgtaaattttattcacggtcatactctcaaattttatttattttctgattataactctttgtttcttcggtcggggtaacacgtcgatttggatgatgatgaggatttaaagactcatagttcttcaactgtaatatgtt

SEQ ID NO: 48075 - DNA, 1130 bp, Arabidopsis thaliana landsberg
ccttatgttttatatgagattatgagttaatggaataaattctggaaactgtggccacttgtatatataaatatctcaacgattgacaatttcgtatcgccacttgatagttgtctatcgaaatgatgtacgacaaaacaattagaaatattgatataaataaaattagtaatgcgttacttattaattaatatctcgttaattatcagagcttatctgtacggataagtaaatgatataattaacacagctttaatcacccgcttagtcgcaaacaacacgtgatgacgcaaacacatttaagaaatggttacttccgttgaaaaggtggtgtcgacatgaaatcggattctactatgttcttttcttctttttagtgctagctactatatatgaactaagccgaaacgaatacagtactaatataaaacattatgtatctacctacggtgtaaagagaaacgacataagcgttgcatctttgattattctatctatattataaactttatgttgattactcgattcattgtatctaccacggtgttttatatttttgatatatgaccgaaaaagaacaccgatttggattcttattgttaggatctcacattagttgtatagagagaccaacactaaaatatattatagtatgggtcataatttattatcaattaattttagttgaaaatcagagcttcgtttgttaaccggaatagaatggtctaaaaaagctttattatcggttttaatgtggaattcgatttgagatagactgagaagaaccatcatctcaaaaaagtgaagcaaaccattcattatcgattggttttgagtcggaaaccaataaactttaatacttattattagacaacattttaaatgttatatttaacaaattaaaacctgatcattgatggtaagaaaccacttgtatatacatgcaaaggctcagtcttattaagccttcacagaagcaccgaaaaatcaaagtctactatgtagttctataactcgtggtatatatacgacatataattatgctcttttaaatcaatgaattatgttgacattctaagttctaaccatatatatacggcattatgaacttgtttttttaacgtaaaact

SEQ ID NO: 48076 - DNA, 586 bp, Arabidopsis thaliana landsberg
ggagagaacggcgaggatgagaggccggagaaagagattggcgcttcccgtgggaacagccattttaattagagaaagtttcttcttgtggatgttgtcggagtctacactctgtctatttatggtcagcaactggtactaatctattgagaaatctttacgtgtttcgtggttttttttttcttctaaaactttatttttgaagtgacaaaatatatttgacccaaaaaaaataaagttacaaaatatattcacaagttaatttcttaatattgttatacacttatacatataattggtaaacttaaattaacagtttgaaaaatttatggtttgttcaagggatccatccaagccccggtttcatatcgaaaaaatggggttttctattgctagtattttatttgattagtttgatattaatgatagattactgaattcttacataagatctcctaacaaaattgtattttatattatgatattcagttatcaatggttttggagaaacattgattcagcgtatactttttgaattatctgtatattcttaataagagttctgtttttaattaaagtctaaaga

SEQ ID NO: 48077 - DNA, 571 bp, Arabidopsis thaliana landsberg
ataaaagaaaagaaaagatcaactcagtgtttgggctgaaatttccatagcccgcccagctattgcgccccctcggcccattccacttttgcctgcggccatcactcccgcgtccttctatttttctctggtgtatggcgcgtgggtcctgttcgtcggtcatagcgtgtccacgcacttggtcatccccttccttcaccctcggagggagccgcaacgaactcgtccgtatctcgcgcgtagtcgcgcgtaacagaatcacgctgccgccgcgcgcgcacctgcggacccagcccctcctttctcccccataagaaccatggtttgcggtgccctctccctgagccggtccatcaggaagccctccattaacccacctgattcgcagagagagagagagacgagttaaagaaagcatgttggtggtcgccgcctggactgacgattggagtcaagtattggggcggggtgctcacaggagctcgggaccccagctcgagctcttcttcacaaagcaggcgcatcgcagctttgaatcggttggcacgcgacctgctctgcagtggggtga

SEQ ID NO: 48078 - DNA, 640 bp, Arabidopsis thaliana landsberg
  unsure (1)..(640): unsure at all n locations
cttccatcaacattgtttgcatttgtgtatcaactaaaatcatctgtaggttgtcagatatattagcatgttctgttgcttatattatgttttcaatgtgcagcactgcgggttgcccctttggtgcaagttgccattttctccataacttcccgggtggctaccaggccgtttcaaagatgaccaacttgggtggaccgcctgttccggctccaccaggaagaatgcctatgggacctggtggtcctgatgggccaccttcacctgctgtgaagactcgcatgtgtaacaagtacaacactgccgaaggatgtaaatgggggagcaagtgccactttgctcatggagagagggagcttggaaacccctgcagatggacaacccgatgggacctcctccaatggggccagggccaacggcgacttcatgccaccgccaatgcctttcccagacatggttcctcctccacattcggtgcttcgccacagccaagatcagcgtcgatgcatccttgctggtgcatcattgggaagggtggtacaacacaaagcatatatccgagtgactggggccaagttagcatctgggacaacgaggctgatctnaacataaaaaatcgactcgagggacatttgacaga

SEQ ID NO: 48079 - DNA, 645 bp, Arabidopsis thaliana landsberg
tggaggctcacaagtctcataccatttgctattctctctgcggtgtggactgcggtttcgataacccgatttttgcagccattgagcttgattactccgaggcagatcaggatcctactggccaagctgctagtgaggctcagaagcatttgactttctatgagctcgatttggggctcaaccatgtctctagaaagtggtctaaccctgttgacaatggtgccaatatgcttgttactgttcctggaggagctgatggcccgagtggagttttggtttgcgccgagaattttgttatttacatgaatcagggtcatccagacgtgagggctgtgattcctagacgaactgatttgcctgctgaacggggagttttggttgtttctgccgccgtgcacaagcagaagacaatgttcttctttttaatccagactgagtatggcgacgtttttaaggtcaccttggatcacaatggcgatcatgtctccgagttgaaggttaaatacttcgacaccattcccgtcgcatcgtctatatgtgtgttgaactgggattctcatctctgcttcggaatttggaaccatggtttgtatcagtgtaggcataggagaggacctgatgtagagcttcctctctaactgatgg

SEQ ID NO: 48080 - DNA, 188 bp, Arabidopsis thaliana landsberg
gattaggattagaagaatcctgcaagttccttccgaccgggggggggggctgaagataaaactccgctctccattcatcaacacaggtcataagcgagccaccagaagctcccatgtggattgacctcaagtcttgactcaatcctgcatagttcaacaagctcatggagtggactgtttttttatta

SEQ ID NO: 48081 - DNA, 382 bp, Arabidopsis thaliana landsberg
gggaacttggaggattcttctaatcctaatccatccgcaaatgggttttacccttttgagtcgccgaggataacttcagcgtcaatctcttctgctttagcatcgcagttttcttcggttaaagttgaagataatccttacaaatgggttaatgtcaatggtaattgctcttcctggactgatctttctgctttcggctcttctcgttgagttcaaccacacaacaaaaaggaaacttgagggtatactttggtggggaaaaaactagttaccaggttaattttgtcttattcttcgtttttgattagttaatgttgtttactactttcctcggtctcaatctactatgcttctagctctaggtagcctaagttattggatg

SEQ ID NO: 48082 - DNA, 407 bp, Arabidopsis thaliana landsberg
ttaagtgtcataaaatattgacaattaatttatttttttacaattataattaacactaggtattatcgtataagatatattgaatcagtgataagataattaatgtattagagaaagagacaaggagtctttgtggaatattttacagtaagacttggtgagtaaattaatggtttcagttgttcaaaggaatatttcgctatctctctacgcatcgatctccatctatgtatatacaaggattctgtttataacaatgtattattttaacaaaataggtaaatttcaaagtataatcattctttgtttaaacatctaataaggtatcacatgtctaggtaatcttatctaataagtgaaatttctgatgctttgttcatatttgcacgtcttaacatgtcttatac

SEQ ID NO: 48083 - DNA, 447 bp, Arabidopsis thaliana landsberg
aggtaagcccggccgaatccatccacggcggtcttggagcgggccacctggtgggcaagggaggcgatgcgtttgcggccggcggcggtggtcaggtccgggacttcgccgaccacctgggcccgagcctgggcgacgaaggcgcccagtttgttgtggccgaatacggccggcgccttgtcgtcggacaggtcgtcgatcagcaggacctgctcgccttgggtgttgccatcaacgtgtgcggtcattgggtgttgcctcgatgcggtggtggatgtggggggcgcttattgcgcgccgacctgtttctcggagatttgctgctcgtatcggatgacctaggccagcgagtaacggatggtcttggtgcccaacacgatgcggcgcggccccttaccagccttgtgccactgttcgagcacgcgcttggtcactccccagcgctcg

SEQ ID NO: 48084 - DNA, 1377 bp, Arabidopsis thaliana landsberg
  unsure (1)..(1377): unsure at all n locations
tgatgtttataatgtggagaatttaggtcagatttatttaattatcggcctaattaaaccactagattttattagtttatgattttagaaaatataaatcccaaattcattttccaaaccatgttatagagcaattgcgaagggaataggtaaaattctaatgaatcaagaactcgctagaagtccttttactgtgaataatatatattttgttttccttcgcatatgctttcaacaatctaaaaaaattatatattgacttcaagggctatactcatcaatcttttgtgttaatgatgaatcaatgatacaagtcaagttagaatattaattaactatagattaaaaagaaaattcaattttataggtgtcaattaatacgtaaacaatttggatgttacagaggaaattaaaaagaagaaaaaaatggaggagaaaccaaactatgtgatacaagtagaagaagagcttccaactttactgagaaaagccacaacagaagaaatggttggctttgacaattacaaagagaatggtcatccttttcctcactcaatcagtcgttttcatccatcgcatgcctccacgactactttggtatgttacatattttatttatcactttccacactcgcaaaaattaggttataaacttattatataactaattccgagacaattatgttacatatatttatatgtacagaatggtcaagaaacatcaagatcaatagacacaatggaagctcatcatcataactacaatgagacaacaccatggactcatcaaagaaaaccatcaatttcaatgccaacttcaccaaatgttctcatgatctccgacccgacaacatctttgtcttccgaaaaccacaagaacagtgggtcgactggcaaatccgtcaagtttctctctcagccgatgaccaaagtctcatctctctacatagaaagcggtaatggtgatgatgatcgtcgtcaaagccatgataatcatcatcatcatcttcatcgacaacatcagagtggtcatcatcaaaatcaaaatcaggctgcgaacaagcttaaagacaacaggtacaactcgttcaagacttggtcggggaaacttgagagacaattcacaagaaaaccagcttctgttgaaccggaggcaccaaaccggaataaccaaaatttgaataccaatgaagccatgcctgtggaccgttactatgacgccttagaaggtcctgaattagagaccctacgggtacgtacctacgttttttttgtatcttttacatttgaattgcattcatgtggtaaatggttttaatgacctttttgcgaanatatatcattactagaagtcagaagtgacacgtttataacttt

SEQ ID NO: 48085 - DNA, 728 bp, Arabidopsis thaliana landsberg
agcttgaaaccccgctgtctgaaaagaaatttgacttctcacaagaaagttatttgggaaactttttttagatattagtaagagaatgaaggagtagaagccacagtgctacctcaaaactgttgaatacacatcacaacgtatacctccagtacaatacatcagtatatctgtcttttccttgtcaacatttatcaaagggtctgaaggggcttcctgtagtgtagaggaatagtcaaaattcttcactgttagatatatataccttccgtactttacaataatgtaacctatagaagagacttgtctgatcacttcatgttagtctacagattgtaaataagaacttttcagctgtcacagtttaggagtagttgtaccttttcatcagatagcccaaaagaagtgttccgaaagcaatcaacttcaggtctatgtgccccacgaaagtgaccaacatcccactcataacctgttcaaaccaaatgtctatcatttccaaaaaccagtaggtttactttttcctataatatgctaacacattttaagaatcacgaacaattacatgcgtgcacaactggacataaagtgggaaaccacaatacaactatcagaaaagaatgatcagtcatgttgatactagataataagtgaaaacaagactgttctgttactatagacaaagagaaggaaaagtaaataccatttctgacatacaaaaatactga

SEQ ID NO: 48086 - DNA, 678 bp, Arabidopsis thaliana landsberg
atccattgccgattccaagactgaacgtgtctggtcttttgtagaactcctgaaattgactcaacacaggctcgttgaaccttattgaagcagcccatcctttggctgagtcgagaacatccgcataactgaaccctcccacaaacacaataccgcggaactgatcaagggtgatgtctccagctagaagatcagacactgtcacgtcccaaggttcaaaaccggcagcgtaaaatgcagctgacatttctctgtctccattgctgccttcctctcggatcactgctacttttggcttaacatctgagagcatatacaataaacaaacattttcattagaaaatatacgctatataaataattaaagataaaaaaaacctcatagagagcgatcataccctgagacatataattattgttggtcgaggatggaataaatgagagtttccaattaggctcatgcctaaacttcaaaccttctttctccatctctacacaagatgccaatcgttgcagcttttccaactggaaactggtgtcttcccacatgtctctgaggaatgaagttttctcactcaaatgagtaatcccatccacttttacctctatcagaggcgaatcagtgacatttccaatgatctcagcagtaacattgaaagcacagagtttttccatcac

SEQ ID NO: 48087 - DNA, 449 bp, Arabidopsis thaliana landsberg
  unsure (1)..(449): unsure at all n locations
gattgatagtataacttggccatattaaattggttcggccatagcatatattaaaaggcccagcccagtataaaccagcatattaaattatagtttgggccatagcctatattttgctttcactgttacggtaaaggttaaatcatagtgaatataatgtagtttaacagacctattattacatgtttattacactaagttatccttgcaggcggatggatataacaagaccgggtgttatggcctcgaccttcctggatttgtgcagactagcagtaccatcgccatcggagctgccattggtcgnnnnnnnnnnnnnnnnnnnncccagtttgacatgacacttcagatctggaaggtataaacacttatttaatttgttctaattttgatatgtttgctaacaattactaaaaattgcaggatctgttttcaggacattggtggct

SEQ ID NO: 48088 - DNA, 344 bp, Arabidopsis thaliana landsberg
tgcttgtatgatatgagtttctgttgtcggacaataattatatgaactaaatcttttcacatatatcattagtagagtaactatgttaaaacaaggtcgatatagatgtgcatcatctttccctctcagtgggagctaagtgaacagtttggtctgtagggcttattcagcgatcctatgcagttcgaagcctattagtttgtttacagcatatttgattataggcttcgattatgtccatagacgctaggattatggcatggactgcggtagcatgtctgattcgaattctatggacttcactaactgagaggacgtacacgtcatcaggcgagagcggacga

SEQ ID NO: 48089 - DNA, 630 bp, Arabidopsis thaliana landsberg
ggcaaaggctcggattccggtagtggtagacggtagtgcatttagagctggagctggcggacgagcacactgaagggtggtcaaacgaggtccgagtgtgtttatacacttaacttgtacaaaaaagaatgttttgattccacaagtagcaaaccatggacgactttgaattttggtgtggaaattagttacaaccccgtttcgcagttttctcacgtttcaactttttacattctttgccacggttaaaagagatcttatcaaatcttctggagattcgtcactgaccttattgaagtaggcgcgcgtgcaacaacgatagttataactgtagatgatttctgtgacaagcgccctctggtcttgcagtttcataaagggcaccgacaacatactcccgagtaagataaaagtctatcaaggcaaaaatatagaaacatacataaactaaaaactgaagtacaaatctctgtggtgtcctgtgaacgatacagcgtatcagtgtccctgtggaccacgcacatgagtgaccggtcgatgttgaattgtgtagaagtagtcatcgtcatagatgtgccccagattttgacaagctaataattaaaggctaaataatggattagtatatga

SEQ ID NO: 48090 - DNA, 549 bp, Arabidopsis thaliana landsberg
aagtaagccaacaaattctagaggtgtctagaaacaaacaaatgatatttattgtataagggtactgaaataacttactgagttaggccttttcccgcgtccgccgttcattcaaagaggtgatgacggggagagagagagagaggagaagacgtcgatacgaaaacaccgtcgatataacttggcggcgaagaaagagcacgaaggttttctcgctcgctatctgacttctctttgacaatttttatggtatatatattcaaaatcaaagagtcacgccccttggttaattttaataactgacccttttttttcgcttggcctttattaatggtggatttattatatttaatgataattacaataatgataaaatggttaatttacggcaatctgaaaagaccacacgtagaaaataatgattacttttgctaactgtcgttcttcattttaaatctctcattcaataattaacgcctaacagaatttcaattttatgaatataatatatatactagaaaaaatattaaaaaaaatgcgtattaatat

SEQ ID NO: 48091 - DNA, 1018 bp, Arabidopsis thaliana landsberg
  unsure (1)..(1018): unsure at all n locations
tgattcgcacttagcatatatataaaataattaaattatgtgatagtctcaactttatagatgattcgtttctatgatagaaacacatgttccccttttaactcgtccacaaatagaaatacgaatacatcaacaggatactacaacaagtatactaccaaaaaccctgattttttgtttttcaaacgtaaaacattttttattttacttttggttaaaatattcacacttttttttagttatctaacctggctgtcctttaaaatgttttcaacccgtaaagtttgttagtttccgcagatgagaatctcaagaaaaaaagaggatttattaaataacccgtatatggctcgattttgaaatcttgtccttctgaactaatgtatttaacaaaaaaaaaaaacataaagaaattctataaaggggaggctaacttttttaataaataagtctatcattgaccttgccattggaacttggaactatgtaaatttggtgcataaatactgtaaatactcccatatcatttgagctagtggtttggccctaagtgttttaagaaaccaccacactttcaaatcttttcaatgttgcactttgtaataaatatatcatgttctcagaataacatctaagctttttgagcatgtagtaatctatgtgattatataaaaggttttggtttatatacatgtaggtggactttgtgatgaaacgttacagggacataaccccattcctcaagccatgccacactctaaccctaggtcctgactacatcatcccacaagacttactgacagatgatgaagtggcggcctacgagactcctcgatcaactgtggtagacggcgatgagtccatgagctggtcctcagcttcctcggataacaacaatgcgggtgcggcggctgcttatgccgcaaccaccacccatgtcgtgaggaaaaaaaggactggtttttgcctttgcgctaaatcggctaatagttataaagaagtttncgaggatcctgac

SEQ ID NO: 48092 - DNA, 132 bp, Arabidopsis thaliana landsberg
gaaagaaaggagaagaagaaaaaaaggagagaagaaaaagaaagaagaaaaaaaaaaaaaagaagggaaaaaaaaaaaaaggaaaggggaaaaggggaaaaaaagaaagaaaaaagaaaagaagaaaaaaaa

SEQ ID NO: 48093 - DNA, 580 bp, Arabidopsis thaliana landsberg
aagggccgtcattcctaaaatcccgataaaagtcggcgtggagattttcattttcatctgatacagtctagctttggccactgtcacaacacttcaagtgtgtttattctattgactaaattaatgtaagaaattagaaaatcctaatcatagcttatgtttgagctaactttgacataaagtgtcggtttctgcaattattacaccaagattctcgttaaccgtcattttcgtttttgtcggcgtcttgagatttttattatttgcaaactgccacttgaagtgatctggtacgatgcaggaaactgcaaacactagtcttaattttgaccgttggattggaactccagtcgcttattcatgttcatcggacggatagtgtaggttatttgagtttggttgagttgcgattgacacatgataaacattagtgtaagtacatgaactatttttgactcggaacgttcttgacgattattgactcgttcactaattttattttgatatttaatcgacgtcatatctttctcgtttgaccaacaaagaaaaaaagatatatctttcttgatattatttcgag

SEQ ID NO: 48094 - DNA, 1103 bp, Arabidopsis thaliana landsberg
  unsure (1)..(1103): unsure at all n locations
cctaaatccgtgaacacatccttttttatttggaaaaacaaaatggaagggagttgggaaaatttcatttctcgaaataaaagccgtgaaactaacgttccgtggaatcgcgtgatacgaccagtgactatctttttccacgttacctgatttgtcgcatttcaaaatttgtcttacaacattattcgaaaactaaagaaataaacatgaagtcacaaacaaaaaaaataaaatcatcagaaagagaagactttcacagtaagacaactgaaattattattccatgatccaattataagagtcaatggcttttgtctcctttgatacatcataggtcacaaagtcttcaaactattttttccttttatacggtcgaagaatgtttggtcacaagcttacatctattcatgtctcggtcaaggatacaaaaaaaaatcccggtttaatccggtatataaccatgacttaaatctcggtttaccgttgagcagatcggtatgcttcttcgtcggagataaccgccggtatgttccatgttcccagcgaatgaccagaaattttcccacctgatcaacttttttcattaagtcaaccaaaaaaaatacagagaatttgattgatgatgttatcttggtaccttctttagtagcttcttcacatcttctttggtaatttgaagacaaatgtggatccagggatttcataatctcttcatacttctcttcagcttccgatatccgcttcgcctgtaaaaaaaccaatgagctctaagacattttcagagaaacgttgatttgactgtcgtattaatgtttctttaccagttcagtgggtgcattcgatgagccgaatattcccacacacatacgtaatacattgaaattgttctcaagaacatcatcctacaagaaaaccatatcgagtgaaagatcgtgatgactaggggagttcttgagnggtgtatctaacctcgtaatcgaacctgcacagtaaagttgaaaccattcagattctgaaacttttgtgattgtttgtgctagatgaggagatttttaatagaagatacagatcattcgctacttcaaccaganactctgagattg

SEQ ID NO: 48095 - DNA, 772 bp, Arabidopsis thaliana landsberg
caggaataattggaggcattgaccatcactcactcttgtattgaatcagttgatgtaggttgctttcatattgtgaatgatctatataatgtgttctctataacaggtacatcgattgtgtggatgctcttggagtggaattcccttgaacaaccacactccaaactttcttgatgttagtccacatctatgtttctaagtctttcgtcttataagcttttctaaaagtgggaatcatctgagtttttgctcgatccctaaagctgttgattcattgtttcatctaaatcttacgacatctttgatggagtcttgaactatgagaatatcataaattcatggattatatggtttctttttaagtgttgtttattgcttttaaaacagagatttgagtttagtgtatggttgatagtcaacgaacagggaaactatttcttgcgttcccttttttatttgtttgtatccaaaatgattctattttccattttcccggtaactgagaacagctaacaaaacagataaacctactaatagtgtatagtaacattactagatgacagaattttgataatatgactaatgtatttcccctagtgaatttaacttgtgaaggagcttgccatcttccgttatctcacaagtcacacctatggctcaaaattgtcaatcatgtgttgtataacatctgctccagctgaattgatcatctttgttttcacctgtaatgttttccaaatgtgagtatgaagtttataacagtagcaatggg

SEQ ID NO: 48096 - DNA, 156 bp, Arabidopsis thaliana landsberg
cctatattattttttattgtatattcatacattaattatttatatttttatacatattacctatataaatatatatatttagtatacataatatatatatttatatattacttctctctctccctcctctctctcccctctctctctctcttctct

SEQ ID NO: 48097 - DNA, 222 bp, Arabidopsis thaliana landsberg
tattgggtgcatgtgtaccaaaataatgagataaataataattgatggaataattagaaattaattatattttatatcttttattggaaacttttctcattattctttttttatttattttatatttcattgtaaatggtaaaatttgtgaggaatctattattttaccatataataatgagataaatggataataattgatggaataattagaaataatta

SEQ ID NO: 48098 - DNA, 526 bp, Arabidopsis thaliana landsberg
  unsure (1)..(526): unsure at all n locations
aaatgggaattcgctgtttaacatggatgcatcaaaatcgaaactggagctagagataatatctgggattctcttgccatcccaagggacaactttgtaagatcctttttcgaagaaaagaatcccgcttgctagaacttcaggaatatgtgttttcaaaggagaatcagcccggccaagaatgtcataaaactcaagctgcagaaaagaagacatagagttacaatcataatgattgcacatattgctaaattattatataaagaaaacttgcctcagtaccnnnnnnnnnnnnnnnnnnnnnnnnnnnnnnnnnnnnnnnnnnnnnnnnnnnatagtcagacaacagataaaccttacagcaaaaataagcgaagtcagagcaaatagatgaagtaattaggaatagtgaagaacttttctgcgacggtattctaaaagagacaataaactcacagggttgctgccagttccaactggaagcttttcatcttcggtaaccaacggcaagtttgtggaagtcata

SEQ ID NO: 48099 - DNA, 720 bp, Arabidopsis thaliana landsberg
  unsure (1)..(720): unsure at all n locations
gaatgctgatgataccgaagatacaacacctgttagttccgatattaaaacagaacactatgaaaggcgtagtggcaagctaaaaataaaacaggtgtttgacactttggaagagtttaaagaagctatggtggattacgtgttgaaaggaggatggaatgtgaagtttacgagatggggaaaagataaatcagagctcaaatgtgcgatgaaaggagattgcccgtggagaatttattgttctttcgaagaaccggttggaaagtggatgataaaagtgtatcacaacgagcatcgttgtgtcaagaatggatataccaagctatnnnnnnnnnnnnnnnnnnnnnnnnnnnnnnnnnncgatataaggagtaatcctaagttcaaaccaaaagctattcaaggacaaatccagcagcgttggaatttgattgcatcgcgtgatcaatgtcgaaaggcaaagcaagtagcgttggagatcatacaaaaagaacatgatgaacagttttcaagggtacaagactatcatcatttggagtttatggagtaagtatttctaacaatatggctgcgtttctagcgtttcttttgacactttgatatcgatcttgtcttggattttctttgttagctcaagccctgattcttctgtggagtttcatgaggagagaagtaagaatcataacaggaaaaaggaggtgcaagagtcttcttcagtga

SEQ ID NO: 48100 - DNA, 722 bp, Arabidopsis thaliana landsberg
taaaataaattattagaaaaagatcgaaaaaaggtgatatatcatatcatcattacaataggtgtgagtcgtccgtcgcctctgactggtccttcctttcgggcacgatagcaggcataagccactatcagtgcgatgatgattaatacaccgactgaaattccagaaattgcgataatcttcgttggatcagtccccatgtttgttttaccacacgcacccagaaaaaagtttatttctactgcttttattttttgtcatgtcttcttgtgacaaagtatgtttacatttatttacaattatttacatttctgttaataaagtccgtgaaatttgtaagttttacattttattagttaagaaaattaacaaggatgaactggaaaattacactttaaagaatattaattaggaagaaatagaaattatacatttttatggtactttgttgatcttcataccatcaaactggaaattgtacattttaatagaaaattaactatgaaagaatagaaaatttacatacgtgagcatgtagtaatttaaggctatcacaaaaattcgacattttatttcagaatattctaaaattttgatatttaggtagcacattatcaaatattgtaaaataaaataatggccaggcttatacgatttgagatttgattcgtatccatgaatgccatactcgatgagtagttactgttgtgtgtgtattatag

SEQ ID NO: 48101 - DNA, 1172 bp, Arabidopsis thaliana landsberg
cacgagaatgtacaactttgtctcacagaagattcgtaaataaggtttggaagatagacttatggggaatttattgggtcgatttcgtcgaactcaagaagccccgatgattgccctgctgctttcccttcaccaccaaaaacacacaaagatttcacatttccataaaaaggacaaacaataagccgagccagcgcgaattagatcataccttcgcagcatccttaagaggtccccaacactcgatccgattgtacttaggtgtgcttgaatggaaataaacccatacataagcatccattagctcaggattctctctaaacataactgaatctccatgcaccacagctttaagtacctatctcaaacacaacaccaaagagttattagatagtcattttcacattcattaagaaccaaatagacaaaagatgaagaagactaaccaaaggcaattccttggagaaaatatgatacctaagctcagcagcaacatcctgcaataaactcataccactcacacaacaatgaatatgtaaacgcagctcatcattcaccttcttccactcagcaaccacatcatctttcttgtaccagccttctagttgatccagattgataacgtttgagattgttaacgttaagttagcagtgaagtcacaatgcgaaagaatataagtccgcggcgtaataattcatccgttactcttgttctccaataactctcctaagaactcaactttaagttttgaagaatcaaagtttgcttgtggaaccaaaagcctcaccgcctaataacaccatcaacattcacattatcaactaactccactacttaaacatgtaatcaaattttgatcttttttgcattttcaagacctcaaattcaaaattaaagctagacccaattcaattatggttataaacaacataaatctacaacctttactaaaaaaatatcaatgaggattaaaacgaattaaccctaaaatttggcttacctcggagactagagtattgtaaagttcgatctttttgcattttcaagacctcaaattcaaaattaaagccagacccaattcaattatgatcataaactacacaaatctactaaaaatcaagatgaattagaaaatttgccctgaaacttggcttacctcggagactagagt

SEQ ID NO: 48102 - DNA, 1038 bp, Arabidopsis thaliana landsberg
acatcaaaggcgactctactccaaaggtaaagaatcggtttcttatgtaaatagacgacacaatgttgatgttgtgcagcttagtcatgaatggttttatattctctagcagcctccaacagaattgatcaaggaaatcgcggtgttggagttagaagtttctcatttggaacagtaccttctatctttgtatcgtaaagcgtttgatcaacaaacatcttctgtatcgccaccaacatcgaaacaacaaagctcgtgttcacctaaatctactcttagaggaaaacgtctagacttctcaagaacacctgaatctcggtgtttctcctttgacaacagactgaagagtccacgtttggtagagaaggagctagagtctcctaaccttagatgtagacaagaaagcttagccacgcaacctcgatgtttctcatttgacaatagactgaaaggaacctagttctgctggtcgacaatgtaatcaagaagtctcaagaatcgattctcggagtttctcctttgacaatagagtgaaggaacccggttctgctgctcggcatttcaatcaagaagactcaagaatcgattctcagtgtgtctcctttgacaatagagtgaaggaacccgtttctggtgttcgacaattcgatcaagaaagctcaagaatcgattctcggtgtttctctttcgacaatagactgaaagatcaatgttttatcgagaaggaggacatcgattcatgtgttcgtcgttgccagtcctctcttaatcaacgttccaccttcaataaccgaatatctccaccagaagactcggtattcgcgtgccactcccaaccattgtccatacatgaagtaagtctcattgcaacggatctattttcttctatttacattgtctgtaactttactcacttttgatgcaacagtacatacaaaatggatcaaatgatgcaagccttgcagaacacatgggaactcggatatctgatcacatattcatgactccaaacaagttatcagaggaaatgatcaggtg

SEQ ID NO: 48103 - DNA, 870 bp, Arabidopsis thaliana landsberg
catgctacttgctttgcttggtaaaactatatcgcgactctctgatgtggtatacacactaaagtcattattatttcactattttctttatactcttgcatttaaaaagatgtttggacatatctccactgaatatatttagatatatgagatttttttgtcctatgtgaattgacttgcgtttcccagaacattatgcaaattatgtatatggatatttataacgtcacatatgattcgacgaggaggacatactaatagcttaactaaaacccctttttaaatatcagtgtcctaatttgtttttaatgtatttatgttttttcaagagatttgtctttaagtattagaatccaagctatagaaaaaaatccacaacaaatataaaacgttttggtagtaacaaaaaggtttgtgtatgtatattccctttccttgcaagtctaaaaaatcagaattctttttatttggcatcaaaaggaaaagaaatggtagatggatgaacctttgatatgatatccaatacgggcaatatctctttttcttcttctatagttgaaacttcgatatcattcagtaacagcacgatcaattccatgtcatgttacaaactaattttcaatccaagaataaaaacaacaaaattatgtggatttcttgtatttcattgccacgaggtcttccatctaaaaataggaagaacatacgtgttcaactgtataagtatataattcgataattaagaaaatgcacagataacaaaagaaaaaacaacatagtcttattttccgaattaaaatttttaatagattatttgaaattattatcaattttaaaaattagtgaaatgattaccaaatactaccatta

SEQ ID NO: 48104 - DNA, 374 bp, Arabidopsis thaliana landsberg
  unsure (1)..(374): unsure at all n locations
tccagtgttctctaaaggttgctggagctgacgaagaaannnnnnnnnnnnnnnnnnnnnnnnnnnnnnnctataagatacgatacgattcgcaggacttgtagcccgaaatccagcaagtattattatgaagggacctccgtggacaagtagtactacgcttgccaaggcagtcgccggagaagcaggtgtcccggtctctagtctctctggatccgacttagtactgatattgctcggagatgaagctagtcgtgtacgctctctatatgaggatgcctaatgggcagcagcagctaccatctcgatcgatgttgatgatgccgaagtgcgtcagcgtggagtcgttctcagcggtggtaacgtcgtacgtc

SEQ ID NO: 48105 - DNA, 649 bp, Arabidopsis thaliana landsberg
  unsure (1)..(649): unsure at all n locations
ttttgtacaaaagaaatggacatctttatataacacatgtaaatgtcgttaatataaattttccagtacataagtacgaccctttccagattaagaaccaaataggtttgccaaatgtagaatgtgtatgatccataatcaaatctatgattaaaaatgtttagagaatgtagctagaatgtagtattaaaatatatattagtcggtttagctatattggtcaaatatatcggttattgttggtttagtcttagacttggtttagtaattgtagtgtagatagtgctctttcccaaactgaatgaagatattttaagaatactgatagtatatttaggtaaacagctaaacctaaaatgtatctatatctagaaacaaaacacaaaaacaagaacacatgcacagaaaatggaattcaatttcttcacgtgatatatttcaataaataatcaaaaatttcatcttaccatacaaaaaaggtaataaaattatcattagtattcacataaatcagagaagatcanaaaacctcttcgatcagacacaaacagggtattcccaaacagcagacaggttggtacgatggttctcatactacacaaacataaacggttcagattaaacagagtgttagagaagagtacccgat

SEQ ID NO: 48106 - DNA, 563 bp, Arabidopsis thaliana landsberg
acacaagccttctgatgctaccctgccggcttaacttacatacaactgcttatctttctcccaacttttttctttacagcataacacggaaaacgagtcacgatggaacatcatgtggggactgttgaagtgaacaatgacggtgcttctgggaagacctgtccgcctccagctatgataccatccatttatgcaaatcctcctataagaaactcaccgcctccgagcgacatccttgtttgtttcaagtgcaaggagttacctgtgataccttgcaagtacgacggccgggaatactgcattgattgcctaggaaagaaatccaaccagaagaagtgatctgtaaattcgtcgatgaagtgctatttgatataaagcagtatatgaaatgtttgaatgaaggttatctcaaacgcctctccggaattccggaggaggattgtttgaatgatgttccaaagctcaaataagtgatcgagtctggaagcttgtctatcgatttgtcaaagtcatttccgagagtcagatgggtgattgtgttgggtatcaagtccacttcttga

SEQ ID NO: 48107 - DNA, 2420 bp, Arabidopsis thaliana landsberg
atgttctttgcggtttcatgttcgaatcacactgagtaaaataagatccggttttaaaagccaaaacaatgagatcatgataaccaattaagtacctgaagaggaagttcttgttcgtcgttagagatacttgagatcacacttgttcgtgaagagcttgatgaaaatccatcccatggatggataaatattagtttggtgcattgaatacgtgtgagactttggcttagtttctcccaccaaaccgatcctagtgaccaccatctgatcatcaaaccgttttctgaaaacgcaaccaatccctaccatacaaagagattttattcttaggatctcatcaagagtattcatcgggaacttgtccactttaatgtttggtgcagaagctacaatgtgtttatgcataaattttacctctccatcaggtgaaaagctgagagctgatatagctgttgtcacggcagattctgaagctcctctgagaaaatttgggagacccggaggtccactcgcatccaaaacccttatttttgtcatactgcaacgggaatcacacaaacaactaagaaactgagataaaggtgggacagaaatacaaagcatgtaaatttttgtaccttcgcatgtcgtatatgcgaatacatgcattgtcgatctctgtgataacatcgccgattgctaaccttgttgacgaatcgtttaagattaccattggaaatacgcgcacaacttctcttagcgtagccattgaggtttgcaggcaagttttacgcatgacggtgttgcttgggtccatcgtttgaagaacaaagttaactgcctgcaagattttcccaaatgtttctcaaatctctataagagtatacagacatatatcggtaaaaatgttctgcttatttaaatctcaactagcctcgctgaatgtaaaagtagatgctacaaaccttctcaagatgcagcaccagatttctaggagcagcccggattattctgatgagagttctgagagatactacatgaacaggagaatcagaagctgtagaccatatttggctctctattatgctaagaaatccaaggacatccgccatggctaaacttggaagaagaacttcgaccagagtctcttttatagacgatggtacaacttgatatgctccgactgaggaactgacacactctatttggaaaaatatgtctgaaactatccgaggaatgtcaggtccgatccatgttttccatgtagtctccattccttctgagagaagctccgcagcagtcgagctgtatttctcactcatggccataaccaggttcaacaatttgtggacgactagcatggctagaccaggttttactagacttgggtaccagattgataaggcagccgcaacaatgatgtgagcagccattgcgtcctgacttgttcccccaacacaagaaatccagtcttgcatttcaaaagattcaagccatgagagtatttctgactcctcagcctgagaaagccgttgagcttgatggatatgctcagagtccagactgtttgtgggatattcttcccctgtgctaagaactttaggttcgtttagactgattccagacagggatctcaccagttctgcatgttcagatgcgtgatcactgcataatggaagaggtattgccaaagaagcagtgtggtggaataatgaccgagctgccatacggacttgttcgctattatcttgccagaaagttaccaaaagctacaataaaataaggagaaacttttagcggttttgtgactatttcgataaaatacaaagtcatctcaacccacataacatctggtgcacatagccaacgacctcacctgaagtaatggtggcttcagatctggatatttctctgccagatttcgcgtgtagaacgctgccaagttgctgtaagaaaaaaaaaaacgaaatagtttttacatgtgggaataaaacatgaagatatacctttgcaagaagagagatggttataaggatcacatgatgtacctgctatatgtggcagtggaatgtgacagacttatcatgcactgagcaagtgacaccataatcactgacctcaacgcagtaaactccgaagatgatttccagagctggaatgttttatgaaatctcagataaagaaggatattgttgaaatatgtgcggttgtgacatcaatataggtcgtcaaatattacctcaagtgttgcattcaaaccagggaatgctaatgtcaatgatcctttgtctccctgcaaaccggaggttacaataaaactctctggtctttttagctttagatgtgctactagcatttgatcgagttcataatctataccccacaaatgccgaaaggataaacctaatcgaatcagatttttttcaatagccttgtccatg

SEQ ID NO: 48108 - DNA, 555 bp, Arabidopsis thaliana landsberg
ctaacctttcgtataacaacgactctaccttaacatttttcgtaatatcaatcaaacttagctcgtggggtcggggataccttttgtggttcaaatacgattctaacactgaatgtagtgttgcaatatttaaacattatgttttcactgataccgttgtacgcagtggactatcccaatacccgtttctcttttgacatctaaaagttataatttttactcattcaaaacaattcatgttcgaccaccgtctttcagtcctagttgtccgttgacatttcttaattcctagacacaatcaatttatgtctataagtgtagttaggttggatgacaataaactcacaagaaattaagagtagcaaatagaaagaaaaaatgattgcttgtctaatttttaaatgcaatcggatataatgttacctctcattaagttgtcacaggaggataattttcttgtaacatgttacttttatgtaggaatcaaaatttataggtgtgtaaaattttgaatacatgattaatttttgatagaacactatatgatcaattaaa

SEQ ID NO: 48109 - DNA, 1432 bp, Arabidopsis thaliana landsberg
  unsure (1)..(1432): unsure at all n locations
aaagaaagccagggattatattaattaatgcacattattcctagcatctttttcaattaaagagaaaaggggacctttccaaggtctatctaataacagttgcctaagtcaaagttattatcgaagagtttttaattattgtatataaagtcaattaatataaaacttagaagagctagacatattgctgacgcatagttgcaaccgtaacgatacgtgaactatttttaaaaagtgactagccacgaaactaaccaatttcatgtcttaaactttgctttcaactatttctacttgtgagattttagataaatgatacttatctctcaaatttaataatttaacgtaaagatactgaaagttccttgaaggaatatttaagttatattatatagtgaaaagttgcaaataatttcatggatttcattcaacttggatcgattgttgtgtttgtaattttaatcaaatgtctaaaccagcaaaagtcacgtacgggtttctaaactacaatgtagtgaactagtgacttctgtttgaggtgtgcaaatttcttgtgaattttgttatgggtccatttccttaagatttctcaagaaacatcttgcacctcccagcttgactactcgtagacattttcaatggcaaaacaaagccataaataaccagatttctattagttccataaattagtttggatttcgacatgagattttctcagttttaaatacatcatgggttttgaaactaattagactcacatttagtaaaataaaaaactaaacccatatataaaatatgtgcattttatacaagaatgggcaagatttgtgtttgtgtttgtgcttcaccgcttttgatagcatatattttcttagttgtcttcttcaacatgatcatgttatgtgctgttggccagaaagaaaaaacgatatgtcatgtgcagttttatctgtgcattatgggaacttgtcttaggttagaaaagaaaaaaccaaatcaaaaaaccaaaataacacattctaaatttatgttatcatcacgagcattcaaacaaatacgattcagtaaaatgtttggtagttgtcaaattgctaggtggcaataaatttgattatacaaaaattattaagcgaataatatatagatggtgattgtcaacagatcatttgattattactaaatcactgtttaaccaaacatggatatctgttgtaaattttaccagtatctgaacattaattgttatatcattacgttccatcattttctaatttctatcatattttagtgtccctagtatcatagctcatatcccgaaacattcattgatagtgttcgaatgtggaattatgtatgttaagcaagacttantcatcattaaattacgcggtgtttctacccaatcaaaataaactacgcggagttaatgttt

SEQ ID NO: 48110 - DNA, 263 bp, Arabidopsis thaliana landsberg
gcctggtacttcttttagcaggcgcctgtctacctattatgatatcatatttcaagcagagctccggccggcatgtactggtcacctttataccgatgatcatccatcatcaaactgacgtagtgctgatttacttaagtctatcgttcccactgctgcatgatagatcgcatcactagtgagcgctaaatctatcaacaagcattcttccatacataagttggatatggttgtacaaatagtttgtactatgcacgtatttg

SEQ ID NO: 48111 - DNA, 822 bp, Arabidopsis thaliana landsberg
atagaagaaaaaaaaatcgtttaattttttagttagtaaaaatgacgtcttcgccactggctattagtttgccttctcaaagcaaatacatgaattcatgaagatcaagaataaattatttttatttgttctcttacatttgatgcgtttgaagttcaaggttgattgtttagtttgtaacgttagacttcatgctcaagattttacttttgtaagatctatgtcaccgatttagatttcagaactttttaaaaatttaactaagattattgatcaaacaaaactggtattatataatagttttgtcatcttcaatttactaaatcaaatacagccttaaggaagccaagataaaacgtaattgtgtcccaacagagaaataaaaacaagttagcctcttctcctaccatttaatttgaagcctctgaagaaagcattttgtagaagggaccgtctttttgaatataagattggtgacggccttcttttttaacacttcttacaaatttgttttaaaccccatttacattcgtccctacaatatattgaaaagacaacgttttctctgaagaattgatcgctctgacgaactccctcgttgaggagaacataacgcaatccggtcttattgtgagtaagctcgaggaagcccaaataaaacattgaatttccgctcgaagatgcgagacgagacgtggcaaataaaggcagttctcacatatatatttacctttccatgatatgaacaccaaataccatgcaatttcgaatgatccatgttcttccacaatcgcttgattttcatgtatacatatatatacg

SEQ ID NO: 48112 - DNA, 601 bp, Arabidopsis thaliana landsberg
cacagaaaccctcctaaagaggtctaaaactgtatcccattcatttccctagatttaaatttgtatgtgagctattctaaagcacaaatctgtcatccgaagcatgttcaggaccacaattccagtgtgttatttgttttctcatccacccctgcctaaaatcgttagaatgctagtggtggaggccagatttggctctccctcaaacaatgaaatcatgttcagtcctaggagcagtggcatagcttaggtatgaaaggagagggggcacaggggggaaagcatggccacgtttgaccctcaccaagtccccactgactgagggcaagaaaacagcacatatccgtaactggcccaggacagtaaattggggacagtgagttactgatagttagttgcctattgtctagaggtggcgaaatttaggggggtttatctggatttaaaacttgtactataacaaacagaagcaatagaccacagtacccttgttctcaatatttttgcagtttgtcaagaaaaccttccgtttaatgcaatctaaagatagatccagtgttgtcagctcccacatgagtggcggtctgggaaagaataccga

SEQ ID NO: 48113 - DNA, 232 bp, Arabidopsis thaliana landsberg
ccaaacacacgaaaatcagccatgggcaacccgaaaaccagaggggacgagcgaggcacccaaaaggagatcccacagatccagtcagacacacaaacagcgaccctgggaggaatataacacaagggtgcaaacgaaaaacgaaaaagcatggacactccaaagagtagcacctgacggtggaacccattgtgaacgaagaccaacagcgaacgacaaaaccaagcggcaa

SEQ ID NO: 48114 - DNA, 362 bp, Arabidopsis thaliana landsberg
tgattaggcaatatcaatatcttggagtcataaaggacatatcacatcaacaccataatctgtcgacaagaacgtaattatatgaagcacaacgatgttcactcgtcatgactcgtaagcaccccacaagtatcgaggtatttataaatagaccaaatgtctcgaaagtggattgtagatatctctaagaaattgcattcgcagggctttagcctattcagtcttgtctatttccacacatcatatctgtacgtggcactatagatatagagtactcccgagtctccctctacagaccctccgaccaatttgggtgatcacttcaggagcatatgccgcgagaacaaggatgtcagatcatg

SEQ ID NO: 48115 - DNA, 827 bp, Arabidopsis thaliana landsberg
tttttttcactatcccttgacgtcactttccactttttcttactttcaaaaattatgtaatggaaaacagcttcaatgtagtaatcagatattccgagtgcgatgcagtagttaatttacagctatatatgtttttaataatatactttgtagtttagatgtatttcatgttggaacaaagtttgatattatcacaataattatctgcacataaaagtagcatgcgtgtgtatacacaagttaattgacggttaaggcgatgcaaaaaggtaaggaagagtaaaacttacgacaagaattccatgttgtattaggacaggttgtcgctttccccaatctccggcgacggctccggttcgtccttccggtatcctttgcatattcaatatgtacccatcttgagtcaccaccttcataatttaacaattaaaataacagctttatcagttaatatatcgatgagtaatcatcatcaatagctatatagaaaaaaaaagaatgtcgtacgtacatcatgttcttcgcacttgtaaccaaatatgtgaacagaagaagcgcatatgccgccggcagcagtcctctgcggtggctgtccggcaagcctgccgaaggttccacgagcttcaagggtcttgagggaaagagcgaagaagattaagacagataaggctaaaccgattgaaacggacggaaccataaccgaaccggccattgagatatatataggggttatcacgtacgttataggaaagtgaaaatggttttatatatagagaaggggtgacggataagataatagaaaatggaattattagcctattataaaa

SEQ ID NO: 48116 - DNA, 765 bp, Arabidopsis thaliana landsberg
taccggaaattggctctcaagtaagtttaatttggtttcttatgtctctcctagagtcctagtttgaaatttgaaatttgcaattcgaaaagctgtgttaattttagggttaggctatgaagaagaaccttgaattgagtcaatttaggttaccgataagtctgggaattagtcaatgactacttgttaatctgtgatttgtttagctaagcctaatccgaattacattagggaaggtgatggtttggtctagggtaattacaaatcctctgcacaagctctctctttgttttttatagtccctaattaatgttttgtgttgcaggtaccatccggataagactgcaaatgatccggttgcagctgacatgtttaaggaggtcacgttttcttacaacatcttatctgatccggagaaacgtcgccagtttgattcagctggttttgaggtgagatttgttttgcattgtgggattgtagatttactctgacctctatgtgtggcaagagttaattttttgtgtgtgtgtcttctgttgaattatagttatcatgctgtattagtctaggttaagatgctgtttaggctcttataggaccctggtctctagaaaatactgcttttctgtagggacgttcttaatctgtggtgtgctttcaaattcttttagcagctaatactactctttgcatcaactttaagaacttgcttaattgcaatgcgcttttttttttacaagcttgtttgaagctcgtaaagcctaa

SEQ ID NO: 48117 - DNA, 488 bp, Arabidopsis thaliana landsberg
agcttgtctcggcccccctctttttctgacttgctggtggtttctagctaactattaagtaacccctacattgtatcttttctttatgttctcttaaggatcttggcccccctctttttctgatgtatgactatgattttatgcgtgccctcttctttatgacgctgtgactaaactgtttttattgtaccatttttcttttttagcatgattatcgatattacgtgttttagcatgtaatgtaaatagttttgactaactaaaaacattattgtgttttgagcatttagtacgtgtgtgtcagataactgactctgccttttttgcgttagcattatcgtgttttgtctgtgttatcgcataaccgaatccaccggcatgttagccgttaatattatagtgtttttagcatttagtacgtgtgtgttagataactgacattaccttttcgcgttagcgttatcgtgttttactgtgttatccgttag

SEQ ID NO: 48118 - DNA, 636 bp, Arabidopsis thaliana landsberg
  unsure (1)..(636): unsure at all n locations
cggagtgatgataacagatcaggataagcttctaagtgatattgttgttgaagtctttccagatgctcgtcatattttctgtttgtggagtgtgctgagcaaaatttctgagatgctgaatccatttgtgagtcaagatgatggttttatggaaagtttcagaaattgcgtagcaagctcttggacagatgaacattttgaaaggaggtggtcaaatatgattggtaaatttgaacttaacgagaatgagtgggttcagttgttgtttagagatcgtaaaaaatgggttccacattattttcatggaatttgtttagctggactgtctggannnnnnnnnnnnnnnnntatcgcctctcatttcgacaagtatatgaactcggaggctacattcaaggacttctttgagctctacatgaagtttctgcaatatcgatgtgatgtggaagctaaggatgatcttgaatatcagagcaaacagcctacactgaggtcttctttggctttcgagaaacagctttccttgatctacacggacgctgcttttaagaagttccaagctgaggtacccggagttgtttcttgtcaacttcaaaaaaaaagagaagatgggacaacagcaatattccgcattgg

SEQ ID NO: 48119 - DNA, 589 bp, Arabidopsis thaliana landsberg
ctgccgatgaacatttatgtttgaacaaaactcatagctctttcactgtaatgttgaattccaagagtaatccttgtgaagtatacaatgatacttaaaacgcttcaaaacttgttacagagctaccgcaattacttgcctctcttcttgccacctcctttcttctttcctttattcttatttttgcctcctttcttttttcccttagacttgatgcctcctccatcacctcctcctcccaagttcttctcgaccctactgggtttcttcgtcttgaaatctctgtcactactacttgaaggaccagaacgtagcaaatgcttaacatcaagaacaccgcctttgaaaatccctccagttgacttcaatactctctcttctggcgtacgctttctctctgcgggtttcctactgctacttccacccccaccaaatctgccaagaatcacattctgccaatataacacatgagaaaactagccgttgcaacggatcaaaagacagagttgttcataacctaaaatagtcacctgttctaacatcttctcttctctatctttctggttcttcatctgcactcgagctacac

SEQ ID NO: 48120 - DNA, 1023 bp, Arabidopsis thaliana landsberg
  unsure (1)..(1023): unsure at all n locations
catgccatgttaatccacattttctacaaattacacatggagatatggattatatataagattttaagaattttaacgcatgtaatcataagtgaaacacacaagttgttttggaaaagacctatataccattaaggacgtcctcttatcaagcaatcttacatacgataaagtcagattattgtaggctatgacaattaagtatttctggcaataccttaatatgagaagcaataagagtcccttgttcagcaaggtcagtgaagtcgatatccatataacaacgcggtgaagaacttgatctgcatgatagtattcgagtccaatgagaaattgcttcatgtaatcttgtgaaaaataaggttcaaaagtcatagaacattttggattattgatgcaagatttgtgatcaaccgttcaaatgttgagcgaaaacgcaaccagccgatcatttgtcaacttctagagcttattctgtggaaccaacactacaaaaaaagggtgagttgcatcaactaatttgctatttagttatgaggctcacatgtcttttttaactgatcagactcgagaaccatgcatgcaaaatcctaactccattgttcaacaactgagcaaaaatgcaaccgactaaccatatgtcgatttgagaaatatatcttacacgatgactcatgtgtttagggtatgtcttacatgtatgctacagtgacagccgagtttgtcatcccaccaagatattcttgcaaacttgtgttattgtctgaactataatcaataatgacagactttatatcctctgaatctgaatatgaatttgttcccttcatgaaccgtgagagccaaaatgcgcaagctttaaaatctctttcgatccaagntatatttttatatttttattgtttcggtgaagtataattgattagcatgacaatgctcaagtccatttagcagctgggtcatgcacttctgtgaaaaataagtttcaaagtccgaatattttggattattggtcgctatgac

SEQ ID NO: 48121 - DNA, 551 bp, Arabidopsis thaliana landsberg
caaactcttaggtaaatgacttaaaacagatataaagaagaaacaccaatttcaatacagtctttatgttatctaatgcatccatatcgggaatttattttaggaccaggtaatggatcgaaaaccgtaccagtaggagaaggagacggacccccatcgtctgatggaagctctatcaagttctcatttcctcttattgccttcttctccgcggtttcctacatggcaatcttctgagttactattttcccatacgcttttgtgccactcagattgcattctttatttgtccctatttattcacatttcgttgtgattttgtgtgatgtattttatgctctgtaaatccctactctccaggtgatattgctttgttgtaccaacggagagcattttggatctctttaccttttataataaacattactttccagaacacagtttgaagaacagaccatttagctctctcaacaaatatcaagtttagatggcagcaatctaactgttttgggttcaaaactcaagagccagagatggcaaatagaaaaaga

SEQ ID NO: 48122 - DNA, 889 bp, Arabidopsis thaliana landsberg
  unsure (1)..(889): unsure at all n locations
aaaaaaaaagagaaaaagaaaaaaaaagaaaaaaaaaagaagaaaaaaaaaaacaaaaaaaaaaaagaaaaagaaaaaaaaaaagcaacgaaaaaaaaaaaaaaaagaaagggaagaactcataacgaaggaccaaagaagaaagaaaaaagaagaagagaaaaaagaaaaaaaaaaaaaagaaaaaaaaagaagaaaaaaaaaaagaaataaaaaaaaaagagaaaaaaaaaaaaaaaagagaaagaaagagaaaagaaaaaaaaaaaaaaaaaaaagaaggagagangaaaaagaaaaaaaaaaaaaaaaaaaaaaaaaaaaaaaagaaaaaaaagaaaaaaagaaaagaaaaaaaaaaggaaaagaaaaaaaaaaggaaaaaanaaaaanaaaaaagaaaagaaagaaaaaaaaggaagagaggaagagagaaaaaaaaaaaaaaaaaaaaaaagaaaaaaaaaaaaaaaaaaaaaaaaaaaaaaaagaaaaaagaaaaagaaaagaaaagaagaaaaaaaagagaaaaagaaaaaaaaaaaaaaaaaaaaaaaaaaaaaaaaaaaaaaaaaaaaaaaaaaaaaagaaaaaaaaagaaaaaagaaaaaaaaaaaaaaaaaaaaaaaaaaagaaaaaaaagaaaaaaaaaaaaaaaaaaaaaaaagaaaaaaaaaaaaaaagaaaaaaaaagagaaaaaaaaatagagaagaaaaaaaaaagaaaaagaaaaaaaaaagaaagaaaaaaaaaaaaaaaaaaagaaaaaagaaaaagaaaaaaaaaaaagaaaagaaagaaaaaaaataaaaaagaggaaaaaaaaaaaaaaaaaaaagagataaaaaaagataaaaaaaaaagaagaaaagaagaaaaaaaggaaaa

SEQ ID NO: 48123 - DNA, 1231 bp, Arabidopsis thaliana landsberg
aaaatcaaatcttttatggtctgtagtgaacaattatatgtttcataataataaaacctatttttattttaatatattcataaaattgtttatatgaattaaattatgtaatttccaatgttgtcttgaccacaatgttgtctttaaataaaatgaaacagtcaatctagtcatttattattcactaatatatttttgtaataatgcgaatataaaagaaaaatcactttcaaaaaaaatcttattccattttcacatgtttcgtgtacacatcccatccaataattttaagtgttatcatcatgtttatgtaacggctaccgataaagataaaagaactttattgttagaggttgtggtcattttcacgcaacaacaaagtggtcaagttcaatgtataaacaaaacatttccatttattcctacactcttttgaactggggttgaaagatacatcaaattattgtccccttaaaattttgtcttcaacctgtctagaggaaaacgttttctagatgacttactagttactacgtgtcataccgcaatcgaccgtttgtaactttgtattatttactttcacacaagtcgcaataacaagtcaatgtcaattaatactttatgggtttggttttgatttattcgttattacattcatggtggtttattgttgttttgtctaagtttgtttcgaacatattagagtcattttacataatgtataatactaccattaattattttcccattcaatattttgaacttgcatagaaaaatttggtgaaagcaacgtcacaactaataataaaacagaagcttgcaaatcaacgataaagttgggccaatcctatcttaagcttgataatggatcgaaaaataaaacgtcatgggaaataagaaaaccatactaatttttattacttatccactcatcgatgggcccaagaatctaaatgcacgcttttatatcattttccaaaaacaataaaattggacttatatttatgtcacattacacaaaattatcagataaaacaataaaaacggagtcatgatcagccctcaaacctcataacaaaaagatgtttacagtttctctgaagactttgatgcaaacctaaacacatccgacgataagagagcgtctacggacagctatagagaccgagtttggccactattcccaaacgtggagggacaagaaccatcacccacatttaaaataacccac

SEQ ID NO: 48124 - DNA, 754 bp, Arabidopsis thaliana landsberg
ttgaagctgttctagccaagtaaagtgtcctcctatgctactgattttagggctgggtcggatgaagcaagagagcagctgaaagctctaggtgcagatgaagtcttttcagagagtcaactgaatgtaaagaatgtgaaaagtcttttggtatgctttaagtctagctattctatagcagaaatttctgagtatccaaagcttaacgtatatgtggtctagggtaacttacctgaaccagctctgggattcaactgtgttggtggcaatgctgcctctcttgtcctcaaatatctcaggtacagtgaacatatctgtttgtcgcacttttagttgaatgaattcccactgttctgaaggttgtgaatacatatatatttcagggaaggaggaaccatggtaacatatggtgggatgtctaataagccaatcactgtgtcaacaacatctttcatctttaaggtaattaaaagatcattcggaaaaactaaactgttatcggtatgtcttaaatttagatcttatttatagcgcacaaaccgagctttctaatgacttcgttgggtgttaaagatctatggcttttgtgcactgggctaatgtgtgattaccctacaggatatggccttaaaaggattttggctgcagagttggttgagtatgggtaaagtaaaacaatgcatagagatgattgactatctgctcgggcttgcaccagacgggaagcttaaagacgagtaaggcttaacattct

SEQ ID NO: 48125 - DNA, 544 bp, Arabidopsis thaliana landsberg
taatgttttcaactctttgtgtttattgaaatgtagatgaggatgatagaggttgcggttttggggggatttatagagtaccacgtcgcatgttctattttttttttttttccttatagaatatgtggattattttttattgttcacgtttaggccatgatattgttatttctttattatgatatccctctaatctctattgtatcgaaatgtgatttccttacctgtcaacgaatatcttgatttggaagaagatatcagtactgactgtattattgggatttttataagctttcttcttgggaagtgttttattttgttccataaaaaggagggtgataaagcttgaccgtaccataatatagtctactaaaatgacgtttaaagtaaaaaaacgcatgataggatagtactggggtgtatgattgaatccgctgtaccagtcccattttttgtgttagtcttcaaagaaactgtatttgctcgtggtaagaacgatattgaagatcaaactttttgaatctgaggaaatacacaaatttgt

SEQ ID NO: 48126 - DNA, 2478 bp, Arabidopsis thaliana landsberg
acattttaaaagaaaaaaggttggtaaaatttggttgattaaatttatgttggctatagaactcttattttaatctccgctgttcctttgcgaaaaactcaaaagtaaccaattaaacaaacaataaatttaacaaatcttttgaaaagtatataataatagaacacttgagaaacacaaactaaccgatcgtgatcggtgtgacaccacatacataaacgattaagtaagtttgaattagaaccgacttcatgatggctttccaaatttaatatattatcttaggttataataattattttcatatacaaccacattagtacattacatatgtgtggtacgtgcattttacgttctcaacaaacacaaaaatttttttgtttgttaagcctagcaattaacttcgaagcagacggtcagggcatttagcagcagccaaagagcagagaagaagcggattggggtcgagagttcgaacctttcccacccaaaatatacaaacgacactcaagttgagaattttatcattgacctcgtagaattaaaaatctttaaacacaacagaccttaaaaagagtctgtgtggctacaacttcatctgaaaaaaaaaaatgttccaacattgaaggcaatacaatatatatagtcttctgcacctaaacactgtccacatagagaagaacttaccttacaccgtgacaccattagtatttacagacgactcctacgacgccgttatgtccccttgtaaaaccaaaccggtttcttttgagtaatcaagattggtttatatggatccaccactcttattttcaaccggttcatggaaatttccgagctttctgaggatatgtggatgacttttggagtgttctcgttggtggtggaggcggcaacatcatacgggagtgattcttgaacttgcttgaagatgaatgttttctatctgattctattggggatgatgatgagcttgggaatgatctcttcttgttctccattgttgatagtttcagtctctttgaaggcttaggatgatgatgatgatggtggtgattatgctctgctgctgaatcttttctcacgtggttcttgttattgttgttgttgcttgagttaagatctatggatgaaaccgttgtcctgtgcctttccagaggcttttcgattagtttggatttgcgggctttcatggatttctgagagagcttctttggccatctgaggattccgtttgggttgtcgtggtttgcggactggactgcaatgtcacagagcgttcgagcagcttctaaaagctgtggacatgaaagagctgtacacaacatatcatcatcatcagaagaggattttcaataaaatttgaggcaaagagatattcagtaatagtatttgtgaaaacataccatcatcttcaacatctggggatccctctggttctgcatttgatgagagataaattgctgttatatagttttcgttaggagtagtataaagagggtaacagatccttacctttgggaacaaagaaagaattttgaagggtagaaacagatgcttctgcgcactggcatgaaatggtgttagcgaattttgtttgagaggtcttaactccagtaatagtctgtttcagtagtggagggactaagttttggttgaaagtgagtgattccagatttgcgaaattatcggttataccctctggagaactcatagaagtgtcggctattcttagccatcgtccttgacaaagtgtcttgcaggtcacaagctttgctgcttctgagttggttctagagctcccattaaagggctgcgaccaagggaaatgaggcaatccactatgaggaggtttagctgaacgctgctggtccaaattgttcttagagttatgagaaggttttgatgcatcttggagcagagagtctaaatctttcgacggaggaaggcctaatcttttcaatacatcaccagcgtcgcataatggaaaactaagtggagtggaaggaatttcagagttgatgcaatgatcctgagaagtcaatgagtgtatcaattttcagttaaagcaacaaacctatttaaagtcatgtatacttgcttacaggtcaaatcagaatatatatatatgaaacttctaaatgttagattaagaaatctaccttggacgatgacgatagatctccatccagggcatttactttatcgatgttttcactatttggtagtgtagcagagatagagctaggcggtgaacccagagttctgctgagacaagtgtctaattcagtagagctttgtgattgaacaggcctctttgctggtagaatggaccaaacatttttgactacactcaataaagtgttgatagtattctccgatttcttcatcttgtctttgcccagagaaggacactcataagagccttcaagaggaactttcaatgaaaatcttcaacgagtttggtcacatcattta

SEQ ID NO: 48127 - DNA, 688 bp, Arabidopsis thaliana landsberg
ttatgtttcacaagcaatataatctcttgtttatataagattagaaaaaaaaaaatttagttcaacattatatgaacgtgtttatggtaagaaagttaattaattttttggcataaaatagtataactcttttatttggattttgcatatatttaattttattatttggaaagaaatttgttcttttggattggcttggtgagaaatgtacaagtggtacatacatattgaccttcccattagggtaaatatgactagctatttgtagaattgtaatctaatgtcacgcgccactgtcagagttaggaactgccaacgtttgttggtgtgtggacctgttgacttgtgattttcatagtaatgagattattagtcaacatattattagtcaacgcatttaccttctcaataaaatttacaaaagagtatctaaccatagatatgagattatattagtcaatacattattagtcaacacattgatttcacaaaatcttgtttttgaccacaaaatcttgtttttgaccacaaaatcttgtttttgaccacaaaatctttgtgaagataatactgcagatacattcaaaaacttcccataattcaaaatatgatagatgtgcgttattagttattacacataaattcaaatatgagtcatctgtttgggatttagcttattaaactggac

SEQ ID NO: 48128 - DNA, 592 bp, Arabidopsis thaliana landsberg
gtcagtaattaagtgatgtttcatattcaaattaaggttccatttcattctggactggagattatcatgtatatgtactagtagcgccacctacctggcctggggtggtgatgaacaggatgcttgtgtcgtcccccacctcctcctcgatttcatctctgtgcttctcatgagggatcacgaacagaggcttgagccccctgtcgccggagctgccaaagcgacgacgagctaggtcacactcaccctgttcatgtcgatgcatgcctaaatgaccatgatgagcgatacaagacacctgatttccttggctatctgagcccagtgcccgaggggaagaaggcagtcgtcgtcgcctctggacttcatgttggcgacggagcatgaggcgatgccgtggatgacgacgtacttgcccttctccacgccggcgcggctatacttgtcctccacgtacgcccgtagcttcttggagatggacaccgcagcggctgtgtcggctgctggggaacgttcttcgccggccgcgcgatccactccagcatgtctttatacatggcacagttgcatactcgcacgcaacgcaattgaa

SEQ ID NO: 48129 - DNA, 604 bp, Arabidopsis thaliana landsberg
  unsure (1)..(604): unsure at all n locations
acaaatagtccatagatactaatataaatttgacttcttatcaccgtaaaaatgttggaacatnctaaatatgatcatgnaaaccgcactggnggggggcagcggaaaactcggacgccaataaagcacaaaaggcctaggangnnccttattttgtagaactcttctagctaattactaaccaactgagattgtaaagactaaccattaagtgataataaaggaaatttgaccctaatatctttataagtgcaaaaaaaataaaatctaagaataagaaaaacgtggagaaaatattaaccacccacttattcagtaaacatatatataatttcaaattgctagtgcagcaaaaaaaaaaatgcataaacattgtgtgggttttgccgggttatgtttacctttgtttttgctataaaaagccataactccttcattttctttagacatctcttcttgtctcatctgtcttttgttctctcttttcctcacataaactctcttttcttactattaaatccatatggcacctcacaataatctatggccatctagggttatcttgaagatagaattgattctagccacacagagaggaagatca

SEQ ID NO: 48130 - DNA, 575 bp, Arabidopsis thaliana landsberg
aaaccatagtgatcactgtcaagacgttcttttgctgcttttagatccaaactcatgttcttcgcttgccttatcccaaggaagatcagccaacagctccaggtaaactcgtgaactgttatagccaggttgctgaggttgcatcttttttagacgcctgcatcaggaaatgaaaaagaaaatcactaataaagaaattaactcttcaagttggtccacagtcacacaccatcagctattgtgctctagcaaagtatacctcaattccctttgagcatgcttccatatgtttgacggcattcccgcagcttgcatctttctttcaagtgcagctacatcatcttcatcatcatcgttgtcaccaagctcctctttaatagctctcatctgcaaaaaccagtttcattgctacacgtcataccgctgaaggaaaataagctctcaagactcaagttgacaaccagagccggaagaaaccaaacctgctggcgcaagagatactccttaagaaactttgacaactggccctccaccttctgcgtaatcttctctgccacgcgaattgaaagccataa

SEQ ID NO: 48131 - DNA, 1091 bp, Arabidopsis thaliana landsberg
gttttccccacaacaaactcaaaccgggaaatacgaatagcataactacattgctcatgatcatacctcgacttttaaatgacctacaaagttatcaggtgattcaacttttatgttttttttaggggtttagtatattcaaattaaactaagggatgttaaccctcactagataattttgttattaaactatcaaatttgtcatgcaacgttatttttcagaaggaacaagaacaagggaagatcaactccgtgctgctccacatgaagaatcatccaggtctggagattgagaactcgatcgctcatatcgaaaagattatcgattcaaaaaggaaagagtttttggagcatgtactagttgatgccccaagcgctttgccaaaaccgtgcaaggagattcacatgtcttgttgtaaagtcttcgagatgttttttaacaagaagaaccgttatgattcaaacacggagatgcttcatgacattaagaaggctctctatgatcccatcaatgtttatgaactatcagagatggagcctatgccactgatggcacatggtgatgaatatatgattcttcctttgcttttgaacagtttgccaaatattcttgaatttaagaggaaggacggatacggagcaatgaaaacatctatgtgctttggaagaagttatcgtgttaataaacgcgttatggcctcacagcttgatgatcaacataagcctctcaagattgttgcgtcgcaccggaaaccggtaccaatgatgcaatcgatattcgcaccatgcttctactaattaatatcttatcattatctatattatatatgtatactgtatatagattggtgattaatctttacctcaattacatgtaaaatagtgtgttttgtttttctgttttcttcttctgtgcaaattgttaagagaggtgtgagtggaaaatttagaaactatgttgttttcaaattgatttgtgtgatagctatatgaattaaaaaaaaaacttttaagaatctcatactgaaagtgaaatggatctatattagtatttttttttttgttataggatctatatcttaatatataaa

SEQ ID NO: 48132 - DNA, 528 bp, Arabidopsis thaliana landsberg
agattaatttgttaattcagaccgctacttttgatttagttcatgtagaccattgctaaggtatcaagttagcgatctacaaagtttgactaattaatcttttgtggttcttggttaaccacgaagttacaacttcaccaattctagtcatactgctctgttacatcagccttgattttctttaatatctctagatccgaaagtatggtcgacatgatttgtgttggattagttgcgaaattttatctagtttaatatgttcatattttaggtccgccgaagttaaggatttagaaccgtctcattttgggaaaagctaatgtacgcgcgtgtgtttctttggctgtttgtgctcgccttgtgcaccgtccgattcttccttttcactgtttgattttgggattctcgcgtctcttcatcgcgtctcttcagtgtctcgtttccgtcgctctgctgctccgcctcttcactttctcagtttcgagcgcgctgtcgtcgtctcccagtgcggctgcagcgctcgcccag

SEQ ID NO: 48133 - DNA, 1023 bp, Arabidopsis thaliana landsberg
gtgattcatatcgatatgaaagcaaacatatgttgtgtcaagtacaatcctggtctcatgcaactacattgcggtatatacttccacgcctcaactttgcatctcacatttattcgctaccactcatgatcagcatgacactatcacacgtctctagatataatctttaattagatagagagacttagacgtttaagcctgttgacttatcacaggtcggatcagctgatcatcacatccattattacgatctaagaaacataagccaaccacttcatgtcttcagtggacacaagaaagcagtttcctatgttaaatttttggccaacaatgagctcgcttctgcgtccacagatagcacactacgcttatgggatgtcaaagacaacttgccagttagattactgcccgagccaatcttgcagattcagtcaaaaagaaaaacttgtcttgactatgttgctcaattttacttttcaggttcgaacattcagaggacatactaacgagaagaactttgtgggtctcacagtgaacagcgagtatcttgcctgtggaagcgagacaaacgaagtatatgtatatcacaaggttcacaaatccgaaacctctgctctcaactttagcatttttcattcatgattcacagattttcaacctgtcgttgctcaagtattttaaaatgtgaatgatgcgatgcaggaaatcactagacccgtgacatcgcacagatttggatcgccagacatggacgatgcagaggaagaggcaggttcctactttattagtgcggattgctggaagagtgatagtcccacgatgttgactgcgaatagtcaaggaaccatcaaagttctggtactcgctgcgtgattctagtagacattacaaaagatcttatagcttcgtgaatcaataaaaacaaatttgccgtctatgttctttagtgggagttacatatagagagagaacactgtattaaaagtagggcttatcatttgggaagccactctggattaatat

SEQ ID NO: 48134 - DNA, 658 bp, Arabidopsis thaliana landsberg
tttagtgaattatctcattatgatttggttatagagactaatgtgaagtcgtgttggtgaaaggtttgaaacttgttgtgtttcatatattcaatagtttagcgactatttttgcttgtagcctatatattttcagggttatccctcgttactggtaaagatcgtatcggataacactcgaaatgcacagctgagctatcatcgtgccaaggctagggtggaccggtggtaccacttcgcgtagttatccggcaccagaaaaaaaaaaaaagattcgaactcatctttcatatggataaatttatgtgggccacaacagaaaatatagctatcatcatactttgtttttacataagctactcatgattcgtccgccaatattccatcaccaaataagaaccacaaaagcggcgactgatggatcataagattttagattatggtaagttgtagaatgtttgtaatgccttaacaccattatgcctcttgccatgttgggggtatggacaacaacttagccccacaaattgatgccctattttgtttagactggaattttgaaacacatttttctctattttgctatttttggggtcatcagtctacacatggatgttgcaaatgaccaccaaattcgttcacttcaggttgggtttaa

SEQ ID NO: 48135 - DNA, 904 bp, Arabidopsis thaliana landsberg
cgaccaagtaatctcagtttcagacacattttaggtctatctggttcggggtttacaagaattttttctctcgccctaagagaagaagactcagtttccaaaacccgtggagaagacaaaagagagatactagttaaaatctatttacgtttttgtactgaactacttgttacttcatcttcttatttacgccatctgattttctcacttgcacttatccttgtggtgagctccagaggaagcggtttcgacgtattgctcggcaagtttcttgatcttgtctccttctttgatcaagaagttagcactcttggctttgctatgatacttcatcactttttctgtggttttagtcactgcccatctgtattgttccacgtttatcactccgctcttgcacagtggtctaatatgttctttgatgtatgcttccacctgacaaaaacaataaaaccattgaagagtgaagacaaagggaatgagaattttgacatgacagagacttttacagtttttagtaccttcttggtgatggagttaccaaagccatcagctttgcctttttcctctttagacggcttttcgcttggtttgcacttttgaatgcttctgggaagttttttctcttgaatgcaagtgatttcaaagtttgaagcgatgaactctctctgtgtgttgctctcgcactctgaatcaggggctttagctttaacaccattctcagcaaatccttcgatgagaggtctttcaactagtttctctgtaccaggtccgtatagttcttcacattcagctacagaaaggatctcacctgccccttctccttctccttctacttctccttctacttctacttctccttctacttctccttctccttctccctcagcctcaggtacaagct

SEQ ID NO: 48136 - DNA, 1805 bp, Arabidopsis thaliana landsberg
cttcttgctctggaatttgcgtttgttttaggtaattttatgctatttctggttcgagtcagttccaaaaatggaaaatggggcgaaaaaatctatgaattaggattaattttgtgtagtattgatcgttaattggttagacgttttcatatacaacattttggtaagcctaatcatcgaattatgctttgttggtttggtcacttgttttccaaattcagcgtcacactagtggagcaagagctatggcagaaagaagagaaaggtttaattggcattttacctgttcgtgatgatgccgagggttcttcaattgggacgatgattaatccaggtactggcaatcatgattatgatactagatgaatttgattcgataggagtacatgttttgatttgatttattttgcctaggtgctggaagtgattctggagaaagaagcttacaatttctagttggtacaacagatgctcagaagtctgatgctaaagatcagcaggatcttcaatggcacaccaggttcggtttctttttgcacttgctagactcttatataatatgaatgctttgattacttagtttataaggtgcctcaaaataatgtgtgatctgatttctattttggtttgattcgcagtatattctgagctatgttttttttttcttctaatattcaggggagtagcagctcgtgctctgcatctttcaagaggggtggaaaaaccaagtggaagagttacgtatgtggttgtccttgaaggtctgagcaggtttaatgttcaggagcttggaaagagaggaccatattcggttgctcggattacatcgctcgagatgacaaaggcaggtaagatatatttttttcatttgtaggttttagtgactactgtttattgctgtcaatttgctctctagtttagaaattcctgtcttgtaaattatatggtaaggacctatatgttctgagactttgatctcaatatatgtttagctctgtgtatgcttaatagatagataagtttatgcctgtgaaaattattgggggttagagattctctaagatactagtttcgacttagagctgatttggtaatgataatctctctggcttatttcaggttgggtcatgaccttttatttctctattacattacgcgacatggtagttcattaatgtctttagctggttcctttctggccatctgcagagttggagcaagtaaaacaagatccagattttgtagcactgtcacgccagtttaaaaccacagctatggagcttgtctctgtgcttgagcaggtaactagtgaaagtaaacggctttctgttttggttcctcctttttcaagtttcgtttttgcttcagcattagagtttctaagataacaaattgacaacgctgaagctattagtgtctgttttcatgaaattgattcttctttgggattttttctttccatgggagcaattgtataatctatatctggtggaatctggatcattcttgattgaattagtaaaaccatgcattgattcttgtttcagaaacaaaaaactggtggaaggacaaaagtgcttttggagacagttcctatccataaactagcagacatatttgttgctagctttgagatgagttttgaagagcaactatctatgctggattcagttgaccttaaagtaagactttcaaaggctactgaactagttgatcggcatctgcaggttggctcttgatattcatattttggtatctgtccttaatttacccctaggcattataaagacatgttgtggtctcta

SEQ ID NO: 48137 - DNA, 500 bp, Arabidopsis thaliana landsberg
caggcgctatttctgaaatggcagttcttacaactaccacccagaaaacagtgcttgtgatctaccaattattgacaatgcagggtttttcgatggataagattgtatggaattgcacatggtaaagcaatcttgcataagcaacacaaaaatacaggagatgattatctttcgtaactgtttttctgattcgtgtgaaaaaacaaggtccatgccggttgttgttttttgtttctgcacacctgaaaagaacatttatacacggtggcattaggtaatcattctgtaggtagtggagaacaatagccatcgcttaggaatattaccaatgtttttgaggttcttttgctttggggttgaattcaagcctttctcctgaaaatatatgtacaaacagaatcatgttgaagcgtaagtttgtgcatggtgaattatgaaacgtggtaaggtctaaatagaaaccttaacaataggttcagtatcctccccagatccaagaa

SEQ ID NO: 48138 - DNA, 560 bp, Arabidopsis thaliana landsberg
ctccattggcaagtaatcagctatacagcacagagaataacacaacaagattcatgtcagtagatttttctatgtgtatctacgcaggacgtatacggactcacagcaataaatatctacacacacaccaaacacaactttaagtccaaattcatttcagaagatttagatgaataccgagtgtcaagcattcaagcggcttctgaaagaactgtccaaaaaggtagataggctcttctagtgactttagttccagggagttcaatgagttgaagatctgttcaaaccacagttaagaagttgtaatatatatcagtgaacactcgtaaaagtcaaattaaatcacatgagaccttccaacagtcaccatagaatccaaggatcccttccttttcgtgaggaaacttgctcgtaagctcagcgatgaaatcatcgtattccctatgaatccgaacagaaagattattggggagatggaaatggacagtggtaggatcaggtataacctccatcttacgaccaactgccttcaatgcctgagttatcaagtttaggttccc

SEQ ID NO: 48139 - DNA, 350 bp, Arabidopsis thaliana landsberg
gtcaggtccttgacaatgacttatgtaactttgttacttacccttcgagtctggtttggttttttgaataccagcattaccttatggagtagcagagtaaaaatcaaatgttacattttctacaatgcccatgccttcccaagattccacttcctttttgtttttcagttgcttagataaagaaaggtgatagttaaaaaacgaaccaacacataacaagatgttgcaaaatcctacttgtgggatgataattttgtcttttagagagaaatgaagaaaatgatcatgttgtgaaaaagacccaaatcttcttcctatggaagcatcatttccttggcgctctgtttctt

SEQ ID NO: 48140 - DNA, 474 bp, Arabidopsis thaliana landsberg
ccttagatgcttcgaaggttaggcctcgcaattcccaaatgcatcttccctgttgagaacttcaaagcttgtaaacaacaaagttgctgatgatcaatcccatcatcatcttcctcctccactattacttccttctctatactctttgtcttcatcatcgacttcgtcttcttcttgagcttcttcttctcttcttcggtttgctgcttcttctctgtttgtgtctcgtatgtctcccatagttgatccatgccttgtccaacgtcagcattgtgtcgttcttcaaatagcttgcaagccaatgttctcctccattctttctcttttctcattgatccaaagctttggagagaaacattatcttcttcttcgttcttagacactacatttcttttaccttctccttctccgagaaaattgctcagttttgggagatcaccactttcattattactatcctcgacctggtcaact

SEQ ID NO: 48141 - DNA, 536 bp, Arabidopsis thaliana landsberg
tctctttgatattataaagaaaaattagtggtgcttaccgctcatcttttaaactattttccaatttctgcatgctgtctctctgatcagtgattagggctacagaatcttcatacgccatttttgaagccttttcttgccatttaagatgtgataactctatcagcatgttagtctctgcctcatccttcacaccctgttgcaaaagcacattagcaacatatacaacaaaaccgggtcacatacaagaaggaaaaacgtcaacaaacctctaagttgtctctttctttctccgctaatttcaccatttgcacaactccagaccggctttcattgagggtttcaagccttaaattttcagaggcagttgcagttatattaaaagcatccaacaaatcaggaaccacttacgtctaaaagaaacagtacaaatgcatagattactcactgcttatttaattcatctatcttctccacatatttattcgttccaattatatgctcgaggtattcaagaaaaccttcatcatggggac

SEQ ID NO: 48142 - DNA, 734 bp, Arabidopsis thaliana landsberg
caactggttcaaaatatctatctgagaaggcagattgtaacaaatgcatacaaaaaaatccaaaaaactgagtaagattcgccttaactcttgtctgcaagtgaccgtatatgtttacaatacttttgaccatgttctatatagttataatatgcttattgacaatgggcatttattagatctttgtttctggtcgtagaaggttagggacaaagaacatgttaagtctcacgatctcgagcttcccatctttgttgatttgtgatgttcctcttcctaagcttcataaaacgaatactgacaataaacaatacgtagattacatgtttaaaccctaaaacaatataattaacgccggttacttcttgcacacgtaactctaagctctgcaattctacaaagttaaatctttgaactcaagttgaatcttgtgatttacttgcgaaatctatcacatcaagcaacaagtgaataagaatcatggttttttctctaatcgaccacaaaaaccgacagagggagagagagagaaagagagagtttgctgtcgttgtcacggagagaggctagcatgttctgcgaacgagaattgttgggaagttttcagtgaaaacgagaagaggattagagagaaattacgaatcttttgaagggacaatttcagcttacggactgataatgacatgtctctcgtctcgaccaagcacatgaaagccccatgttactcttgccgc

SEQ ID NO: 48143 - DNA, 518 bp, Arabidopsis thaliana landsberg
tgattagtggcacaatcttctctgagtcctactatctacaatctgcaatctcgagtgtacacgctttccactaaaatttaattaattaagggtttgcttactctaaaattaactaattaaaattcgtataaccaattttgccaaatgctaaattttaatatatgggctttacaatacccaaaaatcttcgtatatggactttcaaaagcccaaaaacacttatttctgagattttttttttataagttttatttattgtttcagcttcttctacagtgcaacagagcaacaatggattttttcgacgaagacaggcctagattcgttttccaatctcgtccttcttcttctcacacggcggaggaagaagaagaagctagaatccctaacaagcttttcatttcattctccgtctcaatctccctcatcatattatctctctccttcttctacaaagaatcaaaacctgccaaatcgctactattatggctttccctcgccttcctggtcgtaccttt

SEQ ID NO: 48144 - DNA, 560 bp, Arabidopsis thaliana landsberg
cataattctcagctatagaatgaatgaccattacttccccttgcaatctaatagcccatatctagagtcaatctaatccattggttcaaaactaaggaacaccatttctcgacaaatacaatttctgaaaattcactaccacagaagcataaatctcagctatagcaacgaaaacctcaatttcaaaatcctaacagaatagggagctcgttaattaagaaactgaaaaaagtataaattcgagtaccatagtgacaactccgcgtttaggcttggaactggaaaaatttaacggattaagcgattccgcacgaagcttagcgccgcataagtcactagagatgcttcctccggtatacggcgaaagaaagccattcgaaagagaagctctgagagatgaagatgaagaaaatctcggtttagatctcagattacgtgtagaagacgggataatcgctgacgtacgagctcgaagcgttgtgaagctcgtcgcagtagctgaagctacctccatttcttctttgttgcagagagagagaaagagtgaaagtccctgaacc

SEQ ID NO: 48145 - DNA, 469 bp, Arabidopsis thaliana landsberg
cggatgtacgtagaatatcttagtttgatcttcattatgcaacagtgtccagttgtgtgtgttatttgggtcttttaagggggagatataaataaatggaacttgcaggcaatgggtgtatatacttgcagacatcttaatattcatcagttagccattaatagtatgcacatgctagcaaatctcaaatcatgctatcattctctgtccgcaacttttcacttttaccttcaaacttatctgaagatgtgtctctattctatgtaatgttatgctcaaggtcaagctgtattcaaagcatattggtaaatccccggagcagattgaagctgacatgaaacgcccgaaatattttagtcccactgaggctgttgaatatgggatcattgataaggtacgataaaatgtcagaaaaatccgtaaaacgtatgagcgattttgttttcctgtcaacatagagtacttatct

SEQ ID NO: 48146 - DNA, 232 bp, Arabidopsis thaliana landsberg
tggtagacaatcaatatgaaataggactggtatgtttaactcttttttctgccatatgttaaaattcccaccttttaacgacggttcatggatctatataacggtgggagttcaacactcgacctaacgtgaaccactctttaaaggggaggaacactcgcaatttctagagcccagctcctcaattcagccgtgttgaggacgcatacacataccaacatcgctaaggctt

SEQ ID NO: 48147 - DNA, 370 bp, Arabidopsis thaliana landsberg
caatgaaaggcttaagatgtttccagtaaaagtcatgtttttgccgccttttctgttcgcacaattgtcagttcgtccatatgctccatgttgccgacgtttttagaagtaaccgccgagcgatgtctgatgttgccagcactttagaggtaactgctcagtgatggttgacattgctggcgctttagaggtagacaccgagtcatatctgatgctatcggcgttttggaggtaactgccgagcgatggctgacattgctggcgctttagagataaccgccgagtcatatctgatgctaccggcgttttggaggtacctgccgagcgatggctgacactgctggcgctttagagataaccgccgagtcat

SEQ ID NO: 48148 - DNA, 159 bp, Arabidopsis thaliana landsberg
gcgtagtcgcgtactcatctgttccacatccgcgctctcagcttagagtccgtaccctagcgagtcttcttatggagcgatctcaggtgacttgcgatacgttgattgctcgcgcactcgccggagaaccaggtgttccatcctcaagcatcacacggt

SEQ ID NO: 48149 - DNA, 497 bp, Arabidopsis thaliana landsberg
atttctattaaataaataaaattaattaattgaattgatgttataaaaaaataaaaatttggatttatttcttgtatatattgtaaaataaataaatgtattgtattaacattaggagttggtgtatattgacacttgggtcctttagtttgtatatatattgtccataaattattgataagataggactaaaaacagtatatgcttgggtacaagccagtgggtaattccaatttttattttaaaagaaacaggaaaaaaactctggaattttgataacagttttccagctacccgaacgtgatttttgcctgtaatcacgtacatccataaagcatgtatatcaaaacagtagaataagtcaaaactaaatttcgagccctgtgacacttttcctctttacgttggcatctatatttaaccttcttcttatttttttactggttacacaaaatatactttcactattgcatgtagtagatacacctcaaccctta

SEQ ID NO: 48150 - DNA, 757 bp, Arabidopsis thaliana landsberg
atttggtggtcctcaattactggaaagtcagcaatcccatccctttcccaaggtacccaatgccatccctgtggttaatttttttgtttttttttgcgtctttaactaagttttattgcttacagttttccattttctgtagcttattttcagcgcggtcatccgatatactcttcacattatgttcgtttccggttgggtcacgaaaaggacaattcacctcactacaacaattcacaggataaaaaaggtgagccaggaaagagttcaattgaaagcaactatgtatggacttacacttcacaagagttttcgatggctcaggtgtgttacaaatcattgtcttcttctttagcataacagaaaacttgttcctgaactgttgataacaaatgatggtttctttgagtaggaaaatcgattgcagagctttcagcttccagaacctgttctttgcattggtgggtatctgctagtcgagtttctaggtcgagttcagacacaagaaatggatggccaatactatatatggtaccatcttctctccctactgctctagattttccttaaaaacttctcaacttctgcaatgtgaatggagtttctgctgatttttttttgcagcgtgtcacatgtcaaagtggagggaagatctctagcaaaatcatttcgagttgagaatgtggatgacaatggaaagtttggattgaaggtgttgagttacaatgatccgaaaaaaatggaggagatggatgca

SEQ ID NO: 48151 - DNA, 167 bp, Arabidopsis thaliana landsberg
  unsure (1)..(167): unsure at all n locations
cccaaaacaccanggagacaacagaccaagaacaaagaaagaaaccaagcggaacggggccagcnaaagagaggggananaaccaacacaggaaaccccaacggcnagagagagagagaaagagagancaganccacaaaccangagaagcaaaagaacggacagga

SEQ ID NO: 48152 - DNA, 945 bp, Arabidopsis thaliana landsberg
gcaaacgtgttcttttttatttttttttaagtcttaattgaatcttaatagttaaataaattgaatcttaattattcaatatgtttccacttagtttttatcctaattaggaacattttttcttggataatttttttttttttaacttaatacagtatgagtttggtttgataaattatgttgattttttttaaaattcatttatgatatagtgatataataaaattgaattacaaattagttaaaatataaatgaaaaattttgaaatttaaaactactaatagaccatcgaaaaatgttcatgaatttatgcgaggattataaatgccaatcatattaattgctacataaaaacttgttcgattatagaaaaacaatttcctacaaaaaaatagagttaaaaaaattatgttgttttattgaaaattactaccattttactattgtagtagtatgatgattttaaatatcagcaaattcttaaggaaatttttgtaaactagtagattttataaggaaacttttaaaaccagcagcaaaaacaattatgaggaagaccttaaaaaaccattacaagtaagaagtcgatcatataaaccaccaagattaaaaggaaaacactgaaaactcagtagtgtaaaaaatagagacatgcctaatgatatcaatagttatagaatgtcaatcatggttccaataagtcggtgtacattatgctaacaataacatcaccattacaagtcgccactacacatgagaagatgtaaactctcaaaagttttcactcaacatcttaaaaaattagctcatacagtggataagattttcttagaatcagaggtttgaattctgaattcttattcaatggtttagtggatatattataaaagtgtatcatctatatgatgaataagtgaagtgacattttaacttttgacttttgt

SEQ ID NO: 48153 - DNA, 589 bp, Arabidopsis thaliana landsberg
ctattatcactaactagtaccgagtatcataacgccggcttcctttcttcttttattaccgagatacacggtcgtcgaagatacaggacagtaccgtcggttaggaaacatttttccgcaagcgaaccgcaaattacacatctaaaccgaagtccaaaagtccaagtttgatagcaggggtttttgttttttctgaaaacgtttcctgtattgttatcaaaaagtttgatgatatcataaacattgttgccactcaatatatgagagatctttcacttttcaccaaacgtctaaattttgaattacgtgtatctgatagacaagaaaatgagagaaataagacatataactcaacattggtggagagttttaaaagttctgaaagagaaaaaagaaagacattcggttttactatcttatcctaaatttctcctatcattaggaaaatctatctgcttgatctggtgtatgttataaattctgtttaatatataagtctctatacatattttaaaagtgaaacatatgaaatacaatcgcaaaaagtttttttttttatatattcaaatgaataaccctgggagtgatt

SEQ ID NO: 48154 - DNA, 1351 bp, Arabidopsis thaliana landsberg
gtatatcatctattctcactctcaccatgttgtttgcggtttctctctacctcatcctacccatcaattgtatatgatttctggtgttgactacgtgaggtgcctcttggcaggaactagaggattatactgctgaagtgagtgttcaacatgaatctttagatggaagtttcaccttttacgactcaacaaaggctagccttaatatataccaggtactttcatcagtctcttttatgatttatatcactagctttgttcatgtgatgaaggttttgcttagaggctttgctcaaacagagtttattcttttctcgaaccactgttttgatcggtgtgtctattttgatgtttgtgtttgtaggtggcgagtgtaacgttcgacttgctcttgcttctggttctaggatcatacttgatagtgcttttcagtttcctagtcatcacaactcgggtaactatgataaactgatttatcgataaataatacggctatattaattatggaagcaaatttaactgagatttatttgaaatgatgacagggtctggatgacttgataagcttatttcgccggcctccttcccggaaagtgaaaatgggatgattttcttccttttccggtaactttatattcttctcatacctgccttttggcgattcactctcagatatgttttgtgagtcgttagaatttgaatcatgaagaattcaaaggagaagaggcaacaagaaaaaatgagtgttcgttgagttatggcccccctttcgactttttgtttggttgtatgcctctctataggctatatggcttctgattattttgcgtgggcggcaaagaaaataagatcgaacattgtagttttttctttggtttaaattagtctttttccattacctcgtaattggtcgcccaacaaatttgcaccaaaagatcctaatgcaacatattcttaatatgataatttgtggttaaaagataggaactcagggtcttcgttgtaatgaacaaaaagatcaacaagaattaaaatgaatcttgtaatgttatattgatggaccacccaccatcgagccaaccgagctcccacacgactgagcggcgagatttttatggcgacctctgcctccactgaagcacttaaatgatctcttaacactttcctaaacacgatcgggaatcaagttttacctaacacaatttgtgtgacacaaaaatgcctcgattatttcagtcgacgaaattaattttcgctatttcgacttgaagcaacagataaaattgcaaaatagcagatacaacacagggatagaccagaaacactgtcgtaatgtcgttaaatattgtaa

SEQ ID NO: 48155 - DNA, 562 bp, Arabidopsis thaliana landsberg
  unsure (1)..(562): unsure at all n locations
ccctagacacgtcgtcatgtcgtgcttgctgcacaccctcgccgcgcgcgcattcgtgccgccagtagcttgtccccgttattctcgtgctgatcaggcacgtcgtcgttcgcgtgagtcgctatttgcgcactttaataaaatcttttcaccacatctttcacgttaaataattaattacttgtttagtggtcattgcttaaaataataattcaattgaatcaagtttatacttttagtatgtgtttgtaagtacnnnnnnnnnnnnnnnnnnnnnnntaaacgttatgttcaatatctgtttagtatgaacacaacataatttggcattactcgcatgtcacgttatttataaaatttagtatacatttaaacgtagtgagtcttatgcgacgtgttcataaatataaaccgactagtttaaaatgtggtttcaaatcaaattacaatttagattaatgccacattggatatttccttgaagtatcttccgtaaatgatttatattaattaaaattgacctagaacacagattatatgtttattatcaaaccttccgaaa

SEQ ID NO: 48156 - DNA, 389 bp, Arabidopsis thaliana landsberg
cttgtaacctttatttcttaccagaactaaattcactttgttaatttgtgattagattctttgtttctttccggttactaatcttgatcagggacaagaatttgtttttgtgtcggagactaggaatataacaaggatttttgcgttttcttgtgtaacaatttttagggtttattagggttcttgatttcatcaatgggttcttactcagctggcttccctggatccttggactggtttgattttcccggtttaggaaacggatcctatctaaatgatcaacctttgttagatattggatctgttcctcctcctctagacccatatcctcaacagaatcttgcttctgcggatgctgatttctctgattctgttttgaagtacataag

SEQ ID NO: 48157 - DNA, 853 bp, Arabidopsis thaliana landsberg
aacttctcttgacttgatttttttttcgaaaatgtatccgccaatttgtcctctatccacacaggcaaaaggggaggtgatgttgacatatcgaatccatttcctaaacctgtaattttgattgattgaaccaccaccattcgacaaaatcaaatctaagtgatcccattgtaccaacatgttttacgctcaacaatcaaacaaactttatcaaagaaaaaactttattgatcagaccaaagagagtataaagggcaacttcagccattttaataagttaagccagaaactctgtaacactaaacacaaaagcatcttcagtcttaagaaacgaaacatagttaaagataaaagaagatgtgtcaattggtcgacgtgagctgcctgaggttgtactttgctagctccttgtacttctctaccactccaattaagcacactgtctgtaaattgcaacacgaaacccgtattgagtttataaccgaccaaatctgatgaagcaaaacataaattttctccttgtttaccttaataatttccaccacgatcgtcatctccggattgctcaaatcaactttgtgaggggcaggaatagatttggcgatcgtgtttattattttcatcctatcaagccctgtgttagcacgcgctccatacaacacagcaaactgcaggaatattaagagaggttaacattttggaatctaggaagggatacacaacttgatctttaagtattcttactttccggggattttcggtctccatggggcagtactgttctacaagcggcttgaaggctcaaaaaatttcttcctctgaagggtaacacgacacttcagttggtaggagt

SEQ ID NO: 48158 - DNA, 170 bp, Arabidopsis thaliana landsberg
  unsure (1)..(170): unsure at all n locations
tatatttgttctcccatgtatatacttattctctagctattttttactaaaataaaaataaanattgggcccacttttaaatttattgtgtcatantgtgcgtatatataatantggaccctatttatcgtctctgtagattccaaatttattggatatccntaaaaagc

SEQ ID NO: 48159 - DNA, 489 bp, Arabidopsis thaliana landsberg
tcttgaaggacgtagtttgtttctacgaaccaaacattattttagtttgaggaattatcataatgacatggtggtgaatctttgtcagactagggatgcttggacaagttgaaaagggtatagtatcgatgagaagctccgtgtcctgaatattgtgaaaagccaaaagactctgatgcgtgagaaaaaggatgattttgaggatgattcatcatagaaggacgaaccttttgataagccttggggaagaaagggaaaggataggaagatctacgcaaaagaaattggcccgacatgctgggtatggtgttgattcaagtttggaatttcctagccggcggcagctggccgttgtagaacaggatttatatggtaaaccgaaggcaaaaccgaagtttactttcgctaaaacgtctgttgggccatatgctacagggtataatgggtatggtatgaattctgcatacaacccctcttctctcgttaggc

SEQ ID NO: 48160 - DNA, 658 bp, Arabidopsis thaliana landsberg
  unsure (1)..(658): unsure at all n locations
tccaacattggtaagtgtatttaagcaaggagaagccataaattttgatatgtaatagtcaaattatgtcaactttatgccatgaacttgtatgaacatatttgtattcgaagttcttaagagatgttatttattgattgttttgagcaatcgacaacataagttccatttgaaattaataatcgtagtatacttctgtatatttttaagtgtaaaaattacatttaacaattcctagacacatggacaatgcaataattgttgttaagttatgcacaactggatatagattatagattctaaataggtatttgtgttagaaaatgaacaagagatggaaaatagagttatgttttttattaaatgtacatattaaacatgattctggtaatagtatttatgtttccaatactctacccatacatgagcacaagtttttctcgatacataggatagatacgcatcatttcattaaaaggaggagaaagatccgccgcctagccaaagcgttaggcaccacaccccgacacacacaccgcaaggttggatttacattagcgtcgtttaagcaaaatagcacacctnatgaagagttgatgactagtactacaatcattacncgaatcatagaaagaaatacttaaatatcatatatttg

SEQ ID NO: 48161 - DNA, 521 bp, Arabidopsis thaliana landsberg
tatataaactattgagagaaatttgagaatcgacttggttggaatcattacaagatgactagaacttattactaccaactctagtttggagtttcacacacaaacaaaaaaattgcatgaaatttgatcagcccaaaaataactcaaagccccaaaaaataagttaatgaatgaacgtcacgtgaataacacgtgttggttttctcaaaatttttttttattttcacgattctcgtaaaacctactttgcaatttattcttccttttgttaatgatgataaaatttgcagttttgagtgatctagactaccagagttaaaaaaactcaaacacagagatgaataagaaactttcatattgaattgaaggaatgaaaaagcaaattttacaaataaactagatagaccaaaaaaaacagagttacagaaaaatcgtaaataacttttgttagaatttacaaccacaacagaggaagaagaaagcaagcttggataccaaaaccatagcctcgatgatagaca

SEQ ID NO: 48162 - DNA, 1086 bp, Arabidopsis thaliana landsberg
  unsure (1)..(1086): unsure at all n locations
gatataaacggcgaagattacctcataaacaccaggattcataagcaaaaggtctcgacttcctgagattaactgccaaacaagacctcgtaagcaatcagggatcccttttcgtatacgccttctgacaacattaggttttctcctaacataatgcttccaatcactccctacaaccccaatcatattcctccattttctcacctttctctcctctctatagatagccaacaacaaaaacacactctcactctctcaatcatattcttttaaaattattcgctccctcaggacatacctgtcatgatcagtggatgatgtagttttagacttgctaaaacgctcaggcgaattggcatgttcttgcttgagaaacccgaatctatccacaggaacatgagaagtggctggtcctgattcactgccattttccgttctttttctactcattctactaacctgaagagactcctcctagcattggtttcagtctccttgtgatcaagctccctaatgacacaatcatagaccaatatatcccaatagtgaaatttataccatcaaagtataaacaggttctcaaagtaaaatcctaaatctagtaacgtcgatcgtccaaaaactgtaaccagtaatcataatcagcagaaacgtgatcgtaaaaaatccaggagaaattaaaactcacctaggtttagtcagatcaaaagattcgtaaccaaattcctcgatgagaattgttggaattcgatggaaccgaagaagataaccaaaacgaaagaaatacaacgttggatggagatcacatctgggaactcatacgcgtatattactatggtggtggtgactcaatctttgaatttttcatccgcttgaagaaagtgatgtttttcttttttccttgccggagaaaatatgagtccagccagaaaaataataattcaagtgaagccagcacgaaacgacgccgtcgagagagtattattatgattaaatggtggttatgccaacttgctaagtttggtgacaactaaaagattctattttctaaatngagcacgattttgggtaattagaggctttatc

SEQ ID NO: 48163 - DNA, 668 bp, Arabidopsis thaliana landsberg
actttgattgtccacaatgaatatagtcaggatgaaataataacaaaagaccattaaataaaaacagtggtaagaaacataaatggggtaacaaaaacatatatattgtgaaatgtatatacacgtgtacgttttggaacttgacatcctttagcagcaaaggtttattctgccaggaaaaaggccaagacccattcgggtgagcaaaacaataatggttgggatgtcaataaacaggatgaccatcaaccatatttacgagtaggatgataagtcgtacctctatcaaatgatcggaagatagctccacgatgtccattggtagatagtcattgtcattgctgacatttattacataaatatgcatttcagctaaatataaaaagataatgtgttttgagaagtccaaattctaaataactctaggcaagtggtactgtggtagcatacctaaaacccatatgatctttgttggacaagtcttacagttttggggcctgtgatgacagaaggcatgctattattgtctgaaaaagaagctgagccataaagttgcagtggcagagcatatcatgcagttcccacagacaaatcgataggatcccaatgtgcagtgcgaacatcattcaaagaacaccttataatgtggaatctaagttctgaaaaat

SEQ ID NO: 48164 - DNA, 748 bp, Arabidopsis thaliana landsberg
aaatacgttggacttggagtcatgtttttatcatgatcgtatgaagtttgggtttgtataattcaagactatatttttgacttaaaaattatagatcaaataggttaatttgagtaatgtttttgttatacctttttcaaaaagaaaaaaaaatgttcttgttgtctgaagttgggtttgtataatacaggattattgttcttttccataactatatattagtgtagatctatagatcaagtagttttgcgtaatatgttctaataattagttacgttgtatgaaatttgggtttgtataatcaaagactatctatcattctcttgtataatattttacatgaatttacatttcaagtgggtttgtatgaatttacattataaagtaagtttaaacttatattatgaatgaattcgaactgcaatgggataaacattatatgcgttttaataataggttggtgaagtttataatttacaccatttgaaaagccttccaaatttagaaactacatttttgcagacccatgtgagctcatatgaatcaatcatagccttgatgttgtaaaacaaattatgattataaaaatgtgatagtatattacatgcataaaaaataaaggagagtaaatgaaagtcaaatctgggttttatgaactgaaagttgaagtttagaagtagaagtagcgatcaaagtatgaccagttaaaaggcccaatatcatttggaggtttgatttttgggttcgt

SEQ ID NO: 48165 - DNA, 948 bp, Arabidopsis thaliana landsberg
agccccttaactgctatgtgattaatagcatctttaaggttcttaagtttcatcgaccccggtcgtttgcctcgagtttttttcatcttcaaatgcacgacgaggtcatcatgatcgaatcttaggcggccagctatgtactcttgagttatattgtaaatgacttgcagaagacgtgtcaatgcgatggcccaacatatctctgcaattggtaatcacaatttaaattttatcaacccatagatattagttatagataataactctgtaatctatattggtacacattaatcaaaacaaaaaagttaccaaatttttgcttcaagactttatcaactatctctggaacacctctgtaatctttggatagtttgcttccatctccaaattccttaacatataaagtgaactcaaatagagtatacatatataaaacacaaccatttaaataatcaaactaacatagtttaatttacaaactttttatggtatgttaacatatttgtattaaaatctatatattaaaataattagctatatattaaaataattagttagtagcagttagttaaatttatataccgatcttatatgaattgcaatggaggtaacataggtttgatctaaccccattgtcatgagtttgagtcaccgttgtgatagttggacctttcttcttagcagttgcggattcacgcttaatctcattaggtactattggcgccttataggtttgacaccaatggatggctcgtatttccgcatttcctacaaaagaaaagaaattcaaaaccatgcgtcaaaaagtgcaaaatcaaaatacataaagtgataaaattaaacaaacaaattcacaggaaccaatattactgatgagtcatgaataccatcaaatctatgcatttttacaatcaacaagttaccttgcgaaagcaaaaaataatgatt

SEQ ID NO: 48166 - DNA, 122 bp, Arabidopsis thaliana landsberg
taatatgaagttgttagacaaatggaaccatctagcaaactcaacccaaatgtcagtaataggtgagacacggtacaggcgatagaccaacagaatgcgagatattgactctgagcgttttg

SEQ ID NO: 48167 - DNA, 1043 bp, Arabidopsis thaliana landsberg
taagcttaaaacatatgaaatcagatttggttgctgttttactttgatcagctggcaagtctggcacaaggcccctttggcatttcaaaaagccaacgactcggtaaattgaatggataattaatcatatataaaaaagtatacatattatgtgtatgactctctttaacattataataaaaaaatcggaagcgtggccaataaattgtcaaaattttccaaaagaatctgaatagagattgaagtaatgtgtgtttcattacttcattcttgatgtttggccaccgtgactaaaggtaaatggataaacacgattaaagatttaaaggtcaaacctatacctaatcttagagatagtgaaattacatcccccataaacacatatttttaaattctattatttagaacgtaatcattttgtttagtttttctataatatatttgacgtttatatcaatttaagaagtcatactttaaggtataaaaccgtattaaaaacaaaatcaaatgtatatgtatatatactatatataacgtgttagatatatagcatccattcgagaatttgcctattcacataatcacattagtccgaaatcattcaacaggctattaaatatttgaaaacaagaatttgggtttaagttatactccattataatgtttctatcacttggggtaggttcttgtttataaattttaaataagttaaacacaaaaagttgatgttttttttttttcttttaaccaacttcattcataattgtactataatcccaccaagcaaaataaagattagaagactttaaattgccttcttagctattaattaaaccaatttgatttatgaatacatatttatattcaatccaacattctgaaaattttgtagtttgcttttaaccaaacttaaaaaagaaaagatgtggcttgaggttagaggcaaggtggaaggcattattcataggaacatgctcgtgtaaaaattcaaattccatctccaggaattttttcttcgaagcgaatggtcaaagactctgaca

SEQ ID NO: 48168 - DNA, 721 bp, Arabidopsis thaliana landsberg
ggaagcataccataaatttggatgtaaagctgaggtatgaagaaagaagctaccatgactataaccagtagaaaaaacttaaagatccaattatccgagtgccagctgttttgagcttcgtggagtttcattgtgttccatgttgagaggaacataacaaagtaaaatatcttcattgctaaggataaactatgtaacataccaaattacttaaaagtatgactctatcagcaaaagatttgatatttcaggatacgaaacatcctaaactcacgcggagtactccaagcgtatggaaacaacgacttccttctggtccacaactgctgacatctgcaatgatgatttcaacttaaagtatctttaacttcaacattagatatatttcaaaagatttatgaaaaaaatacatggaagcaaggctagagccttttgtgcgtagtcacggataaaccaagcgcatagatttatgatcaagaaaatggttccgtaggtataacgagctctcaaggacttgtttttctcttggtaataatagagactcctctgttctatttccattatgagttcatctagatgagcagcctctaaatcaccgggactgatctgcaatggtcttgtccgtgtagcttccgctgatccattcattgccaaaacctacaagaaattgaaattaaagaacctgtaagtactgaaaatgtagagaacaggaattattttt

SEQ ID NO: 48169 - DNA, 780 bp, Arabidopsis thaliana landsberg
gaaaagcgcatagcaaggagttcacaattgttactttgcggtgaccttctccggcaatttgtgcaatgactttgcctttaggagaaacaacagcaaatgtaggccacgagttgatgccaagctctcttcacatgtacatgtcttcatcgttcacaacctttaaagtaagagaaataactaattaagcgaaaatgcaaataatttatcaataatagttataacatagcactgaaaaagtatccaaacatttaacattgaaggagaatgctaatgacaaatactggtggtatacaaaatgcgaaaatgatgtgaaattctgaccggctaaagtctttccaataaggaaatgtgattccatcactacattccttcggaacagttagttcaaaaacaagacgaacaaaaacctccaggaattggcataagtaatcaatttcacaaaaaacatttataagaaatttcgaaatttggaacatggaaattaccgggtggctaatatcatagcgaagaactgcatttcgtatggcatctaaatctttctcattgtcgaacttagccgagtgtacacccacaacggtgaactgcacacagatggcaatcctaggtgaaatttaaattgcttgaaaatccaaaataaaatataagagagcagcaatagtaaagactcactggcatatccttgtacttcttctcaagaaactctagatccggtaatacatgcatacagtttatgcagcaataggtccaaaaaatcagtataaccactttcccttttaaatc

SEQ ID NO: 48170 - DNA, 817 bp, Arabidopsis thaliana landsberg
gtttttaattgcattttactctattacttcatgggagagctttacatgcgcacatgtctccatgtgtttggcaaccaaatattgtaagagagagagacatagctttgatgggcttaaaatagagcatgaaaaacgctcttgcgtcaaaacaacaaggattttccttattttcaattctctaatctcccaaaaagaatttgagaacaaagataacagtcatcctctgttggtgtcttcttcaacaatttttcatattcttctgttgctgctttgtgttgttccttatctctctcagacatgaagatccctgcggctcttgtctttatccctgttggtgtcctcttcttgatctcagggctcatcgtcaacatcattcaggtcatccatttttgttaaaacttgttttgctctgataccaaaagaagtctatcttcattgtattgtcttctcaatggaagagacatagctgaaacattttatgttctataatgtctgttataaaatcgaaacttgtgtcaactaaaggtttttggacacattttctctgtttccagcttgtgttcttcatcattgttcgtccattctcaagaagtttgtatagaagaataaacaaaaatgttgcggaattactttggttgcagctcatatggttgtttgattggtgggcttgtataaaggttggtgattttcatgaatcttgttgtggtttacatagaggtatcatagcctgatatgtgattcgacttgttgatgctgcagatcaattatacctcgatgcaaaaactctagagttaattggtaaagatcaaattatgca

SEQ ID NO: 48171 - DNA, 157 bp, Arabidopsis thaliana landsberg
aatcattatttggtaacaagagaatgttgaacttgattagggttatgttagcagactttgctgaaaataggattgcacctttcccaagaggtttgctatcttctgatacaaaacctggtggggaaatcggattcccttttaaaacgaaccctttctt

SEQ ID NO: 48172 - DNA, 807 bp, Arabidopsis thaliana landsberg
cacaaaatcatgtgttactgcacaattaggtatatttcttttaatatcattgacgtttttaccttacttttcaattgttcttctttttccgtaatcgacaccgtagagtttcgacgatgacatgacgcggccaaattcaaagcaattttaatccattcagttcttgtctatgattagatgccttgagttccttcctgtcatcaaaacaaatttaactagatccattggattttcaatatgttggtggcggagatgtatttttttaatcgcaaacaaaagagataaagtttgtgaaattggtagagaatgtgttgatggagttgacagatatggtgatggagttgatggagaatgctttgatgaagaaatcacggtgttgatgaagtaatcgcagtaaagcaaagtgatggagacaggaaaaaaaaatgacggaaacgatgatgaacggtgtttgagatagggtaaaatttcaataaaattttaataagtatccaatcctataaacccaataagaaagtgtcatttttcaaatttttgggcccaaatatacctgattgtataaaagtccctaccctatgttttccgttattgttttagtcatatataccatattcaaattttatgtaagttttatgtaaatatgttcttcaaattttttaaaaaatcctggctgacccggtccaagtatgtcagttagctaatataaaagcccgtgaggcccaacaaacggaaagttcggtccttcaaattgaaagaaagaaaaacaaaacttatttattgaaaaatgacacgtgccagatcatttac

SEQ ID NO: 48173 - DNA, 895 bp, Arabidopsis thaliana landsberg
ataaaatgatacatgaactttagacccataatatgacatcttcaagactacttaaaacctcattttttctgtaatatactgactatgcaaacacccaaaacacttaaactaacagaatacttgcatatcctcttttgcatctgtaattttttttctttttttttaaatttgagcatctaaagatcttcgaaaataactttttatgctcctaacgattttggtaattttcttcgtggtactcatatatctactctccccaattatctatttaaatactgcacaaacaatcacaattttgtctaataaacaaaacttaacaattttttatcatttttttcttccagtttaccatatgtcatatgctttatctacatttaatctaattcgtccacgtgatgggctgtggttttttttttcttacctaaagtcatagactcacaaatctatatttctatcaagatggatacatttatggtacgaatcacatgattttgatctttaattaaagtcttgttagttttccaatgccagatctcatcgcatcggtggctactcaaatccccacccattaataccaatttcaaccaaaacaattcccacatttaattattttcaggacctttaatttactaaaatttattattgctaaacctaccggatcgggtaaacggatatgcgattcgtcagccacattcatataacaattataaatagtattattttttaacccatatgctctttttccatgcaaatattaattatatactgcaaaataatgattataaaaaacaaaattatatagatccactataaagagttcactcgaccacattcacataacaaaacaaaatcttacatacttcaagacaaagggaaatttaaatatatctcctta

SEQ ID NO: 48174 - DNA, 684 bp, Arabidopsis thaliana landsberg
ggtatatatctcgttttctattttttggtacacaaataactcttttgtataaagacagctaactaatgttttgaatttttaaatgttatctcttaaaattaaatctaccaattctaaattcagtcaatcattccgaagcatatttttttcatgctttgtgattccgccatatatttccccatgttcttttgtacgcttttcatcatgatttttaagttttacgattttttgtagtatcaatgaaaatggactaagcaaacttctaccgtaatggtcgcatattagatagtggatttatgctcgcggaaacaaaacttggccggttgaatcgtcgtcctggcatctaacacttttttcgaacattgtcataatcaatatatatattgagggatgtttatgaagtcgtctggataatggacgcgggaaatcactcataaacgatgtgaaaatttataaggttataaagacgaacacatgtaatccttcttttgtatttgtatatttcgactcatacatatctttctattcaggaataagtataaaacataatataacatgtggcatatcgaccgaccaatacatctttcccaacccatgatcaaccttttgtttgtgttcttttaatttattcgtcatgaaatggatcagaatactcatgatgagtttgtgtatcactcaagggac

SEQ ID NO: 48175 - DNA, 925 bp, Arabidopsis thaliana landsberg
gcaggtcgactctagaggatcccctaactccaattgttaccttgtagaaaggtgagcaaacaattttccgcaagatgcggatgaagcagaaccttgttggacggtagaatgtgttaaatgggcatatcaagacgcatatgaagatctgtagcatgcacaccgaaaaagaaattagcggtttcaaattgtgattgtgataccgattgcgattgaaacgcgccatatgataattaatgaactaagtaatttgatttaccaggaggaggatgcctggaatggtgtctacttgactagctgagaaaccggacgctcggaggatgaggtggatgaccatagctgccacaactgaggtcatgaacgtggttcccatcagaaacgcgtctcggtaacgcaacgctgtgtttggtgcaaactcaaaaataaaggtgtagtttatcctcgtgttcttccacatgtatagattgcatccatacatgaacatgtgtagactcagcaacgcaaaaacgctgcgtttttaaaaaaaatcatcaaaatgtaagcgataaatggttaagtctcattggatggtgacagttttgttgaattgatcattaattcgtataattattcattacctgaaaacaggataaacagtctccagataagagacttgatcactagaagtgaagattccagaaagatgggctagtattatgtaaataacaaacaatgagatgaagcaacccgtaaataaccctgcatagatacacaatctcaatttgttaaaactctgatgaactgtttttttgaatggtatataaaggtataaagatagagaaaatgaaataagtaccaacaaagaaagtgaccatgtgagaatctttggtctggtggggtttcaagaatttcatggcctttttcctgtcattgtggcgaagtgctttgt

SEQ ID NO: 48176 - DNA, 641 bp, Arabidopsis thaliana landsberg
tgataatagtactgcatgacagcaagaaaagaatggctcccatatggttgacaattttttatatactttttattttccaccgaaatattttttctcttatatgctttatttatcaaaatgagctgtaaaatttcctttcataaaccatataatttttcttataaaatattctaacgcgtattttctgattgatgatcaaacatttacgttgattgtggtgaattattgttatgaaataatgatgcattaaaaaagaagaagattttgatttagtaatttgtcggttagggaagtgcattatgtacgcaataatcacatgctgctcgcgtgctagcttaggtttaaataagtgaattaagtactagtagtaactttatagttacattattgtgttaatatttgattcttacgacaagttttaaattaagatttgatatctgaccgtttgaccaaaggcatctgataaagagataagatttattgcgcaacgcaacggtgggctactctagaaatgccccgtggtttatgccagcccaaacgaaagagattcttcttattttgaccgttggtttttcttacaaaataccaaaattgaccttttggttctgcttctttttacatataaaaacttggtcttaaaa

SEQ ID NO: 48177 - DNA, 1066 bp, Arabidopsis thaliana landsberg
gtaaagtggtcgttaaataacttttccacgttaaacttcttaagttcgattggtctctgatatatgtagtgcccccatggccatgctttgtccaaacgtgagtgataaatatagctcattaattaaagtggtgataataaaggttgaaaatcaagaacttcataaaacaacaccatatccagacagttgttataatgataatgtctttttctttctgcattttgaattaatgattttactacccatatatgacacaccaaaggaccctctttatcataatcactcgaatactacaacaataattagaagaattccacaaagaaaaagtgaaaaagaaagaaaaatattttccagccaaaaagaaagggcatcatgactcatgaaaatgaaatcactcgtttgtgaaacatagaacaattaattaacgatcattatcattgcatgcataccaaccatacatgtttattatatacatctctatgtcagtgtgtttgtatcttcaagccaattgtcaagcgccacataatctttgagaatgtgacaccgaaacctaagaaacactattcacctacaacagaaagaagacaactttatcaaattcaaatatatatgcattcaagcagtgggtccgaaatattattcgatcggtagagtaactagaaaagctataaagagaattttataacatttctagtgatctatattaccaaaatatcagagtatttgtaaacacaagtgatatgttggactatcatttagcatgttctatcctacatttgtttttttgaatatattcaattagcatgttgtattttgaagttgtcacacatacattaataaacatcggtatcggttacgacttcatttcaaattcaattagtaacatacgaaacggttagaacttctaaattagaatcggattacttttatatcatgaaggtagtcaaaatatccgagaatacacatttggctagatggagtttagggactaactaaaaattgtacgagcaccgaaaaaacgtgaaagagacagagagattttggatgacaaagtatagtgaaacat

SEQ ID NO: 48178 - DNA, 938 bp, Arabidopsis thaliana landsberg
ctaagcttgttttattgtacgtcttatatcttatttagaagttttgcccattcaagaacgacttttatgattttatctaatgtttattctgccaaaaagctataaaaggatcaatgtaaggaaatgtttgatttaatcattgaacaacataataaaataattatgtttatagcaatttggttgcgaattgtcatcctaaaagtgttaaacattgcagcttctaagaagaatctctttagtctatattaaagccttaaagaaaacttttgataagatacccactgcacacaaaaataacttctttttgtttgcatttcaccaaattaaaaaagagagaataatattaagaaagaagaaaaagaaagaagaaaaagagatattctaaagctatcttaatattcttgtagttgaatttggaggtcacatgggattgaaattgggattagtggaaagagaactaacaaaaacacctttgtaaaaatatacactcaagaaaaattcacaaaaaaaaaactataaggaaacaaaataaaattaggaatgccaaataccactgagtatgctgcggaatctgttcattgatagcttcttcacaagtttcttagcatctgaaccttcagtttctgctagcttctctatgcttttcaaataccctgaactcgcaatctttcttctcgcgctattgcagctcgttaaagacatcaatatcgatatcaaaaactttgtgttacctgaatcgctgctcacattgctcccatcttcatggtctagcaactggagaatgtagctaatgctaaagtcgtcttgtgcaaacttcttcctgttccttggaaccgagatcaaacagtacagtgccacgctcgccatttctcgtacatctatcgatttggcgtcgagaaatttaactagctcgggcataaaacccgcgtctcccatta

SEQ ID NO: 48179 - DNA, 731 bp, Arabidopsis thaliana landsberg
ctatctaaaagactttgttccatcagtgaatcacatgggagcaccaaaatcttattccccagttggcttcccagcttcttcatcaattgtctccctcttatctagttgcctccatgaggtattgaaggaaggcactgatgtgtgtttgatagaccagattgcatcagttcatcactgtcccaaaactattgtgcttggatttagcaagggtggagttgtgatgaaccagctcatgagtgagatcagttccttggataccaactttgcgaaaacttcaatggtagaagaatctaccagccagcatgaaaagattcagatcattccagcctccaaagaaagcttcctcaacagcatttctgaagttcattatatagatgtaggactgaactcttctggtgcctacattactgatcacaatgtcgtgcagagaatctcccaacgccttgcacgaggtgcagactcgctacgcattgtcattcatggaactcctaggcagtggtgtgatgagctgcgaggctggattcgcaaggaaaaagatgagttggttcgtttgctcaaagctgaaactgagaattccggtgggaaactacaggtctgtgaaaggttctatttttctgatagacttgctgatttgcaaatgcactttgagataattgatgctatggatgtctcctaaccattcgcatgatataagacacataattttactctcaactcagtttgttttcttc

SEQ ID NO: 48180 - DNA, 577 bp, Arabidopsis thaliana landsberg
cgttacagaaacaagagatgtatgaatgcatatggtaactgaagttgatattaaataaatatatctcttaagacttacttgcgcctttgcaaagttgagtgggccaaagaagaatttgatagatggaggatgaatgtgaaggccaaagacattagacttgttatctactatgagcttggtagagcaattgaaagtgaggaacttagtcgacactccatgtgaatccacaccttcttctaacatgaactgattaaacctcccaatctgtaaaattacatactttttttaggtagagtatacaagccaaaactcaagctcatcgttaaaactccatgcatgcatcaacaaaatttggtactagcttagtagattattagaagatttatattactcgaaaagaaatgttaggatgaggaggctgagtagcaatgtagaagacaagcaatgccactcctaagctaaacaaaaacctccaacctacttggaggacgatccaccaactcgaattggaggtccccaatggcaccaatcttttctcatcatcctcatacaagaagttgttttcggagtttctcaa

SEQ ID NO: 48181 - DNA, 536 bp, Arabidopsis thaliana landsberg
gcaatcaggagtttgtctcgtttgccattgtgttaccttgtgttatgataattctcaattcggatcaatgcgctccgggtctcggggatatgttgttcgtcatttggtattcagctacgaatgtaatcttcgaataatatgtattggtagagaagatgccaatcctctaccttgtttagttggaaagcctctttgtaactgttaaccatttttccttttgttcttactctacgaacagcaacgacaattctgcagtcaccccaataccttctcacgagctaccatcacactcacatgcttttgagaacaaaccgtcttcaaacttgtatgtgcctgagctaaacagaccagttccagtcccaatttccgggtatccaccagttatgaaccaagctcaacaacaacatatccaagtcatttacactggacaaccttacattaccggaaactcacctatgacattgtctgtcacagcataccatcacacaaaccacatgtattatcagcgaccggcacagtcatacccaatctttaca

SEQ ID NO: 48182 - DNA, 475 bp, Arabidopsis thaliana landsberg
acacaagaggttatccataatctgtgcttaatctcttgcagtagttatcttttcattattacttattttccaattctatattcttatatgtcaacttgatcttcttccaaattggaattatatctacatcgtcttagcttgaccattatagctccagtaccaaggtctcttcttaactttaatatcagctactattctcatactgaaaatatctgttgttcaccaaacatatatttcgaaccaaactgctgaaagcttatcataaattgcagttctagccacacagttgtgcagttccaaccattgaatgccacaaaatttggacgatttcttaagacaagaagaacatagcaaccaaaccttattgattaaatatgaaatgtctccataaaactgggagagttcccagatgaagagcacacggagaatgttcagcgaacctccagatgaatgtttaatatttgctttcagaaaa

SEQ ID NO: 48183 - DNA, 787 bp, Arabidopsis thaliana landsberg
gaagtactttaccaacgaagaatgcctcaagtcacacataagatcctgtcatcagcacatcaactgtgagatatgtggttctaagcatttgaaaaagaacatcaagagacatctacggactcatgatgaagattcctcaccaggagaaatcaagtgtgaagttgagggttgctcttcgactttctccaaggtaaagaaacatcctgagctacttcaaacttatatagtccaaaacaagtttcgtttccactttattcaacatcactaattacattacgattatttctcaggcttctaatcttcagaaacacatgaaagcagtgcacgatgatatacgtccctttgtttgtggctttcccggttgtggcatgagatttgcttacaaacatgtcagaaacaagcacgagaattccgggtatcacgtatatacctgcgtaagttcatccaacctacatactatcgtgtttttcttacaaactcaaaagactagaatctcatctaaaactgaatgtggtttcagggtgattttgtcgaaactgatgaagatttcacttcaagaccgagaggtggactaaagaggaagcaagttactgcggaaatgctggtgcgaaagagagtcatgcctcctcggtttgatgcagaagaacacgaaacttgctagtagtgtccaagccttaattatattttgtcttaagataagtgaagtagttttgtgtaaagttctttttgtttgtgtgttggtaggaagaaatatagaactacaatagtatgtagtaatataagtaat

SEQ ID NO: 48184 - DNA, 1030 bp, Arabidopsis thaliana landsberg
ttgaaactgagagtctgagagtggcaatcacatagaaaataatctatgcgttacttacataagtgtcgacaaataaaatgttatttacgtacataaggtattgtatgtctatctatgagtgtatttcacaataaaccatgaaaggtcggtgattagtgggtgaaagcatttagtgcatccacttttactttatttatttatgtttcccccaacaataaataaagcatttctttactaaatcaaacacgatcacttcagcaaaaccactacacctttcttatctctcagattttctcaagaagattgtgtggaagatgatgagacggaagatttttctctttggtgattccatcactgaagaatcctttagtgacggtggctggggtgcttctctcgccgatcttctccgccgcaaggtaaagatatgttgtatatattaagtaaagattcataagttttgattgataactcttcgatgccatagctaatttgttttatagatgattaatgtttctcatgaaaccataatttttcaggaaacaaatcatattattattgtctagtatagtgtagtttcggctatgtcttaaaatttgatacataaaattttattaggctgatatggtgctacgaggatacagtggatataacacgaggtgggcactgaaagtggtggagagagtttttccggtggcagaatgaagacggcggagattctccggcagctgtgactgttttctttggagcgaacgacgcgtgtcttccggagagatgctcggggtttcagcatgtgccacttcacgagtacaagcagaatcttcgctctattgtttcgtttctcaaggtgatcattttgtgtattatctcattcaaatcttgcacatgcatatttattatagtactagtataatataaatatggaaatttgttgtatacatattaaatgcgtgagtcagtgttgaagaatgcgcatacatattgtaatttttgtttttgagaacaaaccagagtagtgttgatctgagactgc

SEQ ID NO: 48185 - DNA, 1356 bp, Arabidopsis thaliana landsberg
ggtggtgatgaagagtcatttcatttcatgggggaccccacagtacatggttccataatgaaagaagcatttctttatatatataaacgcatcctcactcccttcttcatgtctcattctcatccatcaaaccacagtacacacttcttctcttaacaacacaacacaactttgaatttttcaccctcactttcatctatctcaaatctccttccaggtatgttacatctctagaaaacgatcacaatccaattaataacaagagataatcattcatttgtttgctaacactttgattgttataaattgtgcagaaaagcgagggaatagtgttgttgagaggtttgtgatttccttttgaaaaaatgatggcttgtggcttaagcaagagccttggcttgtcttcctccttgaagaagcaacaaggcatagtgagtatccttggtggcatttcgtcgaacacttcatctgcaccttcacttaggcgaactttctccgccgatttgtcctccaagacttgggtttcccaaaatgggttttctcctatgaagagaatctcttcctctgagaagcttcgtcctgacgaagaagaagcagaggaagaatcaagatccggtgtcgatatctgggcacagattcaacaagacaagaacgataagaagaaagaggaagagatcgagccgggtcaatccgatgtatggagttcgattttgtctgagaagaagaagactgaatcgagcaaggacactgttcctccaccgtatgttcatccattgatgaaacgtgcgagttccttgagtgagaaaagcctcgagatttgtactgagagtctcggatcagagactggttgcgatggtttctcttcgcatgcatcgtcgaagactggagatggtgagatcgagattcatgatgagaccaatctcgttgttaacgtgacggagacgaaggttgaagaaataacagagactgagattgtggttgagcaagaatcatcaatcattgttccgaatcacataatcgagctgcctcgaggatggtttcctcctccgattcgttctctctcgagccaatctggttcgtctctgcacatgaaaactcgccgtgacaatggccgattggttcttgaagctgtctctatgccgtcgcacaacaacttctccgctaagcgccaagacggacgcctcctccttacttttgctgaaatcagcaacgaacccaactacgacaaagaagacgagattgattcggaggttcagtggttcgacgaggaggaagaagaagaagaggaggaggaggatgaagaagaagaggcaccagacgagtttgcctacaagcccaatgggcttctctataaga

SEQ ID NO: 48186 - DNA, 400 bp, Arabidopsis thaliana landsberg
  unsure (1)..(400): unsure at all n locations
aaaaaaaaaaaaanagaaanagaaaaaaannaaaaaaaaaaaaagagaaagaaaaagaaaaaaaaaaaaaaaaaaagaaaaaaaaaaaaaaaaaaaaaaaaaaaaaaaaaaaaaaaaaaaaaaaaaaaaaaaaaaaaaaaaaaaaaaaaaaaaaaaaaaaagaaaaaaaaaagaaaaaaaaaagaaaaaaaaaaagaaaaaaaaaaaaaaaaaaaaaaagaaagaaggaaaagaaaaaaaaaaaaaaaaaaggagaaaaagagaaaaaaaaaagaaaaaaaagaaaaaaagaaagaaaaaggaaaaaaaaaagaaaaaaaagggaaaaaaaaaaaaaaaagggaaaaaaagaagaagagaagaaaattgaaaaagaagaaaagggaaaaaaaaaagaaag

SEQ ID NO: 48187 - DNA, 832 bp, Arabidopsis thaliana landsberg
ctattacccttccgaactcttcacctaacacacattttctaggggtaaacgtgtcatatcgtatgcagaaacgtgatcccagcatatccggttcttctttatcctttgttggaggcaatatctacgtagacagttacctcgtacaccttcagtaaaatggacggttgagattcctatttcagtaaatagctaatatctaccgtcagattctcactgaacagattaagcatacaacgtcagctgaagtgtttagatgttaccatacaccatctgtagagaatctctgaccttatcgcataattttttaatgttttgcagaatttttgtaggttgcttatttgctttttctttcatatcttttcgttaattgttgttgttatcttcaacgatagcgttgtgctctggagaagtgtttgatcgcagaaaagcttcgttctttgtagtctacaggtttgatcattgagttcttaacttcttttttggtttgattgcgatcctgtactttcgtttcgattacttaaaggttgggtctttaacatgatcgactgatagatttgtgggaattttgataatctgagttccagagtttgggaattgatgatttgatttgagtgttaaatttgttttgatggttgtctgattggtgtcacctatttgttatgtgtgtgtaggcgtggaaggaatggcaaaaagctcgttcaagcaagagcatgacttaggtttggatttgaactttgttcttgctttactgtttggtcctcgaagtcaaaaccttgctttgatctaatgatcctgttttctaaatcttcagagaagagaagggcagaggctg

SEQ ID NO: 48188 - DNA, 839 bp, Arabidopsis thaliana landsberg
  unsure (1)..(839): unsure at all n locations
aagcaaaactcataaagaacaagctatctgaaaattctccctaaggtgacaaaagaaaatcgatcaatagaaaaaagagaacaaggctgttacatgacgagatagttagagggaagaaaaaggatcaataggaaatataacagatttgtgagttgtcaagattttggtcggtttgggctcaggagggtaagggattctccagaattactccttaggtttctggtctgttctttgttctatgtttcagtgaaagatcaagtaaagtcaattctgaatcctaacaccaacacactagatatcatcacaccaagcatcaatctgtcaatcatcatataaaacattgttcaatccatcctccatatatatacctaaacaatcaaatgtataataaacacagcaaaggatataaatctagttacgagaagaaactcaatccatgaagagaaatggaaaagaaatgcataaacataagggacataaatgcacaaatcagaatcaggttgacctaaccataagaattctaattaccagatcaaatcaacgaaaaactacgaagatgaaatgaaaatcttatccaaagaacgagatctacgtacagatgaagggaacgatgcagaggaagagaagaatcccaggagatccggtcaagagatcgttaacaggaggattaagaacaacgacggcggagataagcgtcgtaagaagaagctgagctgagagaatcccatagaccttacgaataaatccccatcggagctgattctcggcgtacttagcccaggataaagcgtcgcttttcgactcccattcagaacatatctttncggcggacgactatg

SEQ ID NO: 48189 - DNA, 595 bp, Arabidopsis thaliana landsberg
  unsure (1)..(595): unsure at all n locations
ctggacctgcggaaccctgaattcggccggcgggggcctggtaggggatccaagttgctcgccaggagcgagtggattccgctcaacctggtgattggtcagcgccacancaaccaactccggtatgatgccccgtttaattcgtctcgagttgttctaggtttagggcgattcgggtagaaatttggcgcactgggtcgcttgatcatcgtgcgccggtgagtagcgccgccgcagggatgtgcttgcgccgccgcggtcgggccagggagggagatagtgtttttgccgccgatctgttcacgaacgtccatgattagatcaggggtacccttacgcgtggaccgtagatctgcaatcctatggatacgatgcgatctcggttattttggatccaagccgtagatataggatccagcggctaatgttgaataccggttcagtaataagtcatgaccgtcgatctcgcgatcaacgactctggtagtatacctgtgggatacaaatgttcgatctaatctcgcgcgtcacgcctaatcggacggccagaacggcctggtacccttcgcgggtcaattttgctaaagagacctgg

SEQ ID NO: 48190 - DNA, 526 bp, Arabidopsis thaliana landsberg
ctatcccctacttcgagccggccctcagtcctagagcctccctcgccatcaagtctctcaatttggttcttgatctcgaggcttagaagcacaatgaccaacttctttcgtcgtcctggggcgcaggacaacgctatatttgataccagctctcttaccccttcagaagctttctatctacagcgggcgcccaccggtagtgcccggccggctacacgctcaagccgcttttcttttaccaggtcgtctaatgtcactacccgatctaattcgcccacacctccatccccagggactacttccatagataaactgtctattcaagatgaaaatacactcaatggggaggccagcctcaagaagaagaaccgtgcgtcaaccggattcagcctgcggggccgtgcagctggatttgttggcacaacaggtggccggcctgggaagactgtatcgcgccccgctagtagctttgatgccgggaaccgtggacctattcctcaccagggcagcaaagcttccaatggta

SEQ ID NO: 48191 - DNA, 602 bp, Arabidopsis thaliana landsberg
cctcttgaactacagataaactggtagatactaagcctggtcctttgtgatcaacaagtttggtataaccatacaagaaaaacaggggaaaacaaaagcatagcatgtaaatatacaacattcatacataattttgttcctttgttttggtttttatgactgattatggtatgatgacttgatgatgattattagtgtagagtgtttatcatatttcttacttgtcgaaatggtgttaatatagtgataaaataaaatttagaaggttcatcaactcataaacataaaatttagagataaggtctttatttaattattcatcttagtagttttattattaacttagtgactgataatttcatctacataggagaattcaacattcgacattttcctctcggacaaggcagcggaactacagtcttttgggagtggagtttttcctttgtaagctttgcagacttgacccaccaaatcatctagtttctatatccccaataacacacacaaagaacaaaaaatagaaaaaaagatagaagacatttcaaattggttagaaaatgtaaataaatgaaagtaagtgttaataaaggatttatcgg

SEQ ID NO: 48192 - DNA, 1445 bp, Arabidopsis thaliana landsberg
  unsure (1)..(1445): unsure at all n locations
agtgcaggaattcttgaatctatttggagttcatgacattttcatttttattaccagtcattagctttagattatgaaataacatgacttacatttgtcagggtactcctttaagcatgaagagttcnnnnnnnnnnnnnnnnnnnnnagttcgggtaagtattcctataactcttttattgaagatttttttgtttatgtttctttatttttgcgttgtttcagagcataagtttgccaactcaccatcaagagaaaacagaggatacatctttaccggatagcagtgctgagatggttccaaaaacccctccgccaaagaatggtgcaggccttcactcagcaccatcaacacctgccggaggacgtccaagtttgaacgtgcctgccggtaatgtttcaaatacatcagttaccttatcaacttctattcctactcaaacttccatagaaagcatggggagtttgtctcccgtggctgccaaggaagaagacgcaacaaccttgccttctcgtaaaccaccctcatctgttgcggatactccattgaggggcattggtagagttggtatccccaaccaaccccaaccaagccagcctccgtctcctattccagctaacgggtctcgcattagtgcaacttcagctgctgaagttgcaaagagaaatataatgggagttgagagcaacgtccaacctcttacttctccactgagcaaaatggtgttgccaccaactgcaaagggtaatgatggaactgcctctgatagcaaccctggtgatgttgcggctagtattggtagagctttttcaccatctattgtatctggttcgcagtggaggcctggtagtccctttcagagtcagaatgaaacggtgtgtgttttgaattcgattataagtttaaggatccctgggacatttgcattatactatggtagtttgagcaatatcatggctttacttgttagtctgagcaatatcatggcttgttagtttttttcgtattctggaacatacttcagaaacaagttctgattcttgtgatgtggaactctgtgtataattgggtttacactcttaacataatcctaaccaggctcttttgagatgtattcctagggctttacttatttttctactggtagtccctttctactgtcttctttttctactattaaatacgtacattggcttttaggttcgtgggagaactgaaatagcaccagaccaaagagagaaattcttacagagattacagcaagtacagcaaggccatggtaacctcttaggcataccttctttatctggaggaaacgagaagcagttttcttcacaacaacaaaatcctcttttacagcaggtagcatattcaatatggaataatcacatgcttaatagtattcaaaacattccatcatattaagagattatcttttctaatc

SEQ ID NO: 48193 - DNA, 704 bp, Arabidopsis thaliana landsberg
ggatagtctacggcaagttcgcaaccgtccacttctccatattctcacaattgaactcgttgcgtttaaaccctatgaatcatcaactacggtaataataaataaattttttgaatcaaatgtaatgagaaatgttttgtgtgagacgtgaaaagtgagattttagagaaagattgtgcatctttttctcatgttttttttttttttggtctaatctttttctcatgttctaaaatacattattaactatgactcagtcaactattatgacattgaagagtttcgcaatgaatccaaaccaatttctgaggtaatttgtcagatagtgctgagggtgatttttcgatggccaattcaaccgtgacacatcgtatccgaattgtccactaaatattcatgcgaattgacctaatcacaaaaaaattgagttttgagaaagatcttcacattgtttctagtaacgatgtgaaaaaaatgagttttgagaaaatttgattaagggtcaaaaaggttcctacaaggatcgtcacattgttttaagtaattaaacgagagtgagttggaaaaatagtttagagaaagatagccactaggaaacatatcaataaaaactagagtcattcacatgtttcatgccaaaaacacacgctttctttcttataaaaatgacatatatattctcactgtatgttgtttatattatt

SEQ ID NO: 48194 - DNA, 830 bp, Arabidopsis thaliana landsberg
cccggtgggaaaagtttagggtttgtggtttctgtggcgactttgttggcgttttggctgatgagaacggaggagagggtcggggtaaaggtggttccggtggagaagttcccggagatacatagatgggttaagaatttgttgggtaatgatgttatcaagaaatgtattcctcctgaagatgagcatcttaagtacattagagctcgtatggagaaactcaatatcaaatctgcttgataaggttttataaaaattctaatgctcacagtatgtctcttttgttcttgtctcagttgctatgttctgtcacttaatgtttgctatattgaaacacgaaaatttgaactttctttcttgttctacctaaagatgttcttaagcaaataatacagaagaaactctcttttgtgctactctgattcaacctgaacagttacatgataaatcccataagacttcctacagaaatttctaacaccagtaatgatctctttaggactagctccaggctctggtaagatatgacaggacaatacgattctccctactgttatctcccatacatggagatcataaacaatcttaactccatcgattcgcttaagtcctctttcgagcttctctatgtccatatcacgcggtacgcgttccatcagtattccaaatatgttcttgagcattggtagagtagcagcaagagcaaaagcagagaaaacaagagtgcaaatcaaatcaaccaaaacccattttggtttcacccaaatgatacctccaccaatcataacacctagtgactgaatcatatcagccattgcgtgaagataagc

SEQ ID NO: 48195 - DNA, 602 bp, Arabidopsis thaliana landsberg
  unsure (1)..(602): unsure at all n locations
ctgcttccccaccaaccatgtatctgctaccttgccatccacccgagcacgtcgaagctcaggtgctcaaagtgggcacgccgcaaccacggctcctcgttgtgccacgccaccaagcacactagctgcacaatgttcagatcaaccaggtacaggcggttcttggagcactttatcttggcgaggagaatatgctcgtaaccgtggatgcatatgatgatgccattgtcgaggacttggcacctgccttcgtccatgtgtctgatgctaacaatgcttgagcaaagcctcaggataatacacatctgtcagcgcctgatgctcgttgttctcgcacttgaagatgatgatgcaacgacagcggatagcccgagtctaggtaccacctctgctccctgtcgccacccttgcttccaagatatatttttttctctagcatattgagtttgtgatcaaattctttatatagaggttgtgtccaaattctttatatggaggttgtgttggcaagtggatccgaagccagtnnnnnnnnnnnnnnnnnnnnnnnnnnnnnnnnnnnnnnnnnnnnnnnnnnnnnnnnnnnnnnnnnnnnnnnnnnn

SEQ ID NO: 48196 - DNA, 612 bp, Arabidopsis thaliana landsberg
gcatgtccaggttaaacagtgtttatccgtcttctttgagcactatgcctccctctcagaaaagcataaggtaacggaaaccatgatgtctataagagcaataggtttaaacagtgtttcatggcgtatttgtataacactgctgaatttgtcatgcaatgcagggatacgtgtcaaaggcttttgttcctcttgtacgctcaatgtggcctgggattgatggaaacactaaaagttcgtcatatgttgtatcaaatcaacgcaagcgcgcagtccaagcatccagattcatcctacagatgatgcaaaccccgctatacaaaaaagagacaagaggtgagcctgaaagccagttcaataaatcaccagaagattctatacagcctccactaaactctacagaagaaggtttggccatacgcatagccatcgaggttagttgcattccttaggctactataacatattgttctttttacccgataatagagagtagtttaacctttaaaatctcttttcccttctagttggctaagagctatcatcctctcaagattaggaactgtggtctgtaacactggttaacccaatttgtaacccctttgctatatt

SEQ ID NO: 48197 - DNA, 1839 bp, Arabidopsis thaliana landsberg
gagacaagctgatataagacagagaaaatgagaccaagagagagagaaagagattttgaccaattcaagtcatgggctagtgtcctatatttagaaagtgatagaaagtgaatatggtctcgtctttcctaatggtgaaaaatagaatggacgactggaattttactaataattggctatgtatagcttatgaatattatgtgtatggatgtgaacagataaaaaagtatatggttagatgagcttgcgttaccagtttttaaacctgctttttgttcttcatgtgcaaccaattcttttctgagattcaaaagcgataactagaagtttaacaaaatttatttgtttaggattgagattccacttacagcctaaattccaaaacaaactagaagatatgagggattcacaatgattttctcgtacacggaaccttccataggttttggggaagacatacgtggactttcagctctggaattggtggagatatggaaactgaccaaaaactactaccattgttaattctttccttcttctggcttcctttgacttatgatgtgagacaatcttcatatcgtacaagagtctgaaaccagaaaacccaagaacaacacaagttggtaaacaaatgcaacattttggtatcgtttctagatgcatcaatagctcatgatatataagaataaactcgaaacactgactaaggttgatgtaacactatatgtgtaactcaagaagaaaaatgtaacactgactaacgtagatgttcctataaggagatcaaattccatgagaacattgaagaaacaaacttaggaacaagatggcaccttctttgttcgagtgccttgtcggatccttccagctttcgtttctgtttatccacagtctaacacacaagatcaataaattcccatcagcaaatagcttttaaaacaagaaaactaaaactaatagagatgcaaaccaaaactaagttgttgtatgcaaagctcacatcacacaacactagttcgtttatctcaaatcagtaacaaaaacttgtgttcatgagtaacataaattatgttacatacagtataatgttgttggaaattcaagtgcttaatacgacgcataaacggcaagtatttataacggagaagcgaaagcgacgccgtaagaaagaaagtgtcattagtgtttgaaacgacgccgtaaagcgaagtattttgtcaacggcgtcgtttaagattgttacaaactcggtagcattttctgagaaggagagaagttgtcgccgataccaagagaggaacaagcgcattgacggtgagtttttccgacataacctgaatcgaaagtttcaaactttattagactgaaaattgattttggttgaatctcaaaggaatactcttattgaatcgaatatactgtcgcctctttgttttcctcagattaaaaagacttttttttgctcaggttctgaaacgatcttaattgctttcttcttcctagcattgttagtttcgtaggtggatttttgattgtatttcgctcttggtactacaaagttatagcccatgttctagattctttggtcaatgaatggatttcgttgattgtggttaaaaagatccaattttttcaatgcaatttaatttaggatcgattttagattcaaaatcaggctaatagctctggtgttgcaattgggtggagggaaaaaaattgtggtttttatttgaaaacttgtagtttaacaatgttaatgttcgaatgcacttaaagctattcggaactctttgacattgctcccagagttcttgatgttcttaaaagccatttgaaacc

SEQ ID NO: 48198 - DNA, 784 bp, Arabidopsis thaliana landsberg
atagcaccattataagcatttgggtgaaaagactcacatttttttttttttgtagaagtcgattttataaccagtttctgtataaatcatatggtatgcttatacatgataaacaaataataaaaccacatattggtcaataaaatttcgtaaaacggtttacaaatattataaaaacaaacgacaattatttttcctttgcatattccataatagtttacaattgttcagaagaaataaacacaataacttaacaccgaaaatgtacaatcaaacccctaatctattagaataacacatcattgtgtttccatcttattcatgttatctacacttacccatatatacttcacagttattcaaacactaatccatctaactaattaccaaacaagagaatcaaacacaacagtttcaataaacttactcgaagccaatttcaatatagcttctgtgatctgattctcttcaaccacaagcttcttcaaacattgtgtcttcatcacaaacccctccacatcatcaggctcaatcaaccgacaacctaaaatgtctaaagtcttcaacttcacacagtttttgttcaaagcaaccaacactgcacctgtcaaatgcttacaatctctcaaaacaacctcaaccaaaccattgcaagaagctaacatcgaaacaacctctttatcgaataaccactcgttccgagtcaaatctagcttccttaacctccccaaatgctgtcctattggcggcaacaaaccacgctcttcgtcaatcgcgttgcagc

SEQ ID NO: 48199 - DNA, 552 bp, Arabidopsis thaliana landsberg
  unsure (1)..(552): unsure at all n locations
tacaggaagtaacgtcgtcactaacagtctctcggaaatatttacttatttctcatttaccatctacaaagatttaaacaaaacaaaacattatacaaacacaatacaactttaaacatggcaacaacaaaaacaatgcaaaagtacattaacaaataaacaaaactatggaaaaaaaaagttacaagagaggtcagaaccaaagttctaaccactaacaacaaaccaaacacactcttgacgtacgttggccttctcttttactcctccggcttaactctcctcttcaccttccatttcccattctttctccatcggtagttgccgttccctaagttctttttcttgtggtggttgttgaggtggccaccgcttcttctcttcttcttcttcacgtttcctcctctctttctcttctctcttcgcctcttcttcttctttcttcctttcatcatgtctcctcttcctctcatcatctatnttcttcctctctatctccaccttaagcttctctatctctccttccgcacaagaatgacatttcaagataac

SEQ ID NO: 48200 - DNA, 222 bp, Arabidopsis thaliana landsberg
tatgtatttgttgcgatgcagatggttcaaagaaaaatgaaaacgaaaatgctggggacgcgttctcaaatgaatatcaaaatatgttaattcctcttatggccattgctttaatcctttctactttctctcttggttcccgagaacagcaacaggcaagcatgtccaactatactctgtgtatcatgttatctatataactgcagacgtgttggcctgagg

SEQ ID NO: 48201 - DNA, 575 bp, Arabidopsis thaliana landsberg
  unsure (1)..(575): unsure at all n locations
taatgaacaataaatcaacttcaatacatattcaagtcaaagcaaaggatcgtgattaagggatatgtacctgaccatatagttggtgtatcatcattccagagatcttccaagctcgtgccacatttaagctgaaaagagttggctttagtttcaggaacgtccagtaaacattacattttacaaagtatattataccttgatgactgttgattcgatacaatttaatagctccttagcattgtctctttgtgctccccgcaagatacaaataccgagattcaggatcttctccacgtcgccttgatattctacagtctgacatatttctagaaacttgttgacatgtggaaccaagtcctttttggcgtcacatcgcctgcagtagtattcagtatccaaccccatgctgcctccaatggttccagccagataagctcgaagagcacagttcacatgagcaacatgtccacatatgtgaccctcggaaaccacagcttcacatttgaaatagctatagcctccatgctccaaacttattaacttgcagcanaggattgcacagcaatcagcgc

SEQ ID NO: 48202 - DNA, 619 bp, Arabidopsis thaliana landsberg
tcttacatttatatctacttgttacatcatatttgtctaccttgcttcgtgtagactataattaagttttatctattgctagtgagtagctagttttgtttaatataaatcttcttaccaagctaccagattggattgttagtgtcggtacctcagacatggggtacccactcctgttgggtcaagatgggacccctatggatatttgtagccatgggaggacgagtgatctaacctgagttgggcctacacccgcccagaagggtcgcaagcctccggattggtgtcaccctaggtcctagcggtgggacaactcgtcaactatagcctgggaccgaacccccaagaagtggttctggatcccacatgtgccatctagacctccggtcaggggaggtccggtgctgccggatgtctgggccattctggagggactcgagtttccctaagtctctcccggactcccaaccaggggtctagagccaccacgtcaacatgcgttccaaccattgctcttcgcattggcggaggtgtggtgctacatgtggccaaggtgtattgcagaagctactgcgtcgcttggtgtgagctctgacatagggggccgctgcataaatat

SEQ ID NO: 48203 - DNA, 1047 bp, Arabidopsis thaliana landsberg
gatatctaataactttagtgaactttcacccgtctgaaattctaaaaacacacatacaccgacactgataattttgtcggtcttgagagttgatagttctactctatagacatgattattggaacagaacattcctactttgtcaccgatacctaacaaaacaaattagtttatatcaataccgtacaatttattaggtaccgtttgtagaaatttgttgaaacattaattatatttttcttcccgtacttatccaaatacaacaatttaagaataccacttaatagaatgatatcctttggtcgacaatagctctaaatcactttcacttagtataaatgtattatgtatagtacaattttttttgattattttatatttaagtatttgtcttcttttaaatcattaaaacattgatatgaactgttgtaagctaatactattacataataaaataaaaccattgtttcttaccatcattctcattgccactatctttaatatttcataaaagcataacatataataaagtttacctacaaaatgaaaactgatcacaggtagaaataagttcgttgtgacttaaaagttgatgctgatgattgatgagtcagtgatgacgtcctggtgacattcatcaaacgcataacataccaaagttacttgtcatctctttttgtctatcttttagttttagtatgggtttgtgaattggtgatagtagtaagtggtgacttccctacctattactgttcataagatcattaactagggttatatactgttcaaaatttattatcggacactgatttcatactgtattatgtgaaatgctatgaatgttacctgctgtaccacctgctatgatgtgggttaaataatgctctctcactagcctctttcctttttcctacataaatgttttgaatttctgctcttatgtcagtgagatagagcgttggtctccaaagcccatggtactaagttctgatcttacagggcgtgatttaaaagatttgttaaaaatagttctgtttacaaataagt

SEQ ID NO: 48204 - DNA, 579 bp, Arabidopsis thaliana landsberg
ggaatcacatcgtcacgttacattacatagagaaaaaatcacattaatggaaaactcgtgactctgtattaaactctttttccagagagagtggaattagattgatttgctttgtggtttatcagtgatgtgaggaacacgacatgacagcctttctatgtatttttaataatctacttatttatacacagaaacagacgaaaagctacacactgttacttgttgaccaaggctttcacagctgaataaagccaccaacattgattttattgattgatttctccagaaacatcaaacgcaaaaactattcacacagatttctacttacatctcacatacgaaaaccaataaccattcagatcctaaagatatgaataatttacaaaaattcttacagccaaataaagtaaaaaaaagaaacaagattttaggtaatttacattgcagatttcaaggcttttctcaggctgtatgagtgagattcatagcttttctcagtctgtccaatatcccatttgcttttctctgcgcccttgaagttccttcacgcgaaagctttgttatcgttccatgagcatt

SEQ ID NO: 48205 - DNA, 1065 bp, Arabidopsis thaliana landsberg
aatcagaggaaaaaggcaaataaagccaacgcaaaaggtccaagctagaacaatggattcatgtccgggaaaccgtggtagtagaagacgtggtggtggaggaccacacatgacataactagggtttttcttgtgaactttttcttctctagcttcaccgtaatatcttgttttcgatgttctctaaaactagcaaatcgtgtgtttacactactctttcaaactacttttctccatctctgacccttgaagtcatagccatgtaatctctttgcattttagtagaataccctgtaacaagaaaaaataattatagataaaaacaacaacaaataatcttaacaaaacaaatgttgatgcttcaacgattcgtccttttttaacacattttcttgattatattttgtggctagaggccctagtcacaaatgccctcaccaacccttcaatcattgaatatatacaagcacaaccacatgcgatcatttgggatctgaaatattaatacaaactaagatctcaatcataaaaaaatagaatgactacaaatctattagttaattaggacaattattaaacattttttctattctctattttatgtttgaatcttactttttgctaaaaaaatattgctccattgatatttatagtttactatagtcttggtgatttgtatggatttgtaaaaaagagtcaagcgttgatggaaatgaactctacttctcacatcactcgagtctttttaaattagtttttttttgataaaaaggaaacaaagcctaattatgaattagcaaatacaactacatctccatagtcgtcccttgaatcttggtcgaactctgtagcatcaaggttgaaattaaacctaaatgacaatcgtgtgtacgtgtataaatatacatataagtgatgattacataaactcatagtcatatatgggatctattatggttttatgctcactctatacgtcggcctaacgtggcaaaagtggatatttctttgaatataaaatagaaaaacaaaaagcaaataagcaaacattgcaataataccaaa

SEQ ID NO: 48206 - DNA, 661 bp, Arabidopsis thaliana landsberg
aagctttgtttcataagcggatttataaggttctgtttatttgcatctctgtctattgttttggtgtagaaagagcttttgtttagcagaatgttttttttttattgaacatgatatcttgtttctagcaagttgttgtgcttttggtcactagtaagatcttgttgatgataaagcttttccattgtatgattctctttatggctcctcagccagctcgcatccaatgtgatctatcctgagattctaagtgattccatcatttttgttaattgtatctagctaatgatctgttatctatgaatctcaaattgaccatcttttttacttttctcatttgaaatttgtagctacaagtacactagacgaccatggctctgaggaaaaggtaagtgcgaaaacaactttaagctatggattaatcttgcacccaccccctccctgattaaccatgtctttgtttgattttttctcagatgaaacccaatcctattcgtaaaaggccaggtattagatcacaaggattagcgaaggcgacaaagcatgtatgttgatgactctctctatatgcgcttggcttgataaagcatctgacatgataagagtgatagaaaatgttgagctaaactaatgaatcttaagtgaaagcaagctgatatta

SEQ ID NO: 48207 - DNA, 2127 bp, Arabidopsis thaliana landsberg
tcctttaatttcatatttttaattttaattcccatatgtaaaaaaattaaatttggaaagattctcttggtacatatatcgtatatgcaattgtattttagaatactaatatcaatcataggctcatagcttatatataataatgcaatacttttgataatcctaggtgaaacttattaatgttcaaaataggttaaatcatcatcaaatcataaagaaggctaaacgactcccaagagcaaccttttaacaaggtattaagtcatcaataaatggctagtagtttcgtcggtataaaataatgctgactcaagaaacggagagaaaaaattgactcaacgtcggagtcaatgaaaatgtcaagggactattgtcattggataggttttgttataagagaaaatgcataaaacaacgcaaagtaaaagaatgatcgagagagatgaggtttaaaatggtccagagagaagggtggtgtatgtttaggggttgtgttatggcttgcatggcatccctagtccgtactgcctcacatgcatatggaccattcgcattatgtttactattcttttctttttctcttagaaataaaataatctttaattttttttaacagcttttatgttcgtggtccatttccaaatttgtctcggttattaggccgtccagttagttataaatagatgtatttatatatacatatactgatgcacatacaaacaaaagtaacgagatgttcaagtaaaaaaataatcacgaaaaacaattaagaaaaaatcttacggaccaatgctgacttggttcataattaacattccattggtccatttcagtaacattggccaccaaagttcaaattctaacatgatctcctcaaattttagaattaatctgtggaagaagaaaactctttaaaagcacttcagttattaaaaaaaaaatcagttatagttttccgagcttagttttcctcgtgcataaacaattgtatatgtgtgccaaaacctccctatttaactcatttccaaactgattacaaattttatttagttccaggcttctagtgggccgatcatcttaaaacaacaatttttaaaagaccaattcttatttgttattcttctgctactaaattagggagtcgacatgcgatctcataaaagtacatttttaatcaattatgttttctcagatttttttttatatgtttttttaatataagaaatgtaagccttagaagctttatacatgataacatgatgataaataatataaaatttaaactgacttactatatttactatctaaccgattttatacacatttttttctaatatagagatttataatttatggtacatctatcccaattgttttcatcatacttttatttgtgtcgctcctgctacctaaagcttatagtaattggccttaacatgcctgtataaaaaaaaacatgcatggactcagagtaataaaggttttccaaatgatatacatgaaagtggagattagctgaccctagttcgttcggatttatatatagttggatgtccaacatattaggattttgttttggacagactttttttttcttcttttctaatcatgtagtaatgggattttcgttcattgtttaataatactcttatactcatagcttatatcatatcaacatgaatgtaaactatcattttgattttttataacatctgtcatttaaagtattcagtattttcacaatcgtgaaccatgattaaaattacagtaaaagactccaacactaatccctcaacttttagaaagaaccattcaactaaaacccaacgagttaattatacatagttggtaggattacttccaaagtatataacttagatttaactaaaaaaggaagaaacccctcacttaagaaccaggccacgttcatcccaaaagtgcattttaataactttcacgaaactaaccgtattgccatgtataagaaaccaactaacggcatattagatgtatgctagatcttggacccgatcagtatcatgaagaagttaacatgtgttagaaaaagagagacactttatttgctttaagaaaatgcatgcgctttaatacataagagtgaaaaag

SEQ ID NO: 48208 - DNA, 566 bp, Arabidopsis thaliana landsberg
  unsure (1)..(566): unsure at all n locations
gtcaccnnnnnnnnnnnnnnnnnnnnnnnnnnnnnnnnnnnnnnnnnnnnnnnnnnnnnnnnnnnnnnnnnnnnnnnnnnnnnnnnnnnnnnnnnnnnnnnnnnnnnnnnnnnnnnnnnnnnnnnnnnnnnnnnnnnnnnnnnnnnnnnnnnnnnnnnnnnnnnnnnnnnnnnnnnnnnnnnnnnnnnnnnnnnnnnnnnnnnnnnnnnnnnnnnnnnnnnnnnnnnnnnnnnnnnnnnnnnnnnnnnnnnnnnnnnnnnnnnnnnnnnnnnnnnnnnnnnnnnnnnnnnnnnnnnnnnnnnnnnnnnnnnnnnnnnnnnnnnnnnnnnnnnnnnnnnnnnnnnnnnnnnnnnnnnnnnnnnnnnnnnnnnnnnnnnnnnnatgtacccctgagttgaaggcgtcgagcttcctgggactatagatggtactacgcgagcctggtaccgacattctcggcatcctcagcacgacctgctaacagggcactgcgtcttgaacgatacatctcggtgactagctctcgtactcggacaaaaggggtgtaaggatatcaccgtgtcatg

SEQ ID NO: 48209 - DNA, 404 bp, Arabidopsis thaliana landsberg
  unsure (1)..(404): unsure at all n locations
gtgnnnnnnnnnnnnnnnnnnnnnnnnnnnnnnnnnnnnnnnnnnnnnnnnnnnnnnnnnnnnnnnnnnnnnnnnnnnnnnnnnnnnnnnnnnnnnnnnnnnnnnnnnnnncccccaacgtctcataaacatttccattgcttgtatctttgattctgccgcgtacacctttaaaacatggttgaccgtgataagatcaggatccacgttgttctcctccatctcacgaagaatctcatccaccatgtttcctcgactgtagagagagagaatcaagttgaatggtgaaggtttcaataggaaccctagctctctcatcttcttgaaagtggccatggctttacccaagtttttatcggatttcgcgtaagagcttaagagagctacgtagacagagtaatcct

SEQ ID NO: 48210 - DNA, 749 bp, Arabidopsis thaliana landsberg
tagaaaagtaagtggctttaaaacttgaaatgtctccacctttaggaattttccgctataggagtgtttaatccatgttgcagtttggattgttgagtttttagacattttcaaaaaaaatctagaaaacagttaccaaactaacaatatgatatagcatgtatcagtttagttcagttttaaaatctcagttctgattttagtcaaataaatatgaagtctcaataaataaataaatattaaattgtctctttttagattcatatctatctatatttgtttggatggatatttcacgtctaagattagataggttcgataaattcatgaacatctctagaattgagaaaatgttgtcaatttacaacataacacaaaaaaaacttataaagaaggtagactaacctattcactggcaactacttaacaactcctactagtcttatataactctaaaacataattagtttttaacgactaaaatttgcattcgtagtaccattatactattggcattggttgaaacatttaacgacttctgttttcttcatccataatctgaatatggttaaacgcacaacgttttggtgttctaaagaatcaagagtctaaaacttgtaatttcactaattatggctctactactctctactctctagttgttgtttctttgagcattcatctgttcttggttttgtttagtgtttagaattgagacaatattgtcaatcttagagggagttaataca

SEQ ID NO: 48211 - DNA, 724 bp, Arabidopsis thaliana landsberg
acaattttgtttttctgctgaatcgcagtaggcttttggctttactgttctgcgttttctcaggccttttttcgtgttgcaggtgggtcgtagattccttgtgcagataacgcgtttgaacgaagacaaaaacgacttgatactgagtgaaaaagtagcctgggttagttccttcccctttttcatgtcttcataagaaaaaccaacaatgaggctaatgctttatcacataatgcctcaggagaagctgtaccttcgagaaggaacactcttagaaggaacagttgtcaaaatcttaccatatggagctcaagtcaaacttggggatagtagcagaaggttagttcattgcctattgtttccataaatttgtccttctcagtgactactagttttgaattcagtacgtttgccataataatgtttcgacagtggactgctacacatttcaaacataactcgaagaagaattggatcggtgagcgatgtgcttcaggtggacgaaagtgtaaaggttctggttgtgaaatctctatttccagacaagatctctcttaggtaaaaacaactaatattccaaaatcaactaccacctcagtagtcagtaacaactattttgttttctacagcattgctgatcttgaaagcgaaccatgattgttcatctcagacagagaggtacaacttgagctatggacctaacttatcttttctaacctggtac

SEQ ID NO: 48212 - DNA, 405 bp, Arabidopsis thaliana landsberg
  unsure (1)..(405): unsure at all n locations
ctatatctttatccaaataaatggtatgaaagagttcctgangccaaaaagaaggagtctccaatgggtggaacccttggagacatcattctagactcttctatctagaaggaatcttccatttagtttttccaagtacaagtcatgatcttcctacatactagcaacccgcctttcactccctttccttattttcttcttctctcttcacgattacatatattcttcatcataagcttcatatccattctgagagataatctttgaaccacttgtaactctttcacttagcagcggacgacagagcctagctaaagtttaagactaaagaaaatctttgaattttttcctggaacctataaagaagatttattggatctacaaattaaatatgaatctataaaa

SEQ ID NO: 48213 - DNA, 869 bp, Arabidopsis thaliana landsberg
aatcgtagaggctcatgtgggcactaagaaagatgaggaaactttgttttgtcctaacctgtttacgtaccgacacttcattcacaattcctccatttcccatgctctctttttatggaatatataatttcaaattgtttcaatagttcttgaatttctttaaacgacatgaatttctttggttaagagaatcttttgtcgagttctacttcttccaagaaaattcttttatattttaccatttcagaggattttttttttgtgaatgtttattagatacgttttatatgtacaaaccatttattttttgacaaaaaatataacaactgtttccctaaaggacgttttatatgcacaaaaccatttttaaatgtaaaaaggacgttgatccagttgatatatttatttattatgcatgcaagaagctaaaaaattctgatgttgccctaaagaatcgccgcaaaatgaggcaccgtctttgaattcttcctcatcacatgcctacgtatctttaggaccatgattattagcttcgatcttcttttctcaaaattttaaatgaatttggagatgaagttttatttatacactcataagaaaaatgcattataatgaagagtaacaattaacaaattaataacgtaacatagtaatggtttctcttgatcttttctaagttgtttccatgcttacttttgttcgtggttgcgtacttgcgttcaaagcggttgggatcaaagggtatcacacctcaatcagcatgttaaaaatttcctcgattatataaactctactcatgaaggatcggactcatctattgcaatttttaaccatgattaccccagaatgctttctttattctatttata

SEQ ID NO: 48214 - DNA, 896 bp, Arabidopsis thaliana landsberg
aggcgtttgaaactgactatgtagagttagtcttgatggtgcattaatagccactttctctaatctactagatgagtttggaatgctcaacctccagaaactggtagaaatatttctctaatatgatccaaactgcagcaatgcaattagaagctggtagaaactacttacccaatcaaagtagacggttctccattaattatattgtacatcaaatagagcggcatagacaatcctcaacctccagaaactctaagagtgccgtagccgtcaaccacccctcacatccactagggtccagggactgtcccctataactcgaggacacttaacaaactctcccctaatcatgtcttaccattgaacacttcacagcattaatttaaacagataaacaaattatttctccactccataaccatagatgtcatatacagacttttctgatagtttatgagtttcaaaagtgaacttcttctatcattactaacgcttctgtaatcataacccgaacataattcactttcaccactgacgttaactttccaaaatgtaaatcaagaggctcttgccgaagaagacttgccccggaaaccaacaacacttagtttctttcctggtcttctatctgaacccgtcttccccctcgcagcaatcgatctggatccaaccgtttttaatatttttctttttggctttgaagatttctctggaggagatgatgcttttcttggtttcgaaaacgaacttgaacttgactttctcacgggtgtcttcccacctgtcgatcttgcaggaggagatgatgatgatggtttgtctctggagtttcggtgcttgctcacttttctgatctgcttaacgcttcttcctttttcttgagtgatatgggttct

SEQ ID NO: 48215 - DNA, 321 bp, Arabidopsis thaliana landsberg
tgggaaatcaccacagcgatctgcgatcctcattgtagccagtcttcgacatgctcctactcactctcaaggacactcccacgcacgcggacctcgaactcatacgcgaaactctgcgacacttgatgcaagtccatcaaccgcgcatcagtctgaccaggatgcgaccattagtcaacagcggtcgtcattgtctcgatgacgatcacagacagtcctagtctcgacgacagactaggccgagcaagcactcatctcacgtagcctctaggactccgctagcacccgatgaggaatcacgatctcagggttccgcttgaa

SEQ ID NO: 48216 - DNA, 844 bp, Arabidopsis thaliana landsberg
cgggtgatgaaggtgttggagactagatttataaacgaagtttcaatattagaaaagaacatgaaattgaacgcaagagactttagactcacctgcaacagagtctcgtatcttttctccagattggtacactcaatttaattacaaaggatttggaaatttttgaaattgcattaaacaaaaacaaaaccaaaaataaagatcaataatacaacagcaaagacaatagtacgatccaatggtatcactgatatattatatatggttctcgcttaagctccaatcgtagtctagtcttatcctgcccaacggtactatatgtttttttacttctaccaaaccaaaccaaaccaaacattgtcattcgtcttcaattgatacaaatgccctaaaaggaaaaaccaaaactattttcttgttaatctcttccgttctttatcttcttttctccataaactgttaaatatttaattttatgataatctttccagcaaccctactacatatttttttttattttttttttattttgcaacaaaacaaattcatccattgatttttttaaaaaaaaatcgcctagaaaaactagtacaaactagaaaaaaataattcaaagaaaaaaaaaaaatcaaatttttaaaagtttgaattttcttacttaaataccaaaggatgaccattcatctagaacgccaattagcttaattaaatctttacgattatgtctcaaaaatcacactagctaaagaggacaaaatatgacattctattgcccaaaagagatatgcagcctatgtgtgtagggtgacatttatcttgtggttgctctttaacccgaggaggg

SEQ ID NO: 48217 - DNA, 1075 bp, Arabidopsis thaliana landsberg
tggcttatttctctaaatgcttttttaaaattactatatttttatggtttaaaatagattttcgtgagagcttgacatgtagtctatcaacaattttcataaaccattttcagagagattaaaaagaaatcttgattgacgtctaaataataaaaattgaaatagtattaaacgatcaacaattttaattaagagaaaaatatgattgagttagaatccgaaacgggtcaagctccatccatctagtccatggatcacttaatcgacataatagaaatcaacacatgataatcaataattatgatgatcttgaaacctgtaggaagtctttagatcactaattgtttacttaattaaattgattgatttgcctagttactgagtctgacaccacccagctctttgatcgtcttagttaaagactacttcaactcatgtttcctctgtcagttcgatatattaccactaacatatgtatatttgcatgattattttagtgtttctacattgaaaggactacaattagcctccatcaacattcaggtaacacaaaacaccgtttaaatcacatacaacattcaactgcaataagacttttttttacatataaataaataatgcagtcattggattccaatagtgtgtcacattataaaaagcacagtaaattaaactttataaatagacaacttcgcttatcatgagtgctccacttacgtatcaaaagctcttcacatgcaccgttcaccatcacctctctcggctttccgcaattaattagtaattaccattagttatatcaattgaatactaatgtagttccgtagctaattaagtaaatatttatcttatgttattataaggacgttccagattaaacgaaccactaaaggacaaataacaaaaatgtctagtgattacgactttaatgcgtatcgagtcaattgtgcgaattttctatttcctaaagtcgccactgatgtgattatcagccgtacatttaagtgggaaaaggacacacaagtcacaacatttgtgcccacataaaacgcatttaaaattctttcgttttctt

SEQ ID NO: 48218 - DNA, 968 bp, Arabidopsis thaliana landsberg
  unsure (1)..(968): unsure at all n locations
ccacatgtttgggtaataataatgtaaataccaaaacattgatggagtagatggggtggtctagtcaactaaggtattctcaaaaattgaatggtctagtccgcactgctaatggatgaccatctatatgtttagtaccttatatatcaaatgatctttcatttttccttggacaataatggctatggtcattacagtctcttttgcttcttcaaaataattttaagcaaatctgagatgttgtgagagatcattactccacccaactctaactcatagtataagttttactatgtgcagttctcatcttggaaaaaaaaatgactcaaatcaatttgcccttccaaattgggcaaattgtggaggttaaatcttttatcagaggataccgtggagcttggtttcgatgcaaggtaatgcggctatcaatacttagtgtaacctaactcttggttttgaagcaagataattggactcattgagacaacctttacccaaaatttctatatcatataggtcattccttgatatgagtaatgtatgtacaaatgaatcttgaagactagttgtaagaactacataccaatcactaaaactacatgttaaccactatttgatgtagtgtctgttgattccacaaagttcttatggaactcttttgttctttctcctttgacattccttttgagnnnnnnnnnnnnnnnnnnttccaacaacctttgtttttcaaggtcctaccttaatttacatgcccctccagtgacaatcttcctctttttgacttccaaaatatgatttctttctagcaacctttttgttttagggcttcatctcaaatcaacctttctattcttacacgcttgagtggaccctagatcaagactcgggcccatgtctttatttttttatgtggagataatatcccctgtcaggcctcttaaatttaaggaccaatctttttacttttt

SEQ ID NO: 48219 - DNA, 670 bp, Arabidopsis thaliana landsberg
  unsure (1)..(670): unsure at all n locations
aacaactctcagcactaccaactcctagaatatactcccctaaacaatacgctgacacccttcataagccaaacccttactagtagttcactcgttttcattcacaggacaataaggtataggatcctaggagcttcgttcatcaagattgcctctttttagcatttaactcttcatgtcattcaccgngattgtaaatatttaacgggatagtaaaagatcacaaaaacaatcttatgtaaaaatcacctcgttgataacaccagtaggcagcttccacacatttttatctttgaaaaacccactcctctcctggacaacgaggacctgctcattgaattatcattatttgttaagcaacgtatgcgaaactatgcaaagaagagaacagttggctacctctttagtatttttgttgatgaccaaagcaccagcacctacaacatgagaagcattggctgggattgtatcaggagtttcagagatccaagatacaagcatcaagtactcaggctccgcgtggtgatatctaaatccttcctgaaaaaatcaccaaacacaagaagatattcaactaatcatcacaataactaacgtcaatccaaatcctcatataaaacttacactaactgcagcctccacaagaatagccaatccaagaggcagcttt

SEQ ID NO: 48220 - DNA, 527 bp, Arabidopsis thaliana landsberg
attttttttagtttcttcaatgatggattgtgtgtgtgtgattttttagacagcttggcttcatctagcttttgaaacgagtagaagttatagctttttcttttagttctacacattcgtcgttaatggtagatttgttttgcaaattcgattttactgtgttttaaaacatataacatgaaatttaacttaagaaaatgaaaatagtattagacttttactaagaaaagctttctactttatcctacacatgaaatgcatacacattggtcttttcaaaagcaacaaatcaatgttaaatacagttttctttatcttaactcctaataatgtagctatagaattcatgactaagcattgtggacccttggagcatttttagatgaagatgggtgtttgtttctttattaggttttgttgcctagtagccacattctctcagttaaactaatacatttgtaaaatttcaaaagtaatcaactaatccaccaaatgaatcaataatgtagctccagagtcgatctggc

SEQ ID NO: 48221 - DNA, 633 bp, Arabidopsis thaliana landsberg
tgggcgcggcgggcgatgatcttctccgtctcgttgcggacgatggcctcggcgtccgggcatgtcttgctgtagtagccggccaccagctgagccgccgcgggcgagctggcagcgagcagaagcagtgctgccatagggagcagcagccgtactagacaagacctgaatgccatgctgctgatggacgatggatctatcggtgttaaacaaaagcagggctcagagcgtcaattatgtgatgtgggtagagcaagaatgttcttgttaagtaatctcgggtggaatggacatgccctttcaactctttgtatttatagacgcactggctgctatgaggatagtggcgatcgacgtggtgtgagttgctcacttcgctgtaacagcctggtcctgcgtaggcgtccatgtgcgctaactgcaatcccttctctgtgtaatcttctcttgacctactaagagcatgcataatgaacttaggcattgacatacgaacgcgttccaaaaaatggagctctttaaaaaattggtcctaacataaaagataaacatgaactagacataaacggagctagctgatgaggtcagttacagtgcgcgcgatatatatcttttcagttttgcatatatttg

SEQ ID NO: 48222 - DNA, 672 bp, Arabidopsis thaliana landsberg
aacgtcatcgtttcatgttgtcttcaacctcacccacactttcttcggtctcatccttttataaaatccccatttcctctgacgatttttcgcctctctctctctctctctctctctttcttctatcttctccgtcatcgttctctctctctcctctcccggagatttttactcaggtacatctctctctcattctccttcttcttcttcttcttcgtttcttaagttcctttcatggcggattttacagatcgaagttactttaccttttgttcatccacaatcatttctcatagatgttagatctgtgcttttttaattcccatcgttttttgagtcttggttgaattcgagtcaaaacttctctgtgttgttctatttttttaaaaattcgtatgaattttgaattttctcggatctgagtttcggcttagccatacggtcaaacttcatcgttggctttatccgaaaatggtttccgtttttttcaaaaatcctttttatagccgatctctctgaaaactttgaatgatctactttttcttcctcacaaagcgattcgttgaatttggctaataaatcaaagaggaaaaactctgaattcagatccgttgttttcttcgctttccttgagagaatttctcagatcttataaagtaaaatctcttgctc

SEQ ID NO: 48223 - DNA, 399 bp, Arabidopsis thaliana landsberg
gtcaatcccaaatgcaacatacgtatacacatgcttataacaaacaataccgtcgtttcttgttgcaatagttaaataagtgagtcgaatcgtcctctaaacacagcatcgttgatcgttaccttcctgtcatcagattagagaccaacgtcaagcctagtattctactttgggaaaaacatcccaagaaacatctctgtaaaacaaaattgttacttatacttggtagatcatcttacctgtatcttctttccttttctcaggcgcatacttttcgagaaattgcaagtttgttttccagtaaacttcaccaccagacagccatgtatccatatgcatcccacttggaaactccacaaatgtgcactgagggttacgggcagccgctttcgcatacag

SEQ ID NO: 48224 - DNA, 516 bp, Arabidopsis thaliana landsberg
  unsure (1)..(516): unsure at all n locations
attatagtatatcttcccacatattcttatatttcgtagtcttccagaaaatgtagtaggtttaacttatcaaacacttcaagtaagaaaatgaaatgcgtctttaatcaacgacgaatgtcccgatcattagaacctaccgttctttgttcattttacctctaatgtttcctacgaagctaccattattacgtagataaccattttttattaacaaaatatgtaaaagattgttataatctgtttacagttcaactttttcaaatgttaggatatgctcacccgtacaagaaattacgacacatttatctcatcatattatctttcgcgtatatgattgggcaaacattctcactaatctaaagcaaatttgaatgatctagttttagaaaaatccgaaccatgcatgttaatagaaaatattcactcgagagncctttaaatttgaaaatctcattttatatgaaaacgaccttcttttttttactatgattgttgattatngggtttattttt

SEQ ID NO: 48225 - DNA, 498 bp, Arabidopsis thaliana landsberg
  unsure (1)..(498): unsure at all n locations
gctaattgataaaaaaatactggcagtaccaaacgttttgaagatttttctttgcattgctcacttttgtattacacttcaaattattgatgatatgtggagccaattctttcagatctcttcattgactagacgaccggactgcacggcgatagacaaatgttataagtaaaagtttattgtttgtttctttggttggtttcttggttacagaaaccagctagatcctttgtatatatctattgggacaaataactaaatgaaattatcaattgtcacatgcattgatttccaaattattattgtttttttttttgcattggtttccgaattaggttcaacaaagctagatacggaacaaaacaaatggatcaataataaccagaaaaagtaagatgtatcatttaatttcattacccacacgacagagacacatcaccagtttctatggcacgcaggcccttgtattaatttatacatatgntataggaacaaaat

SEQ ID NO: 48226 - DNA, 894 bp, Arabidopsis thaliana landsberg
ttataatatgctgaatattttgatattaaaattttcagtgagtgtagattggtcacttacttcgactatacacccaccagccgttttaaatttactctttagtttatgcttagtattacttttgtatctatagctagccttttctcctgtcggagggccgatgaaatcaaactcaagatttgataaagctttttaaccttctttccctcatttgcaaatttgatttaaatagttttgtttcaactaacattaacatagtccagacgcagacagctccagtgcgtttaacaaacaaatggaaagtgcttattttgtagacacacaagctatgcaggaggttccacttcaaaatttcaagacacattctatcttctattgtataactatttgttcgagagagttcaaccttcatcttcatcttaatctctaccagcaagcaaccaaggcccggataccttgtcttcttttccacggtaaaaggaaagtctctggatattgagttgatatactggcttactgccataagaacacgaatcaattttttgaggtctttgaacaactcaccaaagttagaccgcagggaaaagcctttggatagaaatttgttctttgttatgtaacactaaaaactgaagatttaaaaaacaacactacaagatggactgatcgaacaacagcagtagttgatagttgaatatgtgatatagagaagtgattcaacaaacaacaatcggtggagaatgagaaagctcttaaaatgagtagaagaagaatgtgtggttggttggagcatatcaaacttcagaaggaggtttcaatctgatgagtcgcttgatcctgtctttgtcggtgttctccagaagtccgttccaaacgatttcatcaaggcacaag

SEQ ID NO: 48227 - DNA, 729 bp, Arabidopsis thaliana landsberg
agtcagtttgactgtgttccaactcgcattcatcaaaaacacaaaggataaggaagcgacatagtccgtgtttacctcatgtaacttttcagcacggatgttggtcattgctttctgtatcgttagatgaatcatcgtgctctacaagtgtacttgcctcctcaggctttatttgaagaccatcacagactgttccagtttttccaacagtttagcctttaagctatcaacctgcagatgtgcaatccaaatttatgtcacaaccagtgataaaccagttgtacaagtatgaacattacgaacgttctaggtagctctataacaacttaaacaagtcacagataattgagctaagagaaagaactgacagggacatctaactgcttaagaagcactgcagcttcagctctcgcctgtatggattctgaatctgaaaatagcttcgtctgtcaaacaagccaaaataggtttcttgcatcaagaaataacaaacacaaaacataaagaccagttatttgtttatatggttgataagccagtattgtatgtagatttttattaatccagacacgtatagactactaggaccaaaagggatacatgccagctctttatgaatagatctatagcttctctgagagctcgtctgcagtcatggaatgatgtatgcgcatataccttgacagaaagagaaatccatatcctgaaacatatatccacatatatatc

SEQ ID NO: 48228 - DNA, 921 bp, Arabidopsis thaliana landsberg
  unsure (1)..(921): unsure at all n locations
tcctcaataactattactccatgaaggtagttttcaattagagttatctcaacccgtactgaattaaacctattcaagtttagctaataccatacatagtttgacttttagggcacgatggaaaaaaagagacaggatgggcaatatctaacattccagcgacactaataacatgatctcgacaactactggcctacttctcttgaacaataacacatatcacaagataatctagctagggttgcttttccatcctcgtaacatactaacatggctataaaaactcatttttcaacaatcgaaattgattctgaagcctttaataaaaatacacacaactaaactgaaaccaaatgttctaccatttcactttggtggactaaactattcgcatgagcttcgttccttttttaatttttgattttttaaaaaatggtccactttccaagtaatcatcggttctcgatattttcttggatacgaatcttgagcctataggtggatgcttttttcacgcgccggtcaaagaatcttgaatcttataacaatgacaacaaagtgaatatggttcttagttcttacacgttctgtacaacttccgattagattctcctatatatttcccacgatcccaagaagttggaggtcaagaaaagttgttccacacatcatgtaaagggattctacctttattatttcttttcgaccttttgaactcagtataatcatattttcttcaaaaagaaatcttcaaggtctatatactactatataactatagaggcttttacacgcttcttttgattggagaatcttgaagtagttgattttggtaactntaagtaactaaagggaaataattatgggtaaccatatatagcatgccaaagcgtaatgtcaaatccattatttagtaactaa

SEQ ID NO: 48229 - DNA, 376 bp, Arabidopsis thaliana landsberg
  unsure (1)..(376): unsure at all n locations
cgcggaaacacagcnnnaatactggcccagtattttaccnnccanacgggggcaagaacagggaaanatagcggggnnaccccaaaacaaagagnnnacccnggagnanangcncgnccacaagngaaangaccccacnnngnggnngaagcacaagccagaaacccagccaaacaagcgncngcgaaaaccggngcgaaacaaagacccangcgaaaccancaaaaaggcgcggnaccaagccaggacgaaagacacgccacgcgagagcaggancaccaaaaccacccaacccagaaanagaaaccacgcgaaagacancaaacaccaccaaaagaccagccaaggcgncaacacnccgcaccacccccacaag

SEQ ID NO: 48230 - DNA, 1015 bp, Arabidopsis thaliana landsberg
ctacagcatctatcttcattcactaaattttgtatcttattttttatttttatttttatgtaatgaatgtttaaattttatccatcaaaaaaaccgttgttataacagatttgtcatatccatgatgtagaaaaaactgtgaatcatgtactctttacttgttccttgttgcatcagttgtgggcactattaaatatcccatctcctctcctataggtggtttttctaagtccatgttctctaatatccattacctccttagtatgtcgaagttagccggatttccggaggagagtagacgagttgaagaaaaatgaatatgaataacttttctttgaaaggtttctttttcaggcaaacacgattattgcttaagcttttgaggatgtacggttgtagtttgtttactcaggaacacacatgacatgccgcatgcgggtcttgcaccgaggttagataaattttggtctcctcctttgtatcattttctaaagtactggatatgcttggtcaaaacagcacagttctggtgcttcttgggtcttgaggaatgctgctggtgtggtcctatttgtatagtcgccgagcctattttcaggttctctcttctggatgcaaagaaaacgtgctctttggggatgtctcctacgatattgtgaaggttcttcttaagccaaatgactggccggtcttacatgactgacactttgttattataacttttaaatagctgggatgttgtttctgaatctcaggttaataacaacggtgttttcgatattgcatgaactggtggatcttttggttggttgcaaggtttattcgattgcgaaagaatgtgtataaattatgttaccgctatttaatgtgttatgcaaggtctttttatgtatacatgaccacaaacaaataatttaaaggcaatgaagagagaaacccttacagaatagagcttgggtcaattctgaaaactcttcctaaaaaaaaaaacattgggctccctaaatttgctatg

SEQ ID NO: 48231 - DNA, 346 bp, Arabidopsis thaliana landsberg
cccttctcaatccgaatttgcatacatgagtttgccatcttgtgattctgttataacacacataagtttgccttggtcttcatgtgagtcatcatcgccccaaactctgtcttcataagtcttgattcttcctgcaatgtcttcgaaggtagttgttatcagatcaagaacttgttctaaggctgcaacaatgagtatgtatttctgtattggcacactttcgagaaactttttaccgatcttggattcttttatatactctcctaaagctgtggcttttgtcgtattcactctgatcctaccaacgtagatatgaatccgcctcaccattccctccatcttttca

SEQ ID NO: 48232 - DNA, 623 bp, Arabidopsis thaliana landsberg
  unsure (1)..(623): unsure at all n locations
catgattttgttattaaagatttggatgaatttctacttatgcaaaatattaagatcacaacatccattactacatatactataaaaagacaattatatattaagataaaaaaattctatattatgacccaattttatttcttgataactatatatatattaacccataatatttgggagtcaatattactgagctggcctgttaataaaaagcattagttagggtttattactcaatccacacacttgaactggttgcttctttctcaagaaactgatttaggtttataccaattgtcctccattcccctatttctcttcttatattccttcagcttgttaagtcgatttgataactggacttagtaaacctaatttaaggactctaactattttcatccgttgaaaaaaagaactctttgtaaacctaagaataacggctaacctctaacgataatatatagtctctacttctacaatatttagcataaccttcaggagaatccaaagtgttttaatagaattaagagcagtgataattatagtcaaagatttctatcatttaaaacttttctaataatatccatatgagttagagatagaganagagatagagatggatc

SEQ ID NO: 48233 - DNA, 592 bp, Arabidopsis thaliana landsberg
  unsure (1)..(592): unsure at all n locations
gatgcttttcaattgacttgttttttagccataacagccttcatgcatgtcgtagcttagttaggaactcaaatgtctgctttgatcaatagtcgtgtcatcatgtgtgtatcagtttgttgaatctttttgttgcgaactttgcggacttcccatgctgttgtatattgcttattggatgaggcgaggatgttcatgtcctgactccaacgatccttgtccagttgtcacgccacgtcgaccttggcacgatccaacaacaactcagaggctataaatatatcgtactactagatacgagcctttcgacgannnnnnnnnnnnnnnnnnnnnnnnnnaaacctcagcgagctggtacggctgcgatgagttcggcggcacacaagacggatggatcgcatgatacgtggtccgtcatcgaccaggcgttcgtgaaggctccaccgtaggacgactcgacgtgctccgtgcaggtggacgctgtcgcgtaccgcgagaccatccagacctaggtagaagacctgcgtgccaagaacggggcgcgccgctctcggtggccatgtacactgcaggcggcctcgacactgcacat

SEQ ID NO: 48234 - DNA, 609 bp, Arabidopsis thaliana landsberg
tatctctccttcgtcgtgcggttaaattgtcaatgttccttaactacgtcatttttttcccttttcggatttactcgaggggtactggggaatattgcaccttgtagactacaaatattgagagtttgacttttaaattatcatccattcgtcttcttttttctttgctcgagagttctcgctcatgatgcactcatgcttataattgattaacctttttttcttcttgtctgcaaattattgattaactaaagttgtcttaatttcagtataaaagtttttgcttccttcggtgagcaagacacaacacgtgaaacttaaatggacttacattaaagtatgaaacttcgtacccgtgatttatgctactcttttttttctttcttggacagttccttcaaggagcaaacaagaaatacgtggactgcactttcaaaccaaataattatagaataaaatcgtattagttcctctatatagttcataaaagcatttcgaatctaatggattggagtaaactagaataacgaatgttaatatgcattatataagtgtcatactgactagtgaacgccacgacattcttaatatccattatataaataataa

SEQ ID NO: 48235 - DNA, 1429 bp, Arabidopsis thaliana landsberg
aaaccccatatctaatactttccagcaccaatttttttttaaaaccggcctttaatatttaaaatcataaaaggtaggtaaataaaggttagaaccatggggtaatttagattaaataatctttagcaagaaaaatttagattgagtaacaatatagagggtcaggttcaaatctttcagtaaggtggaatttgcaatgatgggttgattaagattaaattatcagttcaaagttaaacaaatggaaacaattggggtaccttttaagaaatttaaaacttatgtcttttaccgaatatatatataactttattccaacccggtttaaggatccgaatagcgtagtcgggttataaatgtaaaccccaatttcaaaatctgttttgcaggcaaggggatcgtcttcttcttcaccaatagctttgggagctattgaagaagaagaagtgagaaagcctcgcatcgtcctcaatgatatttggtctgcctgtaaaaactggagcactgttggtctcgaagtccctctttcgctggaaaacttcgactccgatgttaaacagtactataatccttcactctccgccattcagatctttaccatcaaacccttctctgatgattcaaggttcaattttctgttttctctcaccaccattttgtgtcttattgcttcatgggtgacaatatttgatgtgaaagtttgtgcctttattacaaaggcctgatggcttaagagctagaaattttatgccttttttggatttcctcaggagacttatgtgtttgtttacattgctaacgttttcttcttgtttatgattagaaatttggctattgtagtgtagttcatgatggcttatgagctataaattttatgactttttggagttactcaagagacttatgtgtttgtttacattgctaacgtttttttcttgtttatgattagaaatttggttattgtagtgtacttctttcaagtaatttgattatgaatgtaggagctctgccattgggatagatggtacagaaacaggatctgctataactgactctgacagcaacggtaagcttcagtgtttggatgctggtgacttggactacctttattttcaatataatgaggtagaaaggccatttgataggtttcctctcactttcaaggtatcttataattatctctatttcgttttttatgttggattgattctccaaattcattggttagtagagagtggtttttgtttacttgtctatgtattttgtagatggctgacctagctgaggagcacactggactgtctagtctgacgagttcagatctttctccaaatagctggatttcgatagcttggtatgtcgacttttctattatcttattcagttttagcttcttctttgattagttaattgctcaccgtgtgcccgt

SEQ ID NO: 48236 - DNA, 572 bp, Arabidopsis thaliana landsberg
agatcaagaacaccaacaaaaagaaagaaaacaaaacgaatttcgatggataatcatcatcatcgatcagattgcgtatatcggattaacctccgattcagtctctgacggattcgcatgatgccacgaactcgtcccatttctagcagatttcttcttctccttcttccttactatcctcgtcctcttcgatttcaccacataatatgtcattatactcaaaattccggtcatcgtaacagttcctatgaccgttaccacaaccgccgcgtatctatttctccgaccaaccacaatgtacgatgaggaaatgaatgccacggtggtgcagacagaagcgagccacatgagcttatttattacttccaccacacgtctctccgttttagtctctcctcttacaagcgtgatttgcacgacaactactgctaacgaagtgaagagcgcgatcgcgttgaatataaagaatatcttgaaagatgttgcatggaccataacggccacaccgtggtcgtcgtcacctcctggaaccgtgaaaatggcagcaaatgcaaccgtggcaaagagaacag

SEQ ID NO: 48237 - DNA, 193 bp, Arabidopsis thaliana landsberg
cgccgccaagcgcatggccgcgtgcaccggccgcacatcgccctgcacgaagcggatgtccgccccttcgatgcccggcaggcggcgcgaggagaaaacccaggcgggctgcgtgtagggccaggcggactcgtttcggcgcgcacgggtccgcgttgcgcacatccattcgtaggtggacgaccccatggcc

SEQ ID NO: 48238 - DNA, 531 bp, Arabidopsis thaliana landsberg
gggaatctcttttaaagtcggtccttttataattttatgtcatttggggcgaactaacaaccacatatatttacatacaaatcaactaatcttgtcaaaagaagaaaataacaaatggaacttttctttttgatgagtaagattgcttatagtttcttaagattgagtatgatgataccctaataataagttaaaccaaaagctcaattattcatgtatcttaagatacggtatagtttcgggtagggctaagcacgattatttgttactcgatcctgtatccattatttgcctcatatctgttttgaaaaacaagtctatatccttgtcgatacaagtaataattaatataatttatatacttttaaatacaagtcaagtagcaaataactaaacaaaactcatatataacccgattgttttatcctaatcattttattgttaataataaaaattagtgatgccaaaaccagtaacactattacttttgtactagtactactttttaccacttattttttgaaattattt

SEQ ID NO: 48239 - DNA, 600 bp, Arabidopsis thaliana landsberg
ataaacatagctcacaaccatagggtgtgggcggatagaaatcgattttatgtatgtccaaggtacgattctacatagtactctgtgatctataacacaatcttcataccccctcctcctcaaggagtacaagtatagcacatagacatctcactcgtatggtcaatattgatgtattttatataaaattgtattaacttaagtaaagatccaaatgtacgaaatactgttagaaagaaattcaattctaaggatctgaacgggtccctagtcctaaaaacacaatcagaaagaaagaaagaaagaaagaaaaagtgcaagggcgcgcgatctcaatcgtctcttcggtcagacagcgacctggcactccgccgtttcgaacaaagattcggtcaggtcccaattccaacggaacacacctcatcacatcgccgcactagtgcctgtctaaaaataataataatctctccgcagcgcatacgctctactctactgcttccttgctttggtacatcacagagtttgtgtcagacttcggtaccgggcagggcgcggcgttcctggtcattctacatgtattagagccatgcaagattatct

SEQ ID NO: 48240 - DNA, 692 bp, Arabidopsis thaliana landsberg
ctaagatcgagtgcgcatgagatcatcgaaagacacagaagacaagttggtttacaccaacgttgagagccacttttgtaatgtcttgatatcctccgttgaacaattgcacaccgatcatcgccacgtgagctttccatgcctctctctccaccataccctccattagcggttttcttcttttccggcgattcttattcccggagaaagtaatgaaagccagggtgagagagtgggtaagagaattaaaatcttgaaactgattgtcactttgaatctcttctgtcaaaacgtgtttttcgatcgaacgagacaggggaactaacaaatgatgacatcatgcttcggacacaagcatgcattgggattgatcctatttacccgccattccattatcactaatgtccttaaattttcatttataaatatatgtatagaatcaaataattaaattatagcattgtaaaattctataaatgtaaagatacataaatatagaatgctataattaatttttaaatggttcgaattggtcttggcgtaatttatgttaagagttattagggttaagcaatctgtttctattaatggatttagattgttggattcgtttcactcttctgcacacattgatgtgttggacaatcgtcaacttttgtttttatgtgtttaagatatctctgcatgcattt

SEQ ID NO: 48241 - DNA, 919 bp, Arabidopsis thaliana landsberg
cccttgttctcacgcaaactctgaaaatgccaatttgagaaaaccttctcctttacttttgctattgcctctctcttatttatttctgctctaccttgtccgaagcatgtatcctcctccctgattgcttctctaccgtctgaaacaaaccgttgaagcaagcacgaaaagattcgcattaagaacaccaaaaaggacaaggatctttctcccaagagcagaaaccatttgctacgataactctaaaatcctctcttatcaggacaatctgttgccctgtgtccagatttcccacaaatgaagcatgaacctccaaaacttctgtttaaaggcatcaatcaatcagtaggatggggatgttgtgaaagctttaacacagatttttttaaatactcacctctcccgcgaaggagctctgctgcttgatgaacttctgccaccgatcaaccaatcatcagaacttcctctggaactactaccacctcgggaccagctgcttcctccaccactgctccttctactacctctgtcatcatcacctccccaactatcacggcctcgtgatgatcctcctctaccgcctcttgaccctctagaacctcctcctcctctaggcatcctgtctctgctagagaaccgtccgtagttatcactagatggtccgtcatcttgaagtggaggtaactacaatcaaaacccaagatgtgaagtgttagtcaaaaaggtctaattatgaaaaacatgttatgttggataaagagtgaaagccagtaaaaactaagagaagccggaatcaatacctttgttatcatggataaactgttgccttcggggacatctttctcttagagctctttcgcgatctcctctggtcgatcaaatacagctccttgcatctgagataacagaatcataaatt

SEQ ID NO: 48242 - DNA, 855 bp, Arabidopsis thaliana landsberg
  unsure (1)..(855): unsure at all n locations
aattttcttcatatcaagattagacattgtgaacaagtataaactgtccgtggacaacaatatttggacgtttcaatttcaacgcttctcaatgctgcaaatattaaagtatcaaacgtccgttgttcaatagcgatgatattatcattcaagtcttcaaatgttttgccgtgtgttacatagaatatgatgaatttagctaatacaatgtatctgttttttttggacaaatacaatgtatcttatcctcgacattttcgtgcttatgcacacacacggttaatacatactacttttgtgtggcattcggtttcttaaataatcaaatactagatgtatttttctaagaaaaatcaaactatttcttaaatatgtataaatttttggctatatataatataagatacaaatatgaaatatcgcttgccgccacaaaagaaaaaatatcaccaaatttttggctatccttcttcttttcacgatatcgttaaaagtgggctttacaaaattgtcataggcctataagtaagcccagtatgagtatttcgcttcttcttttttccttttcctttcagatctgctagcattatccagtatttgttcttgtctgaaattctgattaatttgctaacaaagacttataaataatgattttgacttaggatcttcacggttaattttctaatcaacaaaaataaccaggtaaattaagaaaaattacatatgaaattagtcactcactagtaaactaaaaatatggaagaattaaaaaaacataataaaatatagaatggagaagataacgtatataaagatgagattcatccaaacagcatanagggaagctttcatata

SEQ ID NO: 48243 - DNA, 1503 bp, Arabidopsis thaliana landsberg
aaaaggaagtgtttatgtcggaaaaaaaaaaatagcattgtgcaaagaaccaatgcctatttcatggtaataaagtttattcttttttggaatatcttttttaacaaattactttttaactgcttattctattatatattttactaaataaattttgaacttatgggtggttcggattaatattggacaaaaatatttttataccaattaaaaaaaggatttttttttggtagagttaaaaaaggatttatttagtaaattatataatagaataagcaaatgagaattaaatttatgtagtttccttttgctcatttttagcttaacaaatccttttttttggaaataaatcctacacattatacgcaagtagatattctatatattccttgttaaatttctatcctaattcctaagtatactggtcatgtcttaatagtagaaattaattactaattattttttaatattataaaaaatcacataactgagaaagaaacaaaagatatttttcactatatatgcgtttgacaaatgtgacaaggcacacagagcattccgtggaaaaaccccaataaaatctcaggcaaatctccggcgtaatcgatggcggaggagaatcaagaagaaaccctagaactcaaaccaagtagaaaaccaccacactttgtgctaatacatggcatgagcttaggatcatggtgctggtacaagatcaaatgtctcatggaagtctctggcttcaccgtcacttgcatcgacctcaaatcctccggcatcgattcttcatccgtggattcactcactaccttcgaccaatacaaccaaccactcatcgacttcctctcctctttccccgaacaagaacaggtgaaacctaattcagaactcaaatgaattgattcttgaatctgaagcaaactcactctgtttttctctgttctgtttttttcatcaggtgatacttgtgggtcacagtgcaggagggcttagcctaacgagtgcgatacagagattccctaagaagatctgtctcgctgtttttattggagcttcgatgctcaaatacgggcttcagacagatgaagatatgaaagatgtaatgatacacatttctttaaagtcaagttaacttgtgtgtgacgttatgtttctttgtcacagggagtgcctgatctatcagaacatggtgatgtctacgagcttggttttggtctaggaccggagaatcctcccaccagtgctattatcaaacctgaataccgacgaaaactactttaccacatgagtcctcaacaggtttctctactgtttcatttcatatataatctcaaaagatttaatgtgtttaagtgtaggaaaattcgaccaactccttataaaaataaatcaccatttaatacaaaatttgcaatgttcataactaacctttatttttatttttatatatgtgtggtttttcttatactttaactaacaattatccagtatatatataccaaa

SEQ ID NO: 48244 - DNA, 802 bp, Arabidopsis thaliana landsberg
tttcaacttctttttcttcacaatccattttttcagaaaagcaatgggcctgaaactcttttttgaaatttattttatgtaagccatcactcccagttgtatccaatccatcattctattttactttaataagattcaagaacatgttgaaagatcctactgtaataaaaatccataaagactacaggaggagatgaagctggagagaagtagtctaagcgacagaagcaatttcacagcatttgactctgttaaaacgatttagatccagtaatatttataaaccttaaaaattgtctcatagattatccaaaatccaaagggaaataaaatcctaactgtgtaaatatatgaccaaaacaacataagatcacctggtccagaaagaaagtcctccattaccactatatatatgtgtgtatgtctcaggaaagatgatcaaatttcccggacataatctttatatatgtttctttaaaacttccaaaaacagaactctgcacaaaagattcttatcatatatgtgactagacaactgcggatcgcaggtttacttaccctagtcgtttgaagtgtgctttgctttcattgtgctacactgattggaatgctgcatctgttggtgttgtcactgacttatgctgagctgctgaaacatctgcgggtttagtgacatacttgcttcgctgctggtgctcccactttgcctgcggtgcggctcccctatcaccaggtttaaccgctggacttcttcattcagtttctctgacagagctgccaaacaaggaatatcgaaatgtta

SEQ ID NO: 48245 - DNA, 476 bp, Arabidopsis thaliana landsberg
tcttccaagtagtaaacccgtcgactcattcattcacgggtttcgtttctttcttctggaaaaggtgacaacttttttctgttttttttttataataaaaggtgacaactttctcttccattgatgtgtaaacgaatagtcgaatacgaattcgtttctcttaatgtattagggaatcgatttctcttgctttttatgaaaccggatatttcaggctgcgaatagattattttaacaatggtgttgatatgtgaatgtcgaaaccagattttgtgtaacgttttcgattttgttgcttttaatggaagaatctgaatcctgagggtgtgatttgggttttgggggaatattcactttgtggggtctttctgttcgtgaatctagtatattgaattatagtcggaattagaaatcttctttaactctctaggattcggtttctactctttcaaccgtggccattctagcgtaaatgc

SEQ ID NO: 48246 - DNA, 934 bp, Arabidopsis thaliana landsberg
ctcaacacccgcaataaaaagctgtaatgtcataacagaagaaggctggaacgacaaagattccgatgggtatgatcaagaaaaagagccaccgtcaagtaacattctttaaacgccgagccggactctttaagaaagagcttcacaaaaagcatgtgttttgttttggtagcatactagcattattagcaggaaagttaatcaaatagcttaggctagtatcttgctagttctatatattccttgcaaattatttttgcctctttgaaaacattaaaaaaaaatcttactatctactaaatggcataatagtgtcaacaattttatcattaattaaggagcagacaaattacataaattaggacttctaaaaccccaaacgtttgagcttctgaatccaagtcggcaaaaacaccacttggaaccaattcagtgtttcgtctggaatcagttcaatatttcatgttaaaaagtgatgatattaccccttatgggtctcaatcaaaaatctgtgttgggttttttctttcagaatgaaacaaaacaacaaaaagagaatattaagtgaacacgtcattgatattaactctttaagatgaagaactaagataaaaaaaagatactaaacaaaccaataagtaaaaatgatcaaagttacactcttgagaaatgtgacagattggtgtatgacgatgattttagccacttcccgacttcaatgtattactcaacctgaagatcaagatggaaatgagagaagaatatttgagaagaaatgcataaagaaatgggttcagtgtttcaataatgggaccaagaaaatggttcggtttcagaatgtgcttaccagtccaatccctcgaaaagtccctcgcctttcacagcacaagttttgaagattgcccattgacgactctttatcttatgcaactcc

SEQ ID NO: 48247 - DNA, 482 bp, Arabidopsis thaliana landsberg
acctctcctcttcctctttttacttatctcgtttacagttacttcctcattcttttcttccacttcttcatcaactgatgcacttgaatcattcacacttccatctccattgccatcagattctccttcattgccatctgactcagttccttcttctccatcttccttattagactgatcagaatcgtcagattccacctcttcatgttcttgatcctccttaaccacaacttcttcaaccacaggctttggcacatccttcttcttatgtggatgagacacagcatgctctttctttttcttggtttcatgtttatgaacagacgaacctccaacttttttcccctctttagatttcgaaccagattcaactttacctctctcacgtaacttgctagattcagacacgtggtgagctgacttagttcgagatgacactggctcagctatgtcgtcgaagctttctctctggacattaaagg

SEQ ID NO: 48248 - DNA, 1003 bp, Arabidopsis thaliana landsberg
cttgatgaaagcttttttgaatggaaaaaagaacaatattttaatttttccacgttgacagtatacaaatgtgaatggtaacacaaaaacaacaacaaaaaaacgcgaacaaagtaaaaattcgtttttggttcattgagtttttcttaataaaaaaacgtcaaatcgtatccaaatttaaattcgattgtttacaatttctaatgtttaaaattcaaagaatattacactttagcatggtaacgaggatttattcagttaaactttgattttggctagtgacagtctttgtactatttactcactcattatgtcgacaaatatgctttattgaaaggtcaacagcaaacaacttaacgtctctttctccaaaacactaatccacctatatagttatcctataattacatctaaacatctaatcgaaatacacgtaatgtaaaatatgaagcgtgtcacggcacagtttctatcttataaaaatatctggttggttagaagaatgtaacatctacattgttttatttaatgtatgtaaaattaaatacattcacagatttgttttgttcatcacgtctttttctcttaaggtgtgtgtgtgtgtgtcattcgagttattgatattagaaaacaatctccacttcacgaattcatcacgtaactgtacatgaaaacaatcttacccgattagtgaaagcaatgaattccaataaatatttatcccgatctataactaacatgaatttcatctaccacggaagaagttttccatatatagtttgtaacatttcatgttcttatgagtccaaccaaaaccaacgtccaaatgtctcaaaattggtaatgtagaatgtttatagaatttacctagttaattaagatttgtaagtatatgtttatatgctaacaaccatatcgaaaatacaagcataagattctgatttaaaatttataactggagttccatatatctgatggatggattaacaagaaaaagaaacgg

SEQ ID NO: 48249 - DNA, 643 bp, Arabidopsis thaliana landsberg
acatagaagccacgtaatttgttaatgaacaaattagcccataagtagtgatttggaccaaaaccatttggtaactagtttgtccacattcaaaaaccaaacaaaaccagaaattttattgtagacttgtagttttgggccttttggttttctgtcccgcatgagaatcgggtcgaacggttatgctcgagtgactagacaaagtagttcactattgagccatgcattatttaatctacttattcgagaaaatttatctcaatttggaaatatacgatgcatttgaatagcaatattttggataatcaaaaaatataggattagatacacccattaatataggattagatacacccattaaacacgtgttaaattgataaccaataaataaatttaaaaaaatgaaaatgatacagaatcaaccatcttagttttaaaatgatatttttttaattgataaccaaattgataaaaaaaatctcaatctaatgtaattttaaaatgatatttttttggttcatattaactaatcattaatatatatatataccgacacttcaacataaagaatgaaacaaaacattattataaatatatttacacagtgaattcacaaaaggagggtatatgataagcgagtttg

SEQ ID NO: 48250 - DNA, 496 bp, Arabidopsis thaliana landsberg
actgtgtggtttattttaaataaaaaaatgggtccggttgtttcaattatttatatttattgatatttaagattaataaaatttaagttaaatacaaatgtatcaatattgtattttgtttttacaaaatatgttattagtaatatcataatttgaattttagtaacaacttcttccaattgatcctattttaaattttagacacatttcagttttaaaattactatattacaatattaatctattgggtatttctaaaatttatgaaagcagaaaagtcatattttttaattttcaaagaatattatataagaattcttatgatgagtcaataattggctctaaaccaaatgaccaaaccgtaggaagaaatagaaccagattaccaagagtaattggcttaatcaattgttttatgcaaataataaatattggtcttccttagagcatccccaatagttaagaaccattaaccttggaccttaacaataatttc

SEQ ID NO: 48251 - DNA, 574 bp, Arabidopsis thaliana landsberg
tttaaggtatcgtcctattttatctcgttatatcattacaaccaaacacacccttaatagatggttgagcctcgtggactcgacactccaccctctagataattgagactcatgggctcgatattcctaacaatgtgcaaacgattttgtctatggttccacttgacaacatatatgccttttatggagcttaagattaataattccctcctcggagggaacttagacccacctcatttgattgtatctagacagcgtgtgcagcgcttgtacccttaaggacttaatgtgtcgtttgatttgagagactaaagattagtctctctattttagtcttatttagtctctaaattgttaaacagtgggactagaagtgagactaaactgttttagtctctagtccctcaaggagtgactaaaagagactaaatcatataaattataccttttgtcactactttatttcagttgcactaatggagtgagaatgttaaggggtattttagttctcttatgatttatttaatttgttttgaatagttttagtctctagagctaaacagagcagggacta

SEQ ID NO: 48252 - DNA, 598 bp, Arabidopsis thaliana landsberg
gaatttggatttattaattataatattataacttaaaaaatttactatatcaggtaaacttaaacatttcaactataaaaaaaaccgtatagaaactttgtaaatttggatatttactaagttaaatttcatgttcattaagattcgaattcattttttatcttattttttttatggctctgaacgattgtctaaatattttagctgatgttggacgttgaactcaatttattttctattaattgagtaatatatgttcgttttaaacaattggaatcacaagaatacagacaaattaaactttttatgtcttatatgatgattcaaaataattaaaaaataaatcttaatgataggagaatcattcttttaaattttatgatttttttattttataattgatgttaaaatcttttaattgtaaagttgtttggttataacttataagtaatgacattctttgtaaatactaactgaaaacaaagttactctctaaaatgtaattcaaaaatattaatatagatagttaagaactaataaatgtcactatccaagatttatataatttagtaaaaaatctacataatttttttttaac

SEQ ID NO: 48253 - DNA, 750 bp, Arabidopsis thaliana landsberg
cgtgcatcaatgtaacctttaaagattctctgtatcttctaatctgtttttcgacttgctgcgtggctttcctggagctcgatccgttttcaacaatgtgaacacaagacttgcttctcgcaatcactcgaaactgcttatggtgacatttcgccaagaatctccacattgttttgaatccgttaatgatctcaatcacttgaaacgaaagctcttcgtctcttatcttatgaattctcatcgaaatcgattcaaccgctcgaaccgaaacattaaccttagataaatggagtttaaccaaagtttccgcctcgtaaagctcactagattctgctccgttttgatcaagattgttcagaatcttgtacgatttttcataagcaaccctaagcttttcttcagctgtaacttctgcgtgaagcttcttttcccacatataaagcttctctaatgtcatagagagtgaaacagcgagatcatctaagcgaaaacggcgctttaaaaccaaatcacgagtcgtagtcccggaactaccaattactcttgaagcaaatcccttgaattgagatcctaaaggttgatgataaacaactctgcttacttcaagcaactcagagacttcactattatctgcagctttcccgcatatacaattgatccttgccactacctactatagatccgtcaaaaaaaaaacagaagattccgaaaaacaagaagaagaagaatcattcgcatcatcagagactt

SEQ ID NO: 48254 - DNA, 599 bp, Arabidopsis thaliana landsberg
  unsure (1)..(599): unsure at all n locations
tgcaaaacgcgttggctgaaggggtatcttcgtctgtggaccgttggattgtcttcgcacggtgcagattagctcgcatccatatccaagcggtaccanccagggaccaccggatccggatccaaggaaccagcatcgctgaagcgaaatggtttacgaggcctcgatctgagtcgtccactaattgatcaatggtcacgatgagacatgagtgtgctggctgaccagattgaatctgggtcgcccatcatctgatgaacggccaccggcaatcaccttctcccccagacacaagccacggcagcggagcccccccccccacggtggtccattcgccggagtcaagcgccatcgagattttagtgagctaatccccacaattcatggtgctacacgcaggcaaggacacggagaacttggtaggggcttgcttaccagggttcatgccgcagagaattccgaccacgcaaccaagcggcccacggcggacggttacgagcggtaaggaattctggccacctccgttcatcaatcgtgcctgtcgaggcatccacacccaccagagttcctcgatgaaggtccccatcactcgcgaggca

SEQ ID NO: 48255 - DNA, 729 bp, Arabidopsis thaliana landsberg
aagtaatcacggaacgcatatcagacatgtgactaacaccagcacaatggtgatggatcaaacacgagttccagatggtggatataccaacactatgattaaaaagccttgctttaggtctttcaaatgttttggatgtggtggtgtacgccatggacaatcatcttgatgtcgcacttgatgttaatagtccctcaatttaagatgagctagtggagggtgatacaggttcaataatgatgttacgtcttaactgcatcagtccacaaggtgttaacaatgcttggttatgaattaacattttttgtaccatacaaggtaagttttggcaaattatcattgcttcgagcagctgtactaaatgtgacttctcaaaacgtagcaacaaaattggcattgtttattgaaacacacccaaagttttattgactagcttggctaaacaccaaaactgattacgcatctcagagtaatgtgtttctcagaatttcatgatgtgtttgccgagagattaccaccattatgtgatatataacattgtattgatattacctccttataaggctttgcctaattgtctgcactatcgaataagtcatcaagaacacgatgagcttcgacgccaagtagaggaattgcttgctaaagtttatctaattgaaagcttgagtccttgtacggtgttggcgttgctcattcccaaaatggatgggactttacgcatgtgtg

SEQ ID NO: 48256 - DNA, 1943 bp, Arabidopsis thaliana landsberg
tataccaagtgatgtcaacttgaagcaaatgataattgaatgctttggttatgtttagtgactgacctcacatcagcaaaagcaatcacccaaccacgatcaagcatactcaatcgatttgtgcaccagcttttgtccaaaacttctccataagcgccataacctatcaacattcccggtgactcactcttcttccatgcttctcgtgaatacagaattgtaagagggacttcaactccgtcatgtgaagaaacttcttgtctttcacaaacatatgtatcagataagtcctcccatttaggcattcgagaatctaactgaccatcttctccctcgctggttctatcattaagttgaccgttattctctgtagagcgatctgcagtgtaccatggcttactactatcagaattatctacaacccctccctcctgctgaacaattgagaacaatcttcttgacacgtcatagtcaacgatagtgtcaggaatctgcaattccaacaataacagtaagatattcagagaaagtatcagagtagaaagaaaaattcaaatgcaaataaactatgttatggttcaaagctaaaacaaatagagaaacccgtttctttatttaccacaggagacgaaagcaccactcggtatatagagctctggaagtcgtggtttgaaccaggggcaacactgcatgaatcaactggaagtggaaaataccagggaacaagatcatccatatgctgcacaaatgaaacatactttagtgaaaatgtatgaacgcaaagcgacagagaaaaaacatacaactgcaatactaatcagaaataccttcgtatttgcttttatgggcatatcaatggaacagagcataggtaagcctttcttattaagataaagcactaagtagtcattgaacatgtccatatcttgtataaccacatcatcatctggacggaaaacagtctgccagtcagatgcttcaatttcctctactaagcatctagtcaaatagtagccttcaccagaccactcactaattgcatttgagggagaatttgtaagaatgtaaaagaacccattgtgatgttcaagaaaacactgcacgccaggaactcgttcgcgagttctttgcaaaccagccattggcttatcagcatttacaatataaacctgaaaacaagataactcagcttgagcctaaagtatatcgatgatagacactaagaaaacaaaaacaaaaatgcagttgaaagaggtaaattcctcggatgaagtccttgagtttgaattgatagtaacaaacttgccatcttttgtggacgttatgtctacacagaaactggaatctctttcggtaaacactacggcatcatctctcccatctgattcaacatttgtgacaacaaccctgcaaaaactagtcgcagttgaacaaacactctccaagtttaataaaattaaaaagctatctatctactagtatgagtcactgtatttgcctgtgaggtctttggttttcatctgtaacagtgtaaaacaaggtgattccatctaaagcccatgccaagctaacaactccatcaacttccaacctcggaactaactgaccagttctcaaatccttaatctggagaatgaaacgctcacctccttcgggatcaaccgtgtacgccagatagttatgatcaggtgaaacccgacaaactccaacatgaacataacctgaagtagtacacataacacttgcttagagactgacgatgactctaaaactaacaatgaaacattatactaaaggaatgaacttttaccaaactgctctgcaatttgattccagtcaagcacaacttcttcttcttctccacgaaaaagaccagagagccaatttgttttacccttctccaatcttctacatagaagaggatactcttttcctttgggtat

SEQ ID NO: 48257 - DNA, 366 bp, Arabidopsis thaliana landsberg
  unsure (1)..(366): unsure at all n locations
cgggctgcaagggggcgtgtcattggaaagctccattcttttctacactttttaacactgcctgaacctggcgccagtctacgtgtcggacctacacctcatgctcgggacgtcgatgaaccaagtcacgccttagatgcacgtcctgctctgggcattttaacctgaaataagcctttccattttggctctgtgcttatacagatgccggttcacactaggtgtcttgatcagtgccgctcgtattgagaggtcctctgtagacaactgccatgtgttgatccgaagcagaaggaatgatactgtcacnnnnnnnnnnnnnnnnnnnnnnnnnnnnnnnnnnnnnnnnnnnnnnnnnnnnnnnnn

SEQ ID NO: 48258 - DNA, 664 bp, Arabidopsis thaliana landsberg
ggaaatgaaaccgtcatgaatttttgtaatggcaataaaaacaatctcttcagtggggatgataaaaaattgattcgcatatgtcacagctaatctaatcttttatattatttaacgttttaatttctaaactcataatttttaccaattgtttcaaaattttcacatctgcaattttaactgcaaaagtctctataatttctacggtcaaattccttacaccaaaattttctacaaccaaaattgatataattagaaataacacttattaccaatcggtcctaacactttcagattatagatattgcggttaattagataaaaaagattcaaaaatatatttgatttctaaggacaaactaaaaaaatttaggagctttagaaaaattatgtttgatttccaattattctacgtggttttagtaaaagatgtgtttactataaaaaccttgattgtaattgtttataactcattactaaaagttgtgattgcagaaattacgaaactaaactattacaaaaaaagtggagaaatgggttaaaaaaaacaaggaaaaatattcaatgttaaatcaactgaaatttttttcatttaattattcagctaattgtagggaagttatcatatcattatatatatatatatatatatctataaataata

SEQ ID NO: 48259 - DNA, 525 bp, Arabidopsis thaliana landsberg
aaaggatcgcgcacactatgttcatttacagaagttacagaacaaaatgagtctagtttcacagcagggctgcacattgtttaccttccaggcattctccatgctttggtctgtgttgtctgcattaactttctgggccaatgaactgagaagttcagcttgttgcatcaaagctgtcacctttgaatcatccttcttaagaaacacctcttggttacttttatcctcacctatttagcagaaacacaacttaatagaataagactctctatgtttgcaacttaatagaaacacaacatgaagaagaattttgcgcaccgtcactctctttcacattgcctatttgtttctgctcctctgtaccatcactacttgtggcattgtgggctactacagaaaatggatgtcttctctgttgattcatagtcgattcaacctttatatgtgatctatccccatagctcttaatctctgtaagatttggaatatgacttctcctggataatgaacattaccatttacaac

SEQ ID NO: 48260 - DNA, 500 bp, Arabidopsis thaliana landsberg
  unsure (1)..(500): unsure at all n locations
tgttagtagtgcctgaagtcgatatggcgatatcgaaacatccgttttttgttaatacaatggaggaagctatggctaccgcgcggtggaagaaatggggcgatgtcgacgggctaaggattcaaatggagacttattnnnnnnnnnnnnnnnnnnnnnnnnnnnnnnnnnnnttgccatatcccacaggtaataaaaaaatattccctaataacgaacaaaagatttcatttttctatggttaattaatgatacattagttgtctttacccatatataggtagttaggtaagctccaatatacacacaaaaaatctagtagtttaatctcaaagtactaattgttagttgtgcacttatctataatctatatatgcatagttgatagtagactcaataatcatgttctgattatatcgtgcaagcttatgcatagttcgagtctgagttcataaatgttataataatatattgatctatataatctttagaaaaccata

SEQ ID NO: 48261 - DNA, 1204 bp, Arabidopsis thaliana landsberg
aaagactaaatagaagcgtgaggatagagcttacttcacccaaagaggaagtgaagtctcattacaaatcatggagtcaacttcttgatcattctcatgttcagaatccgttccaccaaacgaactcgaatatccatcagtcccatcatcacaccctgagacttgaatctcaatgttatcattgcattccaatatatcaacctcgtcctcgtcgaactctgcaacctcttttttaatagaagcatcagcatcaatatcatcaccaccacaaggaagatcctcagtgacatcttcttcaacatgattatgaaaactatggtcctcatagttactagtacaaggcatatcttttggtaattccccaatctccttattgactgaatcatccatatctatcttcgattccttcacctccataccaaaatatcctttttatttcttctcaattaaaaccctagaaaaatccggaatcagaagagtcataaagaactaaacttgaaattgaacaaattttcgaaaactttcatcacgtatccatatgcgtcgaattggaaagagaaagtgaagaagaacacgaatttacacaaaaccctaatgtaaagttcgaagcttgatagtcgatgagatcacaatttcaaatgcaaaacaacaaaaacaaaaaccctaagaaagctttaacagataaaagagaaaaaaggaataaatacctaatcgacttagctcgccgtttccgacaaggagatggtagtagataagtattttataatcggcggtgagaaacacgacggagaaaagacggagatctcatagccaccattatcgttaggtggtcgaggctttttcttgtgggggagagagagagactgttttatcttacacaagtggggtccattatcctctagagaaggatttctttcccttttgacccaattttttttatttttttcattacatatatttggtcaaaacatttcattacatatagtatttgggaaaaaaaattcatccaggacataaattgtgataaccaattcatatatgggatgaaatgggccactgggccctaataaatgagaattcttatccaaattcaataaaaaaatgaatataaccattttacttttatatttaataaaaataattaaattatttcacctttcaaattttataaaaaaatattatggtggcccttaggatttaaatt

SEQ ID NO: 48262 - DNA, 914 bp, Arabidopsis thaliana landsberg
cgcctgtaagatcttttcgggattgcaaattaaagatccatttttttgtcaacaaaaacaaaatgttatcgtaaaaacgttgcttttaagttaaaatcttgcaaaattacttccgaatcatattttattttgtgtagtgtcgatgacttagttaatggtataaacgtaatattttttttaatattaagtgcatcgtgactttgaaaaaaaaactctcctaataattcgattttcttttaccaaaagtatcataattttactctcttttttctctatgcattacagcattatagtacaatatttgagagtaataaataaattagctgattatggatcaaaaataaatatgtagcacgtatagtgggcgtaaatgttggtcagtgtacgcaagaacgcaagtacaaatttttactttataattataaccaaaaaaaacgagtcgagtttttattttattttattattgataattttaaaaatataaaaaatggaagtagtagttgatagaaactagagtaaagctgaaaatgcaaaggtgaagttttactagttaggggaattcagcttgcatctaacggtctccacctggatctagttacttctttcttacactttatatgttataaaatgtcctttttaattttgattttgaacaaccaacaccaaatcccataaaccaattccctccaatccccaatcctcatagctagcttcaggccaaagtagctgagagttctagatgagctcagataaaggctgttccaatctcactacacattgtatcatatattatcaagacaatctctttctctctctctctctgaccaattaatttgtccggttcctctctgtcctctcgttgttctctaatgatatatatattgcaaaagctttattttttgcttatagtaatc

SEQ ID NO: 48263 - DNA, 820 bp, Arabidopsis thaliana landsberg
  unsure (1)..(820): unsure at all n locations
cagcgggatcagacacccccgataggggtatccttttcgcctttaatgtcgcaaagaaatagttaccgaaatgaggattgttgagatgcaatggagacagataaatcatctccaggttcattagctctgattttccaattcccaagcatatcctaaaaggttatttaacctctaaccaatcacacaaaactgataaaacatcaatcaaagaagttaataatatcaaagaacaacaacataccatgaaaggactgacttgtaatgatttagcaaccaagtcagattcagggtcaaatacaaatgtcactcgttccccccacggcgtatttgtaacctacaaaattcctctaatcagatcaatagatagagacactaataccaataaagccaatgcaccataaggtttcattactatgagagacataagcaagaaacagaggaacaacaaaaacctctgattcatatacctgagcaatgcatttacttaagcgcttacttgacccttccaagtcatagcaatagtataaactcaatgggttttgttcatatccaacgcttggtggtattgtcaatagaaatctgcaccacgaaaaaattacagattcatcaaaactacttcctctatcacaattacaatttctgaactgataaagattcattcacctaacaatttcattacaaaaacaaccaaactacactgttagagagcaaaacataaccataaaaccaaacagaaactaaaaaaaacactcaattttgcaaatctaactaactccggatcaacagaatctttcaaatcttgtttggtnctcaaaaacat

SEQ ID NO: 48264 - DNA, 1012 bp, Arabidopsis thaliana landsberg
ggcttatgaaactgctcttgtttggttccatctctgagttactactcagttccttgaatagctccattgccttctctcccattccatggaatccatgtgcagagataacggagttccaagcagaaattgaattcacccccgagtttctaaacaccttcatgccagtttctagcatcccgcagctactgtacatgtccacaagtgctgcactgacaaaagggttagcttgaaacccacgacgaatgagatgacaatgtgcctgcataccatagctcgttgacccaagctgagtcgacgcagacagaagaccaacaaatgtgatctcgtttggctctaacttgaggtttctgaagagttgaaacacttctcgtccagctttgttctgagacaaagctgatatcacacagttccaagaacacaagttagggtcagagattaagccaaaaaccttcactgcactctcaatgtctttacatctaccatacatggtgatcaatgtattctgcagttgggtgtcaagttctcttagacttttaatagctagaccatgaaagcaccttccttgtaagaccagtccgaggtttccactagctgaaatagtacccaggagagtaatcaagtcatgacgaattttcccttcacgactcattgcttgaaacgctctcaatgattctaaatggagaccacttgatgcgcagccagagattacagagttccatgatgtgagatctcttgtttcggacattgtctctaaccgcaagaatgctgaagtctggtccctgcctccgatgttcatgtttataactgaattagctgtaagcatattatccccaaaccctagcttttgcagccaacagtggactgatttgccaaagatgagagagtcataggaatcacacgacgtaagaattgccatgacagttgccaagctaaactttgaacaagaatactcactgacaacttccttgaacagagtcttagcttcgtgcgtcaagccgatttgcgagaaagc

SEQ ID NO: 48265 - DNA, 822 bp, Arabidopsis thaliana landsberg
  unsure (1)..(822): unsure at all n locations
aaaaaaaaaaaaaaaaaaaaaaaataaaaaaagaaaaggaaagaaaaaagaataaaaaaaaaaaaaaaagaagggatcgatagcggaaacnaaaagaggaaaaaaaaaaaaagaaaaaaaaaagngaaaaaaaaaaaaaagaagaaaaagaaaaaaagtaaaaaaaaaaaaaaaaaagaaaaaaaaaaaaaaaggaaaaaaaaaaaaaaagagaaaaaaaaaaaaaaaaaaaaaagaaaaagaaaaaaaaaaaaaaaaagaaaaaaaaaaaaaaaaagaagaaaagaaaaaaaaaaagaaaaaaaaaaaaaaaaagaaaaaaaaaaagaaaaaaggaaaaaaaaaaaaaaagaaaaaaaagaaaaaaaagaaaaaaaaaaaaaaaaaaaaaaaaaaaaaaataaaaaaagaaaagaaaaaaaaagaaaaaaaaaagaaaaaaaagaagaaaaaaaaagaaaaaaaaaaaaaaagaaaaaaggagaaaaagaataagaagaaagaagaaaaaaaaaaaaaagaaaaaaaaaagaaaaaaagaaaaaaagaaagaaaaaaaaaagaataaagaaaaaaaaataaaaaagaaaaaaaggaaaaaaagagagaaaagaaaaaaaaaaaaagaaaagaaagaaaagaagaaaaaaaaagaaaataaaaaaaaggaaaggaaaaaaaaaaaaaaagaaaaggaaagatagaaaaaaaaaagagaatagaaaaaaaaaagggaaaaagaagaaagaagaaaaaaaaaaaaaaaagataaaaagaaaagaaaaagagaaaaaagaagaagagaaaaagaaagaaaaaaaa

SEQ ID NO: 48266 - DNA, 990 bp, Arabidopsis thaliana landsberg
atgatttcaagagtagtagaaaatatgcagttttgtttaacgggtggtgaaatgatgattatgaaagaaaaaaaaatgtttatgattaagaaagagtttgtaactatgtataaggagtaaaagtaatcttgattaggaaaataattttaaaattacagcaaatttagttttcattttcaataatagtgaatataattaaacaatttataaaataaaataaaaataggagaaattgaaaaatggaccacatttggtgtatagatagacacggacggtagtgagcaattttttaagcggttcataaccactttattttaaaatttaatacatgttttaatcatcttttctcatttcaaatatctatttgaagcgtccgtttaaaactttcaaccattttacccaaaactgttaagtcatgagtatttttaactattaagcaggaatattactatgcaaggtgacaaaaaaatagaaagaagtaaaaaagagaatcaaatcttaaattttaagaagaaaagaaaaaacagcatcaaccaaaaataataatttatcaaggacagaactataagagcccaaatcatcacctcctttctctgcctacttctctcttttttttttaactcgagaagtttataatctggtttctgattttagttttctttccatttatgaattcatttgcttcttcttgcacgttatagttttcctaattgggtaagctccaaggtagcttcttcaatattaatttcatttttttcattttctgtagccatatgtttattttcccgagaaatattatccacaccccagatcttttaaaatctctttttaactcctggagtcttttgataccttaaaatacccactcatggctggtttaattaaacttccaccccaaatctaggaaaaaacccaaatcagatttctttttttaaatttctttcttggccaaaaatcttcaaaaaagcttacccccttacaacaaaattc

SEQ ID NO: 48267 - DNA, 908 bp, Arabidopsis thaliana landsberg
tgatttgatttctcgttataggccttagtcggcccataacgaagattctctataaataaatgaacataatcaaggcttattttgttggaaatatatttaacttgtttcactatttgtctatttatatgggccagagagacctttttcgattttcttatgtaaaacacaaaatgaaataaaactgaaaaagctcaaacaatgtggtaaaggtgtcatagttgcaacttacaatgaaaatattttaatacattagaaaagaaatccactttatttgaatatagaaagtgaaatcaatatgttttgttatataaaatatatgtagaaaatcaattttttattagccaatttcgcatttgcactcctcaaatcctctagtgcgattcttttattgccttttctaaaagccttgaaaagttaactttttactagaaaaattcccatgtgtttgtatgttatagctttattttctatttatgctaataaaattgacatccttttcgcatttaaccagattacaaagcgaaatgtaatccatattgtgggaaaaaggtatacaagattccaacaaattaagaaatttcattattataatagtttttggtctcgatatttgggaaatcataatgaaattcataagtttttcaaatgtataatagccttccaataatagcaaccaaaatgtggggacaattctgctatcacccaaccactcaacggtgatgggcttttacatcacggcccaatattaacctcccacgtaacctttttccattacgccctgacgcacaaaacaccacttccacttggcatctagttttgtcacttgcttagaaattgccacatgtacggatactatatcgccacgtatacgaatgctttggtttaccttattaattctactatttcgc

SEQ ID NO: 48268 - DNA, 895 bp, Arabidopsis thaliana landsberg
actggaaatagtgaaacaaacaagcaaaacgttataaactggagaggagagacacatggaaacatggatggtgaaaacaaaatcgtcgttttgttttaagataaaccgaaaaagagactcacactgtgatgagtttctccagggagaccattcaaagaaggaaatgcatctctgtctagagaaaatactttgcttacagcctgtattttgcaaatgcaagagagtaagcacaaatacacatagatcccctcgaaaacgaaaaggacatgaactaaaatttagttttctttacctctgttgcatttctaactttcttctgcgacatgtttagagactctgcaatcctctggaaataacaatcactataagcatacacaatgtagacatgataaaccataattgtttaaatgttaaacttacatcaatggagggtgtgattcctttctcctgaagtctaagctttgcatttcggattaaaccgagtctttcatgtaggtgagtaggtaacctcaaggttcttgagttgtccactaatgctcttgagacacccttttagaaatttgaaacaaagagtatcacttgtcagttttacattctaaccatattggcaagcacaaacaatggttattctcacctgtcgaatccaccaatatacgtaagttgaaattctgaaacctttggaagaatcaaatttctctattccccgcaaaagtccgataagaccacccttcatagtaaaaaaacaagaatctatcttagagaaaagttcatgaaaaggtataacatagagtacacaaaatgacttggaaaaattacctgaacaaggtcagacatttcagctcctaaattatcataacgctgagcaatagacataaccaaacgtacatgacttaga

SEQ ID NO: 48269 - DNA, 598 bp, Arabidopsis thaliana landsberg
gcacgtctcagtcgggatgttattcatagttttggaggaggaagagacaatgcttgtgccgcgtactcgctttttatcttagatcaatcgcaatgtcgatgcaaagtgatcttacctatcacctccaaatgcgcgcaaccacttagcagagattacagagctgtgacctcctcgccactccagaacaatcctgcaaatcattcaatgtcagttctggtcatcatagccaccactcaagcgtcaccatcagatcgatgtctcaaagtatcggaattgaattgaatcataccgttcttcagtgtcgttggctgaaggcagcaacgtcgagttgggatttggaatgctgggcttcgatgccgagacgtgtgctgcggagactaattgcagagtagacttttcactgatgattggagctgatgaatgaagcttctgccttgaactaggttctatgcatcgactgcatggacagttatcgcgcagccacacgtaggacagcgccgtcttcgtcttggctttcgtattccagtcgacttcgagccttttctcggcattggtgattgtgatagcctcgaatatgttcgcagggatagcaccagag

SEQ ID NO: 48270 - DNA, 1063 bp, Arabidopsis thaliana landsberg
tttcaagttcgtagacctttttttatacatatagtccatataggtcaattttaaaagatccattcctacgagaaggtatgaaaatagtaaaacaaacatatataattcatgtcctctttgaaatttgagtttggcatcaagtgtatgtgaacgcattcaagtttaacgtgcttgacttcctcgtataataaaaaatccggctatacatttccatataacaataatgtttgcacaaacctgggactacgtacgtttctaattaatgaccccaggcaaaacgcttttttttttcttttctttctgtataggactcagaggaaagaagtttgtatttaaatctataatatataattagtttctctataaacaaagttttgaaataacaaacgcgaatgaaatgaattttttaaggcccttcaattaattacttaaatacaagacctgcaagactacatcttaaaagtataatctatgtaactattgtctccgcattaatatattttttttttatatatacttgtcaattaaaaatgacatggaacacttcacatgaccaagatcccctttttcgtgaatcatcttacgatgttttatcaatgaatttcagacacgtgttctctgaagaatgtgttcatcttttacgcagccacatccatctatgtgtaattatgagtatggggagttccaaactctttggtggcatgtggaggcatgtgactcagatgccctcattatagggagcaaaacttatgtgtcgatcttttacttgagccatcctctctgacacttgttaaagataggaaattttaaacaaagtccaaatgattttagtggatgatgttcaataaagcaaatgaaacaaacaaaaagtatatgtttttaaaacacggctgctaagaaggtacaagaacaatttaaagaaactcaaattaaggcatgggttccaacgagaccatgtggaggtttaggataaaaaagtctgtatcggtctttatttcttttgtttaaacccgtattaccaaccacggggtttttcaattattaagtccgaatccaaatttta

SEQ ID NO: 48271 - DNA, 1337 bp, Arabidopsis thaliana landsberg
cttaaccctcgttggcgacggcagagacttgacggtcctcagcggcgatttgaatttcattgatggcatcaagactttctactcggcaacacttggtaagtcattttcctctttatcaataatgtttctgatgatgtgtctaatcataaactggaactaattcagctaccacaataactttacatgttatctcatcatcttttgcatactcattcaactgtttgaaaagacacttgcgaaaatttacttagatgatcatgtgtaacatgtgattttggttgctagatctgaaccctgagtcgtttgcctcatcatttccctataactagtcaattatggtagattgccaaatgaaccagtttttttctccttggtttccttccagctgattatttgtttccatcagtttgtcatcatgattcatgcattatgtcataacatagagtctctactcgcagaagtcagaaccaatagcttgtctaagttactgttgaatcctatcctatcattatgcaagaacactcttgttggtcttgtctaaaacctttgttgtctatccaagctttgctgtaaccaattgtctttgataaatatcccgaaagctcacctgaacatagtactacttcttgtgttagtgtgaacatgtcactgaacaacccaaaacaaaagtcacctcaacacataaagccctttccttgaactatgcttgttgatacaacaacctgccattatctcaaatgtttcatgagccttttgttctgattaatgtacaaagattaagaacccttactgctgttctccatacagaacaccctctgtataagtaaacctgctacttacatagccaaccagcaaactcaacatccattatcctttgtcatgatctggttgaaagagaaactaccttacaacctgtttttataactagaaccctctgatgaacatgagactgcagactttccctcaaacttgaaaccttcagagagttttagaattccctgtttaaacagcctgcaagaaacgtgttttagaatcacaaaaccttaaaaccatagaatcattactcctaaagcgtccctagacctgagaattccgttccaacaactcatttatctgatgaattttgttcctttaccaaatcagattgatttttgattctgcctaactttcgtgaatcagaaatcaactcgtcgcccagtgagaactactccaccttacccatcttaagcaccctgtttttcttccgtcctagaatcttcttcttccacctgtcttcagttttcacacttcttcccttttccggtgtcaaaaatcgccgaacctgacacaattttgat

SEQ ID NO: 48272 - DNA, 627 bp, Arabidopsis thaliana landsberg
ttttttttttttgaatcaggtgtttttcacgcccaatgggagaggctggggactcagaactctagaaaaactgcctaaaggagcatttgtctgtgagcttgctggagagatattgaccattccagagttgttccaacgcatctctgacaggcctacttctccagtaatattggatgcgtactggggttctgaagacatttcaggggatgacaaagcactttctcttgaaggaacgcactatggaaatatttccaggttcatcaatcacaggtaaagggacactgaaaatgagtttgttataaagtttcatatgactagcctagatttagaactcatttgggaaacttatatagttggtttcactctcaattcattacttctaactgtactatgtctatatgtgcagatgcttagatgcaaatttgattgagatcccagttcatgcggagactactgattcacactactatcatgtatgacacagttccttgtttcatttctaatcatttgcttatagaagactcatctgttatgtggaaacaatagaccgattagctaatctgtatttttttccagcttgcattcttcacaacaagaaagatcgatgctatggaggaacttacctgg

SEQ ID NO: 48273 - DNA, 588 bp, Arabidopsis thaliana landsberg
ctcagacaaggattacatgcaagctaagctgtttaatgatcaagaaaacgagtatgatgttttggttgcaagtgatgccgttggaatgggattgaatcttaacataagacgggttgtgttttacagtttgaacaagtacaacggcgataagatcgttccagttgcagcgtcacaggtaaaacagattgccgggagagctggaaggagaggaagccgttacccagatggacttacaacgacattgcacttagaagatctaaactatctaatcgagtgtttgcaacaaccgtttgatgaagtaacaaaagtagggcttttccctttcttcgaacagattgagcttttcgctgcacaagttcccgacatggccttttcaaatctcttagagcattttggaaaacactgcagactcgacggttcttacttcttgtgccgtcatgatcatgtgaagaaagtagcaaacatgttggagaaagtagagggactgtctctagaagaccggtttaacttttgttttgcaccggttaatatcaggaattcgagagcgatgcacaacctatatcgatttgcttcaagttatagccaaaa

SEQ ID NO: 48274 - DNA, 533 bp, Arabidopsis thaliana landsberg
atatgacaattcagcatttctagatcagtagatgttttgtgatattttttgtttccacgacttcatataggttatgtaagctatgcaagagaaacaatgtcctccaagcataagtttccgaatcatttcgtatataccatatagtgttatacttatacatcatcattataccaatgctcgtctaagttaccgaatcttttcttttttctgttatgagtctttttcgaaaatcatgacttgcccctcacatttacgaagttagtatgaatctaaccattcttgttacaagcgagtcatttatttcattgtttgtgcagcttttcctttttacttcaaacaccttttacgatatagaaatgcaaaccacaaacgcatatgtaacatttttttagttgattttttttgtcttacattgatgaatcattttagtttcagggcaagatttcctttaacatccattggtagcatattctcactgttaaatttgacacaaaacatttttaacgcaaattgtaaaaacaatgatcacgtgt

SEQ ID NO: 48275 - DNA, 659 bp, Arabidopsis thaliana landsberg
ggacattttcctacattcatttcaatgtcatcaacctttcggccgtctctataccccatttgctttattcattttaattattttcggtttaaacttatgatgttcatattgagcgcctacaattcaaaatatttagtcggacttgtatagaccatgtgaatcacgtagtttttgttttttggaaccacatactttaataaagttttttttttgacagattgatgaattgtggtatataatcagtcaaggagcgtaaatattgattcctactattgcatgtcaagtccctgttctgatagatacagtgcctacaaaagatatattgaattagataatagatacatgtagaatatgttcttttacacatgaaactgattgataagaaatatcgacaaatatttagaaaagcatgatcgacatcagtttgctacaagtatatggtgaaaaatgtcttgtaatggataatgaattttataggattcagcaaaggagcaaacattgaacatgttcatgtccaatgaatgaggttcacaagtcaaagagggtctacttgcgctgaccagttacaaagttgtggcccataactcacggcttggcatattcaaccctaactacttcatatttttcctagagacagaaacattttcgaaatttcccat

SEQ ID NO: 48276 - DNA, 672 bp, Arabidopsis thaliana landsberg
attcaaatcctgtaaagctgagatatcctctcttacaataagtcatgaacgcacaaccccaataatgaatgaagagtactcatgaatgaaaatggttccgaaaacatgacacaacaaacttgacgatatcatctcttacaagtctcgatacgaagttagtaatatatctcttcgtccacaattgactacataaatatttttatgtatgtagaacaatattgaatgtaaactaggttattaattacgaatccattatttgacttgcgtattaatcatttgttttcaatgttctgataaatcatattcctttgaaggaccacaactccatctccatgatcaaaggaccactcgattttcaataatctccttgagttttatcccactagtctatatgagatagacaacattatagtgaatatggttatagaatctggatggtttatatcaatttagacatcatgtagaagtacatctaaactgttggtttaaggtcggctggtagtgtgcacccatgatttggcaacatctaaactggtttggttaatagatcatggcaagttattactcccctaacctcatttcctattgctggaatatatattgatcttgggattaaaaacatacaaagaagttagattttgacagtttgaaacttgaggaagtgatgagaag

SEQ ID NO: 48277 - DNA, 976 bp, Arabidopsis thaliana landsberg
ccttccataaaatcaaaaaggattcaatctaaattgaaaatgtataattcaattcaagaacagtctacctatcatggtcacgatcacggcttcgacggtaatcatcatcatccctaccaccacgttctcttctttcaccacgctccctgctatgatccctgtgacgactacttctgtgatgacgctcacgatgatctctgtctttgtctctactcctctccttgcttttctctccatctctatccctgcttcggcgagagacttcagagtctctttctctgtccttatcacgacccttctctctttctctatctttacttcttgatgtctctctttcatggtcacgcgattctctctgcacatgtaaacacacccaaaacctcatcaattacagtttaagaatcaatgaaacagaagcagctttaaaactaatcatctcataattcgattctcaattcaatccaattgctaggaaatatagattcgaaactccaactataagctaggagattgaagataatcaggggggaaattaccttgggtttcgagtccaattgatcctcgatttcgccgtcgcggccaccattctcttcgtcgtaaatcgcgtcagcaaccgtaccgtttccctcgtgatcttcgaattcagacatcttttcgccggaatcaacgctctctatctctttctcaccggagataaatttagaatctgtttcagccgtcgagattcgaagaaaggggtggatgcagaaaccaaactattttagggcaattacggattattctatttttttatagccaacacgggacctcctgtgagggtatttttgttaatgtcatataaaaacaggccggtccaaatctgataaggtccattattcagcgcatccggtccaataggtggcccaattcgtgtttgggataaatctacttttgagaagtataagaatttgccttttcaagatatggcccaatctgt

SEQ ID NO: 48278 - DNA, 602 bp, Arabidopsis thaliana landsberg
caagcttcatccaccaaaagcaagaaacttattttataagaatcccggcaacacacaagcattagtgaaagtttgtttaaacaaaccttagactcatcaactttgatgggaagattgagaagatactgcccagagtgtgcaacttccatctcttcattacttgttattttaaagttgctcttctccataacctttataagcggggggaaaaagaggcacatttcaagaacaatgacatagataaatataagggaggagataatatcctaatcaaagagagtaacctgaaacaagtaagctaggaaattttgttcaaggacatcaatctcttgagaagttaagttctgctgctggattttctgagcaccgtgtacaggatcaaacagagagtatagttgctggaaattcaaaagcgcatgataaatgagaaagcaaagcaaaacaagtttgtaaaagagagattttaaaaaggaaagaggttagagaccatgagatcttcaaattgaagaagataccaagctcgaacagtgtactcaattctcttacatagcttaaggaactcttgtctatcattgctatgttctgcaaaaacacaatttatc

SEQ ID NO: 48279 - DNA, 521 bp, Arabidopsis thaliana landsberg
tgattattatgtgtcatctcttgtttgcatttaggattattttttttgccgaaagactttttgttatacttagtgcgtgaaattattcacctttttggaaggcttatccccaaagattaaattattattagtaaaggccatttcacgtgctttgcttgtgctgaattcaatttatcaatctatggatgaattgaaaactcaagaaagtcaccaataatgcattgaaaagttttggaaatctgagaacagtgaagaaatattcaaaagcttattactactattaattttgaccgaccgacaactaatactaaggtttagaggtagacatggagtatttctcgtgacaatgttttaaaaaaggacattcgaagacatgttgagacagaagtatcatctcactactcaaatacaaatctaatatatcatccgagttctgacaattagagtggatttaaatggatgaagagagacgagacgaagaagaagtttctcaatttgaatccctttccaatcttgaccga

SEQ ID NO: 48280 - DNA, 834 bp, Arabidopsis thaliana landsberg
tttgtttgtttttaaaagaaaaaacagaatttttggacatactttataattgtccgggcctattattgactaaaaataaaaggtataattatcagggcctaaatataatatttttagaagttttttttagtgaatattataaaaaacaaaaacgatttgaacccttttaagtacaaaatcaataaattaaatggtcttttttatagcagaaatattttagagttgggtattaacccacggcggtcgtacttctttcctacccaagtgaaaaatacaattcttatcatcataagaattgtatgactgaagtgagaatagtgacagatccggaaatgatctaataaattaattggagaagaattaacaattggggggggagtctatttatatatgtttgtgcaagacaataatttgcagaagaatagtcatatgcaaaattgccagtaagcattaaacatgctagttatagtacttattcaaaattggaaaaatcaaacacgctaatctcatttttaggtggaaccagtcaaagactaggccacccgccactgtacacgcatcagcatacgtatagttaaatacatttcggatttacgtacgtggtttttctttaatgtcagttaattaactacaagaaaacatactttctgaaggtgatgagcaatgaagttgacaaaacgttaacgtgttttgaattcacctctctttttcatttctcaaaggcagttcacctcatgaaataaattaaggtagtgaaaaccataaccatttaccactttaacacaaaaatgtgtgacgtaaatttgttttcatattcaactttataattccctg

SEQ ID NO: 48281 - DNA, 561 bp, Arabidopsis thaliana landsberg
taattaattttgtttagcacgcatatatgtatccaaatttgcttcgataggtaacactccctcttgcccatgtaccaactcaaatggagtaactttattggcacaccatgtctagttatatgataacttcatgccacattctcatattatcctcaatcttctttttgataagtttgatcgaagtcctattactagacttagcttggccattagcttgagcatagtatggatatgattgagcaactcgaccttatataatttggcaaaatcttgtacatgttttgacacaaatgatctcccttgatccataattaatgtttgtatgccgaacctataattctaaaccacgaaaaggccatggtttggtaatatgagaaagcataacactaggcaacaatcttaataattctaaaccaccggcattcttcacaacctttgtagtaacaaaaaaacaatagaccattatagtaaccaataaaaattaactctacacaataaccatcctcatctttagagatgatcgatgtgtactcaaaataccttcatgaatttatcccatag

SEQ ID NO: 48282 - DNA, 733 bp, Arabidopsis thaliana landsberg
cttctcttcgtatcgctgaagatcctcgcgttccttgttgtgcaacaatctcttagcgaaatcgttatcgacatcgaaacctttgaactgtgaaagttcgccgtcgtcatcatctggtatcgctttcggccgccccatcatgctactagggcttctgcaaaattgttcaacttaagtctttctcctatttatacttcgtcatttatacagaattgcgcaaaagaccttcttacttttctatattctcaaaatttgacaaaactattatttattgaaaataacaagaaataattcactaccaaaattgattatagatgttttatgattgttgtcaatgtcggttcgatataaaggttcatatttggtgttatagtataaactaggtatggacattcggatttggtttggtttgttttggattgagatagtttggatataaaagttttgtatcgaatcggagttattatggtttggtttcggtaagtattggacttagattggtttcaggaaggaaaaacagtaagaatttttttatgtctactttgtttagtttcaaaaccaggttttcagatatattgttcggttgttggttggagtcaagtataaatattgaaaaatctattcaggttttatgactatagattcggttttggaaccggatttttcggttcggttcatgttcagttttcgagtttaatgcctaagcccaatattaaactgaaaaaacaaaaaa

SEQ ID NO: 48283 - DNA, 1137 bp, Arabidopsis thaliana landsberg
ccactaattatatataattatgtcctaagaatcgatctaaatggtaacacacgtttcttcgataactcggtttagcgataagctcttttggacttcacacgatcttttatattctaacaacaattgtctacgcatcctaatatgaagacattcctacctaattttaaaaaaactattcacacgctcacactcttaaatttgaatatgagttctaacatcaaagacactagtataaaccattaacatattacaagatccagttaaatctaaacattataattacaatatttatgatttaacagataatagatatacttatttcagtttaaataaaaataaaatatttttaataaaaaattaagatgtaagaaaaacatataaacacgcgtgtaggattattcaccggccaaataaaaacatgaatttcaaagtagagaacagtattagttaaagagtaaaaagtaacaaaagtttaaatgtcaaattatcatctgagatctcatgcagatacgtgacattttttttactataattagaaagaaaaaacggaatgataattgttaacagagtggaaatggggcaccgggcaataagaaattaaccataagattaacctttaaaaaaaaaaggaccataagataactttttgttaaattaaattatgcattcttcgactaaggaacgtataggcaaaatgatcagtaattttctgctattaaattttaattaatatttctcttcaattttcatccaaaaaagagtaaatatagttatacaaaaatgatcttaacatataatgttgcttgaagaaaagtaactaaaaactaatttatatagtctcaactaaaaagttgtctaagtgggatttgttttgtctcgtttgattagagtcatcaatgactcaataaagcccccatgaaaagtggatggggaaattaaaaattaggaataataacatataaataaaaataacggttgattcgatcatccttacgatttttaatttatagataaaaattccaatcatgcttgtgatcttaaccatcctttctttctttataggtttataaagatacgaaaaaatttatatcataagttatcgccccgtcagtttatcgacaccttattcattatgga

SEQ ID NO: 48284 - DNA, 497 bp, Arabidopsis thaliana landsberg
tgtcaagtctcagacaaaccaaacccatggagtttctggatggtcatgctcaaaaatggaaactacgacacaaaatctgctctttgccctaaaaacggcaaaaagatcccacctttcaatcaacccggattattcccctgtttcggcagcggttgtatgaaccaaccgacgctgaaccacggaaaaaccgagcttcagagagatggtcaaaccatgaagggatggttcaatggtacgtacgagcaaggggcagattttggaaatgggttggatgggataagttattacgaggttgtgtgggagaagagagtaggcgttggtggttgggtatttaaacataagcttaagacttcagctaagtacccatggcttatgctttaccttagagctgatgccactaaaggattctctggtggataccattatgacactagaggaatgctcaaaacagtaagtaattaacactaactttaaacctttttaaaagtttttttgat

SEQ ID NO: 48285 - DNA, 739 bp, Arabidopsis thaliana landsberg
tattagagtcttgattggactgtctctgccgatagttctcaaatccctgatcgagcatcacaatagtctgctaaagaattataagaaactacttaagatatggtaattaatgtttgatcgtcaccacaagcctcaaaaaccgaccactaattccaggcgttctagtcagattcatgtatgtaagcttaggaaaaccctgcaaaaacatttaaatgttttagtggtaccaagtgaagtaaaagagaaagaaatactaaaaggaagctatacctccgcaagatttctgactgtttcttccttcagtccaaaacctacgagctttagcgtagttaagctggggcaggaggtaacaaatgcctcaacggttgaagaagatacacctgtcacatattggttgagcttgagccaaccagggaggaagtagagaggaaagtttcacagtggaaaaagtttacctgatgcaggaattaagtcgatattgttctgtaagattaaacgttctattatcaagcgaggatttttagtgagcgtctttagtacttgctctagaatttttttcctgtcacttgaaacatcaaataatggaaacaaaaaaaagagagtgttaagttgtagaattgagattgagaattcatgaaactaaaaagctacatgtaggctccacgaaacaacttacaaattagcaatcatgagatcagtgagatttggacagactgataacaaagcgcataaggacttg

SEQ ID NO: 48286 - DNA, 745 bp, Arabidopsis thaliana landsberg
gtagttattgaagacagccagacgtttgagtagaaagggacccgcccgacccggttaacgaagttgatcataattggtttataaatatggttgcggaaaagtacataagaaattcatcaataattctagtgctcaatatttgaatatatatcactgaagtagatgatgcgttcagaaatattggatgtttagtctttattaaacgtatatgggtaaaaattgattttaacaaaaaatttaatttggttagccgtttagtcattaaattatttggtgatagattaatttgttcattttattaaacattcgtaagtgaaacattatatactaaaaaatcggaaatgaaaaataaaaataatgcaaagtcgtagtacggattcaaatcatcgtcataggaaacccatgtcgtcctagtacaatttttttcagctctagcttgctgacgtgtctgacacattgattttctaaggaattacgtggcacaaacacttaaaaataatcagacggttctcgtatctccttgattacacaccgttggatcgatgactgaggaagataaaacgaaacagagagagaataagcgttttgttttgtcatattttgtgttttgtcatattttgtgtgacatttacaaaaagcgatcgagtgagtgaagcgacagcttcggattatccgtcttatcggaatgtggaaactttgagaaaatacaagaacaactcatagagagacacacaagagaagtttt

SEQ ID NO: 48287 - DNA, 963 bp, Arabidopsis thaliana landsberg
aaattcataaccgaacacacgcgattacatgtattagcagagaagacgaagacatgaaatgatacagatagagagaggagagattcaaattacatccgatgatgtttccgagatgaggaacgttgttgacgtaaggcaaagcactggtgattagtatatttctctttccagggatcggtaacttggggctgctcttgccgtcgtcttccatggcgaaaagaacaagaccacaaagctaattagggttttcgcgaagagtcagagacagaggagaaagacgaatcagagaagctgagaaaagagaagctctttagctgatggtaaacctaagtaacggcggcctcagatagatccggttaagtttagaccagacagaaagttggtcactttccggtttgataactgaattgcatttgcaagatattgatcttactggtatggatggaattaaaccggaatctaaatagctttactatagtttagtgaattattaaacttttgtgaaactaaagtaaagtgactatattaattaggaaattaccattaacaaaaaaaaaaaatacaacatgaccacgtcctatattacatggaaactttctcctaaatcattttcttttgttttacaacatgaccacgtcctatagaaactctttgctaggtgactaggtctatcttttatgttaaacaaaacagatttaccacgtctatcagcccaaacttgaagcgaacttttttcatattgttggacttttttcatctttctgttattatatcatttcacaacatatatttcaaatgctacatatggataacactatggttaaaataagagagttatgtaccaattctctaaacaacggttgaagaatatctatcatatgactaagaagcagaatcttccaaggtatacttgtcagagagggaaaaatgtggaggcaaatttaattgtttaattatttacct

SEQ ID NO: 48288 - DNA, 695 bp, Arabidopsis thaliana landsberg
ccaccatccttattatatccacttcagtcctgacttccacaatcacctttgtggctgcattcacatacgttgtagaaaatgtttccagagaaggcctatccaagagcagtcttagaatttgatctcaaaccaattaccttcacaaccatatctgcgacagaaactgaaagaaaccttgcaatattagccaccaccatccactttcccctgcctgaagtacgaggtttatgacttttggctttctgtaaatttgttgttgaagttgaggacctcatcacaacttcaagatcagatatcaagacttgcacttttgggtctctagaaagaaaaccaacgccaagtttgaccaaggactggcgtaagcttagtttaatttcactagcggacaccgactcaatggcaccctgaaaaaacacataaatcagcagcaaatcatccttaagggtaaaattagtcatcgcagaactcattagcaaattactattatcccaatagaaacacgttcaaacatgcaaaaatgactaagggacagatgaacatgaactccactacattgattatgattcaagattctacagaaacattctttctcagctacatcaacgcacaacatccacttaattgatccgattcaaacttcaacagaaaacattctaactcatctacagaaaaaaaaaaaaaaaaaaaaaacattc

SEQ ID NO: 48289 - DNA, 1088 bp, Arabidopsis thaliana landsberg
  unsure (1)..(1088): unsure at all n locations
atgagaaatctcatttaacccgtcgcattggaccttcacgtcgaacaaatcccatgcgtcattctccgacaaacattgaacttctatgtcctcatttgccctcataactgaacagacatccttagaacgagtagtaaacacgactttgtattttttcccgagcactggaatgcctattgctgttaaactcacatcctcccataagtcatccaataacagcacgaaccggggcttcatatctcttagtaccctgcttatttcactagctttcttccctcttgagtatgtagaccaattattgtcacagatgtgtaatctttccccgatggcatcttgaatcttcccgacatctgcatctttagacgattcaacccaaataacaacatcataatcatcactgacttcaacgaacttgttgttaattagagtgaggagggtagttttgcctacgcctcccataccgaagattcccaacattctgttttcatcttttctaagactttcccaagtcttttcaagcgtcgtatcaagaccgactgtttgttggcaaagtctcacttctaccacaggaggaggaggttgctcagtcacttctttaaaatctttaccggagagactnttaacttcagtcaacttcttgaataccttctcgcctaggttgcaggatgagaaccagcacccagatgttgacagacgtcgacgtacagctgaagcattgtgagaagaagcatcccgagcggacgcaacatcaattaactgtttggtgttttcctcaatgatttcgacttgtgaaagccacgtagccactatagctagccgttgaccacccttaagctcaccagcattgactctgtttacaacatcttctttttctgctttgagctcatcaaaagcactcttcaacaagacaagattttccttcaacatgcaaatgttacccacttttacacaaaagtaagacaaagcagacttataacatggctcaactacctgccaacagcaattcattgtgctcaagattgagaaagagaactaagatgagagtagcaaatttaaaacagatctttgtacagaacaggatgtctgta

SEQ ID NO: 48290 - DNA, 1361 bp, Arabidopsis thaliana landsberg
tcgctcactcttcccaattgctttttccaatgatttaatcaattatatgctcaatggatatgtccagttaaccgctgttaaacattttttctttaattgatgatactagcaaaaatgtataaacccatctgttatagatatttgaaatactttaatttgaaattcaggcacaagacacattaactttgaaatatattatgctttattttaagataaactatttaacaaaaaaaaaaaaagcattcaaactgaagtatcatgtgagtattaacattcaaaacaaagatgcatcatttgtaaaccagggttttttggttgaatatatgtgagtaatatatgtctctgttgggcatacaaagcccatgattgtataaaaagtcgaagaaagcccatttacgaaaagtctatcattggcatattctcaatttctaaagacccaacagattcagcaattacatatataatatagtacatgcaatttcttcaatttgtacagcacatacaaaactggctaaacccacaaaaatccccaatcttgtgtaaaatactaaaatgctttaaaacttaccgtaggaaaactaaattgttttttcagtttgtttggatagatcagagtgtcgacattaagtgcagagtattgatattcacagaaattgacatctataaaaactttaagatatgtttaccaaatctactattaacgaaaaagaaaactactactagtgttttttgtttccaatatagctcaaatcatttttattgtcggccgtgttatgttactattttaatttttaaacaagtacgacaagaaaaaggtggcaaatggatgaaaaagatggatatcatattaaataaattataatgcaaaagttaaaatcattcaaagacatgacattaaatttgagtcgaatagagtcttcgttcttcttcttttttttttttaatcaaaaaaacatagagctttgtttcatgaaatttatggagtctgtcaattacttatccatagttcttacttccatgtggatttgtccaatgttgtgtctccttctatattaattagacttaattcttttgataaccatcgttttcatgcaaaaaaatccagggtgtattttacattgttattacatgatagcttaacatagccaaatattgcatcaaaacggaatgtgtgagtttaaccttgccatttatatcaatagttttttgccggagtttttcaaagttgaagtatacaattggctctattaattagtaggaatctaatcaacttatatgctccatagccaaaaccgtatttttcacttagaataggattccaaattttattttttataattagaaatattttgttctaagat

SEQ ID NO: 48291 - DNA, 537 bp, Arabidopsis thaliana landsberg
ttggttccaaccagacaaaaataaaacagacacaacacatatcctggaggttttgtaaaccaaggaaaagcttataattatgaaataattaatgaaaaaaatcccggtgattattaaattgttaatctttatatcatgtaaattaagtaactactgtagaagcacatggtaaaaaaatctcacttttcttttcatgattccttcctctttgctcgctctctctctctctctctctctctctatctctctctctctctctctctctgcctagtctagtctttcttctgcacatcttctctctctctctatttccgcagacatcaattcccctttttgactaaaattccgcgacttgggctttgatccattcccagtgaatctcactgcttttctcacagaaaaaaatcactcctttttcctggattttgttttctcgactgatttggggaaaagctatggtggtctgattaatctctgtctgtctttggtgagatgggtttggatgctgttaaagctaaagggaattggaaatcggag

SEQ ID NO: 48292 - DNA, 845 bp, Arabidopsis thaliana landsberg
ctaataggcattctttgattaactttttccttctcagtcttttgaactcaaagacagatgatgcagaaacactcttgatctcattcacattatcataatcagaatactcttgaagacccaaactaatcgatctagctatccctgaagtagaacaatcagtaatctcactcacaacatcaacatctttgcaatcatctaatccactagcaactacaacatttgaaaacaacaaaagcaaagaaaaaaagatgcaaactttagattcaaatagagacaaaaggcgttattaaaaagagtattaagaaatgattaaggggctccaccataaaccctagggtcatcaatttgattagacccagatctcattgtaggagttgattcttcttcttcattcttctttctatcaacacctagaagaagcatactccttaacttccccggagaaaatccgccgccgctactagtaacctattcatcggaggaaacagagtttatcaaatcaaaaacagagatgatgatgaagtgatttgcaaaaggaaagtttgtacttttaagtaagaaatcagaaaattgacaaatctggcttttgatatccctaattttacgcaaaacccagtttcggtaaacgtgaaaccgaagcattttctcacctgggtctttccgattcgttcgtaatccatcgaaagagaatctcaaaaatcttcacttttttctcgagaaccaaaaatcctgaaaaagagtgatgcaaaatgtgtaagaaaatataatagtagtagtagattgttggtgttatcagaactcagaagcattatttgaaaggaagagtacagtgaatgataagagag

SEQ ID NO: 48293 - DNA, 1091 bp, Arabidopsis thaliana landsberg
tggggccttcacacaccacgttggcttatgatcgcgtaggtctcatcaaagaaatattgatctatggtgcatgatgcctagctagatcgaacagaactcttatcaacttctcagaatcacctgaaaaacattgaaaagcccacatcctatttctcctaaagactgcatcttatttcatggttaagagtaaataacggcacaaaatcttacacctctccatttgctaacaacagatgaggctgagatgttgaaaaatgttgcattgcactctgtatcaacagcctttgcaagcatagtctgcacaagacgaataagactgttatgcatcaagaacataaactatacaagatctaattgagctaggctcaagaaatcagttaatggtttggtgtgcatatgaattgaaatgcaaaagacagtaagagttcaaaagtgaaaacacattcgagatagaatcatcgcacctttccggtaccaggaggaccaaaaagaagaattcctttccatggagttagtagaccattaaagtacctgacatcagaagttgagattcaagtactaaaataaactgaaaggtatcaacattggcaagaatggcgtagataacatacgtggggtattttataggcatcaccacagcttctttgagcaactttttagcgttctccaaacctttgatgctttcccacttgatatttggattcccacggatgatatccctgaaacacaccagttcatcaaaaaaaacaagaacatgatgtccaagagcaaaaatatatcagtagccacaatgacttacctactcaaactctcagcgagagtacgagtttccgcagactcaaacgggggaaacatggactttttcctgcagaagaaacattcgtcagatccaagactataaacataacatctctatggacaaagaactaataagaaaaagcaaaaggaaagcatagatcttacggcttctcgcgaatcacattgccattggccaaagctgtgttaccatcctgcaatcatatcataaatcctaaaactttgatcatcttaggagaaagaacacacgccattttatgcttaaagcacttgac

SEQ ID NO: 48294 - DNA, 292 bp, Arabidopsis thaliana landsberg
gtttcatcattattcgactatcagcaaagtggtctctcatagagacagaggaaatcatttatcacatacgctaaatgggcccattttacatggcattcactgttatcctccaagggagtttcatatgactacttgtgatagttactaaatcaagattttacattttaagtaagggtttgtgtctacttggaaactcaatctagggatatacatacctccattttacgcaaggtttctccaataatcactagctggtcctcaattttgtatttctttttcagcagatcagcgt

SEQ ID NO: 48295 - DNA, 955 bp, Arabidopsis thaliana landsberg
atgtcaaggagatcaaccattgtaaataatttaaatagttttaattatgactaccacatcttccacagatcttggggacgactaaacttcgattttggatacttacatgaagaaaaaatgaatacaaaaagtttaataacaaactcttgaatcgtcgtatcatgtttcgagcacctacttgattatctaagataaaagtttgtggatttatgaaattatctttaagctagcaacttatcttagttagttggtcttttttaccattatagtcatatgttcaagatttatgaaattgttgatgattctaagtttctaacaaaagaaaataaactaattacctgaattattcttgagttacaataaaataagcttctcattgtacatcacttctcttctgcttttcttttttttggatgtaagaacatacaatagcattggagttcggaccattacacaaccttgctactttcttccctaccaaaaaaaggttccaactttacaaaaacccttttcaccaccaccaccaaatttagctttgttcatgatctcttctctactttgctatcttcgacttttctccaaaggccgaaccgatacttctatgcacaactccctccctggctagcactcgcgcatactcccacttctagtttcacgcactagagcatctacatcttgcccgactctcttcgagcgcctgaccaaaaataaaagtattcagtttcttacagagtgaacaaagggattcaagagtgattagtatgcaacactagtgagatcattaccttcacttgttcttgcaggtccttgatgtattgacccgcaagatccaacatgtctgctgtgtttgtttgctgcatatcaattgaagatgataaatacattgagcaaagaacatgaaagtacgaatatgagagagaaagatcgcataatctacccgtgtccatgtttggaa

SEQ ID NO: 48296 - DNA, 1030 bp, Arabidopsis thaliana landsberg
  unsure (1)..(1030): unsure at all n locations
aaaagttgtgcttccttttgagcaccaaggtgagtgtagatactgtgaagcctttgagattgtggataaaacatgttgttgatacttctctgttcttcagatgatggaaaatcgaacgagatctatgatgggaggagatctcttgtggatggcaagattgagacaacaccattgtcgtcaatggagttgcagaccgatgtggtttcgtcgggtaagggtggtgagattatatatttcagagattcagacgatgagcatcctgattctgatgaagatcctgatgatgatttggacatttaaggttcttaatttacacttgtaagaccagagaatagctccagttttggttttggcaatagttgggatcttagtatccaactttgtacactaaatagaagatttgattggttattagatgtgtattacagttataattgttacagtaatgatctcatcttctattattcttgagttgtttattgtgtttgttgctgcataatgatcatcaacacatatctatcaaatagtaattgattatagtatgaagaaagagcttgctcagtttatttttggatacaacatatatgtataaaactttatcttgggcacacctaagggcttctccaacttgacaccaaaacaccattttggtgttagtcttgctccaataggactgttcataaaacaccaaatttttattttatctaatttgtattttgttttaagtaagataatttaattgttatttaccaactaaagacaaatataccattaatatttttgtatgaattcacttttaatataaaatattaatttgtacaagatatctaaataaatatgaaactaattgagattaaaaactaaaggttcaaataacactgaaaacataatataatagtatntatgaaatatattaaaaaataaaagaattttatatttaataatataattatagataataatagtatttattgtaaaattagtggtgtgttggagatgagaanaaaaaatgggacactataacacccaa

SEQ ID NO: 48297 - DNA, 1118 bp, Arabidopsis thaliana landsberg
catgcatttgaaacagacgcacattgctcattatttacgaaatcaaatttttgtatttctaagaatcctatgtatttcagaaaaatattcttattatgatatcaagatgtgttttattgatttttttaatattcagaaagtttcacatctaaaacaaaacatacaaaaaggatatagaagtttcacgtcgaaaatcaaatataattctcggaatctgtataacattgagtgtcattaatgtattaacaatggtggagatccttatactataaaagaactcaatctctaaccttttttttttttttttttttgtgcaaactcaatctctaacctaaacccacaaaaataaaggaatcttcttcaccaacttataatccaaaattgtaccacatatactgttaaacatcaccacgtataattcacaatatctcagttacagcagcactgtttggaaaagctatttgttttttgcgattgtttcaaaataaactatgtaaagtgatcatatttagacagggaagcgaagatgcatttgacaagactattgtgaaactgaatgtacggaagcatacagtatttgtgcatgcaagtagagaagaaagaagatcacatttttgagattctaatctaacgtacaaattagttgcagtgcagtgtagtttagttccagtccaacacgtacgacgtacttcttttgctttacaaatgtttttttttttacttgtaatttactcaattagaagaacttcaagtctaacttagtttactcttagttttttttttgtaatttttcaacagctgtttgattgtttctatttgggtaattaaaatacgtatttttaattttcaatatacgagtttctttatcggctacaactacataatatacgatgttttgaccgtattgtttttggggtcaaaccattttgttcctatttaaaagaactataaagagtgacgaaccctggaaacaaaataaaagtcatagaaaaatatcaatccatcgaatattaaatatactttaagtagttagttgatagatgaagatcgaccgacgagaggctttatcttccatgcttttcggaggtttactcatgaaagatacgagatggtgagag

SEQ ID NO: 48298 - DNA, 686 bp, Arabidopsis thaliana landsberg
ttacgtttgaaccacaaatcatttattttgtaaatttgtacaaattaaagacacatattcatgtgccactcaatacgtggacgtgcatgttttgatatccattattggcagtatatagataaaacggaatactgctttttagacgaggggggttaccaatcaggttatcatttgtagacttttctcaattatcacaactcacaagattgatgacaaacagatctcacgttagcctattcgtaatttccatttctttagatatagaaatattatttttaataacgaattaacgaaaaatgaaccactatcttaattatcattaaaaagaattcagtcacttgcatgacatcatttacacttaataatgctcatacagttagatgaatttgacagcagcattcataagatcattggttgttggtaatgcgttaaaatcttactgaatttaaccattggagagcagaaattaaagtcaaaagttgtattgattagagataactaactaaaccaaagaacgttatatatagaattattataagtttgattttaatctagacatcatatctttatgatctaagatatcttcatctctaattaattgatacccccaacttcattttatggcttctgtgttaaagagggctttgggctagaagataattaattacttcattgcggggagtttt

SEQ ID NO: 48299 - DNA, 832 bp, Arabidopsis thaliana landsberg
  unsure (1)..(832): unsure at all n locations
gcttgacttgcttcgattcagattcttaacaccgatttgggatggatttagttttcaggccggtcatcgacttacaatcttgtctatgcttagtgtttctcgattccgttgttctgtttacatatttcttgtattagagtttgctaattcaatctgtgtcgtgttcttgtaggaataattatgtgcttagggaaaaaaaaaacatctgatcaactctcattgatccaatcatctacgcttgttgatccaatcatcaactctcgttgatcataacctcttatcatcaacgctggttgatccaatcatcaactctcgttgatcgtaacctctaatcatcaacgcttgttggtccaatcatcaacactcgttgatcataacctcttatcatcaacgcttgttgatccaatcatcaactcccgttgatccaatcaaccctcgttgatcataacctctaatcatcaacggtcgttgatctaattatcaactctcgttgatttaaaagagaaggaaccttgattttagttagtgttatctatctccatagattttaacacttgtacaggttatttgtttgagctttcaaactgaaaagaaacagatgtaccaaaaacacagagaggggattttgtacatgacttttgccatgacaggtgcgcttgcttggcaggtcacaaaccctttaataaaaagatacagtttttggtttcgtggagggatgagggaaggtacggngtttggttaataaactttctttgcccggctctctttccttcctgaatgtgtgtccactgccttgttttatatgcttcttgcatactacacagaccacaat

SEQ ID NO: 48300 - DNA, 203 bp, Arabidopsis thaliana landsberg
ctcttccccccataaactatcactatttagaattttcaatgtggaaaaggaagctgattgttgaagcataaatcccgggagaccacttttgcattttcaaataattaaattaaaccatagatacacacacacagttacttactcttttagggtttcccaataaatttatagtactttaatgtgtttcactgatatttgatgat

SEQ ID NO: 48301 - DNA, 770 bp, Arabidopsis thaliana landsberg
tgttatctcgcatttggttagaatcaaaaggatgatatgaagcaagaatcgaacaaagacttactctgatcattgctaccatcacccaaagcaccaagccttctcatgagttcgacaaactctggctttttcatatactcatggacaaactcgtgggagttcttcacaaataccaactctaaatcatactatccaaaagttcatgggacaatgtcacactcacaaatatgaaccagtgtttttagcaattagaaggttttcacgttaacactgcatcaagtatttacctcctccgctaaagacttgaagacgttaaagggcacaatccattcaggacaatcaacagcatcctacaatacaagttcctatgttatattttctttttaacagcaaacatgacaagggaagtttctggaatctccatttaataggtagtcgtgttcttacaatatatttacacagatatagtttcctttacaatgcttaagtttctgcggtagactaagtgaatatctcaagaatactgtagataaattaggtacctcgagatgaaacacgtattcgataccaaatgggctgctagatttgaacttctgaaccatacaacgagaaactcatcattagaaccaggaaagaaaggactttccggaaaacggataaagtcaaaactaaggacaaagaaaggtcaccttttgggaatactcttcaccaaaacgaatccagtaaacactattaccaatctccaaaccttcagctgcgtattcagtata

SEQ ID NO: 48302 - DNA, 1200 bp, Arabidopsis thaliana landsberg
gacctttatctatccattgtctttgctgcgttatctcactatgaaactgtttgatgtgagcctttaaatgattagaagtcggtttcttgtctcaactcttatctgtaatattttgctgaaaaaatgtttgaatcaaaaacttcccaacttgtctcttattaaccatcaaatgcgagtacaacttttaatccaatccactacacatttataagagatttggcataactaagtgattcgaaaacagattaaactagaaccgtcatttaggatgttgaggagcagggatgattccccattttctacgaacttgctccaagtcttcactaaagtgacgctcatagtacacacacatgaggtcagtgcattgtcttccagcacgaacagcccaaggaaggtaatgcttcaagaacattgatctttgcttttcgttgaacctcacagtacctccaatcacagaaagcatacacatcggaagatacatttgctcaaactcgataactttcaaagacgactcgccgataagattcgtaggaaggccaaacagagtgtgccataagtcgtgaacttcgcgtgcccgtgtcgctacgtaagccaattcatccgtctccatgaatcttacgggcggacgatcatcgggagagaagtttctagatcccatgaatttagcatatgcagctccaaatgtgttttctggtagatcccaagcatgacctacttgctctgacacaactcgaggacgctccaataatatagccttcaaagtaaagataccaccaaagatcaaaacaccattgcttactcaacaatataaccaacatcaagtaaaaatgttaatcaatttaacatcactcattgcttactccagaattactaaatcgaacaatttctaaatcaatcattcttaagcaaaatcaatgatttgatcaacaataagagagaaattgagtgatttgaaaaacgtactcttccttcttcgctcttcttcattctctcaagaaccatttcaaaagctggtttaccggtagtttcgccgagagcagcgattagatccgctctacgaggatcaaccaacgcaccgagagcagatcccatcgccacggccgcttgttgccatcggctcaacggaactcgagctctttcaataatcatcgttccttggtagataatctctctggttaaaaaccaaacggcgattctaag

SEQ ID NO: 48303 - DNA, 697 bp, Arabidopsis thaliana landsberg
cgcaattggtgctaaaactgatggggtagggaattgaaacaccacaagtggtaggaagtgcggccacaaggtcggtgttgaggcccttgatttctttacccgctagtttaaggcactcacatacttgtttacggtccggtgtggtctgagccaattggtacaatgacttgactcccacgcagcattgtgatggcaatggaccactgttggtcaagtaggtcacgcactgtgccagtgtgctcgtcactgtcccacactggatggttgactctgttggggatgccatgtagatcgtaaggacaatgaggcatgtgatgatcttcggagtaaacgccatttttgttttttattgcttttactttgttgaggtcggtagggattttataattggaaacactcatgaaggtcatgcgtacccgttaattatgcttagttccatatgcatgcaaatttaatgaaaattttattttttttgttgaattaagattaaaatacacatattccaaagtaaatacgttgcattccctatcgcttaattgagtttcaagaagttgttacatcagaaaactagattcaactctggacggaattataaaatacaaatttcggcgattgaaaaagaactaattaactttttttttataatccgaatagatattatgggtttaagtcttaaacttatgactgatggaaaaca

SEQ ID NO: 48304 - DNA, 931 bp, Arabidopsis thaliana landsberg
  unsure (1)..(931): unsure at all n locations
tgacaaaattaatagcagaagaagactgtgttttatgagttgttaaaaattacatctatatgtatgttaaatatcagttgttgttccatgttgaatagttaactaatccttaagtaatggttaagttagagtgtcttgtacacatagcattacttcacatccacgatacgttactaatgtattatagtggccatttaaaacaagtaatacattttttgatattttatttttcatttatataaaatataattatgattacataacaagaagatacatacttgccaactaaaaattaagatttgtcgagaaatttcctgaataattatgtcagagatattctccgggtaaaaaaaaaagcaattacatataacccgggatatttttttttaattattatttggataatttatttgacagatacctaaactacgacgtcgtatgtacttgagttggttctgggtccgtttggtctgattcgtgcacaagctcgacgaagaaaggcctgagtgtatctgtccataaatctcgtccagatgcagcggctctttgtctcttcctcacctctatcataaccagctcgtccgttagctggtttatctcaaccaccattgcgaagttacctttttgcccctcgatcttcatcccccatgtttccttcttcgccaccgtcagattctccgccgacacgatctcctccagcctctccaccaccctctccgccgtccacgccgacacgaaccgttccactcggtcgtactttctggcgtctccgaaaagaccggagagattgaaccctggagatcctgagatgatgtcgaatgcgttcatcctccttgctcccatctcgccgtcggtcttcgccgtcgggagtttcatatcggagtcctctagatggaatttagacatncgatcgtcggagccctggttgaac

SEQ ID NO: 48305 - DNA, 882 bp, Arabidopsis thaliana landsberg
ctccaggctgtatttgtaagaacctaaaggaagtggccgtacttctagagaagagataacctgaatacctcttcctttaaccgcaagcaaacaaagcaaaagagaatcattgttgactggccaaactaactcttcaatccaaggatcattggttctaagatcaacagtactagtgattctccttccaagagagacatgaaatgctggaggactattctggctatcatagtttctataaacgaatgtagcacgaatcagaactgaagacaagtctttcctcacaggtaacttgtaacattggcgaccttgaggatccgggaataatctgatgggaacactggaagtagaattcccctcggcgtaagtaaccgtggtagtgttacctgtttcgatataatcgttgtctgaaacccatgagatgttataagcagcggtgtaacttgagccgccacatgataagctcaagaaacctgttccatcacaaagattcaatcaaacagttgaaggcaaaatgagtacaaataatgtgagacaaagtctagaatctgcataccatctggactggagaaacaaaacacacagaaactactgagcaaaacccaaaagagcatgttctaatttcctgattgaaatctgaagaacatatataactaattgttctatattgtttcctaatttgtgagtgaattcattctttatataatatgagtgtctgtgtgaagatgtcaatgatgatgactcgtaagtactttacttagtggtcatcagaatgcactaacagtcaatgtcaagttaatattattaattacaatttaactaaaatgaatgtttatttaacaatagaaatgagatcttttttagtgtcaaatatggtatttgtga

SEQ ID NO: 48306 - DNA, 971 bp, Arabidopsis thaliana landsberg
tgctcttccgtaggtttccttttatttagtaagaaatatttatttattaagaataatttcgcaattttaattttgtgagcttattaaattcattcaggaaacaaccaaatatcacaaaattgtattttcatgttttctgagtcaattttcaattttccaaaactcattggtatggtaacaaatttttcatgtacattcactaaaccatggtgataaatagtattactgtttttttactattttttgtttatatcaggtaaataatggtgtgactaggaaatactacataaactacattaaaatgcgcaatatattttttttgttaaatattttgttgaagatttgtttttatcggaaatattttgatatttttttgttaattaattattatgataacgcaaattattaaagaaatgcagcaacaattgttttttttttgtttggtggtattttgtcccacatacgtccgaggatatgggggagatcgctgccgtccgatgaacttacatgttcatgacgttgacatcccactactattgtctatttttcaaatcgattgtggtgtatcttacaaattcgaaatattattgctctacaaaaattgaacgttttaaaatccaatattaatttactgttcaggggtttgtgattaattaattaaaatataaataaacaagaaactggttctggtttaaatgcaaaaaaccaccgacgatatatcatttgtacgttaaagtcttagaagttataaagattatggaccaaacttctcaattcttttcgacttggagaagaatatttccaaactgcattaaaagtaggatcttaagttatatctcaagctataataataatagggttggcaaccaaattttttcttttaaagaagcggcgactatattgaacgtgatccgtcatgaaattaaaattttgagactctagacaaattcttttataggactcagcaaatg

SEQ ID NO: 48307 - DNA, 135 bp, Arabidopsis thaliana landsberg
atatatatatatataaataataaacgtaaatctctgaaaactaacgtcaatacattaaatttctatattagagttttgctaatattttttcgcgaccttgattgaggcaaatctttgggctcaccgaacaccgat

SEQ ID NO: 48308 - DNA, 927 bp, Arabidopsis thaliana landsberg
ataaaaggcataagagtggttataacataatatcgtccatccccatatatatagactattcgtctatctggacctaacaatgagattttcaacttttggagtattcagctctttttttttttccaatttgtggaggaaaataaatcagtatcttatacctatccatcgactgatacgtgtcactcacacaatgtatccaacgatccaaaaatttaaaacaaataatctgtaatatatatccaaatagcacaaagaaccttcacttttctctcccattctaccttttactactctcacacatatctctgtctatatatcactttacataaaccactattccacacacaaacacacatagccatggcctcttctttctcttcacaagccttcttcttgctcacattgtctatggttttaattcctttctctttagctcaagctcccatgatggctccttctggctcaatgtccatgccgcctatgtctagcggcggtggaagctcggttcctcctccagtgatgtctccgatgccaatgatgactccaccacctatgcctatgactccaccacccatgcccatgactccaccacctatgcctatggctccaccaccaatgcccatggcttcaccaccaatgatgccaatgactccatctacaagcccaagcccattaacagttccggatatgccttcgccgccgatgccatccggaatggaatcttcaccttctccaggacccatgccaccggcaatggcggcttcaccggatttcgggagctttcaatgttagaaacaacgtcgtaacactttcatgcgttgttggagttgttgcagcccattttctcctcgtttgaaatgattattgaattggtcagcctcgatcgttttcttgtaatttactttcatatttttttttcctcaaatt

SEQ ID NO: 48309 - DNA, 998 bp, Arabidopsis thaliana landsberg
atacttcaggtataagataacaatatttcctaatagaaaactctagaagacacgatggaaggcaggaaaacgtggccgataagagagttgaaaaccttgcatcttgcctatttgctaatattggcatatgttttcaacgcctttgtaacccacaattttgcatttataaacaaattgttaaaatcctgttttttttggcaagagttgtaaatggtgaagatggtagatggtgagaaaagagacgaaattgttgcaattgcaattgatcgagacaaaggaagtcaggctgcgttaaaatgggctgttgattatcttttgacaccaggagagactctaactcttattcatgttaaagtcaagcaaacccttgctaataatggtatccccttaaagctcattgttacatattctagtcaacttcgtttcaatttaccttgaattaaacatcataatgttgatgtagggactcaaccaaataagtctggagatgacgttaaggaactgtttcttccattccgatgtttctgcactaggaaagacgtgagttttgcgtctaacttcatcaatttgttaaaaatattatcgcgatttttacattaaaacattgcctatcgaaactatcacctaaccacacacatttttcttcatatcattaggtcaatttattcgttaattagtaattagaaaggaggtgttttggtcaaaaatgttaaagattgagagtattgttgacagataaattgtgaagaggtagtattggagaacgttgatgctgcaggaggaatcatagagtatgtacaagagaatgcaatcgatattctagtactcggtgcatctaagatgactcttttaaagtaagaagatttcttcatgttattactcttctttgtcaatataaaaaacatgtcttatattaagtaaatgtgtgtgtatgtggtgttgcgataggcggttaaaagcggtagatgttacaaacgcagtgataaaaggagcaccca

SEQ ID NO: 48310 - DNA, 772 bp, Arabidopsis thaliana landsberg
  unsure (1)..(772): unsure at all n locations
gtcataccaataccagaatcactgacaaagtgggaaaaaagcattgacagcatattattatctactaaccatttgctcaaaacgaaatttatacatttaaatcagaaactaataagtcatacgtgagagttatgattccattctccttgtctgcatagatacgtatatcaagatcaggagcatcttttgagagctcagggttggtaacgctcaaataacgaagcttatccaatgcatcacttgcattactgttgaacaacaaatcaagtaaaatatagattactaaatatgagtccgttacacaaaaaccattacgaaacaaaaaaagatagagaataatacgatacctaataagctcccgaagaaacacctccttattgctgtataagctgttgacaataaggtccatgaggcgactaacctgccatttgtttcaaacattagtgacgaggacacacacaaaattgatcacaaaacaagaaatcatctaaacacacagatcgtacgtacttcagcttgatactcgaatttctcagccggtggaggagcttgtgaggaagaatctgatgctgctgcactggattcgttccggtatcccataaaccaattggttttcatgttcaattgagcaaatgacccactattcttagagtgtgcattggataaagatgagtgccatctcgattcagcgtcacttgtgttgacatcctaaaaggggggaaaattgngacactggtagtaatccaatcacttctcttcgcctatcatacga

SEQ ID NO: 48311 - DNA, 575 bp, Arabidopsis thaliana landsberg
aaattttattatcatccaaatcatataatcaagtaaagacgtgatttgaaataactgctcgatttagacttacatttaaacctacaaacatcaccgctaataagaattactctatcatagcaccgtcgacgtgatcagagttagtgaatctggtcacaaactaacgccaaaaaccaaaacatagagctttttttactaaatatgtcagatttagaaaattacgacattatttcaactccctgcctaacttcagactcgatgaagaaaatatcaaatcaagatagtggaaacaaccgtttgcgcaacccaactatccaaaactagttttagaaccgacatgaaccattgttaatctattcacttacattgaggttcaccctcaactggtatcattgatcaccttcaattagtgtcctcgaccattgtattagtgaatgaacttctcaaaataactgtaaaatttaccgctaagctgcatcaagattcagatcctctagctttcattactattgtagaaaaaaataatattgactaccgatttgccgacgattaacttgcactaaagactaaacagt

SEQ ID NO: 48312 - DNA, 1048 bp, Arabidopsis thaliana landsberg
  unsure (1)..(1048): unsure at all n locations
gttttttcgtaacttttacgtgtttaatctgaaaaacattgttcatcttcaacatttcaattgttgtattttcttatatctattctatagatcgtaaaatttaaaccctaatctcaaaatccgataccttaaccgtcgtcttaatctcaatgaaactcataaatttttagttatatcgagcactgccgacatcatattcttctgttttcgtctaccttccttttgatgttgggtccatggttaatttcatgttacttgcacgataacgtcagtccattgaaataaattttaattatttagtgtgagaggctagtttaacaaccatctgatgtgataagaccatttgtgagaatgtgaaatttaataaggcaattgtgagacttttcaaggatgaaaaccctatcagcatactacattcggaatatatcgtatttcatatagtttcctctaaatgtttaccaatttactacaagaagctattttttaaggttctgtatgtttttttttccttgatcatattcttattcacttagtgaaatatatttgatttattaacagctctctccaaaagataccaaacatccttttcagtacgccgggagtgggtgcaccaaccccagatctcattacataataacacgaccgttcactttctagaatgtcctcctccagtcctcctccatatattattctatctctatacatgcatcaaatcataaaatgcaataagtggagccacaaatcccactaaagtcaccctcactagatctcattacatatgtatacgaccgtgcactttcgagaatgtcctcctccatatattatgatatctacacgcatcaaaccataaaatgcaaaaattgtacccacaaaacctaagaaagtcatctctctccagtctccactaagggcagntttctctccttctatcttatttcttctcgaacactagccctcgtcctaatttccgccacaggagaaacccttgaatctaatttcttgcatcacaagaaagagaaactaactcatttcagagtatactggcacg

SEQ ID NO: 48313 - DNA, 930 bp, Arabidopsis thaliana landsberg
ggcttcatttaaaggaggtgtttagactacgtcttaggcttgacattgactcgggttcattcttggattttacccatcttggtcatgtcacattattgccattggtaccgcgtgtcaagaattggcaaacgactcctcctttagatgaaaccacttttaggtattcacgttagtatgtagaatcgacgtttaactttcccttaccctctttgatatcttctttaatgtagcaatatggagagtcttcaatcgtcatcttctatcatcaacaaaagatttctttaaacaaataaattaagttatacctcatatctttaataaagtcgaaacgttagattcggaccctgaggttagtgcggggttatgctcgtagacatatttgtttggtatattattcataatctgaactcatatcagtttggctcaattctatttatagacaaaagcataaatcagatttgttcttgttatcagtaaaaacaacatcgtaaaaatatgagaggatataagcatgtagattttgggacagaaactccatccgtctcatatataccaggaatttttcatctcataaccgttttttctttttaataataatttacccgtttatgattgtatatttttagtctaataggtaagaaaaattctacgattaagatggaatacccgttgaaaaaagaccattgtaatgtatcgaaaatttttgctatatcaaactcgatggcacttctacaagcgatgtgtctctttatgataatctttcattacgagcattcctctctgacgaaaggcaagctcatgtggttgttgtctatgagttggtatcaaaaactctataaggaatgggtatttgtaggcctcaaggtacttaaattcggattaggacgttccgagtcaaatagttgaagtgcttttcatgcttgcgggctg

SEQ ID NO: 48314 - DNA, 338 bp, Arabidopsis thaliana landsberg
attctcccccaaaacagctcccgtatgcctttgtgccggaagaagaggatgacgttgtcatccttcctcaagttgacaattcggctctcctaggtcgtcttcaacttagcttggttggtagaatgtttcatcaaggatggtcggagtactgaagctttgctctcttttctcccaaatatatggggtctggttgggagggtccggcccccttctcttggagattcccggttccaattcttctttgaatctaagactgatcttcagaaggtccttaataagagaccttgccacttcagtaagtggtcctttgcgctggaaagatgggagtccacattggc

SEQ ID NO: 48315 - DNA, 795 bp, Arabidopsis thaliana landsberg
  unsure (1)..(795): unsure at all n locations
cattttttatccactacaacattttaaagttgtatgggtctctgtcacgaaggcaaagttatcaaagtcaactatgagaaaaaattatagaagtgctagaaaacaaaaggtagattctaatttccaactcttttcaaaataaatttttttagtaaaagaaaaaaaaaactatctttctcataaacaaaataggaaataaaattacagtggtcaagctaagattatattcaagcattggatacataacttaacttaaaagtacaagtccatctattgtattacataatttatactaatcaccttcactgaaaaaacactacaaagcaaaacctactttaatccacaataaaaacacaacatttcaagtttttatctcttattattttcaagaacaacatttaaaatcaattaaaggtttcagaaaaaaagtctttagggaattattatgatagatgtatgaagttgtgaagacgacacatcatgtcgtggattcgatcacgtgacaccgacgagttgtcgagaatatgaaaagcgtgaccaacacctccatgaactataccttcaactctcttcccatggcttctcatcactttacacatctccaagtttcgttcttttagtatatcaaactccgccatgaacaccatcgtcgtcggtaacttcgctcccgccgagctcatcagcgggttacaccatggatggtctctactcgctccacgtggcagagctagacgccaatatgcgtcngaagctgaaagagtaagcgccgatgacttggtgtgatgttgttgtttc

SEQ ID NO: 48316 - DNA, 818 bp, Arabidopsis thaliana landsberg
ctcacacctgatttctcatttgctccatagaaacttcactattgggtctaatcaaacaacattcaaagtcagaccaatataaccaaagcaaatcaaacaagtgatttaacatcctaaactccttaaaccctcaagtgattccaaaaccctaaaccctagattacacgaaataattaaaactttttccatgaatatctcaaattacagagtgagctaatcaaacaacaaatggattaagattcagaaactgagaaataagaacgaagattgaaatctagatgcttagtctgtatatatacttcggaaactcctacgaatcatgtcttggcattcatcgatagatttgccgcgtcttgctcctggattaaattcggatcctgaattcggagcagctgcatcttccattcaatctctggttcgctttgaatcgattttgacggcagtaggatttgtataagccggagaaatccttcgggagtggcctaagatcgatggtcagcgagtgaggacggagagaaaatgagtgaaagggtaaatgtgtaaaattacattaattttgtactaatatttttctattttgccaatttacgtaataggtgacgtcagtgttttttttggtaggcacaggtgacgtcagtgttgtggtgaacgttggtaaaaataagataaatagatagtggaacatatctaattaaggtttgtataacaaatacactttagttatttaagaaactatcactttttaaatattaaaacctttaaaataaaccctgggttttacttaaccatttccttggtttttttttttcccccttaac

SEQ ID NO: 48317 - DNA, 364 bp, Arabidopsis thaliana landsberg
tggactatagaggattagatagtgaagtgtaaatggttagtgtgagttgggtataggggggaaagagtaatggaatgatgtagtaggtggttaaataagaagtttgtgtgaggataggtggagatcggaggtgagttatatggggtaaagggaatgattagaggtattggaggggtaagagtggatgtattgtgaaagaacaaagaggtaggaggtgtaggttgattggttgaggagtgacacggaatggagaggtgcaagtgggggatttttggtaagtagaagatgggatttgggatgaagtggaaggtgggtgagggtgtggaagtgtgggttaatgtagaagtgagaagggtgttggttg

SEQ ID NO: 48318 - DNA, 1204 bp, Arabidopsis thaliana landsberg
atatatattcatactgagctgagaatcatatggttggtactaaatttaactaaagataataacacttattgtcacataatgtaaagcaatatttaagtagaagatcatatttaaaatatgtcttcgacatatatatagacatatagcataacaaaacacttatcatctgtataaactaagcaattgcgtcaaatagaaactttaaaatataattagtggcaacctaaatctttataatatctaagatcaaacatgtagtatagcaatatgtgttagtatcgtcgatgcaccgtcactcgaatttaaactcgcatcatacatgatacatactggtgaagtgtgtaatcgttcatactaagaaactttctaaagagtcattgaaactgaaattttcacggcgtgatagattatatattgagtgacacaaacggatttacaaaatatttgaacactattcagaaccaacaatgtcatatatacgcattaatcactaattagtcaaatgcttacttatgttagacaaggcaattgtaatatcatcagggtatagattattataattattaatttaagtgtgtaattaagaaaaaataagaggaagacgacagataagaaaatgggtgtcattatgtgagaatttcaaaattttcagtgcgatttgttttattagtccgtcgttggcagcttccattctctttctattcttctattcttccattttgtttttgtaaatctcaaaattctaaagattcctcctatttttaaaagcaaacaattatttttatattagtagcatgacaagtgattaagatacgcatatcctagtgagtagtatacaattttttctatattatatttatattgtgtatattcagagtgttagttgagttgattttatgaattaaattatgtgaactcctgaaccagaaagcagccaactatatctcgctgtagtgcagaaacatatattcagcattgacagacacaatttgtgaagttagatagcttttatcacttgctcactgatacaatgttttgtgaaaacacatcagctagtcagtagtcagattgcattcaaattttgggttccatgagaggacaaaataaattgaaatagactttcattttggttagtaacaaagttagtaattagttacagtaaactagcttatttttatacaatttccatagttagaaaatagtt

SEQ ID NO: 48319 - DNA, 110 bp, Arabidopsis thaliana landsberg
tatacaaagccactcattcggtatcgactggcgccatcagacctccgagaagacataagaaccgtggttactgattgggagtcatttatggctttctgccatatgtactg

SEQ ID NO: 48320 - DNA, 723 bp, Arabidopsis thaliana landsberg
atctctccattgctcatcacacaaagcttcctctgtagatttttttactgcagattaagacaatggttaagaggtcagaaaccaaattagcatctgctgaatcactgaattctaataaacagaatcaacacttcattacctgaagaaaccttttatgaacatgttgtttcaacagctagtgttgttactggatatactactacattgttctcctgatcctgaaacacacatcacagaaaagtttggaatttactcttcttgtaagagactatctacaaaaatggaactccaagtgtgtcattattgaaattttctctaaccgctgtggataaggatggttgttggagttcaccattctgttgtaatacatcagactcaacttgctcgctgttttcgattgcttcttggctctcattgtttaacgggggagatttaattttttcatcctgtagccttgtttgctctttcaaccatctttcatacatggagtattcggccggtttctcccactgtgtgttcatccataaattcagtaaaagtagatattgcttcataggagttcacattgaaagagggaaacttttaccgtgctttcccacgtgatgcaatggaagtaatatttattcccatcgggacaagtgtgttcactccagacacactctgagcccactgtatttttgatcttcagggaatgcatttgaatgactagtaatcttctgacca

SEQ ID NO: 48321 - DNA, 687 bp, Arabidopsis thaliana landsberg
ctgtctctgttgtgatgtaaatacatgtatttgttatgtaggcaacgacctttgtgatttttcgtttgttttaatacatgctactgtttgtctcttatagtaaccccaaacaaaattctatcgttttctataaaagtccatccccaaaaagattcgagtcttagacgatgatcggattaatccgattgacatgcctaccctaagttttgatcttgtttctttcctatcaatttataatttggagtacattagtgtagtttcattgtaagtttttctaggctatgcaactcaagttttgacttttgaaccactttcaatccaattgccgattagtatcacaaagtagaacatattttctaatattacgagaaaatggtggtacggaactttttttccgtaccactatttctttaccgtcccacggcagaactatttctttaccgtccctcggcaggacggtatcaaccaaaacctcaacctaacttagggcaaaaagcttttttttttaagtgtcatattgccaaaagttccattggtctgcctttcaagcgagccttggctagcggacaactgtagtaattcactgcaattacatgaagtcgggagcatcagccgcagtcgacacggcacaagcttcaattttggatcttccggactcttagccttggcgtagaagctgcgtgtata

SEQ ID NO: 48322 - DNA, 794 bp, Arabidopsis thaliana landsberg
aaagaatagtgtttgtttagtttcgagtctgacttagaagtgattttggatccaatatgttatatttatgtcgatattagaaatttgaggaaaaaaatgtaaaacttctccgaaatagggttagaactctctgggatgcaaataagattgtgaggactaactcgatcaagagattttgttaaaggatgaacagaagaaagatgttggctttgttcgtttgccggtcggtgtttgtttgacggtctatgtgttgttcgttagagagttgctttgattatagtaattatccgtcaaagtttatgttattaagtttaagtcaaacttacaaagattgaatatatgacataacttatgtattaaaacaacaatttacatcagttccattagtgattctattaaatagatgactataaactatgtataaaaagattacaattttttaaaaaatttatattaaaatctacacaaatggaccttggctttcgctttacaattcaatatccagttataaaatgccaaaacggtaaagaagaccggaatcggaaaaagaaatcggacctctgctgatggacgcaaacaaaagtgaccagagccttagatccggcgtactcaagatttcaaacttctctgatgcctcgaaagatcgatgaccaccgccggaagagaggcaaagattgcttgggacattatttcctcatataaagctggtggtggtttactacttgaatgataaatttaacaatctaaaattgtgaatgtgagggtaaaaagtttaaaattatgagatccgaaaa

SEQ ID NO: 48323 - DNA, 895 bp, Arabidopsis thaliana landsberg
  unsure (1)..(895): unsure at all n locations
aacctgtgggagaaaatattcttatctcaaaattttattttcttccacgttttagaaaagagcaacctgacaaaacagagtaatttgacgaaacagagtaatttgatgaaacagagtaaattttaaactatttgaagttcaaagaaattgtcaaatgaagcctttaaagaataaacccttgatttcaatgggacgatctatacagtaaaaaaagtgaaccaaggtatttttctgtgattattcgagaatttgtttcccggaaaagaaatggtacttaaaagtcttcccgacaggaaagatcaaaagggaaaaaaaggtttaattatttcttgaactagtatgaagagagaagagaccctcgaagataatgatgttctaatttaggcgaagtagtgatttagtacaactttgaattgaaactaagtgaagaagaaacgagccaggaacacacatgaaaaagacaagttttcaataataataaattttggaaaggaaaataagttgagttgacttttgacgaagacttagtcagtcaacccaaaaaattacaattccaatttggtttttcttgagacgaaatataaaaataatttttctagtgaatgagcaaattccatccaacattatttaatttactaattcaacttatatatgtatatgttgtggttcttaccatgatatataatatttaatctgttgtttatttatttacctcaatatgttcattatttttaaaaagaatatatatatgtacggttataatttttttatgtataacaaccactcatatttttaatagtgatgatgactcagttactctctgaatatttgtattctttcactttatagacctagtntttatatgcattcacggtcttggatttatatacggaca

SEQ ID NO: 48324 - DNA, 159 bp, Arabidopsis thaliana landsberg
atgtcatgcttataccttcattacacacgttttgggaatggtttcttcccgattcatttttaaaaccacaatctaaagacatatgctcaggcaatattaagtcctccagttcacatagaaacagatacatatctttttgaggaagcattgttgtatata

SEQ ID NO: 48325 - DNA, 613 bp, Arabidopsis thaliana landsberg
tcccaaaccaaataacagatattgacatgtcaaaattattaaacatggcatggtatcacatttaatctttttgttcaacatcaccaaaaagcagattgtaatatgaattacaactgtgccgactaaatcaccgtggggcatgggggttcaccagatgtcgactctgccgcggccaaagtaccggtacacgaactgggggatgcacgaaggttgacggtgctgatgccaccagcagtcaataggccacctcgagcacctcgtcttcgcagcgctgctggaggaggccgaaagcgagtatggcttccgtcacctggatctcttccaacctatggaaaataacgatattagaaattgatatgaatttagaagacaaagtgcacaatacaacgcgatacatgtacatcatacacctgcatgaaagaaaataatatgaagataaaggcactaagtggaagtaaaggaagtcaatgtacaatctgcgctccttcatgatgaatgttttcagttaatgaatatcaattcaatagatatcttttatgtaataaattgacattaagatgcatttttaaatcgacataattgcatgtcccaggcctagataagtaaatgaaat

SEQ ID NO: 48326 - DNA, 610 bp, Arabidopsis thaliana landsberg
aaatataaccgaaacataagtgactgaaacagcattatgaaaacaagttttcggaatgcaaacaacaagaatcgtgaaagcaataagtatgagggttacctagaattgatttatcaacaattgtgagagaaaggaaaccaggtgcagtaaattcaggctggccaacatcagtatccaaataagcaacccttttgtatctgtaagaaccacaaaggtcaattgtcagcaaaacttatcgaaacaaagcaaccatcataagccacttaagaaaattgcatccattcaaactaaatctggttccattcaaattataagaagtagaaggtcaagacagttttcccctgatcggaaaaaaaaaaaaaaaaaaaagacagttttccttaataatcagactcacgaacactcattaaaagaccgggaacaataaagagaggctaacggaaagtaataacctttggagaagaacttcaacaagattgcgtgaaaatgtgcttttgccactgtttttagggccacagaccaaagctataaccggttgcaacgaactgcaagaaacagaacttgctgcatttgaccattcctctggtatgaaaggcaatttattttctgc

SEQ ID NO: 48327 - DNA, 608 bp, Arabidopsis thaliana landsberg
agagacaacaactaaaaatctctagtagactaagacaactattttcaactattacatttaacaaccactgatagggattaggggttccactcaccacatcgttctccttttaagaatatgtctcatccaagttgacggtgacgcagcggcgaagaagactctctacggcgatgttgcgacggagcatccgccatgtacgaatagcgaccggcatcaaactattaaacggtgccgtttgtcaccgaagactaaaagttcattttaaattgcatattaacccttacattttacctttcttttcgataaacatcctaattatttctcttttttctgaagcccaaataggcccaaactgaattttagctatcttcttaaattgcacattagctcttacatttacctttaatttcgataaaacatcctaaatattccgttttttatgaagcccaaataggcccatagtttatgaaaggcccaaaatgagtttagcgatcttctttgagagtcttgtctctctcgccgaatttttctctatttgtctgttgttagggttttagcttcttctctagtcgttgtttgtttctcttttcggaaaaacaaatgtcggc

SEQ ID NO: 48328 - DNA, 753 bp, Arabidopsis thaliana landsberg
atgtcacatatataatgatatgtataccgcccatcaaagtatttgaattcagtgcaaacacttgtcaaaggggctgacgccgatccggatgcatcatatctacgtgtgtctgcccaaccgtgacttaggctttaacatcacatgtaacttattgttttttgttaatatatcacatattgcttagctccacagaattatcaaaaaaaaaaagggaaaaagaaaaaaaaaatgcaaacttttgactccttaattagggattaacgactcttaatatgctcatgtgtatattcaacaagcatgcttagctacatggaaccctctcacgtcaatatgtatattaactgttcgatatacgtatatacgcataagcatatgtatatcacatattcaataggtaaactatactgtatttgatttgctcgaacatgaagactaaacatttttacaggtgagtaataatttagtctctacatgtaactatcctatcagctagatgaaatagttcctccaaccgaatcattcaaattatttatacaggaaggtttctataaattttaggtccttttatgtcatcaatttcccatatagacaatcatttgttaatattggaaattcgcatgcctataaataatctaggatttatgcaaaagaaaagaaaaccgtatgtatatacgaacgtaaagacttaagcatatatatacctacaatcaaatagacaaggaaaaaaaaaaacctcagaaatcaaaagtttcg

SEQ ID NO: 48329 - DNA, 785 bp, Arabidopsis thaliana landsberg
  unsure (1)..(785): unsure at all n locations
gtctaatctttagctataactcaaaatctgtatctaagttctgacaagtttctgttacgaaattcaattttttttatacatatgttcatttctcagaacaggagatgtcaattttggcgatggttttcgtaacataaacatgagatttgattgttctgtgcagatctcatagttaatctggtttgagtctagaaatgtcgagtgatgcagctcgtacgccattgttacccactgagaagatagataccatggctcaagatttcaacctgaactcaagaacttcttcttcaagaaaacgaagattgcgtcgctctagaagtgctcctcgtggtgattgtatgtacaatgatgatgtcaaaatcgacgaaccacctcctcatccgagtaaaatcccaatgttcagtgatctaaacccgaatctcaggcgagtgatcatgttcttggctttatatcttaccattggtacgctctgtttctacctcgtgagagaccagatctccggtcataaaaccagtggtgtggtagatgctctctatttctgtatagtaacgatgacaactgttggatacggtgaccttgtccctaatagttccgcctcaaggctacttgcttgtgccttcgtcttctcgggaatggtcctcgttggtcacctcttaagtcgagcggcggattatctagtggaaactcaacaggccctgctcgttagggctttccatataagtcagagctttggaccnacaaacattatcaaggagttgcatactaacgagttagcatacaaatct

SEQ ID NO: 48330 - DNA, 1002 bp, Arabidopsis thaliana landsberg
gccaaagagaagggattgtataacattagctctgatcaacagaagaatcagcaaaatattgaaattaagttactcgattttattgaaacattcaaacgtttttcaaatttaatcaaacgaatatgtaaaaaaggaaagaaagctaaaataatgaaaaatatagttatcgtttggtattttatctggattattcaaacgacggcgggatctgttaacaaaaatagtatcctaagattagttttcatatcaatttgttaaatttagtatatatattgatgatatttgtggatgagaatccgcttcagcttgagccttgaggggtgcatgcaactcccaagaagagtagtgacttgcttacaatgatgttggtttttccagtgtcgatttgtccccatcttgcttgttaactggttagcttctagtaagaagaatatgagtttgtcagattgatgacatacatgaaaacacacacatggttggtattgctagctactctgttctatttcaaagacttctgaaggagttttaactttaaaaatcagatattaaaaaccaaaaatgtgagactaatcgtattaagtatgatgaatggagagaattaaacaattatctgagaacttgagttgaaaacaagagaggagtcatggcaatatggcatattaaaggcaaagaagccattgtcattgaaatgaacatttctctggctttgtgattcaaaagaatcaaaaccactgttgtcttaaacaaaacaaaaaaaaacattgcccttgaattatgtatagccagagtgggttaggtagaggtgtccagacctcagaggcccagacccatatgatccaactaaaaagttctctccaaaagaaaatttcccatgaaaaataaatattgggccggacctgtattgaaatgtttgttggatgtcttgtccgtaagctgttgttctgagtctgacactgaaactcatgcgggcaccagaaagtgacacctgttatgaatttgccc

SEQ ID NO: 48331 - DNA, 438 bp, Arabidopsis thaliana landsberg
  unsure (1)..(438): unsure at all n locations
tactcgcttaatacgaccgagatatgaaagatatagtaaacgttactgaaacatagacttggatggccatgcggtaatcggtgtagaatagagtgagaggtagagagaagaatcctccgatgacaagaagacacgcaggccataaacgctcacgccaggcccctggagcatagctcatcaacggcgtcaccgagagctcaaacgttagctgcaacatacatcagcatcatcattaagcatcaatctacgcatgcaggcggtggcgacacggtctgacacacggaggcacaaactcgggccgggtgtccatgttatgatcagtataaatataacataagagagaaggccgaactaaagattaatataatgtgntcgagaagctagaatgccgccgtggaccgtgcaggtcgcatccatgaggagtacacgataagacca

SEQ ID NO: 48332 - DNA, 1901 bp, Arabidopsis thaliana landsberg
tgttcactgttccttcccgcacacaaccaaaaaagtattcattcttatatctctcacggctacttccaaccctagtttttgttttctttttttttgatttaaaccaaaagggtaaacactgctctatgattgcttagtgacgccattgaagcagcggctcactgatagtggcttcttctgcctccaattccaagttgctaaccctagttttcatctctctctctgtatatcatattctctcgtactttcttactttctcttctacttggtaaagataaaaagtagtcaaattttattcaaagttttgattttgacatctgaggtttcacctctgttttttttttctagaactcctttgggtatgtgtcttttacgtcactaaagggtttgttatagtcttaggtcatgctttttggtgttatctctctctgttttatcttttagctcaccaagtgattgtgtctgattttcgaattttcaggtggattttgtttcactcactcatcgtcgttgatcagtgactctgtttttgcgaaattctcttcagatttcttgataaaagatagaagacggaattatgagtggagctgtgcttgttgctattgctgctgctgttggcaacttgttacaaggatgggataacgcaactattgcaggtgattgattatcttctatatccataattctgtttatgaaatttaggatcgataaagtcaggatttttatggatacaattcacagatcttttagcttatctcttttgcttgcgtgatggattttaagctttctttgggtactctgcaggagctgtgttgtacataaaaaaggagtttaatttggagagtaatccatcagtggaaggtctaattgtggcgatgtcacttattggtgctactctgattacaacatgctctggaggggtagctgattggcttggtcgccgtcccatgctaatattgtcctcaattctctactttgttggttctctagtaatgctatggtctccgaatgtttatgtgttgctcttaggaaggttgttagatggatttggggttggtcttgtggtcacacttgttcctatttatatatctgagactgcaccacctgagattaggggactgttgaatacgctaccgcagttcactggctctggagggatgttcttatcttactgtatggttttcggaatgtcgttgatgccatcacctagctggagattgatgcttggtgtccttttcatcccttcccttgtctttttcttcctcacggtcttcttcttgcccgagtccccaaggtggctcgtgagcaaaggtcgaatgcttgaagcaaagcgggttcttcagagactgcgtggtcgcgaagatgtgtctggttagtcttaaatcgttctgactctaattctttcaatgaaaccaatcttttctattgaatgttcttatgtggcaatgtataggtgagatggctttgttggttgagggtcttggaattggaggtgaaacaaccatagaggaatatataattggtcccgcggatgaagttactgatgatcatgatatagctgtggataaggatcaaattaagttatatggtgcagaagaagggctgagttgggttgctaggccagtcaaaggaggaagcactatgagtgttttgtctcgccatggaagtacaatgagcaggaggcaaggctcattgattgatcctcttgtcacactgtttgggagcgttcacgagaagatgccggacactggaagcatgaggagtgccttgttcccacattttgggagtatgttcagtgttggagggaatcaaccaagacatgcagattgccctgaagagaatcttgttggagaagaaaaggataaaccatccgaccatggagatgattctgaagatgatct

SEQ ID NO: 48333 - DNA, 396 bp, Arabidopsis thaliana landsberg
gtaaactttgcttttgaaaaaacttgtcttgcgtctcacgagacattttttatatatgtttaattctaacatgtaaaatacaaataaagatgtaatcgtcatcccaaaacaatattggataataagagagcatacagccgaaatatggtataaaaaatgatcaaaattctaaagtaatctgcatgagtactgagtagctagtaattaagtgaataaattattaaaaatatatatataatcattagttggttaccataatatgggagtttaagaacatggttgatacttgatacccatctgaccacacttagttttattttatcaaatatattaatatatacaaataatgttatgtgtacagcatgtggaattgtggatacaagtcatgtaccatgc

SEQ ID NO: 48334 - DNA, 1086 bp, Arabidopsis thaliana landsberg
gattacgtgtttggaacattgcaacattcttgcagccttcaaaacttaaatcctcaacatacactttagttgttcaaatgttttgaaatagttactctttaaggttaatttcactactcagtcccattcgacataaaactcaaagaatacaaacttgggccttgcttccaggcataagaaaacaaagattcacctacaaagccacaaaatcctgaaaatctgcaaacaccatcgttgaatgagagaggagctctcgcaaccaaagcctccactttttccttctgcagctgagattcaagatccacgaacaaaagcttcagcttctgcaaccgttcctccattgtttgtagccgtgggccactactctgctccatcttcttcttccgagagacctcatccagctttgtctacagccaatccaactcaaagccagcatcaatcagatcaacaagtgttacatcagccttgctcagatcatcctctgatagcttctctggcgactggcacagcgtctaggtgaggctaaggagtgcatttatataagctcttctgatctgtttgttctttggtcggaagcctatggctatgtttgggtctcttttgaagatatggtttaccgattctacctgctagcaagaacaaagtgaactatgatgaaacccattctaacctgggacataaaaacctcaaacccattgacatccgtagtttcctttgctggtggaatctctgtaagcacattatttgaagtctctgcaacagatgccacattgttaaacgccttaccaccagtttctactgactgagaggcatccttcaaggacttgttttattctacaagacttgtgtctctagcactgtcagtccaaacaagagatgaagcctcatcatcgacatcttctttatttgcataatcattttcattgttagaaacctcagtcttagatgccacactgttacaacttatagtacccgtataaaaagcatcctctatggcattcagaattattcaaacagttttagtatagaaattaagtcggttttagtatttgatcatcagttgttttggtttttttccctaaagtt

SEQ ID NO: 48335 - DNA, 636 bp, Arabidopsis thaliana landsberg
ccgaaaatccgatctctctgaacacccaagcctcatgagcgtttatggtgcaatttttttaaccataatatatactgtacatttgtatgacttatatttttattgttaaaaatgtgctttataaattatgaaaattttctttcctgcaaaaagaaaaaaacatatttataacgaaaaaacataaattatgaacacatacaataacatattttcattctattatacagtgatcaaagaatcttcttgagagcttaaaacaaaatataaattaccaacttccaaaaaaaaagtttaagcaatgaaataattaaataactttatgttttgtgtatgacaaagacccgacgggtttaatcgtcctcgacaaacccaagtaaagaccggccactgcgtgttgatgaacgcttacactgtttctctcgacttcactaaaccttctctattcacaatcacacgcatcactctctcttcacagattcctctaaccatggccaccaccataaacaaaacagttcgtgtcgcagctgctcagatgacatcagtcaatgatctaatgaccaatttcgccacttgctctcgtctcgttcaagtaatcctctccaaactcaagatttcatttcgaaattcaataaatcg

SEQ ID NO: 48336 - DNA, 412 bp, Arabidopsis thaliana landsberg
  unsure (1)..(412): unsure at all n locations
gggtaagaagtgggaagagaaaaatccccgagccatagtacgagcacctggcgctacggcgtagaagtaatcctagcaaaactcccatgaaaaccacgaacgaccttctacaaaagggaaccggaacctaaaccgacacaggcgggaaggcagtgaaaatcaaggggctcgagtcaactcacaccaaggaactcgtcaataatgccccgtaactcctgtattaggggcgccgccactacaatggtggtcgcatagaccatgctcgtgcgactgganactcaaaatcacaggactcctgcaaagacgtaagactggtaagggtgcagaagcaagcctatcgccggtaagccaagtaagcaggagactcgacgtacatgggagccggcgtacgtagctccggtgtacggcggcc

SEQ ID NO: 48337 - DNA, 673 bp, Arabidopsis thaliana landsberg
gtgtatttctttcgtaccatttgggtcaataaacatacatgagctgagaagaaaaccagattttcactacttgatgaaaattcattatcttttgaaatcacaagatgatcttagtaatcggttctgtatcattgtccacttttaatgcttaagaatattaaatgaatgtaagtaagattaaataaacagtaagatatattcttcaattaagcttaaacagatatattagtttagtcaagcataaacagagatgcgtttgtgtcttaccttggaacgaacttatagataacgtatttttcctttgcatcattgatcagggctctaagactgtcacaccgggaggcatacatctgatcggaagaattcaaaatactacggacagaatttggggtatcgctaatcgctttcatctctgactgtatagcttcctcgacatatttcttcaccgcatcaaccttttatcaagaagacaagcatgatgaagataaataaagatgagaaagtcataactttttgctctaaattagaagttctccatggttcttacccttttctctttaacaggaacaatctctccagtaaaagcaaccctttctggaagctgcaagaaagttagccccgtttgagtgagagagatacagacttcagaacctgtaatctagagaaaacagag

SEQ ID NO: 48338 - DNA, 1074 bp, Arabidopsis thaliana landsberg
aatgtcgtttatgcgaaactaaggcatcccactactatgatctaggtccattcacagaaaccctccataatttttacgttgataaaaaaagttattgtgtatagtatactgtatataccatgcattacttggctaattttatttttgttgagatgatggttaaattatattgatgatactaatatagaaatacaatggttaaattatgaatacgataacgaatacatgaagcatgtgatcctcgagaacttcagatacgaatctctttttttttatttctttaatgtcaattcagtgtcaatttctatcatcaatttctttctatatggaactattattttttgttaagagttacgtctagctgattgttaacttatagactctaactaaatttattgaacttgaatattaaaaactctaatttagaaggaaaaaattgttttctttttaccttttttttgttttatgttggaagatagggtaaacatgttttgtaaatgaatggatttaacattgatgaggacgaagaagacacaagacaaggtattaaagaggttaagaaaataagaagattgtttcccataaatggcgacacgtgaagtaaataactcgtctgttctgtaattaaaacgctgtttcttctttaccccgcgaacttgatgggtcaatcacatccccaataacactaatttactgtttctctgtaataataataatcattaaaatggacaaaataaaatattagtaattaaaaacagagaaattaaagagagagaatttaacgggggagaagacttttgggaatgatccgaagaaaacgggttactaaagaaaacagtggtgcggttcttaatatttctcttaagaagatctctctctttctgtttctgttttattattgttattgacacgaaaagacagagaaacaaatagaggcagagagcagaagaaagacgaaacagaggattttcatagagaatcctctttcttcctcctttcttcgccttcttctgttcttcttcttctcctggttagttttcttgatttcatggttaacaaatgattagagttttc

SEQ ID NO: 48339 - DNA, 601 bp, Arabidopsis thaliana landsberg
tttgccacaaacttgaacttgatagtgaaccttgaattagttagggctctttcttacttctctttctcttttgctaccaccgttaaaagtctctgttttttttttctttttaagattcgttaggattttgtttgattattaatgaattcttctggttcggctgaattgaaaataaattctgttatcagtgaggctgatttagagcgagcagatgagatttgaagtttaatatgagtagtatttgtgacctgagtgatgacttgctcatgaagatactgtcattggttagcacaaaagatgttgtagccacgagacttttgtcaaaacgatggctttcggtgtggaaactggttctaaggcttgactatgtggtactccattgcatgagatagattcagcttttgtaaactatttgttgctgctaagcaaggctccagttctagaaacaatgcatctcaggattggggataagtggatacaaaccctgagatcatgatttatgaatattggctagacacgtgcgtgatcttgagcttattcattatctaatgaatttctctgtcagctcgaatatctagagccatgatttggattcaatttc

SEQ ID NO: 48340 - DNA, 550 bp, Arabidopsis thaliana landsberg
ttgtgtctctctggttcttcaatcccttgaacctttctcaagccatcaccaacatcatcagtcatttccttttccattgctccacttgtacttgttctatctaaaacatcagattcttgttcttcaatctcttcaaatgctctggatccaaaatcatcactatcatcactctctgcttgaaccagttgtttattattctcttgttcctcatgtcttgtctgttcatgacattctcttccttcaatgtccggaggctttcttaagctactgtccacactctctttatttgaatcagccaatcctttttcttcttctatacgttcatcaatctggtgactcttctctaagtaatcatcctttagttcccccttctctgtttcctctttatgctcagcttcactcacatccactctttcttcttcttcttcttcttcttcttcttcctcaatcttaaatccagagattccttttactcttttcgcattgtgatcgtaagagtcgcattatcgtcatcaaacttgctttaatcttgtctaaatcgacagtatca

SEQ ID NO: 48341 - DNA, 665 bp, Arabidopsis thaliana landsberg
  unsure (1)..(665): unsure at all n locations
ataacgggtaatggtaatttgaatgtgtaataatatcattgcttgcatgtcaatgtcatcttcacgtgtttatagactagcatgttaaattagagagcctttgaattcggtggttccttgcttcgtaccgttgacctttgccttttctttcattttgacctcgagccaggggacataactaatattatactataagaattaacaagtataatgacattgacaatgataaataataatgataatgacaaggcctatactcatttatagtggtgtatatattaatatatgaactcatgtattagattactgttttattagcagaagtatttctttttaaaagcaagtgtgaactcatgcaactcttgagtatgtagaaaccatacaattataagtaaacatatattataacataaagcttcatagagactctgcaattaacaaatgttgaattttccgacttaagtacgtatacctaaccgtggccctttatttcttttgcatttctccaaatcatttgtttttcaagtgttgtgagtaagatcgtaaagttctatccggggtttagttttttcttttaatttttagtgtaatttgaaattgatttagttattctagatgcacaatatttaaaaagtgaaaaaggatgtangattatttggaatata

SEQ ID NO: 48342 - DNA, 557 bp, Arabidopsis thaliana landsberg
  unsure (1)..(557): unsure at all n locations
ctgtgttctgttctctcctctgtactcgattgtcgtctgctgtgtttgaagacggctgatggtattcagtttcacgaccactaaactattgcgtgagatgctttctttcttcaagtcaaacttactgacttgacttacttgactgagtcgcgcattcgcattcctttttctcacttatcaggcattagctagctggcccaatctatgatttattccttcctccttatgtattttgccctccgaaagtgcactcatttttacacctttgatttgaactagtgtgtgtttgtcacagacaccaaagaacaatcaaacactattgcactgcactggtgctccttgatttagtgctgctggtggcagctttccattgactttgaagaaggaaaccactgctgctgctgactattgtctttgacgannnnnnnnnnnnnnnnnnnnnttgcgcaaacttttatttccaacttttgcagacttgtaccaccaacagaagagacatttggcacttattaataagcagtcactgctgcttcgatttcatatctcacacacagcct

SEQ ID NO: 48343 - DNA, 911 bp, Arabidopsis thaliana landsberg
ttgtgacataaaaagcttatgaggctttttgggcgaaatgagatgatcacactaactcaaggatgtgtaggtggaaaacaaaagagtactagattgccgttctcaaataatctgcgcctcggagatggagatctagttgactgaggatgccgactcgtaacattgccaccaccataacacacttaagggaaggattctaatggattccaaaatcaccacatgcatgacagcatgactcgattagaattagatagaaaaatgagaagatccgtcttcggttaccggcgaggaatgccgaaaaccgaagtggaagatcggtaatttttttttagtgcagagaaaaattaagaaagaaaagagaaacccataaaaatagagatagtttctcaaaatattatttgcgtaatcatcatattaagcaaacatgaaaaaatctttaatatatgaaacaatatattattataattctactatctattttttacacaaatgaaatatattaattggctaaaaatttttttttaatcattttatcaaattatattctaacaattaaaacaaaaattactattgtaacatgactatttgttcaaggttgttctcgttaaaaatatttcgaaataatttatttttctttgaacatatttagttgattttttatcagtaaaattatttgtttttcctaatgatatataactcttataaataaattaaataatatatacatactgtagttccaacgtatatcatcaatatctatccaaagttggattttattggttgacgttacccaaccaaaaatcttatattttccagaggattactcttacagtgccaaagtttcatttcttgtcatgagcctctcaaaaaaaccctcttctaaatgggatatcatcaagtcttttttgcgt

SEQ ID NO: 48344 - DNA, 797 bp, Arabidopsis thaliana landsberg
cagatctttttattggatagtctactgagagtaccggttcgatgctacatggattttgttgaggatcctctactatttactatactgaagagagagtatcaaataacaacatacattacatgagaataagtatatacagaatcgaaccacttgatttggttctgttttacccgtctatctataaaactcagtgctacaattggagtgggaaggatcatgatcatcatcaacaacgttttaatagagagaagaaggtttgccatcaaaagtagagacaagtcgatgaggagaaagaccgcagtaccgatggcttaatcttgcctcgcagatttcaatcactctcttaaacattttgtcccctcttatcatcggttgctccacaaattcagccaatggcatccactgaaaaaacacaacaatcattgtaatcaggaccgtcttgtagcatgtacaactggagcattccaacgaagactctttattacatttacctttgcggctttgatctcaagagcatcgatgattatcttatcagagagtggtctcaacatacagatgaagaacagatcagatttctcaaatgcaacgttgtgagcatgtctgaaagctataacctctgagaactctgtatctacctgaataacacaacacaatgccatacatggttatgatcttgcgaatttttaaacagaatcaagatttatactatatactaatcttctcggatttaattaccccagtttcttccttgacttctcttacagcaccagagaaaatctcttcagaatcattgataa

SEQ ID NO: 48345 - DNA, 1209 bp, Arabidopsis thaliana landsberg
  unsure (1)..(1209): unsure at all n locations
atctgaaggagtggtcataccaatgttaatgccatcgttctgatgcttctcccatccgccagtatcagccttagaatgttccaagtagtaaagaatggttgcaatcaaagacatgagagtgaaagcagctccagcagcaaagactccaacgggtaagacggcacacgaaagctctttccctttgtaaatgccttcacttttagtgtggtacgcgttcctcgctgatccacccaacaagcacgcctcagctcctaaaaagcttaccctaaagatacacaaaaccaatgactaagacaaacgtactcaaacatagagatgaactaactagttcttattcttgtaaggtcgtttcttttcttatagaatccacatagtttggtaagataacaaactgtaaaaccaaacatatagaatattcaattgtgaccatgacgaagcctaccactatcattgtctttagatagagacatccacaactcacaagtaagagttaaggacgtaaataagaagtcaagtttgcaacaaagtgacttataaatcataaatcacataaccaaatttcaatacccactaatctaaaagtgtctacttttcatgttcacaatactgaaaagagttggaaaaaactttccttttcacttcaaagttaaaacccataaatatacacaatcaaatcacaaattagttcattccaaatctaacttaaaagcccctaatcagaaatttcaaattttggttaccaaataccacttaaatcaactcaatttcaaatcttgatgtacaaaagattcaattagagagtaaaggaataaactttaccaagaaacaacgaagaagacaatagcccagacagtgtaagaagtaccagtaacaagaccctttccaaaacagagacacttagtnnnnnnnnnnnnnnnnnnntggctaacaagaagcaacccaaacgccgacataccgtacactgtcgacgcctcagttccgtacttacaaatagtcttctcatcgtactgatccggaaccggcacagcctgaataaacaagaaaacacgaattcacaacacaaatcggaaaaatgacaaattttagtaagagagagataaattgggtacggtgctacggcgacgctcggcaccgaagcngaagacgaaagcaaggaggtgaagagcagtgacgacggtgaggattgaaactgaaacagccattgatttg

SEQ ID NO: 48346 - DNA, 546 bp, Arabidopsis thaliana landsberg
  unsure (1)..(546): unsure at all n locations
tgtcaaccaaaagaaaaacacatctagccgtatgacattatttaaattcaaaactacttgattgggctctaaagaaaatgtgatcattagtagcccacaacggcccatttttgtgtaatccattacggccttatattggcttgagcttctgctctctctcccttcccttgttacacacacaaactatcattggagcttgattcggagaataaatttaactcaacctctctcccttttttaagaaaaacaaaacaccaatttagggagtaatcagaaaatgacaagaaataatataattagcaatttagtaaaacgaatataatctgatatgcaatttagtacgtggcgtctgtccagtgggatttccgagcacattcatgaagctgacgtgagtagcttcttctggcgggaatacactaccactcacttagataatctttgctataacaagacacgtgtcaaaagcactatctccatttttcgtggtcggtcctatnttgccgacacttccctcactacgatatatctatttttctatcttcatca

SEQ ID NO: 48347 - DNA, 391 bp, Arabidopsis thaliana landsberg
  unsure (1)..(391): unsure at all n locations
cggaccaaccgaacnccnggtactggaaatcctacaagaaaaccaacgcggcnngccaggggagcatgcaggnaaccccgcgaanagcccangnncccnnagccgagccagcaccgccccaagaagaacnaggagaggcacccaagagnncgagaaaacaagaanagcgccaangaagaggaaaacaaacccgccaaagaaaacccggaacaccccanncancacnancaggaaggcngcaggcgcaaaggncaanccgaaaggcaggaccacaaacccaaagaggccggacccnggccggaaagccgaannccccacggccggnggccccaagggaacggggagacaaccagaggccaagncgaccaaagaaaaccacngngcaccccca

SEQ ID NO: 48348 - DNA, 861 bp, Arabidopsis thaliana landsberg
cgatgaattccatccttgatggcggtggtagctgacctgtacatgaattcaaattttaggggacaccatcttactaaaaagcagggtgaagaaaaaagatagctgacccgactttattttgaaacccaaagaatactaattactttctctctcttcctattgttataatattgtactgtacataccctgaaaagagctctttctccgacaagagaataatgaagggtaccagtcacaacacatttgttccccccatcttccactgtgacgaacatatgttggtttatatcttgaatagcaacaatcgctcctacacatatatcaatttttcattagaagaagaacccacaaaagaatggctaaaatattaatatacctacttaccatcaggaactacagactcaaaacttctttcagattcactgttgaacgaagaaggcctttcaaaagaagcatgtgcgctatctcctccaggtatcgcagcaaataatgaaagcatagaaagtaccatctgacataaaaacacataacaggccagcaatcatgactattaacaactataggaatgtgtacatataacgagaatttcaaaacatgataaatatattatataccacaaagactgatacctgcaattctgacagagaaatagttatatcaaatcccagaacagaacaagcgccagcccatgcctggctaaactggtgaccggtattttctcgcttcttaacagatgcagagacacgtaggtcttccaaaatatagttgttataacgagagtgaaattcttcctgtaaattgctgtttgcagaaaattctcttagagaattaacatctcctgaaacacttgtgctatcacct

SEQ ID NO: 48349 - DNA, 286 bp, Arabidopsis thaliana landsberg
  unsure (1)..(286): unsure at all n locations
cagaaaggagagnggnaaccacgtgaggggacactgttaactgtggagacaacacaccaactagctctcaaggagcatcagatcaccgtgacattttacacctgacatccacacattatacatggtatctcgacagagcaagagaaagaaccacaaagataccccgctgtatgggccaacggagggagaaggacccgctgcacaggcataacgaccacagatggggaccctagcactcacactaaaagcccaggagcagagcacgggaccaaaacaccagtgccag

SEQ ID NO: 48350 - DNA, 352 bp, Arabidopsis thaliana landsberg
tgatggtgaagatgaggatgaggagagttttggtagtgtagaaagttgcaatagtgcgggtttgctctcaaggggaaagaaaagaccaggctttgaggagcagctgatttttggaagcaaactgctcaaaacgttaaatcaagaatgtttggggtcaacttcaaagctcaagcaagataggtccttcatgaattggatatcaaatatgactaaaggaatctggaaaggtaatgaataacacaattctccttttgtagctcttaccaccacctcaaatgctaatggtcatggccaagtcaatgccatcgttgaccaacaacaattgagtccatgctgtgtgaaggaaaatagt

SEQ ID NO: 48351 - DNA, 1115 bp, Arabidopsis thaliana landsberg
  unsure (1)..(1115): unsure at all n locations
ctttgatcttagaaaaataaaatgagttaagaatacgaatatacgatcgattcccaagaaaatagatgtgtaatttgggagtatatattacactttttttttcgtcaggagtatatattacatttttacatttatctataaagaaatatattgtgttaatacactaaactcagataaagaattaaataatttagcatattacgcggctgccgacaatagatgtggnnnnnnnnnnnnnnnnnacatattaagtcactagtgtcaatatattaaattgattgttgggttataattgatcttaaagtgagcaagttttatgtcgcaccaaaaataaactattgagtgttatgtgcctaacacttaagaagttaagataatctcgagcgcttttaatttaatctaaacaagactaatgtgactaatgtgcataaacattcgctttgctttttttcatcacatcctatcgatggcataatcatattctctggatacgttatacttttgggtcggcaattcacgtttttattcggctatatattgagttttcttatttaaaagaatattgaaataatacatctaatcaaaaaataacaaaacatgtagcatagtgatttatactaatatttttgtcgtggatcatcatcattcagactaaatatgtattgttattgattgaaaaaagatagttaagtttctctaaacttgtgaaactaatctatttgaaaagcatcttgagatttcataaatatttttaatgaaatataaattcggggtctattggaatagttggactggtttaatctggttaactccggttaactagatttcggtttaagtttaatgtgcgtagtatataaacttgagaatgtaattaattcagtttaaaaaagctttgtaacaacattttatcagatagtaaagnttgttatatctctcttcttcttctccgattagacttccgatcatcggatttattatggtatcagagccatacaatcgattctcccgcttactctttcgtcggagatgagcttgttcttagcttcattgtgtttttcgatttgcgatctttcactttgaagatttgcaatttcgttctttggttcgccgaaatc

SEQ ID NO: 48352 - DNA, 1078 bp, Arabidopsis thaliana landsberg
tgttataatgagaactcttttcaactttgcaaaacatatttttgaatcttaatacaaaattgatatgaacgcaaacgtaaacatatgttttatttacacaataaagatcatattcatatagccagtctctcttacagaggaaataataatactttttctttcatggaatcctgatatatatttgcaattaaagacgaaaggatactagagcggtcacaaaatgcggaaggttagcacatatgggattcatatttcaagtgcatgttatgagattaattaattaagattttgatttaaaaaatgaacatcaacgttttgatcgttgatgattggagttatgactacaaatccaattttttttaataagcagcctttcatgcttgctacctgcagaagctgagtcatcggacacactgtcccattttataaatttcacgtgattttcatgcaacctactatatatttacacgtcggtataagatcttaacgggcacatgataagcgttacgtgtgcattcgtatgcaaatggatatgcatgttcgtttttcttatttgccttgtcttttattagtgttggccgtgttagattcgtgaaagaaaccctagatttgtgtcggattttttggaggcatcttacatatattacgttaatttaatatggaatatgctttatttggccggaaaatatctctcggcaaagtatcatttgtggatggcagagcgatgtctagagaatctaatatctatcattaaagaaataaaattcaaaggaatttcttcaactaataacaaactagagcttaaaatccagcatacacatgtatttaaatcataacacaaccgtggttttgctttgacagtttaacattcgtatataaagtcgtaaagtctatatttttaaacatagataccagattgacttgagttgaccacaaatcaataaattggaaatttatgtatattattgcatatctaaatctattgttaacataagataaaataattagtctatgattttaaaatatgatgtctaacattaattatagagtgatagtggtagattgataatgatgaaat

SEQ ID NO: 48353 - DNA, 903 bp, Arabidopsis thaliana landsberg
aaaaaaaatcccctggcatttataatactgggacatattgaaatatttctccattggggtataaaaccaatcttgcctattttactttatttttttgttaaattaaaaatttagataatgggtcattttttttttttttgcctacaattatttccagggcaaaagatgttaaagaacatactattcttatattttgacctttgtaatcacgtttcaagaaaatccaaagtccactgtttgtgactttttgtggcttttttgaagtgggacttaaaacatgcatcccccatttttcacaactttctattaaccgacttctctatatattaaacaataaatcccttttggttattaaaatagaagcattagtttaacctcagatacagagttttgtcatctaattaggaaatgtctaacaaccaatctatattttaacacaattccttttcttagaaagctatacaccttagtttaacctaaaacagagttttgtcatctaataagaaatgtctaccaccaagagttggattcatgtgcttcctccttatttgtctaccctaatttctttttattctttagcattccacattctcaagtaaagtccaacaaaagatggcaaaaagctgttttatttcacatgttaaataccatatcttctatactttctatgcaagacatctgtatctcatagggatcgacctaaaaaccgaaccaaactgaatcaaagatttatcgatccgaaccgaacttaagttttatataaataaccggaccttgattaactaaccgaaattcattatgttttgtcaaagtatagactgaacgagtctacactatacgaagcaagaagagtagtagccaaaacatatagacttgatgattgcaaattcacaacttcacttt

SEQ ID NO: 48354 - DNA, 990 bp, Arabidopsis thaliana landsberg
ataaaaacttgataaggacttaacatcccatccaaaagcaaacaaagaaaaacagcttattttaactagtaatgaagacataatgattattgatccccaagtacaacaataaaaaaggtttgcattgcatatcacaagttaaaaacagcaaagagcttcttcgtcttcttctaaagaggaagctttctactccctagcttaatacatgggctatgcgctagaggaagacctagtgaagctatctctagttggaacgaaatgaagggcaaagattgctatccaaatagaattacttttatggcacttattcagggtttttgcaagcgtggctggtctagtgaggccttagtttattttcgtgagatggaagaaaaagaaatggagcctgattcagctgtttacttatcactcgtaagctcttttctgtcaagtgaaaacatcaatgctgggtttgggatattcagagaaatggttcataaaggaagatttccggtttcagtagataggaactatatgcttgctgttaatgttacaagtaagtttgtggaagacttgaggacatcatgctatctcacatgtctaataaaagacgggagaattccaattttagctgttgtgagtagaatatgagccaaacacattaattgaaaaacaagggatacttaccaaaattggttgcagagcttttcagataatgatttggtaaaagctcagttttgaaaccaataagaagctagctccttgttcctaatcttggtatgatgccaatggacccagctccctcttacaaggtatgtgctcgggttcaagattttgttttgtttttgtaacgtgatgcacttacatctggaaaaaaagactaagagatagttctatgggtatgtttggactttggatcattaatagaaaagctaatgttgatattacaatactggcaaccaggttcgggagttgtacttgatagactatgcacagaggttccgtagctta

SEQ ID NO: 48355 - DNA, 1330 bp, Arabidopsis thaliana landsberg
actatctattctgataactacacaaagtaggatactgaaaaaagcaagaacgtttggaatagcctagaaattaatcatcgaataaggagaagaaacataacgtacaatgcaatttacagatgtgcgtgttttgtgtttgtctcttactctattaccacttttctcatactcgagaacaataaaagtaaaactagttccatcattaaaaatttctttataagtcaagtgaaaacatgagtagatttaaacaatatttatttatgactttcaagttgccctcttagatcttttaaaccgtataagattcacaaattttagttgacaaaagaaatcaacaaattttactcgaatctataacgaacaaaaaaaatggcagacgaaggaagtcggtcaaatatgagttatgtattagttagttaatggatgatgagtcagtgggtgtggaatataacctatggacgtggcggaggtagatattacttttccatgggtcaatttttctctaataactaagatgtcaataagcatattttttttattctttttctgatttttgcaagggtcaatggacccccttgaatcttctacctcagccactctatggtctataactctatatagctaacagcttccataattggaatttgtgtatctttgttagtatcaaaattgtgtatgctatttctcccacattgcaccaaattttaagtacctaattgctttacccgatcagagttcatacttcataacataaaataataaaatattgtattagtaccattactgtatcatctggagttatacgatgaaattattatttgtgaaactgctaaaaaagactgacaatccttgcacatttacattacctaacatatatttttcttttatactacaacaaatttgaagtctgaaatcatcaaccattttatgtaagacatttatctgcgtattaacaaattagtcgtgcaagtgattttcattaaacctgatgaatttcataaatattttcttatttgcatgaactatatatcatgtaaatcttatgaattttaaacctgatgaattttcatgaattcgcttaaatttatatggcttataatgggctttacgaatgcatagaggcccaattatagggacttatgaggtcgttgcaaagcaaaatttgaatttatatgtggttaaccccaaaagggtattgctcgtgtaattccaaaagaaaaataaactttttcaaaaattgatgtgaaattttttctttaagtaatgattgagagtaaaacttttctgttccctttcaaaaccgaattagatttacaggaattaaatttta

SEQ ID NO: 48356 - DNA, 653 bp, Arabidopsis thaliana landsberg
cgctcttcaaagcaaaaaaaaacatcaataatgaagcaatctcttcttctatccttcgtgttactactactctcatcatcatcactcgtgacaccaatccatgcacgtaacaaatcaaatccggcaaagtctcctgttggtgctccagcaccaggaccatcaagttccgattgttctacagtaatatatagcatgatggattgtctcgggtaccttggtgtcggatcaaacgaaactaagccagagaaatcgtgttgtactggaatagaaactgttttacaatataacccacaatgtatttgtgctggtttggttagtgctggcgaaatgggaattgaactgaatagcacaagagctcttgcaacacctaaggcttgcaaactctccattgctcctcctcattgtggtgattttttatatttatttctattgtgtctcaatattaagtttttttttttttgctttcttttgccttatatttttagggtttgaaagtaatattttctttccttgcaagtataataactttaggcgctacgacaccaagtgcatctcctggtacgtgttgacttattttcatgttatggtcgtaattaaaaatgaaggcttttgtgttttggtccccttgaggattgtctctaggaaaatgattg

SEQ ID NO: 48357 - DNA, 940 bp, Arabidopsis thaliana landsberg
gcttcgtgtctattttaagtcccaaagaaagaccaacaacttcattaccgtctagagaacaccgtgggtcatctttttactcgttcaaccaatgagatatgaaagaagaaaaactgtctttaaaaattgttacactatttagtttttttctatttttttccaagagttgttatactaccacgatagttttttgctagactactgtataccactattactacattatcaaaatagtgaaagaaatcaacagttggcaatgcacgaagctactattatattgtagtaaaagaaagatagagagagtgatgaaataagatggccaaaaaatcacgcaaggttgagttattaacgtaaaatcgtaagaataataatagccttcgtcatgtgcagagtatccaataacccatcccgccacgcccggactgatttgacactcgtttacaattttgaatatagctagtagatatgatctaaatttatttattttcataatttttattttctcagttaacctaaaactacattacatttcacaaccatatattgtacactggacaaattaaaatacaaactcctgaggaaaaccagagatctaacaaaagattttgaaggtatagatataaccaattaaaatattcttctaaacattgcttttaccacctaatttgtaaataaaaattatagatgtatgtataaattacatttttcactttaagttctttatggtttcatggagaacatgattaagattaattattatatatcacagaattttaagagatcattttacattagacaagatgccgaaagatgagccggttttaacaaaaagttaagcttaatttttgcgaaggttcttatgcattgaaaaagtaaactaaaagtctatattttaaccaagatttacgatttttttttttttttgcaattgattagttcg

SEQ ID NO: 48358 - DNA, 865 bp, Arabidopsis thaliana landsberg
acacccctacgtgtactaaacaaaatatcaaaccgggaaaactaattaggtgtgatatcccggtttagttacaaatctcagttggttaatagagatttgactttcaattgaatgtaaaaaccatataaaaattagctaagccatgtgcaatgtcattgagaaatgaactttgatataataactcgagaaagatccgaaatttaagcaaagaatcaacatcaatagttgcactcaattcacaaaaatcaaataaaccaaaacaatggccttcaagaaccattcttcaagaacaactctttcttcttcttcttccacttcattttcattcaggttcacaacaatcattaccttagcattcatcttttgttcttcttactacattttcttctcacagtttgattactctccggtgacttcttcaccggaaaatcctcctttcgcaggagatcttcgagacctgacattcccttggaacaaactctcacttggaccaatctcggagaagctcaaactcgctgtcttctgcaagtcatggcctgttggttcgatccccggaggaatggagcgtcatgcttacacactctacacttctctcgcctcaagaggtcacgagattcacgtcttcacggtttcttccgacagaagtaaccgagaagagtactacaacaaaggagatctccatgtctactttgctccaaacgaacacggctcacttaaccactctcgagcttttgagatcttccataaaatcaacagtctagatcatcattcctttgattatgttcacactgagagtgtttctctgcctcattggcgagtcaaaatggtgcctaatggtgacatagcatgtgacatggcacggaat

SEQ ID NO: 48359 - DNA, 537 bp, Arabidopsis thaliana landsberg
caaattggctactaaaactctattatatatataaaaaatacatttgcgatatagatcgtgcttcgttgacttttttttgttggttaggaatcgtgattcgttgactttagcacgatagaagtggtattataacacttgctgttaaaaagaacaaaaaaaaaaagagattgctaaacaactaataattgagtattaaacaaacaatagtaattattttttccaacggatttattggttctataagaccatatccttttgatccgggtaatcataaagtagatacatattgttatctaacattacgtgagaaaagagatatcaaagtcctacagttaaaaaaaagacagtttttccatttttttcatttttttgttcattcacgccatggattctgtggaggtgctacccattcacgaggtgcattggatgaagcctgtgagagataggcggatgggtgattgctgtggaatcaaattcgaagctattagtgatggctactcatgcaccgagtgtgattttttcgcccacaagagatgc

SEQ ID NO: 48360 - DNA, 597 bp, Arabidopsis thaliana landsberg
ctcaatacgaagaccaattcagtagttttattgacatcgtaaatatatttccagcgagaggcacatgcacaagtatgtatatcatcttttggataaaagaaaaaacctatatatatcgactgatgaaagttgtgaaactgaacaatgaaatcctatagcatttactttatttagtggccaaaaagtacattttcatcattagctgatcgatgtactttcttaataaggatatatgaatctcttgaattgatcaatagtttgaattatgaaattttgtgtcatgggttatgatgataactattaattaaataaaagtaacaatttcaaaacactgagatatcacgaacaaaaggagagaaaatgagttgcctttgcaagcaattatttttgtcggccacgatatatttctattatgtgttaccatgttgcgcgtaattatggcttccgatccaattaacataagcataattatgatggtagctagtaagaaaattaaaacaaaatataatcaatatggcaccatctttaaagttatgaaaagttagaaaggtaattatattcaaagttttgaaaataagttaatcaggttcaaaaaaa

SEQ ID NO: 48361 - DNA, 891 bp, Arabidopsis thaliana landsberg
tgttcagtatgaaattgaatgttccttgtgatgcacgtttgagaagaacttcccttgcttccactgcgatcccttgaggctgtagaacaaaatttaaacattatatttcatcataaatcaaatatttttaaaaatgaaggtctcttagggaatctagagagaaatacctcttctggaaaccaaacccctggttgtgtgcttccttcaagcattgctgcaacaaaagctgcggtcgaaactccaacggatctgtaaacacaacatgtatcggttctcatacatagctttatatatgtattaatgttgcatataagggatgttaaggagactcacactgatagttttttatgactaaataacccaactgtggtccgtccatccgagcactccaaatcaaccttcccaaagagtttaacataagtaacaatgagtcaccgaaataactactgcaaaattattttgcaattatctgttttttcacttaccctcattgagacacgctctccagcaaagccatccatggctctaacgacagggtcaaaaagctctaccatttgttggactttggttctgtctctaaggacctcctacagcgtgcaagacaagcattgcaatatgactacaggtagatataactgatcacaggaccattgattcaggtaaggtctgagcatgataccgatggtaagagttttgtcattatctccattccccagttccagaagaaaggagctgtgccgaatcgagcaacgacagttggcactcctagaacttcatgagttgatctcacctctggcaaattcctgaaaaaaatcactgatctaagcaaatccttttcagtgtgtcaatgtagcttttgatatggaagggtaacttacaaaagataaacat

SEQ ID NO: 48362 - DNA, 727 bp, Arabidopsis thaliana landsberg
aactatcaataagatacaatttttatttttttcatttaaaaaaacaaaacttgaatatttaatatctaccagattaatgacaaaattatacaggtgaccagacataattaagaatccacttggctcgtgtttttatgagtccatcgtggatggtcttatctcaggggaataattaaaaatggagtcaatcatcgggaaaactacatgtggaaggtatgatgagacaacaatagcaagttaggatagtgatagattcatcatgtcgttatcattggatgttaggtctttcgtctagatgtcaacagcaacatcacgagcttttgccttcatcttttgtcaccgacatgtatcgtttaaccatgcattaagtgtttgtatagatcatgagattagcttacttatatgcttcgtttaataagctccacacaaaaagaacgaatgcggtgcattttccccaaaatgtatagtaaaatagtgcaaccatgtccctaagcaaacaactaaaatatttgaagagtctgatatgcaatagtagattgaagtttgatagaatgatatttttagatagtgtacaattcttacagaaataaaaaatttaagctcacttttttacgttggacctgagtcattgtgtaaatttaatgtttatgggtttaaacttcactaggaacaaaaatcacatgcatattagttgggaaccagtgttggaaccgtctatgttgccgga

SEQ ID NO: 48363 - DNA, 827 bp, Arabidopsis thaliana landsberg
tctttatcttcttttcttttgctcctaagaacacaaaatctaagagatacatcgttttgaagaagaagttaataatggaagcatgagtatatacatgatacatcattccgaaacctgataatttctcggagattgcctacgactctgtacagtggccaatattgctcatcataaatatcataattcaatgagaaatcaccaacaacagtaggatttaatgatgtcttcggaaaaccgttttctgatattataatgatgtatccgtaagaatatacatattttctctaaccaaatcatatcaaagctggtacgactataagtttcagtttgcatttactggttataaggggatggttttgacttttgagcaatgatcttgacccggggttttgagagaggagcaaggcaaagggctttcatatgtttcctctctagtctctacatgatgaacaaggcatttgggtttagacttcgtttaacctagtgtcgtcactaagtttctgttgtctctttataagttttagcttcttggttttggttttggcttttctatttgtgacttttgtccctctaactagttttggattcggtctctttcttttgggattagttttccaaagattttaccatattccgcatatcttttataattctcgtaacttagaaccaaattcacatcaaaaagaaccaaagattttgtctctctacctagttttggactagtctatattaaccgcgaacggaaatataatgtctaaaccaacctcactaaacccataaagtagcaggttgacaaatgtgcttaaaatttttcttctacgaataat

SEQ ID NO: 48364 - DNA, 790 bp, Arabidopsis thaliana landsberg
tgtttcttattaaaataaaaaattcttaaaaattatttatgtttgacccaaaagaaaagttttggtatactaattatggtacaaatgaaaattaaaatgtatacgaagataaaaagattccaataactcgcagattgacaaaggaaaggaaaactcatattcacaagtaaagacgactgattgtggttgatatgtatagaaagaacttcgatttttgataggttggttcacaatcacggaaatccaaaataagtttaaccgttgttggatagtcctagtatactataatttttttgtacttaggcaagctagttcatatagaatattttaggtgaaataaacgagaacaacaaaacaatatgaaataatctaaataaacacataatcagcggttggtgagttcctatgaacaccggataatacgcaaatttattgaattgaatgatcgagaagcactttccgtggccaacattatccttttatattttaattaacaaaagattggttataatttcactttgtgattatatatttgtaaggttgctgtagactttggttaagctaatgatgactaaacgatataggatccgtagctactttgctactagtataattttagtggctcgttaatttctatattagtggagtatctttgcagtgtcggatagtgggtttgaaaagttttggtttggaaagaaatagattatacaatatactatacacgttacttttaatttattggtcatccaaataaatatttttgtttttttcacccatcgcatggaaaaga

SEQ ID NO: 48365 - DNA, 761 bp, Arabidopsis thaliana landsberg
tgcagatttgatccctgaattatacaaacaccattttgaagtcaagaatattgtaatataaaaaatgacggatgaaatgaagagggtaatagaaaaattgtcatcactcaccatacataagagcaccctgcagtctcttgaaagcttaaagccaattctgttgagcgctctgggtctctccatgagattattgtgtctgtacattgaaacagataccaattatccaaaaaaccagaaaaccccaaaatatcttagctaattaaaccacgacgcaaaagaactaccttcttgtttcctgtaaatatcctcagggttgatgggatgaacaagtaacgtctcgttatcttcttcatcaattacacatagactgagttcttcagatcgctgcatcatatagtatttccatttagctacaaattctggaaatatgttttacataataagtgctgcagaatacccgcagcagatggaattcaggaagtcaattagaatcacaacagacctccacaaagtcgatgcttacgtgcccagttcctcgatcatcccatttaccatcttcattcaaatgatagactttcactctctgaagaatgaatacaagagtaagaaggatgatccaacagcgtattggaagaaagaaaagaaacccttccatctcaattcaacacatttcgtcaaaacaacgcaactttctagtgtctcaataattgagatcccgtttatctgaagaagtaagtctaccactggtcgaatagctactc

SEQ ID NO: 48366 - DNA, 298 bp, Arabidopsis thaliana landsberg
tagccgagctgacgtgggagaacgggcaactaggcttgcacggcttaggtccaccgcgagtgacggcttcgtcgaccaagtactccacaggcgccggtggaacgttagagtcgatagtggaccaagctactcgcctccctaaccctaagcccacggatgagctcgtcccgtggttccatcatcgctcctccagggccgcgatggcaatggacgcgcttgtcccttgctccaaccttagtacacgagcagcagacaaagcctggtggcgttggctcaacccgggtggggtcatgtagcg

SEQ ID NO: 48367 - DNA, 830 bp, Arabidopsis thaliana landsberg
tcagcatgtggaattatcggaacatagctcactaagtggtttcttatcattttgaattgaaagtgttctgttttcacctaatcacattctatgttaaggaaactaaacttattttttggagacagtcacctcagattaagacagatgccagaacacatgtagcagtgaacaaaatttagctatgagagttttcactaaatcaaactgataggatatgtagcttgtttggttgctctcttgcagaaaaagttaggtcaagacactatgacaggttttggccgatatactataaatcatggtgagaaatgcatgaatgtattaagtcttgcagaaagcttgggaggagctgctgacaatggaattgaggaagaaaagtctcgttgaattcattagaaaatggtacatctcttagctccatttgttttcaaatatcttctgccatttctgttgatgcaggttttcgacgcagaatgagaatgatttagcaggtcaagggttctaaaatccaaaaacattatgacacaaagttctactaatagttccatcttatgatgcagcatgatgtcctttcatagttttaggtactggtaaagctgtggatgtagagactatcaatttctcacatcaagcttccttcttgatacagtctcatatactgcagagtgttaatacaggaacttctacaagcaggatttattgctgttgaagatcttacacatcttcttgtccctctatgacatgacgctgggactaagatcctgatccactgaactttagcaagaaaatcaaattcacaagggttttcatttcagttgccttgtattagtaaa

SEQ ID NO: 48368 - DNA, 669 bp, Arabidopsis thaliana landsberg
acgacaaggttgcttgggattgagagcgtccatgacacgaatgtcaaaaaggagtttctttgaaaggagagatttgcatgaaaaaacaaatttttccaaaggctcaaaattatgtccgagctttcatgtagaacatgtctcgctttcactgtaaatctgcaacaaattattcatcccggaagctaaatctacaaacaccagaatgataaaaaaaaacatttcagtgtcaccattcgcaccggaagactagtgtttgcacaaaaggataaaaattgagaagtgattgatatcggcagacaggcaaaagatatctactgaatagaaagaaacaaaacttaactattatctcagagtcagtcaggtattggtcacaaactttgcaaagcctggatctgataaatggttgttctttaactgtcatatataagggatgcattcaaaataaggatacttacaagttacaagtctcaactacacgaaactctagctaaaccaagtgcattcctagctacaaatcctagaacgcacaagctcgctataaaccttgtatccaacaaactttgtctattccatgtgggagtagcataaacagtctatgacataaacactcgaaaatatgtgatatcatcaagatagagttcagaattttcgtccaaaataagaaacaag

SEQ ID NO: 48369 - DNA, 1272 bp, Arabidopsis thaliana landsberg
actcggttccctctttatggctatagattttgccttcgccatggaaactttacaacgcttttatatgtttcatcaatgccgtagctgtcttcatattttttctttgtaagagcttcaataattgtggtttttcttatgttttagatgttgcttaattagcatggaaaggaacattggaggtgagagcccttaggggattatataggaacatgaaaaggtacggccacaagtcatggctttatgaatcttgtcgtatgtttttaatttaacggctatatgttttacttaatcgcgcagcaatcttctcacagttcgccacgtggaaataagccatttgatgtagtggatcacttgctttttctagtttaaactttttgcacgttctcttttatcaaattgcatcgtgcctacaatttacgaacgtaagcattagatatttctatattacttctttctatgataaaggatctcaagaaattaagtctatgttgatttcgtataaaaatgtggcctaacgaggttgctttgccgatgagtcgggtatgtttttcttataaagtatcatgcgacataattcatgcctactatgaatttaaaatggttattatttttcgactagaagtcatgtttggtacgtcaaaaatatggacaaagtttttgtaaagccaacatggcgtttttaacattttaaatgttaaagggactcttgagtggttcgggtgttgaggcctctagactccggatcatacgttccaacaattagagcttctagtcgacaagtggactctagatcatacgttccaacaattagagcttctagtcgacaagtggactctagatcgcattgttgcggtatggttatgagagagcacttctgaagagcttcaacataaagaatttcgagagtaaaacatctcaaacggttttatttacgcgttttgcatcccgatcgattaatctctgaaatccaaaaattcacccccaacgagtatagttgaaatggatcgattagtctcaagtggaataactcttctgtaacttttttgtttgatttttgtttttgtgaaaaatgtactatttaataagaaagattaattagagcaattgggactgagattacagaatttgtaaatgacatagatacatccacaaggaattcaaactattgtccacttcttctttgaaaagatttgattgattagcaactttgtttttaaatgtgattaactttacatacgaaagcaattgtacagctaagttatctaaatagaa

SEQ ID NO: 48370 - DNA, 573 bp, Arabidopsis thaliana landsberg
tccagatgagtcatctaatgtagaaatgaaccataaaatcaaggaaaggggttgttggagtacaggagagtcagcgtctagagttgaagtggcttcaccaagacgaaaaactccgctataacctttgatcataccttggtatctgcagatacagatgacttttatgttctctttctgtaaatcatcataagcataaactttggatcaaggaatgacaaacctgtcaacaaccttagtggctttaccgacgcagacgattaatagaccagtagccatgggatcaagtgttccagcatgacccacctgagaaacactcatcagctagcagcgaaaaaaaagcatacaaattcaaatattggacaagacaaggatataagcacaaacctttttcactttgactaatcgtcgtagcttaccacagacagtgaaagaagtccatcctgagaaaaataccataaacaaatcacataacatatcatataccaaaagaaacaaaagagagatacatttataacacaaattgcttctcacctttaggtttgttcacgaaagcactgtaccgttggaccatcc

SEQ ID NO: 48371 - DNA, 689 bp, Arabidopsis thaliana landsberg
aaagaatccataagttatttggtgtattaattatccgttttttttttgttcacaatattgattatccgtttatagatatgtttccttttgatcaaaaacaaaaagatatgtttccataactatttcaattttttgttaggaattaggtaattttgttataatttttgattctttaacatataaatgaaagggattcaaacctacacaaccacaatctttaatgatacattactatgaataggatttagcatccccacatcttctcaaagattgaagaaagttattcaaaattcaacaaaataacaaagagaaagataataaatgcgaggacgtaactggtaaaatcacgaaactgcctgattcaccttcactattcagagtgtttccttataaatatctatcacacggcgcaaaacgaaacgctcaagccctcaagtttatcttcctcagccgtgtagttcaaatcccggcacaaaactctgtcgtcgcttccccgagaaaaggtaaacgaatctttcaccaacgattaaccgtttctaaatattaaatctggttatctttgatctgtcttttttttggttctatgaacaatttctgttactagtaatcacacattttcgggaggagtgttcttagatttattttcattttcaaacgaaatttgcgattgtgtgttttcgatttttcag

SEQ ID NO: 48372 - DNA, 433 bp, Arabidopsis thaliana landsberg
gtaccagtctatgtaaaccctaaaacgttctgctatctcagcggattcctctgttttcatctatgggtcctctgttttcacctacggtttcctctgcttgtatgccttaactcatcctgcccagttatgccttgtttattaacatggaaagcaatactttcgcagaccgctccatcgctcatctaaaagattgctccggcgagatacacaggaggactaatacgtcatgtttccacgttatctcatcacacattggaatcttatcaccaagttatgtgaactacttaacttccacgttgaaaaacggctggagatattctctctgcggtgccgctgaccccgctctaatcctattgataggatccttctctatccacgagacttcggctagtcttatcgaccgcggccaagactataaggggtagctagccct

SEQ ID NO: 48373 - DNA, 461 bp, Arabidopsis thaliana landsberg
gagagagagagagattcttcttcgtttcgtataagagtaattttattaataaaaaaaagaaaagaaaaagacacagtttaaacattacagttatatacagaaagagaaggtatatatatatatatatatacacgcacccatatgccaacacatggagattgatagagagagagagaagagaagatatttctcagtttcttcgtttgtattcttcttcttctctctctcttttgagatcttccaatctctctctctctctctctcttatatatgattttttcaaataaaataaaataacggaggctggtttaaagaacaccgatgaattctatgttcccataggctgaaagaaaaactaaatttttgtgtggcccaccaaaaggcttgaaattttgatccgacgatacttgagctgatttacggtattagtgctatttcgatttcctaaagattccgttttt

SEQ ID NO: 48374 - DNA, 536 bp, Arabidopsis thaliana landsberg
tattttgataaatttttaattttgtaggaacaattttctataaatgtagaaaatatttacagaagtatgatattattagaaacaatgatttcttatacaattaaaaaacatgtttcgctgtatattgagatattttctattcaattttgatatgaatagcatctatgtcaagaacagaggatacaaactttagtttaggttcatcgggataatggtagaataaatatattttataaaatagagcaattagataaattagtgtgacgtgaaagtataactaagtttaactagatgtattaaaatgttaaggttaatatctttgttattgttcataaaaaaaagatttttggtatagaaatggaatttaatgaagtaatgaaaattccagattggtataatttgtgatgtttacatgttgctgcatatagtttatctaaacgagattgtgacaaattattatccatggacaatttttgcgaggatattcttttgccgtgatacatcgtggaaggaaggaaaatcgaatttgttttgtt

SEQ ID NO: 48375 - DNA, 548 bp, Arabidopsis thaliana landsberg
  unsure (1)..(548): unsure at all n locations
gcnnnnnnnnnnnnnnnnnnnnnnnnnnnnnnnnnnnnnnnnnnnnnnnnnnnnnnnnnnnnnnnnnnnnnnnnnnnnnnnnnnnnnnnnnnnnnnnnnnnnnnnnnnnnnnnnnnnnnnnnnnnnnnnnnnnnnnnnnnnnnnnnnnnnnggcgtccttgaccgtcatggcgttcagggcccgatagtcgacgcagaagcgccaggatccatcagccttcttgacaaggaggactggcgacgaaaacggggagtcgctgcgtcggacgatcccttgttccatcatggctgcacactgacgctccaactcatctttgttggcagcctggtaccggtagggctgcaggcgaccggctgtgcatcgggcttcaacaggatgcggtgatcaatgtccccccttgggggcaatcccgttgaattgcaaaacccttgcaaacgctccgaggagagcatccaagagcgattcttcagcggacaaggcgcacaccgtcggcccgacgtcgtggataagccagccatgagattgtgcggcccctcgctggaggaca

SEQ ID NO: 48376 - DNA, 450 bp, Arabidopsis thaliana landsberg
cgatggaaacactcaccgcactttccatatatcttcaaaagctgggactgtgtagccactgtcctaatgagtactcgtctggcatctaaaaccatggaagcagtacttatgatcatggaaagcgattgatgagacaggacggaggctcagtcctacacatcacagccagtggtgagggagctctacgcactatccaggctaggctattgctggttagactaatgaaggcataccatacgaccatatgagtctagggcgatgtatcgcatagcatggaaacactatgatagctcttgtggaccaactggcggaataggggagtactcaatcatacacatgacaacgatacatgacagacaccgcagcactacatcaagctagctattgctagtaacatgctggagatggtgatgataacactccgtatgagctctatgaaccatgatacaa

SEQ ID NO: 48377 - DNA, 736 bp, Arabidopsis thaliana landsberg
gatgatgatggatccggtgagaaaaagagcgatgatggatccggcgatgggaaaaagagtgatgatggatccagcaataatgacgatgatgattacacacctaatgacgatccacaatcgacatggttcaaggtttttaaacttttagcaactaggcttctttacatcggggtcaagagatcatgcgaaaggagcgtcaaacgcaaatagaagtttctcaaatttatcaacatatctcaagctaagaagcttcaactactggctaaagctaaagggaaggagcatcaaacttttgtggagtacacttgcctaggtaaggcctccagagatttctcacaaacctatacctcgtttctcacttggtgtttctttggctctcttacttgcatctccttcgtttgggggtaatggaacacctctaaaacggatagaagcctagccgacttgtggttggagataaacaagaagagtgtggttatccatgagtttaagaaagagatgagtgccaaaaatgctctctacatgcaccggcttgatgagattacaaaggttgcaaagcaaaatcaggaagatcttcaaaagatcgtggcacttctcgtatctaaaaagtgaaagatgggtttagtttttggctctttcattttgttcttgttcttacagaaaatgattagatttatatcaatatctttatatgctaagaaacctctcacattttgtggatgaacactctcttttg

SEQ ID NO: 48378 - DNA, 1116 bp, Arabidopsis thaliana landsberg
gcaccagcgaagctcacccgccagcagaacagccagacaaaacagcctgcaatagtgtcataaacgttttagaccactttgaagggtcaaagtttgcaagagttaatggagattggagaaattttgtgaaggaaagaaaagctaacattctcggcgtttatcatgcctttagctagcagctcttgcataacggctaaccaaactcgagcacctctgaagtgaagattagtagcctgatcaaattaccattatgattatcgaataagaaagacaacactaaataaatctcatgtttctcttcttagtactcacagggttcactgcttctacatctcctgtgaatgatgccccgtcacagtatctaactttcactctattccaattgtaaaaatctgccatttccaagaagaaccaaccaaacccataagacaaaaacttaacttcatctttgatcaacaagttagtcaaaagcttccatatataccaggattatattgtttcttattgctaagaatagctgagaaagcaaggttctccaccattttcttcgatgaacctaatcgagtatgcatccgactaacgcaatttgttacattattgcaccatcctcctccctaaatcaaaccatttccaaagacactcaattaacttccacaaaaacttcatttcaaaatcatctcccaactccaaaaatatactaagccaaaagcaagaacaacaacagaacacaagaaaagaaagcagagcaaaacctcaagctgtatcaaccaactattgattccagttccagaacctctatccaaatgataagctggtggacttccatctaaacaaactgcaaaaccaaaagacatagatgaagaataaaaaaacacaaaaatatactatataggaacaataatgaataaatatataaacagaattaataactcaccggcccctttagcgactgcgtttcgaacaaatgtaatattgacaaacagtccttctgtgttcattattactaacgaatacaccaaataaatcaaccattgcttcaacttgaacatactggtgaaagaaaacaatcaaaataaataaatctaagaactttataaattgaagtacagatagaag

SEQ ID NO: 48379 - DNA, 706 bp, Arabidopsis thaliana landsberg
agagaaatttgttacaattttcattaaatttaaaattaggtttatgcatgagatctctagtgactcaagtcatggttaactttaaactgattagttctatatgtattaactttaccactcctacgttaaagttaatccagctcagattagttgaagcccaaaaaaaactatagtttagggcccatttcacttaacggccgttcattatgcttgaaaccgctcaacattaacgtggtaatttattattatcctttttagacttatttttcatgaatttagatgatacagtagatgttgtcattagatttgtactagtttacttttaatgtgagattctatcaaccttctgtcgctgagattttaccgtaatcaagttcaaagtttagaagtttttgtttgtttcatcaatctctcattactcattaaacattcagacaatatatgtcataccatttacaaagataatagcactatatatcataaatttagtaatgcatatagtataatacatacatatgtggcaaagaaaacagtttcacaaggatatatcatggataagttcgtcaaccaaggaagtgaggaaaccattccccaactcttcgaccacatactctttctcatccccactgatacaaccccatttcatttccttcacataaatctctcttttctcgctcactttccaactcatgaacatattatattc

SEQ ID NO: 48380 - DNA, 849 bp, Arabidopsis thaliana landsberg
agtggcctttcccaaacacttggtggtccaatacattcttcgaactaaattccaacagaactcgaattatagcgggaatttcgaaactaaactcacctgtatttgaacaaacctcagctgtcgcagagccaaactgagaatctgaggaaaaagataaacttcgagttctcgaagaaagaagaagctgtttctggataaagggtttgttcaagatgattccttgaagagaattacatatagatttggagtataatctccaaagagtagccgccatagtcacaggaatggagaagacgaatttaaaaaacaagttcgtattttaaagctcgaaactttatttttctcccaactaaaaaagcattaaactttagcagaatacataaacattcctataaaagtaaatttagggtttaaaaattgaatcttcctccattgtgtgactgcaaaaacctaacgtgcagacaaatctgtgagagaaacatcatttaaagaaatcgaaaacgacgctgatcttctgaagaaaccaggctgcgatggttttggaagctgactatactcataatcagagctaagcattgaaacaactgaatccatagttggtctttctgtaggattctcttgaacacaagacagagcactttctaagcattgcattgattctttcttgtcgtgacgtttgcaccaagaacaggatctattagttccattgtgttccttcaatccaattttgcccagcctgcaacaaagatgagagattgacattgattcttgtgtgtttgcctgtgttttttctctcctcccctactctccccttttccttttcttttttctctcctcccctccctctcc

SEQ ID NO: 48381 - DNA, 722 bp, Arabidopsis thaliana landsberg
gtatatgaatgtacacattaaaaactaaacaggaattctacccaaaaaaaaaaactcaacaggaatgaccaaatttgaaaactatcctttggtttagatataactatgcaattgtagtatacagccaaatcaacataaacaatatcaaatttcaaccaaattaaatcgaaccggaccaaatcaaatcaagatgaaccagaaccgggtttcatactccaaaactaaaaactttacattcaagcaaaccaaacaaacactgaagctaaagctcaactttctttagtgtctatacaaatcgcacaatcactgaccaaaagatcgaccatgcaataagagagaacggttaagaaaaaagtcacaagtatgatccagtatatatcagctatgatctaacattggctagccgatatctaatggcctctagttcttcttcagcatcaactccttctacaattgcatcttcctgcaatacattatacgttcccttttcagatttgatctcttcctctctgtaactattccatcttttttcatgtacttgcaatcattcaactgcaagagttcttaccccgtgtaaagtttccgccttttgagctggaacattcatcttttgcttcctaactgcttccgggagctcagctgcagtctctccagctatggcagtcaataccttatcaacctcttcctcgatctcctcttcaatatcctcagaatctaaggca

SEQ ID NO: 48382 - DNA, 335 bp, Arabidopsis thaliana landsberg
agaccatatcctacgactcgagagaactatgacccgcgggtattggaaaaagagtactatacgtatactgatattcgcaattttgtagatagcgagaaagcataatgagatgcatgtgcatgggatgggcagatggggcccgcggcctttacaaggcccataaagctaaatgaagaggagaggaccacgtggcagacgagctagctagtcctacaagtggagaggatactatgaagtcacaaagttagaatgagttgaatctcgcgaccgctctgtttctactattggcaatgcagagaagcttacgactagggttccagagctatagccccatc

SEQ ID NO: 48383 - DNA, 582 bp, Arabidopsis thaliana landsberg
tttcctttccttttgttattgtaagtttatgggaatgtcaatgatgatgaaacaggcttgttgcaaagacaacgcagttggaaagcgagaaagtgcagaaagaagcagaggttcagaaactaatggaagagaatgtaagactgacggctcttgtggataagaaagaggcacagcttctggccatgaatgagcagtgcaaaatgatggccctaagctctatatgatgcttagagatgaatattgctctacttaatctttcttccacttgtaacataaagaaactcttatttgatacaacttccatgtttgttgatatcctaaaggcaacaaaatatttgtcctggaagactctgtatgtgattgtacattcttagcacatgaaattgcgttattgtttggcttaacgtagcttgcttcggggtttcgggttttaggcttgataggattggctgagactcgtcagcttctttatttaggtagaattgtaaacaggtggttttggtcggaccgaaaaaccggttaatgattggcggctgcacgagactgtatgggcattctgttatatttccgttaatggggttt

SEQ ID NO: 48384 - DNA, 284 bp, Arabidopsis thaliana landsberg
  unsure (1)..(284): unsure at all n locations
ctggcaagctcttgaggatctgagtggccatcgcttatacaatagaaatattttcacataggaaggctaagttcttttatttatctgtcttggtgctatagacattgacagggggtgtcttgctgctcagaaataagtattacattgtaatatatcnnnnnnnnnnnnnnnnnnnnnnnnnnnnnnnnnnnnnnnnnnnnnnnnnnnnagaattaacgaaagagattcaagatgtcgaagagagggtaagaaatcgtgagattggggctgttcagcctgttggt

SEQ ID NO: 48385 - DNA, 1180 bp, Arabidopsis thaliana landsberg
ttttacccgaaatatctacctgattttttttttttttaaacttcttgtgtaaaaatgagtgaaagttttaaataggtatttcagtgctagaattttataatccgtcagttgtgtttaggttaacagctgtgattgcctgtttggtaacaaatgcagctttgagcttccattcaaagaataattctatgtcaatgattatgctagaggataatgattaaacgaaaacatcattcctcaaaaattaaagcaaaagttaaacaaatatctaaagtactctatattccctctatataaagaaaagaaaaataattgacaagtgacaaaattgattactttatggaccccataatttatacaaagttccaaaattttcctcccttctttccagattttacacatatctcccgacactttccacggtttcccaaacaaccccgaacaaaaaggtaaaagaagaaagaaaaaaacacattttttgttcaagtttcaaagagacaagtttgagttttgaatcttacacaaccccaaaaaaaaaaaactcattcatctcttgagctgaatatccatcttgcttttttctaacttttccattatagatcctacaaataaaaacatacaattattactacaaaaatattctgttcaagatcatatatatgttaccaataaataaaacacttggcattaaacactaaaacgttttgaggaacaaactttgactcaccaggaggataacaaacaggaggatcttcaaagagagaacgagagatttgtttatgagcaacaccgatatcgaagagaacaagtccagaagaaggatcattcactgcaatgcctttaacaggtaaccaaagaaaaagctcttcttgtgttaaaccttcaagtccaacaagcccaccatagcttaaatttgctttaatcacacgatcaaaatatactctgttttcgaaccgagcgaaacaaggattttgtagctgaacttcgagctctcctgtcttatcatctagactataactctccacgttgtctggaaacaaaccacctggtaaaccgcgagcttcgaggaggtttcgaatggaagattgcgaagatggagtaatgaatgggacaaaaagaagaagaagaagaagcatagacatattttctttttttacgtgtgatggtgagatttgtggtttta

SEQ ID NO: 48386 - DNA, 1322 bp, Arabidopsis thaliana landsberg
aaagcaattaaccaaagcagcattcgacgtaattgtgaataacacttcatcccccatctgattctgcctgtttcttttatctagaattcatctctctttctcttggggcgtcgagacatggatttatatatccaagcacagagaagaactgagttaccaacaagccaaactatatagataacaaacacgaacacaaacacacgcccagggtttattttctgctgtcacaaatataaattagggaccctctcatattgtatcttagagcatatcgtccatttaaaaaggttagtaccgcttccaagtttaactcacttttgttaatatggaattttaattttccacaggcggaccaggggtatattggacttttgaccaatataactggcgattttatgcatacatatcgatatattgaacttgtaatcacattcattgttaacagggaacaatttgcgcttggattacgttcctcttcctcctcatctcctcctccaccccgccctcgacctcccaaatcctatatgcctcccttctaaatcgcttaaaggaaaaggcccgtaagccaaactagtctccagaagtgacggataagaggtcaaagaaagtgagttgtcagatgaactggcaagcttatcatcaaattaaaaaagaaagaaaatggtgaaaacagtcttatagtaactgaacatttgcaaataataatatctgagttttacaaccgcgtatttacatatgcatactattttgcaatattaaattttagagttgtctacgtcgaacgatcttattcagtagagttcaaacttgttggactttttaggcagcaatcattgaattttagtacataaaaacaaagaaaaccaaatgtagtctagtgccgacgactgttaattatgagtcagtgcatatatatatatatggacaaccatattcacataattctttaagaaatattattcatcaacacccaaataaaatattgaccaaataacatagcgacgttatttttgttttaaacccgctcgattacaccggaaggatatgaaaatgaaagacgggtggccacaatcaattgacattgatattacacattttagataacgattaaataagaatgttttcgattggacaattgagatacattatgaatagaaaatcttattaaaatcaaagatacattattttgtttttattttgttcaaagatacattattataacactagcatatagtttacgcaactgatttaaggcatggtcgaaggatttacactaggattaggagatcatggttcaactagcaataatacccgacttttct

SEQ ID NO: 48387 - DNA, 855 bp, Arabidopsis thaliana landsberg
tttaatacggtcaactatatacgacatccgatgcgataggaaagaaaatcataaccaaagtttggtgatatcttcagtttcagtatgctcattgtggtgatacacaaagatttattatggtcaacaataagtcactaactggtatcatgatatatatttcaaggaaaacctcttcttcagagaaaaagatatatttctagaaatctcacaattaaagggaaattactgcaattataaattttcaatatatgaccataatataactgacactttaggaatctttgcaaattaattatttgatggtaattttagattatttcttaacattgtgaaatttttgtaaatcaaaactaatcatagtaatgataatattaataaattccaacgagaagggatcataatccatatatattaattatccaaaaaaggaaacaatgtcataatttttaatagtaatttcttaaaaccaatttattattaacaggtggatgatgatttaaatgcataagaagagaaaagaaaaaaaaaaattatatatgcaagtaaagtcatattactcactttgtcgttctattattttttctcaaatatcaatgcatattttattatgactattaataatttgcaatctttttctattggttaatttttaaaataaatgttagatactatatttatgggtatttaatattagaataacaaaacatttatggtctcttaaactttgtgcttatttagaaaatattataatctggaacgttgggagtgtaaattagctgtcaaatatatgatttattacttaaatgtgtttatcttatttaggtaattcttttaataaatattttggtttgactc

SEQ ID NO: 48388 - DNA, 950 bp, Arabidopsis thaliana landsberg
gttattggaatccttacacttcctgatcagtattcacgtcgccattttctccggatgatctacgggacacaaaatgttccggacggtgttaaggttgatgtgaagtttgtgttctgtaatttgactaaagaagaccagaaagtgcttgttgctttggagattatgcattatgatgacatcattatactcaactgcaatgagaatatgaacaaaggtaattggtttatcttggtttagaattccaattattcttcttttggtttggcatatatagacttgattattatttggcataatcatatagaaacttggtaaagaagtttttggtatataattgtaacattttcaactaattcgatttttgcaaatatctacaggcaagacttacacatacttctcaagcttaccagacatattcaatgagaccgatgcacaaaaaccaccgtaccattacgtaatgaaagccgacgacgacacatacataagactagaaagtctcgttgcatctttgagaccactccctcgagaagatctttactacggctatgtaattccatgtccaagcatggacccatttgttcattacatgtcaggaatgggttacttagtgtcatgggatattgcggtttggctcaaagactcggaaattcccaagaaacatctagaaggtcctgaagacaaagtgtttggcgattggattcgagaaggaagacgaggaaaaaaccggtttaacgctaagtggtccatgtataatttccctgagccaccgactagatgcacacatgagctttggccagacactattgccgttcatttgttaaagaaccaagagaagtggatacgtacattgaactatttcaatgttactagcaataacaagccttctaaactataccacataccgtagatagtctttttgtttgcttttaccggattcttatctgagagca

SEQ ID NO: 48389 - DNA, 1431 bp, Arabidopsis thaliana landsberg
caaaagccagatgtcacgattttgtcgtaaagattagaagagtcatcattcgttgagtcatcatcactcacggtttgaagaagttttttcctggcgggagaatctagtttgaactgaggatatattatcttttcctcagtttagactagctcttatattctgcttgctgtttctgcagatcttcaggctaaagaaattgctgtttcataccgtaagaagattcctacatctcgcttttctgctttaggtcaacgttctacgatcaaggaagggaaaatctctaagagcagaagatcgatgatggctaagatttattcttacatttcagagtattttggtgtgttactgaagcacacagagcatatatccagaataaagtcaaatatatctatttcgttctatatgaagtatgaaccatatattaccacattagcctagcctataataaacaaaccagtagtatgatcttcagaataacttgtgtggaataatccctgttataatcttcacatatgtctacaaaagaaaagatcaaataacatatcactacaagaacacataccatgatctaagcgtttatgtatttttagacagagaagcaaaagaaaagagatttcactttcattagttcataaggataaaaagaaagatgcagggacaagcatgtgctattttcaatcataccttaaaagtccagaagaagctggggaagaatcctctctaaatgagtagcttcaatcttttccattccctcagcttcagcgattatagcagcgcgctgcacagcctctgccaatgccgataaaatccttaagatagcttatagatacaacatgacttaaagagaaaactaagtagtttctaaaatgcaaaacttgacctgagacaaaactcttgagaagttcacagctgagttttaaagcatttgcgtttgctacaagaaccaataaaccataaatattcatgtctcatctaccaattaacatgacaaactaagcaacagtgtataaacgaaccagaagcaagtctgttcttcttggttgttcccagagcaacctgcacatattgcaaatgcataatttagcatcagaaatagtaatcttcctcccttttttgaacattttgaatctttgaaatcagaagatcatagctgttacagtcatacaccagtatctagtgaaggagttacgataccaaatgataattccaatttattcttgcggttttacttttaatagaatacctcagcttccgtagcatcaatggcatcgctcctctccctttctgcatcgcaatcgaataaaaaagctcgcagataagatcaacataaagcgaataagttactctgagaaaacaggatgtgtaccgcgaaatctttgggccaaatgtgcttaaaatggcgtgaatcagatcctaattccatgaaaatcg

SEQ ID NO: 48390 - DNA, 600 bp, Arabidopsis thaliana landsberg
gtataacgaaggaatgctgagtcttaatgtataaccatgtagacttttcccttttagcaagcttgcagtcgatgagattgctacaaggacacttgtgatggatactgaatcagggaagataccttgactgagcatcagattgaaaaggtcaatcgacagttctggaaggttgtttcggctgtagcaagatatcattgaattccaggcaaccatgttttccgtgctcatgctagtgaaaactttgagagccatttctggtaagccacacttagaatacagatcaataagggagctgccaacaaaaacattcagcactagcccagttttaatcatgctgccatgaacctgaaggccaaacctgaaagcctctaatccagcacatgcgtttgtaacgctcgtcataatatcagaatcaggtttcaagctatcatcatcatctttcatgtccccaaaaacttttatagcctctttgaattttccattcttgcaaagtcctgagatcagggagccccacgcaaccatattcttttcttccattgatttgaagactaagtaagcatcaggatcacatccacacttggaatacagagtgagtaaagc

SEQ ID NO: 48391 - DNA, 998 bp, Arabidopsis thaliana landsberg
aaacccaaacatagcaaatcaaaaatagtaaatccttcacatacaaatatttattcatttataaacgcatgaattttcatttttataaatattaaaaggtttctgagtttaattcatgattaattataactaaagatactaaaattcataagtagattgaagtagctcaattgaacaaatctcagcaaaatacatagtatatatgagatgtaaattcgattgttcaaatgtcttttcattaggacctgtgtaaaaagttttcgagagaagaattatagcgaggtttgtttcaagtttcaacaagaaaaaacagaaaagaatcatgtatataaatcaatcaagtactgataatatagaagtattattggaaacaaacaagaagagaagtaaattcaaagacaaaatgatttagaattcttggagaaggaaaaagaagaagacagcgtggagaaagagcccagaatgttgaacgtcgtgtgggcttcactctgcaccaccaccccaaaaccctagttcataccctatcctataatttatactcaaaattttctcatttcttctattatttatcaccattcatatggaagtatatatttaatgaagaattttcggatctatagatcattatatgtaaaatcagtttttgataaaacatgtgacagtttcacaaaaatagttcatctttcacaaaaatagtactcgaatccggtagcattttagtatcctactatttagtttttccactccttttcattatatatataatgatataagtctttttacctctttttcataagtctttttaactctttttttctttaaaaatgattatatgcacatctacttgataaactggcggatggtaaacttgagttaggtttgagaattttcactaattattttaggatttgaatcttctctagtatgagactattaagctaacacactcgaagatatattcagatcataatcaaaatttatccggtggatatgtatga

SEQ ID NO: 48392 - DNA, 383 bp, Arabidopsis thaliana landsberg
  unsure (1)..(383): unsure at all n locations
ttctcgcaaacgttggtagccgcgcgtgtatgtcggcacttgaatagcctcttgaaaacctgtatattccccgaggatgagctatcacgcggaaacgctcgccttgggaactggagccttagccggccttgatcaagaaaccaccggtcacgcccggcgtgccggtaatgcccgacggttcaacgnatccggtatacttgcgtgagcacatgttgcccacgccggagtatgcgtaggcagggccggtgcaacgtacanacctgaagcgtgcccatggagtacctgtataagcccatggttgatcaaggactaattgaacggccccacctgagccacagtagtatgtgtggtaggcccgggggagatagtatgacacctgcctg

SEQ ID NO: 48393 - DNA, 458 bp, Arabidopsis thaliana landsberg
tattcttcttcattcaagagttttactgaatttacgaacacgctggtctggtccggtcacaacatactacttttacttctattacccagaccagagccccatctggtcccagtttgatgaaattgatcgtaaactacaaacatttgtataaaaagcaaagataagtcaaaagaatgacacctaaaacccctcaggtagtatttctctgcaacctgtacttgtgagaatcaattatacaaatgattttgttactaaagaaaagaccgaaagaaagaaagaaagaaagagacgcaaatatgatctgatctgattagatcggcgcatagattacccgtgggatcttgggattttgtactgttttttcagaaactgagatgcctctgaatcgtttctgtggcaaagcactcgtaccaatgtttgggtgtccgcttcaagtttggcttttcctccttgctgca

SEQ ID NO: 48394 - DNA, 187 bp, Arabidopsis thaliana landsberg
  unsure (1)..(187): unsure at all n locations
cgccaaaccaagggcaaanaaaggacgcctaacggccaaccaccgcgaggacaaaccaggcnanngnaaccaggcnaccanaagcngcnncaaaagcngcgncaagcgaaaccnnnnnngcgagagaaaaggagaccgnccaaccnncncagaccaangcaaaacnaaaacnnnaagaaccccgcaa

SEQ ID NO: 48395 - DNA, 565 bp, Arabidopsis thaliana landsberg
tgtctcgggtgtttaaatgaaggctgagaagcgtgaagctgagcttatcgatacaacaatacgcgaaaatgtgaacgagagagcggttttggagatgttggagattgcttgcaaatgcattgatcatgagcctagaaggagaccactgatcgaagaagtcgttacttggcttgaagatcttcctatggagtctgttcaacaacaatgaaaaactcctctataagtagctttcttagtttcttgtgaatgaaagagtgtagatcactggttttaatctaagaaacttggggtatacatgtaaagcaaagaacttttttttttgactcaacatagtgatcagacttttctcatgtcacagtccttatgacacttgggaatcaacctgacaagccacctgttccttctctggacactaacttgatcctgaggtacttgtgtgagagtatatgtaatgtaacagagtcgtgttctgatgtctgtaacaaaaaatggcggctttgtttaatgttaagagaggaatcataaacatctacagaacatcgccgagacagcacaacaacaacac

SEQ ID NO: 48396 - DNA, 169 bp, Arabidopsis thaliana landsberg
ttcttctgcagagttttatccttatccgttccatcaaattctctctctgtaagttttctgttgatttctctgttacatactctgggttgatttctctagatttagaattcaattttttccccgaaaagacgcggaatttcgatttgggtgttgaaaacaaaattagggt

SEQ ID NO: 48397 - DNA, 222 bp, Arabidopsis thaliana landsberg
  unsure (1)..(222): unsure at all n locations
cagacanaagaaaaccncngaanagaagacacacnngacaccacaccaanagcanccaagaaaaacaagaaaaggcganacgaacgacacagaggagacaancgaacacannaacaaaaanaaacaaacaagaaaacangggcaacagccccccaaacacacaccaggaacggccggaacaaaacaaccccngcagaagaacacncaagggcaanggggaaa

SEQ ID NO: 48398 - DNA, 575 bp, Arabidopsis thaliana landsberg
  unsure (1)..(575): unsure at all n locations
cagtcaagaagtagcggtacacgatccaagcgttaccgttacaacataagttcccgtcatggcagtagttgagctttttcgcgtagggttttgtgcagtagaggtatatgtacccggaccggtccacgaataagtggcacctgctaccgtggttgtacttaaattaatggtagcgccctggcaatatggccccgtattggcggccgcggcagcaggcgttgggttaactgtcacagttgtgctggaagtgctgctgcacccggctttggtaacagtaacagtatatacaccactcatggctgttgtggttcctgttacagtggggttttgcacgctagaggtataaccagcgggcccgctccacgaataggtggcaccggttactgctgttgtatttagcgagaaggaagtgccttcacaaacagggcttgtattggtggctnnnnnnnnnnnnnnnnnnnnnnnnnnnnnnnnnnnnnnngaagtagcagagcatccacctgctgttactgttacggtatacgttccggccatggctgttgtagcgctggcacgggttgggttttgtgcacttg

SEQ ID NO: 48399 - DNA, 654 bp, Arabidopsis thaliana landsberg
tatttaaattccttcaaaccaagaattgaactggggagctagatataaaaatatgactttcgccactattgagtacatctgttatgttattcataacataatggaaaaaaaaaatccatctatcgtatattcgtatgtaagttttcttctttcaagtctgcgatatgaaatagtgtgtataatcattttctcctacataccatgtcatatgggtgccttagagaaactaaactttgttataaaatgaataaaagacaaagggaggtatttttattctttatgggaaaacccgaaaattgatgactctcgtactatacgagattcttacaacttttgttgacatatatcgagtcaagctaagtcgtaaacttggaattatcttatttgtcatgagaatttgaatatctgtgtacgtacacgtgacttgacttctttgaagatctatgtgattaagttcaattttaaaaaagtacttaaaaattttttgtcgaagcttttgataactttcttttgatagtgaactaacaccaaaattcccaaatattattcttttagaacccacttgaatatattatatatatgatgactaacctcatcacactttatgaatagaatggaaaaatgtataaagtgacattaacaataggagttttg

SEQ ID NO: 48400 - DNA, 965 bp, Arabidopsis thaliana landsberg
gtgtgtgtgtttatcactatcagaccggagaacaagttacgcggtcgccggagatttagcggaaggtgaaggaaatacagagaaaggtatatactaccttttctaggaagtgaacggaaatggtaaagctcattatttttctacttgcttaaaacctctaaaccaggacccaatcactatggtcaaatttaaaccggttctgatttaaaccggattaggctgcaatccaaacctcagctcatcttctgcacacagctcaagtttccgtctttctctttcggttcggtgaaatggttcgtctgtttcttacactttctccggcgatttcccgattcaatctttatccaggaatctctattctagcgagaaataataattctctcagattacaaaaacaccataagcttaaaaccaaaaccccgactttctcgttaatctctccttcatcttcacccaattttcaaaggacacgtttttattctaccggaacaagaatttcctccttaccctatagcgaaaacccgaattttgatgataatttggttgttctgggtattgaaacgagctgcgacgacactgccgcagctgttgtaagtccgtttaatcacctttcttcttcttgtcgtgttaacttatagtattagtttactgaacctttctgatgttggaatgtgtggcttttaggtgagaggtaatggtgaaattctcagtcaagtcatttcttctcaggtaacgatcactcctttgctttagtggattctttggcgtgcttttcatgtttagaagactccagtaatgacttgaatacatagttttgtctgagaaagcctttcactattaaaaattgctatcctttatatgactcgttaagtttcacctgttctgatctcggaattggcaacattaaggcagaattgcttgtccaatatggaggcgccgctcctaaacaggctgaagaagcacac

SEQ ID NO: 48401 - DNA, 869 bp, Arabidopsis thaliana landsberg
agagagttcgagagaaacatgatcacaaacctgttttcatcagtttctttatggatcgagagaaatttcccagggaaagggaaagcagcccacatacacagagctagtccaattatcaactccagaataaccttaagaaatccaatcatgagacatatcaaatcataatcactgctgaaaaaaattcaaacacaattgaggaaaagaaaatcatatatatatactcacattaatcggtggtcgagaaaactcttcctccataatcttcagcaatcctctatctgaaacaaacaagagaaacccaaatcaagatcctggctcaaaaattaaagtagatctgactcaattggaactggaattggattgggaagagtagacatacattggattgttgaataagcggcatgggagagaatcagaactccgaaaactccaactaagaaccctaaattcatctttagaagttctctttttttgttcttcttcttctctaagttgattcccgatctggattttctcgtcgagtattcttcgtcgagaatcgaactagaatagaagacgatcagtggagtttaaaaacggcatgtagttataatatcgcaaatctcaaagtgaaaacggcgcaacgtctaatatcgaagagactaacaaacggggcgtagttctagattgatgatatcctagattcctattaatcttttgtatcccaaactttttttaagtaactaatatttttaattagatgaaaattcggttagtttgataacttttttacaacaataagggtttatcttttgggaaaataattattttttcgtataataaataattatgaatatttatttaaaatttcatattgattgagatat

SEQ ID NO: 48402 - DNA, 555 bp, Arabidopsis thaliana landsberg
gatggtgacgagaaggggaattagacctcaccctgtgtcgatcgcttctctctctactgcggctcctgctggtgcttggcatgtctgttgtatgagttgcaagatgtgtgtggagaaggaaaggttaagtgaatcgcctcccaacctctggtgacgttgctccaaatgaatggaataaactatacgtgactgtcaaatagaatcaaaacatcctgaaccatatttggaagctttttttttttttttttttttttttttttgcaagtgaggttggtcctgacactttttttttgctttgtcatttgcactcattcaacaatgtcggaacagcaccatcagcatcgttccaacacgaagctcaagcagcaaaacaaacccttcaagtcaaagcaccagtcgaagggtagcttgagagacaaggccaaaggcgcatttttaattcttctactgagcttcagctcaattgctcttttaaagcgcatatgcatcaaataccagatacatctccccttacaattcatcctccttaatacgacttcataggcaaggtcgagc

SEQ ID NO: 48403 - DNA, 414 bp, Arabidopsis thaliana landsberg
  unsure (1)..(414): unsure at all n locations
tcccgtgtatatcgtttcggatatgtctaaagatagtccgctgtacgaaataagcaggtctatggatcttntccatttatttggtttcgacctnnnnnnnnnnnnnnnnnnnnnnnnnnnnnnnnnnnnnnnnnnnnnnnnnnnnnnnnnnnnnnnnnnnnnnnnnnnnnnnnnnnnnnnnnnnnnnnnnnnnnnnnnnnnnnnnnnnnnnnnnnnnnnnnnnnnnnnnnnnnnnnnnnnnnnnnnnnnnnnnnnnnnnnnnnnnnnnnnnnnnnnnnnnnnnnnnnnnnnnnnnnnnnnnnnnnnnnnnnnnnnnnnnnnnnnnnnnnnnnnnnnnnnnnnnnnnnnnnnnnnnnnnnnnnnnnnnnnnnnnnnnnnnnnnnnnnnnnnnnnnnnnnnnnnnnnnnnnnntgc

SEQ ID NO: 48404 - DNA, 210 bp, Arabidopsis thaliana landsberg
ctgattctcagactcgtgtcttgctctgcgctgatccatgtggaggtaatcggggaatagccatgactatgaggtctagtcattttcttcgaaccctttctttcgaagggtgggaagagatgagtgagaacgaagataagatttgtgcagagctgctcaaggaaaagggagcgataggatcatgcggcggatggctacctacattgaagg

SEQ ID NO: 48405 - DNA, 1440 bp, Arabidopsis thaliana landsberg
  unsure (1)..(1440): unsure at all n locations
agatatggtagggaaatccaaaaagaaaataatagcaatacctcacatgtccgggctaatccagcaagattaggaatacgatcaaccaatgcagccacaaggatcaaactctgtcgaccagatttcaacctttcgacctccatgcttctagatcgtaagagctgagtcacgagctcatcttctttttccatttctgaaaacttacttgtgtcggtacataatcatgtttacaaaataatagctatataatatttgcataccaaagagccgcttgtaagtttccccgtttcggagcacagaagttgaactagcatcttgcttctcatgtttggaaagagtgatcttcctctggaaatccaacgaagatggctcagaaagcctttcttcatctgtcgtggacatgatcaaccgacgcttgggctcttcatcaatcttgaagccttcattttttatggtaactacatcctttgccatggaggcacggagatcttcccttacatcctgcaagacttgaagataaggcaaagagacagaaacaaaaaaggaaaaacaatcttaaatatgtttatttgcttacattcagaaaagagagcacgttatccatgaggcatgttggaacacattcaaactcactttcctgcacaacattcaagaaattatcttaaaagtaaaatggcattgaaatccgaaagcagctttgtgaaattaaagcaagcaaatgtctgaagggtcagtagggaccacaataaaataatctcaatattgcggtcacttggcattatgataaatttcagaaatgtctcaatatttcaattatcccattggtgcaagtacagcttgaagattgcactgttacctcaacacgattgacaaaaacaccggctggagtagcagatgtgctgggatcatatgcatcaagaaatccttccattgatgctcgcaatctagaccaggagagaaaagtcacaactgaatttgtgtagtgaaccaaaaccttctagatggctttggccacaaaagattgtttctatgaccaacatgagaaagtataatcacacttaagtagaaccacgcaccttgaacaatcaggattcttgtccaggtaagacttcaaattctcaaaagaaagtttctccagggatattgtatgagaggatgtagactctacagggggaaacagtctaaagagtactcgatgcactaataactgtcaaaccccaaaagaaattagaataagactgatactctagtactctaccaaaacgaagacaaaaatggcatctacataagataaacctgcgcgaaaccacgtaagctatgatgatgagaagttagtaacggtagtattggtggaaagaagttctcttagatgtgtctgttgagctatcttttctgcgtggaggataacattggctgcaacaaaacatangaggagagagc

SEQ ID NO: 48406 - DNA, 946 bp, Arabidopsis thaliana landsberg
taaaaaatggctcggcggcctgttaacaaattgctccactcccgactaaagactgcatatgtcaacggattccagtatctgtacaccctactctgggaaacagcctgctcttggtcgtgaattcccctcgggaatatcgacgaacgttcgagaaggaagcaactatgggttgagaatggattatgagtttcctcaaacaatggcgttataaaatcgcgatttctttttcttcttcttctgtttttttttcgtccaaaaaattgttatttatactggttaccgcgtggggttcacgcgcttcatagcgcgtatgatcaactttacagatttcacaacgactttttttacattcgtatttttattttaataaaattttcaattttcttataatttgcatttttaatcacatagttaaaaaaaatttaaaatgctaatatagccgtcaaataatttttgttgcaatcgtcaatagccaccgattaagacggtggtcaacttgttagtggatatggccacgattaggtggtggcactcagttgcaagatagccactgtttttcatatggtcatatgtatgtgtatttgtggccaaataattaagaccaatttgctaaggccaaaaagtgattcgtttagtcattgctattgttcggatcctttatattgaagttggagaatgattaaccaaagctaaaatcacccaaatggccaaatcgtaccagcaatcaatgcatgatttcttaactcttgtttctaaaactatgatcatccgacaattctcaatttatcgaagattagttaaatggattctgcatctgacggtttggataagacatgctttattttgatctcgtatgatgtaggaaggagtcaaaatgtttcacaacacaacacgaccaggggtatcttaatagatgatgcacatagaacagaacgttttttttttt

SEQ ID NO: 48407 - DNA, 571 bp, Arabidopsis thaliana landsberg
  unsure (1)..(571): unsure at all n locations
nnnnnnnnnnnnnnnnnnnnnnnnnnnnnnnnnnnnnnnnnnnnnnnnnnnnnnnnnnnnnnnnnnnnnnnnnnnnnggtttgattgtgttgatgaggaggattcctttgaggaagtttctttaagtgcagcacttaatggtgttgagggtttggactatatggaaagaattcctcttgccacatctgagggttttcctcatgtgctttcacgcaaaaatggtgaaaaaggcaaaaggagatttgtctctggggatggtgaagagacgacattgattcccggaaccagcgttgaagaggcttacaacaagctaatagttgaacttgaaaaaagtgttcctacattggttggcattgaatgtcccaaggatgagaaacttcctcgtcgcaaaatttttgacaaacctaagacgcgctgcttcactattctacctatggagattaatcttgtgcgcccgcacatgttgttcaattttgtgaggttcattatgaacaacagggacaagcttagttgtcaagctggaatcgacccatactccatggaatggactggtttggcccatagactactg

SEQ ID NO: 48408 - DNA, 363 bp, Arabidopsis thaliana landsberg
tgtgccatacacagaagtgcaagagacagtaagaagaggtaaacaatccataacacaatacggaaaatgctgtattcgtctgagaaagtctcctattaatgagtgcaaatgaaattccgagtgctattgtatgattgtctccgtgttcttagtcaaaagtattgggaatagatagcataattgtaattttgaccgcctatgttccatatataataacccacaatcgtgtatgaaagcatttcctcgtttgatactctaaaatcatgtcaatagtaaccatcaaatagtctttcgtgggtggatttgcaaagattttgtaataacaacgtctagtcgatgtacgtgctcaaggcaggggatagt

SEQ ID NO: 48409 - DNA, 178 bp, Arabidopsis thaliana landsberg
ccccccccaaaaagacagagagacaaaaatggcgaaaaagaaaccggggaggaaccccccctcacaaacgacacgcaccagacccacagcaacaacagcaaccccacgaccaagacccaaaacaccgcccccaaaaaacccaggccggacccccgcgaaacccaaccaaaaacgccaa

SEQ ID NO: 48410 - DNA, 987 bp, Arabidopsis thaliana landsberg
caaaagggttataatgagttgatgggaaaacaccttaggtatcaccaaccacaggaaggaccatctaaaaaatgcatgtgccaattatcacatttgacataccggtaaaggtatgactctaattctagtttgtttgaaagcaaatttagtttttataccataggacatttggtgagttgattcgcgtacaacaactcatataattgtggcaattcaggactatctccgttaccaaaaaccttatgacgttgaaatacttatttaggtaggagatggtcatggggttagagtgtcagcaaacaaaagatttataattgtggtaaatattgacaattttgtggatttgataggggacacaactaaatatcggtatccatgtttaataagcttgcatactttgttcttttagaaacaataaggttacaatttcagttcattagatataattggcaagggacaattggcttgtccatataatatgtatttctacactttgtggttttctaccctaaaataatacatattaatacacataaaacaaaatgaaagtttaccaatgagatttatattgtgttatgatataaatgtatgtaccgtgtctctcgaaagagaactaatagtcatattagcgagtcactctaattattctatgaaattgaatccacaatctaaatcaaaaccactattcaaatagatcggcaatacaaatcttgacaactattatcatgatcaaaatcattagcttgtcgaattttatttgtgccataaacaataaatggtatcatagtcaaaactcatacggttcacccaatttttgccaaattgtactagttgaattcaacttttgtcaaaatagtgttttttttgtcgaccgatattagttaaagctcaaaagagtcattcttggagaatgttgtaactatatgtaatatgatgttgttcgccacaaacgttttgtgcctaaataaccgttatacttttcgcact

SEQ ID NO: 48411 - DNA, 176 bp, Arabidopsis thaliana landsberg
  unsure (1)..(176): unsure at all n locations
acaaaccaagcacggaggtaattggatgggcttttgatttgtcaaaaaagtcaatttattcattttttncgnangcaangcacaaaaaaatttttttttnttanncaaanaaaacggtggctttttttttttaagggggggggattattgagaaataaaatttttcttttttatta

SEQ ID NO: 48412 - DNA, 607 bp, Arabidopsis thaliana landsberg
  unsure (1)..(607): unsure at all n locations
gttggtccatatattctcaatacttcgagataaaatatcaatatatgttctaaagcctccaaatgtcttatattttaatcatgtataaaaaaggcaaaatatgtattgtagggtttgttttaaaattttcaaacaatatataggtttaatttaacctttgccattattgtatacggagctacctactttggaagtcgaccgttttctaacaaatcactcaatatctatctaattaaaaacctaccatttttataacacaatcatacaatttaaaaacctcttattttctggttgaatgtttatattagtcaagtcagtattgcatgtttagtacaaatttgttaaaatttaacaacaatcaaattgcaaaactaactagagaatttagaaactttgttgaaactcgtataataaatacatgcttgaaatttaagaaatttctttttttgatgtgtaactaaatcttattacaattaatactacttttgtctttttttcttattcgnatcttttttttttccttaaataatggcctaactcgatccggtcttggtaaacatcatggacactngtataaatttaatatcaaaattgtcattcaaaattt

SEQ ID NO: 48413 - DNA, 539 bp, Arabidopsis thaliana landsberg
ttacgtatatattaagaactgtgaaatgcgatcaagactaatatgcaataatagaatgtcatgattcgagcaagatgagactggtcagcacctaagtcattggcaagaaataatggttgacaaagacattgcatttgaaactgttagaagttagaatggtcaaatcgacacaatgatgtatgcttattcattgttttggcatttgacatgagcagggaccctaaagatattgtgtaagaactctattatagaaatgaatagaacgtctcatatgctaactgggaaaataaaagatgatgctcaaaataggaactaaggtgtgcttcttcatcataacaaagtttcttgttatcttggattcaacctaccctaagatggtgagcagatccagagcattccgtgtgcctaatttctataagtatcataagaaatcttctagcttataccacgactctacaattctacaaagaagagaccactaaagtagagttaatgtatatgatcagacactcctacacaagttgacatgcatttaatgg

SEQ ID NO: 48414 - DNA, 421 bp, Arabidopsis thaliana landsberg
caacaggcttgtaacattttaggttcctgataagagttcattaacaatgccttttcaacttgttagtcattgagtttaaatagaaaaggcttttgatgcttaaagggttgactattttcgcgaggtttgggggttctctaaaacaaaacctaggttctgtctttgattctttgctttggttggttattttgttcttcatttgcttctttgactctgtctttgctctatgttactgtgagagatatcgccgtatgaacctatcagtgttcccatttctatatcacgatgtatgcgagttttgtgtatttctgatgttcatgtctgtttttgctcactatgatatgaaactactggcggcggatattccgatggcgtctggtcctgatcaacgcttattccttattggtgatgaagaagagta

SEQ ID NO: 48415 - DNA, 503 bp, Arabidopsis thaliana landsberg
ttcttcggtttcggaaacgatcttatccagtgaaccggtcgtctgacaaatgtgatgtttactctgaaagattttcggcgagttgtatcacagataatttttggagtcaggacagtcattaggccttcatctgctcgggttgctcattagcactgcggtgcccgggtggaacaagaactgattctatacaattcctgcaaaattgattaaagatcacaattaaaataaagaacgtatgaaaactggaaaagcattttggggatgggtaacaatggcttcaatttttgtggcggtgggaaccatgtttgtaccgaataataaatccaatatagtaagacggatagtcgacaaagcgaaaaagcgcttaggtatggaggacgggctattgacaaaacacgaaagagccgaaaacgcctctccaaggcagattgtaaagcaagcttagtgattggtcactgttaaatcgaataaaaatgaaaactaacgaggatttgcaacgagat

SEQ ID NO: 48416 - DNA, 536 bp, Arabidopsis thaliana landsberg
cacaacaaagataattttgattatgtaatggtcaaaaaaatacttaaaacaataaaagaatcggtgagatacaatgactaaaaatataagtttgaaacaactaaataatattttatcggggtaaaataaaaatattagtgaaagaaacaggactaaagtgtaaattttaaggtttctcaccattaaaagcctctctccagtcaccaccatttttctctgaagacttttttttttggtcattaagattctcaaagagatagagaaaattacaagtaagcccacacgtttctacagagacaaaagagaaaagcaaaaagtaaacgaaacgaagaagaagcaaggaagcaagtggtgtagaagaagaagaccagacgcggcaggagatttttttcaatttttcattttcttgatcggtctccggcgaaacggtgtcggaaagttaatattgacggcggatatcgccggacatttgaagttatcgtctagttcacgttattggttggtgaaatcgtttgattaggttttaatctgaggag

SEQ ID NO: 48417 - DNA, 396 bp, Arabidopsis thaliana landsberg
gaaaaaacgaacgtccttttcaagaacttcgcaattttacagctattattcttacaaaatatcgccaatttttatgacatctcatcgaatttaacaaacccttttgtctaaaatctaatccttgcgtcccaaaaatcaaaacttttctaatttgttagttagctctgctttcgataagatttgattaaaaagggttgcgcgagctcaaaaaatcaaaaccgttgccgtaattgcaaaggaggattataaacggaaatagggccacgaagctatacaatgcacgttcatgaatcagcacagcacaccggcgatagaaatcacactgaggcttttactccctacacattaggatctcttagattatgcgaatctcatctcacgcgctttaacttacac

SEQ ID NO: 48418 - DNA, 406 bp, Arabidopsis thaliana landsberg
  unsure (1)..(406): unsure at all n locations
accannnnnnnnnnnnnnnnnnnnnnnnnnnnnnnnnnnnnnnnnnnnnnnnnnnnnnnnnnnnnnnnnnnnnnnnnnnnnnnnnnnnnnnnnnnnnnnnnnnnnnnnnnnnnnnnnnnnnnnnnnnnnnnnnnnnnnnnnnnnnnnnnnnnnnnnnnnnnnnnnnnnnnnnnnnnngtgtatgatacataaagacatgtataaattgtagccgctttctcccgacgatatgttcatatggtgcacgcgctccgctaatgagacattgacccttatgaatgctgaaataagactgtgaaacgttgcctttgagtatttaacaattccgagttgtccacactaactattgtgctgcacattgtcttgctgtgtttgctaacccagacacgctggtgaaagtttaaga

SEQ ID NO: 48419 - DNA, 520 bp, Arabidopsis thaliana landsberg
  unsure (1)..(520): unsure at all n locations
caccttattacatagttaaatatgcgacagtctgtcgtcgggatcatgagtctatcatactgcgtgagactcatgtccctgcactcnttggtgagttagctctcgtacgggtcatggtgccccctaaacccgttcgctagtgtgcccaagcatctgaccaaggcatagtactaacactgccaggtgctcatacacccaagcgctgaacaagagcaccttgcgangagcgaagttgctttgcaaagctcccagtgtagtcagactacattatcacaggcgcgaggcgtaccccagctatcagactgagtgtagattaaccacnataccctactgcctcacgcgcaagctcgctttaaacgaatcgattgtggagagagtcccgcgagaccgtgtacaactcgantgtgactcgaccgctancgtgnactggagtgaacgaggcccatagcgtgncatgcagatggatgatatgcggagactactgggagcgctcgagtagagctcggtaacggactaccac

SEQ ID NO: 48420 - DNA, 763 bp, Arabidopsis thaliana landsberg
  unsure (1)..(763): unsure at all n locations
aattttgctgaataatgttattatccgaaacatgattaatctatgaatttttttgcatttgtcaaaagtctccgatacaatttggttggactcaaacgaacggggagacatttgaattcaagtttagtccgaaattcttctaaccaacccaaccttatccgctttgtatgcctattcttcatcatgtcacggtgaagtattagttgatttgtgtttgacataatgtcaaatttaatgtccattaaatgcaacataacgtaaaatgaatcactcagttttggttaatcatacattcataatagaacggttagtttttgggtcatgagacttgtatgactccacgaggtgtttcttaatcaataatttgacgagattaatgataactactaactacccaataaatcttgctatttttgtaaactctcattaatctctctatcaaccttacatgttactttatatatacacaaaaccatagtgatgaaatgaacgtgggaatattttggttttggagcagccagcagtagagattctagagaagttaatattgcactctgaaactgcggtgcaacttccaccaacttagtcatataatagaagaggaaaaatgaataaagcttctgaaaatgaatattttatctgggcaatatatacaatantgttgtataaaaaatgttaatagtatgaaatagagtaaaacgaatagaaacaagttgttctttgttgagataagaccattaattgttaaaaaaaaaaaaaagac

SEQ ID NO: 48421 - DNA, 176 bp, Arabidopsis thaliana landsberg
caagatagagaggatgatctaggcactcgctgtgatgttatcgacgccgcgttttatgttatcgctaggttgttagttctggacaattggttaggactttcaccaaggttgcttgttttatggctctcgagaaacataattttatagcgacaattggtgggagaataatgaagggc

SEQ ID NO: 48422 - DNA, 658 bp, Arabidopsis thaliana landsberg
atttttcaatgctttcgagaactaacacgaaaggatagatttcagttgcaaatgtccaaaaccagaattaaaggaaaaatatgttgctgttttagcttcaaagttcacagaagttacctgtcctccagaatcttttgaaactggttgaacagctaaggacataacaggttcaggaacgttcatcgatgtcattgtgtacttgactgatccatccgtaaatgtatcacctgatttaggaaaattgacccaacaacaaacacaatatcagaatttcatccccagagaagcaaattatgttaagttcgaacaagtatggaagaatattttactgtacctgatgcacactcaataccaaacacagctacaatttgtccagcgtgtgcctcttgaatatcctgaaaatagaataaaaatttagaatccagtcacatggcactatagttgccaccacggagctaccataatggaatcttaaggagaaaaataaacttcaactaacctccatatcatttgaatgcatacggaccaagcgtggaacctacaccaagaaacattgaataacctttaggcaaaatcaatcatcacatgcactacttggcttgagaaaaaaaatatgacaaagtggtctgactttcagacatttgcttctatgaaaaag

SEQ ID NO: 48423 - DNA, 1533 bp, Arabidopsis thaliana landsberg
tgacatactaaattctcatgtaccttaacaaatataaatttctttttatgatttaactaacgcattcgcgctttttttctgttgaataagctcgattatcataactgattatgcttttaaaaacgaaaaaggtaacatttgagaatcattgtcttcagaatcctttattcgagttaagttataaggggatccaactgtgtttcacgtgttccagaaatttgatcacctgttattctcgaatatgattttgttttgacgtggtatccacgtataatgatatagttagtaaaacaaaataaataactccaataattagataaattaataattaattttgttctataaaaggattttgaattgaaaactccaattacaaaaatttagtaaacgttttgttttggagaaaaaaatatataacaatctctaattttagtcccgttttgaaaacaataatcaaaatcttgttatacacagaacaatacaatatagaaaatctgcaaaacgatatccaaaatttaagaattttacatggaatattaaaaacttatgtataatatttaaagcaacagattttactgatgtgaatataacagtccaaaaatgaacatcgttatatcttaaatatatataacaaaacatatttgttttaacatttagtcgttataacaacgacatttcaccccgaaactatattttcataagtttttgtgaatacttttctatttcgaaatatataacacggtcttttaaatcaaaattaggaagcaatgtactaatgtattcttactttgtgtaaaattttcttatctaaaatctcataacacaatccgtttagctacagatcagatggtcgtgttttttttttttttttttggtaatgatttaaaacgaaattatatacatcactaaaatatgttaaaccatgtctctttttttttgttctgatataagttgattttttggtttcgtcaataatcagttaccaggccctccgaccaaaacaaatatcagttactaggccctatacctggtcaaaactgagttggaaacaataaagttgggcctgatattttggcccaataataacacggatgagagttctcagttctcacatttgacatcctccgcttcattctaaatctcccggcgaagaaaattaccggcaaatttcacggagaaacctcgccaacgaagcggagttatggcgggcatggctgcggtggcaggattacgaccgtggaacgcttttattcaagctctagttctgatatctctatcatttccctttctctccagcgcttaccgacctggagatatcgtccggatgagcaagatggggcagtatcactctgttcgtacttctctttaacatattagctgagattattttctaatttgatcggagactaaggatctattgattctctggcagtcgagaacgacttggcatgatgtgatcggaaagcattgcccgatcttcgccgtcaatcgcgaggtactgtgtgcaaatagggctcaagacatttgatggat

SEQ ID NO: 48424 - DNA, 896 bp, Arabidopsis thaliana landsberg
tgtacaggtacagtgcagagcagaaagagacgaggaggaagcgatggaaggtgttgcaacggtaatggtggctgtgatggttggggtagggatgggtatatggaggacactggtgagttcatgacacatgagacacaaagagagagagagagagaatcaaatgtagtttaatgtaattagggatgatgcaatgttagcatgtttgtgtgttgtaacttaaaaacttatttaggaatctgataaaagttactgttgaatttacacggatggtcaagattaaatgtaccaacatcttaattatctacggtcaagattaaaaataccaacatcttaaattaacaccgcatcaaagaattatctcaatcgtcgtctctccccaattcaaaaaaagaaataacctaaacgtgttcacacagaggtaagctcgctcctactcgccgcctcatctgagtcaactccgagtcagctatttttccccaccggattctcacttttgttcctctctgtgacagatctcgagatgaaagataaccaaacggaagttgaatcgaggagcactgatgataggtatctttatatttatccgtaatctcgattcttagattcaatttgtttccgtagttttgaaatcgtcttttatgattctcagattgaaagttagagggaacaaagttggaaagaaaacaaaggatccaaacaggcctaagaaaccaccaagtcctttcttcgtcttcctgtaaataaaaatcactaatctctcttcttcttttttcttcactaatttgattacagtaattaatatgctctaaatcattaccctctcggattgattaacctggacaatttccatggggggatagtggcctaccatggtggtaacaaataccttggtaatg

SEQ ID NO: 48425 - DNA, 861 bp, Arabidopsis thaliana landsberg
ctctacgaatagcgagtgtttctgattaaagtcaagagcaaatgagcaatacatatttgtctgtatatgtatccatgagttactagtcgaaaaaaaaatgttcattacttttatgttatgtttatttttgtcaacaggtcgttgcagatttgcagcttatcttaaccctaatattttacacatatgtcatgtatgtatttctcagaatcaagttaagaggttaaacaaaaaaggaggttaaccagggtttgtagcttataatatattttatatttattatatgtagtttatattaatttttgtatatacaagtgaaaaagctatgtaacaatattgtaaaaaacaacatatcatttaaattatagctccataatatatatagggaatagaaacaactcaaatgtaaataatatagtggtaagactcctaaattatataatccttaggcctcaaaaaagaatgcgttagaatgtaaattaacggtttaaaattttctgagaaaaaagatgatgaggattcggtccacaattctccgattaaccatataaaactctaaactttcatataactcttatcatgaaaccgtaaaagatcgtccataattattgatccagattttttcattaaataatagaaggattcaatatgattttagctagatagatttgggagtttaattagctggtttagctaattcaccagaaaatgttttatctaactagtactaattagcatattgtattttacatgttatcccaaatgaattatttttaattttcacacacacacacacatgtatacacttttcatctagaatgccacacatcttcattttacttttagtcattgttagttgtagtt

SEQ ID NO: 48426 - DNA, 765 bp, Arabidopsis thaliana landsberg
accaacagcacaggggggggtttttgttatactacctggcgtcgtttatacaaactgctagatgttaacacaagacacaagcctcacactttgcagaaccccttggcaaacgcgccaactccatgagtatacgatatttcattccaactgtcgtacgtaattcgattctcacttgtttgcagactgctggcgaaaaggttgcaatcttcagacgtcttgaatgtttcaagagaaaacttgcgagttcgttttccatcttcaaccctctgtagtttctccactccaaagtctcaagaacaaacatcaaagtttcaggaacagagcttggttcctcccaatgaaacataggatcactttgagaaacaatagtgtagccgtgggtctgagttcattattagaccattaaagaacatttagtcaagataacacgcaaagtttttcatagtttcaaaagggcacacttacctcgttaagcttgagagatcgaagtttcggggaatgtttgagcataaacataagtatatcccattctgtgcaacaagaacaaaactccaagtgttcaagctggtggaagatggtaccagtaggtaactcaggctgcagtacaaaaaaaaatacaaataagcgtaaagacttcaagtttgatttaatcacaaacataattcttacctctgtgggtaaacatagcaagaggcgtttgactgatgcaagagatgtaaggatatcatcagtggaacatgcaacctcaacatgtgcttccacaat

SEQ ID NO: 48427 - DNA, 805 bp, Arabidopsis thaliana landsberg
ctatatagttcataaattattttaaaaagacaaataatttgtttcgagaaataatgattgctggtctcgtcaataattgtttaaaaaatacattttaaaatacagagaaacgaattattgagaggagaaatttagagaccattcaggttttgattgaagaaaataaagattcccattttatcatctttttagtttttagtgtcaactctccaacaaaagcaaaaaccttaaagaattttgttctttttttaaagcaaaagaaccaaacacggtttcacatgaatcccaatttcattgcaaaacataactaaaaataaagaagaagactttttggagatcgaatctgttcatgttgatgggttttggctgagctttctagagatagagctagagagtactgggtctgtgtaaagttgataactttttttggtttagagagagaaaggacagagctttacagagatggagatgaagcagatgaagtttcttactcaccaagctttcttttcctctgttcgatcaggagatcttagtcaacttcaacagttagttgacaatttaaccggagatgagctaatcgatgagtcatcgccgtgttctgctgtggctgagcttatgtctgtgcaaaacgacgccggagagaccgccgtctatatctccgccgcagagaatcttgaagacatttttcgttacttgattaggttttctagtttggaaacagttaagatcagatccaaatccgacatgaacgctttacatgacgctgccaagcgaggtcacttgggtatgtctcactaattctgac

SEQ ID NO: 48428 - DNA, 895 bp, Arabidopsis thaliana landsberg
  unsure (1)..(895): unsure at all n locations
agagttaataactgggcgttatagtttttcatggagcctaaaatggatttttacataaatttttaaacgaatatttagaagacgtgtcaattatataattaccctgtgtacttgtacattatttaacataacaacaacttcaaaaacattatccaatcatgtttcattgtcaattctcagttgcatcagattcgagcgaattattgattggttcgacattaattatcatgatcagaagtgaccaaatcaaacatatatacattacatacgttttgtgtgtgtaaacacgcgttacatacataaactaatcagaaaacctatacaaccagaaaatacaagttttggctccattctgacagaagaagttggagacaataatggagtaattaaactaataattatgacacaggcttttatagttttatctatttatgattttacaatttaataaaggactggaggaatcttgacttgatcccacacagatttattataagccatttccagcccaaatttctgtacacatttataaaatattaaaagtcatttgtctctagacccatatatattttttattttttatttttactttttatctcagatgaattgcagtttttatctggccaaattcatccacaaaacgtcatcaaatgtgacatattaagatagtatccatttgtcatgaaaagggccatgtcactctctggaaactttttggttaagatctcataacctctttctgttggatggtacgggctaaaacattaaagcaaccgattttcttgcataaaagcgatgtgaatctgttgcttttgtgagcttcatgtntttaatactaatactcaatagtattggactattggttccttctcatttttcgatataaaattcatag

SEQ ID NO: 48429 - DNA, 335 bp, Arabidopsis thaliana landsberg
aatctcatacttctatgccttcttcttatcagcttcagagatgacacccataccttcttgaccagtaccaatcacctccatgacattgccttcatactcatgaaccaaaaccttaaacttgaggtgattaatgatgtaatcatcattactgttaggtggcgaatacccaacaggatatccagtccactggatagtaaccccattctgctttagcgaatctcaaagcaggcatgttatcaagaatcatattcacttgatacaactcacgagttctctgtttcaagagcttgacctcatgctcattcaaaggactcgttgtgcataagtaaagagac

SEQ ID NO: 48430 - DNA, 1027 bp, Arabidopsis thaliana landsberg
  unsure (1)..(1027): unsure at all n locations
cgttatgttagtttttaaatatttcccgcgaaattataacatatgtttatcaattcttttaattcccgtgaaaccaaaccttcaaaatataaggttcccgtgaatttatcttcttgtagatcccctgaaattagaacaaatatatgttccagaacatggagttaccatgtataatgttttgtgacatatttaggtgaccaaaacccacacaaaacaggataatgcgaagagtatacgtcatgagacgaatgtgtgacaccaacttatgtatgtgaatgtgtgtacgtgtatagaatggaattgttgaactgtcgactatacaactaatctttggtgattaatatattgtctcgacgacaggtggctgattgatctatatgatgatttccaatttcgatattggattgttcaatcgaatacgttcccattcgtttctatgatcaccacaacttttgtcgatgacttatgtttagtgttcacaaatcacaaacaacagctaagcaatgatttcctttatttgctctcaatccaaagtcaaggtctccaggatttaaggaacattaatactccattttttgttttaatctatatatttaataattgttttaatttctattgtcagtaattgttttactgtaatattttgagtgccttcaaatatggttagagagacaaggaactcaataatttttattttgcctttacttttctaaaaacttaaaccaattacatccttttttactctttttttcaaactactcctcatattgaagtaatcatagtcgagatctaacttctaaggtgtcgactacactataatgtctactataaactacgatacaaattaagtatatggttcgagagtcaactaataacaacaacctagatattattattagttgggatagacccgtttttaggttttcaaaactaaagattggatgcttactttnttttttttttttttttggcataacatattttaaaatataaagaatttgataaagtttagttggatagaattttg

SEQ ID NO: 48431 - DNA, 647 bp, Arabidopsis thaliana landsberg
tcttcttagaaaccaacttctccatctccttcaaagtaagtctcgccttttcgacattatcagtcttagcatacaaattcgttaacacactataagtcacccaatccggattcaacttctcttccttcgccttaagataaactttctccgcaccctcgacatcatttccagaagcaaacgcagtaagccagagattataagtaacaatatcaggcgatgttctaatcttcaactccttaatcaacacagggactttctcaaactgtcctctcgatatatacatcgataacatatgattgtaaggcaaacaagacttcaagaaaccacattcacccattttctcaaacaatgcctcagctttatcagacaacttgttctgcacatagctatgtaaaagagatgtacacgcagcatgacctctcatttgatctggcatatcttcgaaaaacttctcagcactgtttaaaccacggattttagatatcaaatccaaatgtacagcgtaatcacctgcttgtagctttatatcttcctgtacaaccatccattcacatatttacacacacacacaaaataaaacattttaccacttcgcagagttttcacaatcgaattcaaaattgagagaaaaatcacgaacctcaaga

SEQ ID NO: 48432 - DNA, 591 bp, Arabidopsis thaliana landsberg
aagttctctctttttatcaaccgtgagattcttggtcgaattcataccaatcttcagaatttatgaaaaagtatgatattattttcatgtaaaacaattacaataacaaatcatacttaaaaatgttgtagttcgaaccatgatcctttaagtaacatatgttcttcaagctctatggcccacacaatagtgtagaccttcttcttttttgggtgtaaaatagttagtagtctagatagtgtagaacatatgttacttaaaggatctatatatctatccaatcataattcgtatatatagggaaaccttcacatttacgtttacttatcagccgttcgtataaaacacacaatgaacaagatttcttaacccaatcgttgctcaactgcatgtaaggcacttgacatgagcacatggatatcttaaaaagataaagtcacagtgcatgtatcgaaaaggtctcaaagtacattaccctttattctctttacatggttgaagccctaaaatgtcaaatatatgaaaattatgaaaataagagggttttaaaccatctctcattctcattgataacagtaaacatgatgagac

SEQ ID NO: 48433 - DNA, 547 bp, Arabidopsis thaliana landsberg
aagcattatcgtcactggagggtttcttctaactggtatcatacatcgcacaggggaaggagtttcaaatcatgggaacatgttcaaattattatttcagttggtggccccgcaaatttcagaaggtcggaaaaagagacctttggagaaaaaaaaaaaaaagaaaaaaaaaagaaaaagaaaaaaaagaaaagaaaaaaagaaaaaaagaaaaggagaaaaaaaaaaaggacaaaaaaaaaggacaaataaagaaaacaactatataatacgggtgcgatacgaaacaataacaaaaagagagaaagaatataacgaaaatgctaaaagaaaggacagcaaaacacaaaggattaaataatagctgaacggagaaaggaaagtaaaaaagaaatgtgtgtgaacaacgattctagtgatttagatcgcgaaatattggtcggaaagattggcggcagcgcaaacggatggaagaagggcgtgttcaatcgcacaacggagtattaatgaggagcgaacaacacatatcaaacaacaatagacagca

SEQ ID NO: 48434 - DNA, 498 bp, Arabidopsis thaliana landsberg
acgtgacatacaaatatggcaaatgacatgggatctacgagactcacgtgggtaatatatcatacatgttaccgtacgaatttgcatgagatcatatccttgtcgtaattggatggacgagagagatggtaaagtgataatatcatctcttttcttataattttctctcatagagataatagagaatattatgcaaagattaaaattcctttaggttataccatttagcatattttgtggctacgtacgttgccttcggtcctttcacttcacttccaacaattcctccaattaatcaattccaatataatatgagccgtcgatctcaccgccattatgaacggtggctcaaaagtcccagaccatggttcatataatggtagggttcttgtcaaatatcaaaatgcattataggtttcttaaaagtatctgaaatgcttttataagttttagacgtatgtattattaattgaaaatttattccatactaacctagac

SEQ ID NO: 48435 - DNA, 823 bp, Arabidopsis thaliana landsberg
aaacgacacagcgttcgcgtctttaaatggtaaactttcacgttcgcttttacttgtgtcattttcagttttttgacctattgctaataaatattctcgcaggtcgcttttgtgaaatacaaacacaaatcccaccaaaacggtgtcgcgagaacgttgaagaaattaatttggcgcactgcttcatcattattttattcttcgtgatctgtttttttccgacgatatttcttgctcgattctgaaaaatctaaaaatccaaaatcgaaacctgaaataaaggaaatcgcagacaagtggaggtagaagacgacgaagaagatgtggagacgcgtggctttactttctccgatgatttcatcatcatcgcgatcccttaagctcagccaggttagattttcaatcccgatcgctttttctccggacaaaatgaaatcgttgtctctatctttgctataactttgattttgtgggtttaactcagttcattacttatttcttcatattcataggcagcttcggggctcaaagttggggaatcttttgcaacagacataattaatcaggtatatagatcaggaaaagctcaatagtttgttttcggcgttaattgtgtgtaaaatgtgtttattatctgtcacaggatgaacgagtttcaccgccgaaagagaaagctccatttattacatttgtactaggtaagttatggattctgctggttaatatgttgggaactaggagttgaatctacctaggtttctgtttgagtttcctgtgaaaaaagttgaaggtgatataaactctcacattgttcttcagcgtt

SEQ ID NO: 48436 - DNA, 546 bp, Arabidopsis thaliana landsberg
attaatcacttcatttccctgttaacaggttggtgtcagtattgctgctcgcaaatacgacttttgtgcttacacgccttttgagacgtcagatattttggatcttcggcccgtaattaagcactccgtccctgtatgctctgaggctaaagatcttgttgagatggggaaggtccaactggctgaggtaccttttgttatttcacactagctaacttttgcttgctaatttttgccaatatgtttgtactggataagatcaggagaaccttattgtgatatggattggcattcaactcttcaataagcatcttgttttagtttgcgaaagttgcattatgaatggttcttggtttagatttttatgtatgaaaatgattaaacttttgttgggcatgcttagtgaatcctacacgttcttttcagaggcattttcgatactttaacaggtaagtaatttgtatacgcatctcgtcctgtcaaaataatttaacaccgaagtagctcatcatattctgatttaggtgactggtccaatgcacaggg

SEQ ID NO: 48437 - DNA, 595 bp, Arabidopsis thaliana landsberg
ctgactcgaccgaatatgttaacgcatgttgtgtttgtattttggtgttttgtgtttatttttttgctttaagatagattcatttgatttatccaatatagaacatacactttcagctaagccatatattcatacataatttttgtcgatcgattaccaatattagttaatggggatgttgaaccaagctttttatccggtccaccaaagtcatgtccgtatgaattcctatctgccaaaagtccattatcactagtggcgggttaattaagctcgtgaccagtgtcgaccctgaattttataagaccacatacatgaggaaaaaatgggccgctacatcaaattttgaataattttattattctgttggaaaacaaaagagaactcttaagccatactgaagtttcgaactcgaagatgatacatcttcactaaactactagacaatcgtatattttgcaaaaagaccaaatttttgtgataagctctctctgtatagagctagggatttccgatcgccgttcaaacgaatctatatatccaataggtgttgatgaatttgggaaaacatacttcatgaacagcataaatgcat

SEQ ID NO: 48438 - DNA, 154 bp, Arabidopsis thaliana landsberg
tgtaaggagaggctatcttgggcatggaagcgaataagtgtgcggagttggcgtactctgggcttactgcgctgtcgtgcgtgtcgtgagggagtcctgtgcgaccgttgtgatctagtcctctccggtctgatcgatgactgactgatgccac

SEQ ID NO: 48439 - DNA, 662 bp, Arabidopsis thaliana landsberg
gggagggcgctcaccacacgcaaaggcaaactaccgaagggcttgtcagcggctcgattgcgttttatgcagccctgcaatcgcgcagttgtgcgcgcaaaggaggaagctagggccgctctgttgacgtctagtaaatccacgtggccgctctgagcgttgtcttccatgatcttctcagccattcccatggcaaattgatattttcttgaggttactggaatctcgttcataagcgctaatgcctaatcgtgaaaacatgttaagatatattatctcatagaatccatatacgcaataaactatagcaaagtttatgtggtaactaactatggtaattaattatcttttgattaattaatcgagcctatggattaaacttccctctttggtttttcatgtatgacgtggcaccgtgcatgatatccacgtggaaattacagagataaaatgtccacgttaggaacttcgtggtgccagaaatagaaagatccaacataatattatataattttatatagaaaacatgctattttgattaagatcgagttatacaagtctaagtacgtcttagttgaaccgcgcaaagaagtgaaaatattgaaatacagtatcaatggaaatgttaatgttaatgaactaacttttgaaataaaagaaat

SEQ ID NO: 48440 - DNA, 960 bp, Arabidopsis thaliana landsberg
cggacattccctataagcctatcacaaccataagaacaatgagctcccaccaagtcatccaaaaacaaaatgttctgcttatgtgtaaataggataagccaaaccttttctctgatttttcaatgttttccgaagaaacagacccattctccatcttgcttccccctgcagtgctctcattctttttgctgtcttcactgctttctaatacttgtgcgctatttttctttttctccaacctattattgtctaaaactccattagcttcctcaccagttttggaccgttctttctcctctcttatctgtcgggcctccgccaatgcttcttctcttctagcagctccaagggcatgccgttgttcaacaagctcatctatttcccccttgaacatacctgtttcggttatatggttcactaattcccttaagattttcaattttacatttgggtccaagagaccataatgtccacgtttgatcgttccaacatcgaagcacaaatcaggagtgttgactgattccaggaaatcacaaagatactctgcccacgtgatcaatgttatctgaaataagatgaaataaagcaacaagcatgccatcaaccacaaaaacaaaactgaaaaatcacaaggctggcgacttaatgttgaatgagaaaagcatattactgtgcggcctaatttgttagccaaatatgattttcatgagacgaggatctgaccttcgacttgcgactccttctctgtaaagctttgaaactatcaccacgttcattgatgaggaaccgaaaaagagaggcatgcacttccatgataagaaccaaattactctccttgtggcagacagcattttaaaggtcttcaggagaaaatccccataaatccagttgcctaccaaatgaggtccaaaagtcccagaccataagaagatccccaacacaatccataggaacactaaa

SEQ ID NO: 48441 - DNA, 506 bp, Arabidopsis thaliana landsberg
tgaacgtccgcctcgctcgtgccttccacaaggatgcgatcctcagcggcggtctcgtgttcgttccgattagcgtgttctgggcgatggtctacatcgcgaccgacaagcaagcgatggcgacagagcacgcaccgacgctgacgcggcgtgaacgtcgtcgcctcgaagcgtgggagctcacgaagcaggcgggtgtcgccgcgcgcgagcaggactgcagacaagtcgaagctatcgatccgcgcgtgcgcgatctcgacttcgacttccacgtcagcgtgttcatgcgcgacgtggcgatccagcgctgtctacgacattagtcccggccgcgaaaccggcggtcaccagggctggcacccatgggaacgttcggcgccgccgtccgtcgacaagcgcggagtcgcgccgagcgcgcgcgcgggttcgcttcgatctcggcgtcggttccgaacacggtcttcttcgatagcacttcgacgacgggctcgacgcgctcaccg

SEQ ID NO: 48442 - DNA, 582 bp, Arabidopsis thaliana landsberg
  unsure (1)..(582): unsure at all n locations
tgtcagccgctcttacttcgcgcacgctggctactctctgcaacgcgactgccagtgtgcagtcacatcctgacaacaagcgctactctgctcccgaccgtcacgccgaccccattgggcatcccgcagctgcgtcaacggaccgcgcgccatgcgaactcctctgcctaccttcgtgcnnnnnnnnnnnnnnnnnnnnnnnngcggactcagacgataacagtggagctcgccgcgacttcccctcctccaactcctcgcgcgcgcgttgctgtcattgcccagtcgcccatagttccgtgtgtgagagcagggtcgggccgccgccgtgtgtttttcgtccgtgactgagctcgggtctgcgtgggtggtggcgggcgttcgcttggaaccacataagctgtaggaacccttaattcgagcggagaaccttgggggactcgagaatttctcgtcggagtgcgtgaagctgcctgcgccgtggccctgccttcctcgcatcccaatcaccggtatgaacttatcccagtgcttcgtcgcaaacctcgtcgcaatttaggccttacaaggataggattggat

SEQ ID NO: 48443 - DNA, 432 bp, Arabidopsis thaliana landsberg
cggtctaagaagtcaatattttctaactacctccaactacgagagtggacgtgccaaattgcacttttagttttagtaagtacaacaagatcaataatgtaagatgcacttgataattaggcacattccagtcactaactcttatctttgtccatataagccattttaaattgtttttattgacttctttaaagatagcaaacactagttaaacacacaaatcaaagttttataaggtatgcgatagattaataactgacgctgtgaatgtgattaggccttttctgaagtcatgcttttcccacttagacataacaattttaccttcatccctattcagatggaaacagttggttaagatcggtttacgtccatggtttggattttggaagatatcatatcagtgttggttataggtaggtgttgtgttaa

SEQ ID NO: 48444 - DNA, 616 bp, Arabidopsis thaliana landsberg
atttgttttttttattactacgtccatcatgaacaagattgatagtttgatactacaaatacgtttgtatgtatatagttgattcaggcctcaatattctcaagtaacattcctcctaaaaagtgaatatatatacgaatgtcaaacaattattcaagctcagaaaccccaattatttaacatctaaattttatatgctttattgcaataataaaaatacaaattactaaatagtagttccacctattccgaaagaatcttttagggtgagtgacaaaaacccaacacgcatcatactttacaaatcagagctcataaattgcctctcattacccaaacataaatattttaaaaatcaaaataaaaccaaaagcgaattttaaacaattaaatagtaatattctaaaaaaagatactcgtacgtaaacccttctctgtcgccctatataaaccctataacacttgaacaccaaatcctcaagcttctgctttttcttcatctttttccacttttttttctcttgttttttgcttcatcagaagtattaacaatgtcaaagagcaaagtcatagctttaatgggagtttcaatcgacggtggtagcaaccgtagact

SEQ ID NO: 48445 - DNA, 339 bp, Arabidopsis thaliana landsberg
gttaatctcatttgacccattgctatgtgaaaaactagtcaatttacctaattagttgtgttttcgccagtgggacaagaggcccgggacagattcacgggtgctgttgaggcattcgccagaagaaatccaggctctggtcgccatggagatcattccaggcaccaaagccttgcagattcctttggcacatccaacgaagcagtaagtatccgatttagctcttgtagcgtaataagcatccggtttagctgtgttagctagtaaacatgaatggagatatacactttttaaacgaaaaatatgcactaaattgaaaatgagtgcagtaaatggaaa

SEQ ID NO: 48446 - DNA, 458 bp, Arabidopsis thaliana landsberg
tctaggaaatagctacaaacaacgtagctgaatatcgcggattcatcttacgattgaagtatcccattgaaagaggttacaagattaagaacttagaatcatttgaccctgaccaattgtctataattctgaatcaaatcgtttctacttaatgtaatgctactcaaagatcatgatatcaacaaaaccgatatgaaggagccaaagcaacaagctttgattagaaatgaacaaagttctgcgccaagatcaaaagcaacacactaaaacaaagtctacacttctattattcagcgatacattcttgaactaacaaagttccatctctcaacaaaaccaatttagcaatgagaaagaaagagcaagtgtaacaactatgaccctttataaaaccttaatcagctttgtatcttgagctcatacacggaacaaaagcagaaaaatcgaaccgttagatc

SEQ ID NO: 48447 - DNA, 592 bp, Arabidopsis thaliana landsberg
aaatctgtcgtgaccgtctccactttcgctacttagaaaaagtttacggcaatgtacagcaagccttttatattaaacaacacgaacgtaacttttataacataatacagatcgtgtgagcagtcaccggagagatacggatcgagttgtctctgcgtcaagattcgtagccggtgtcatggagactgcagacgtacgccggcgtgacgaatcctccatgtccatgtccatgtctgacgcccagcagtgtgcgtgaggattccacggccggcgctggtgagagtgagacccgcgggacacggtctggccgcgcgtcgccgtcacgagatctgagccggtggaatatggaggttttggatggtggagatcgtggatgacgtggcttcatgtaacggcaccgcccgaccgccggccgcccaagagcctcacacggctctgctgcattctcaacgaatcgagcaggaaggagcaatcctgcgtccgtgcgttcgctacggacttgattcatttggtgggatgggatatttgcaaagggaacgtatcaggtgcttaaagaggtgcggtgctcatgtacacattttaaatttgatgt

SEQ ID NO: 48448 - DNA, 134 bp, Arabidopsis thaliana landsberg
ggcttctcaagtacggcgtgatatgttccacggaacgctgaccccctctaacagtcggcaggactatgtcggaagtcatgagtcagtccataagtacatggggagtttgagtcgacggaagacttaatagcgct

SEQ ID NO: 48449 - DNA, 766 bp, Arabidopsis thaliana landsberg
  unsure (1)..(766): unsure at all n locations
catgtcctcctggcatcacttcccggcgattttttctgacaataatgatccgacggctatatatgatggtggcggcggcggatacggaggtggatgttactcgatgaatcattgtttcgcatctggatcaaagcaggagcagttgtttccaccggtgatgatgatgactagtctaaatcaagattccggtattggatcgtcgtcgtcacctagcaagagatttaacggcggcggcgttggagattgttcgacttctatggcggcgacgccgttaatgcagaaccaaggtgggatttaccaattgcctggtttgaattggtattcttgaaaacaatttacgatgaagaatttttaaaatttgtgtatatatatacggtttgagtgattagggggcattgggggatttatttacggttgattattattgtagtgttatagaactaaggagattaaattaaatagattggaggagaggtataaggtaacatatagaaattatacaacaatagtttaaatattcttttcttttctttttcatgttattatttttactaatgtataggtgatgattacacttagatgtttgtagcttgtataaattaatgcatgcatatatataaaaatatattaacagttatagaaactagattacccttgtgcttttcttcagctatttattttcagtactatcagcttcaacattcgcatgttttgctgcanattttattttttaaaaacatgatttttaagtgacatcagaaatact

SEQ ID NO: 48450 - DNA, 305 bp, Arabidopsis thaliana landsberg
tcctggtctgttcccgtggcatccatcgcgtccgtccttgtcgcggcatgccgtcagctgcaccatctcgggcctgcgagggtgcctgtcgtcctgcagccacttctcatgactgcatacgcacgccactggggactgttgtacgctaaccgccgggcgcgctatctccatacgcgtagcacgagagcccaggcatgccgccatgcgtgctgctggccatcggcgtaccaagtgccaaatccatccagcacgtgagcgcggcctggatggtgcgcgtcacactctgattgccagaagcagcagtc

SEQ ID NO: 48451 - DNA, 348 bp, Arabidopsis thaliana landsberg
ttcaatatctaccgagatgcatatcaaaacgacgaggctcatctcaagaagtcggcacagtgattgcctgaacgcttccatggtgaaactcgaactaaaagtcgaccagtcattgggatcactatcccattatcggagtatctttgcacagcaacattgaccactcagggtcatgtattcacggcgattatcaccgtcgagtgtgcaagtaaggtgtcagcagatccggagagtcctcatagagcacgaccagagatgtccagtggtgatttctcgacgacaacatccgtgcagtcgactcggcaggtacaaaggactgcttcaaggcgactctgcggccacattgcc

SEQ ID NO: 48452 - DNA, 752 bp, Arabidopsis thaliana landsberg
ctcacccctacaaatcttcagcaaaagttttacgcatagcttaaagccttttgactttttaaataacgttatgttttgtgtgttctaaacgaacgattccttcggaatagtttgtgacgttcttttcctatttttttttactataaacaaagcttatggacctaataactgaagcatggactcatttggctaccaaaggtattttgttcaagataatatcaattgtaacatgttgctcgcaatgcacattcttagtaaatacagaggtgacgacgagagattcggtactattagggggttataagtaaatatattatattacctagattattttgttaatatcttaagtgtgtttagggcttcttgtaccatgtatatatactctctctttaagattaataagattacaacattctcttctccctttggcatggtgtgattcagatgctaacggttagtaatggaattattcatctgtttgtgaaccacattcccaatgatcaatagtattaacataagactatggacaaagagaaaggttttagatccatatagctagtgtatcacattacttgccgcacaagaaaactagtcttcttcgtcagagttgtttactgttatctcaaacgtgatctcctcaaaccgtccatgcttctcttcacacccatctcttccacactgtatctcatttaaatccatggctgaacccaccggggaacgggtagaaatcaagctgcagaaaaatccttcaa

SEQ ID NO: 48453 - DNA, 1428 bp, Arabidopsis thaliana landsberg
aaggccattaatcatttgaaagttaaatttgttttgaaatattttcttttgccggaatgagtcttgtagaaatgatttttgtattgtggtaaatttgaatataaagaactaaaaataaactttttgagttatgtcttgtgttgggatttgggaattcaaattttggggaagtcattttctatagtgattctaaaacacttatccagacggtgaaagattctacactttggccgagggtaggctacacaagtgagatagttggcctttagtttaatgggaagttagggaatatgcatatcgaccgattaggctacacgtagaaaaagatttggccctataaaacaaaaacaaaaaaaagcttaaagataagtgatatgaaggaagaagggttcgcgctctcagccctttaacactttgagtaagtgaatgactaattctgctgataaagctttggagataattattgtatttacgcttgcaaatatatgaatttggctcgcttgtactcatggccagccttgaaaatatgtgtgaatcttattgctttgatagtttccgcttgtacccgtctatggttactaccattggtggataaggagaagaaactaatgtttgccttttaatcttaataaaattcagtttgtttgtgctaacaaagtaaaaaaaaaaaaagagtagagatcgttcaatgcatgatagaagataacatagattatgttatagtatattctaaaatatgtcgaactaacccaaaaatgtgaaattcaacatactttttgtttggaaaagctagcaaatattcatattttcgaatgtgggtttgatttgaagattatgagaagaacttgatcaacagttgtaaagatgttataacgatgcatgttaaatttaggatatgtgtagaatgatttttctaagttaataatgtactaatcagaatcatcatttcattgagagaaaaaaagaagaagattaattatgaacaaaccgctgcgtgggattgatttttacgattgcttatcagaaacaccaacacaaaaaacgctgcgtttccaaaaactaatacgtcgtcgtgtagttggaatatctttttgacggccttgtgatagtttgatgcccaccttcttcttccactgctcgcttttaagtttctcgaaatttcttggcgaaaaatccagattttgtgtttagccgacgagaattgggaaaaatgtcgtgtacgcatgatcacaactgcgaagatcatgagtgttcttccgattggtctctctacaaacacattgatctctccaaggtctctctctctcttttctataatcacttacctatttcgtttgttttgctcaaataatgtctaaatcttccatccccacgtcaaatatgttactagtttagtgaatcccaaccatttagattctaatttataaa

SEQ ID NO: 48454 - DNA, 798 bp, Arabidopsis thaliana landsberg
aaataaaaattaaaaatctgaagttaaaccttgagaagaactctatcattgttattaatgtatccatgccattcttcatcagaagggtaaccaccaacaaaatcttccgtcggagacctaaattatcaaaactccaatttaatagattttccaaaacccagaatctggtacctcaagctaaagtagtgatctgacctcatcttaagacaaaacgttgaacgaatggcttcagcatcaggtaagacatcagtgatgtgaggtatgctgaatcgttgctcgaaatctttctcatactttaatttccaatctggatcgctgagatcgatcgatgaagctgaggttttgctgtgttgaatctccgaagctcgcaccgagacgcgagatcgtgatgagggattcaccggagatctcgatttccggaggattaaggagggtagtccgtgagaaggaacgagagaagaagaattgttcttgtaaggaacggagatcccggaactgatcgcctgagaaagagcatccatggcgaataagaagattccgatcggagatctttatgcttagttttctcagtcaactaagttcttttttggagggagtttttgccaaatttacaaaacatataaaacacaacgacagcgtgagatcacagtactctggctctttatattaacgaacaagtacgaaacaaaatctaacttcattttttgtctgtaatatttatcacgcctctaaatatgtaaaaatcgtcttcaaacaaattagtgactagaacgtctgtgaataaatttcgaatttagt

SEQ ID NO: 48455 - DNA, 812 bp, Arabidopsis thaliana landsberg
tcccgttctctaagttaattgctttgtgttgaatatgaaacctaaagaagcagtagagagtgccagaatataccatagagtatgcatagttcaaaaccatctgattgttgttactaacattcaaaatgaaatactcaatgtattttggttgttgttgcagttgataccaaatgttgtttcctatgagaacttcaccacgatcaatggcgatcacataggggtttcagaagataccaagatgtttctagcagagagaggacatgagctaaaggagctatcaggtggagctatagttcaacttattgttcagagtttcaaggaagagaaagaagtttaaatgattattgaaattggaaggaaaatcggaaagaaatcgaaaccattaaagggcttacttactgcagttagtgatcctcgaaaagatgggaagccagctgcagtttgatttcgttattaagctaattacaaatttcctcattcaagtcccattctctatcatgtaaagttgaataaagttacatgagcctcaaagactcagcgtgggatatatacagaagcaaagttgtagttggaaccaagagttgttacattattctcacaagagttatctctctctcttctctttgcttgaagaatattataaaacaatttttgaaaagctttctattaaattaagaaaccttacttcccaaacaaagatgtcctcaagtcaaaacacaaacgaatgtttttgtagacagtgttgatcaccatttcatggtccctggttcaccaaccaactggtttgagtggatcttgtcagcttgcttcat

SEQ ID NO: 48456 - DNA, 869 bp, Arabidopsis thaliana landsberg
agggctgaagatcgattgcttgcgcatcttagccaggtttgaatagtttctgaattcgatgattttggtttccatttttgttgagataataatactgatttcttgtttattgaatagcacttcgagcctgcggaaattggtatgctggctagatgtttttgcatacctctggtttcggttcgcgtcgggaagattataaaggaagggattctaatgcgccccactcccataaggtaatcaatgagtcctgtttttgttataatcgtgttaattgctattttctttgttcgctctttgttgtcttagagatttgtgaattatagctctctagttaggttttgttgtctttgaagacggttcttatgttagagatgtagcatagcatataccagaatgttaattaatggtttgtgtgtaatctgtcattgattaggcgattttatgaatgcttgttcaattgcaggctgattatctgaatcagtagtgattttgaaatcatctgctgatacaaagtaagttttttgggtgcacacatacaattcctgctttagttttattgatactctctcgctgagtttctccatgtttggtctcattttatcaaatactatacctattttcatatgaatggttgtatctctgttttactgaccttttgcagttctttatgtgctaacactttggaggttggggtattacatagtcttagttcatatggctagttatgtttgtatcaatgtatatctagcttccagtaataaggtctatccactaatttgcgttggtttagttaaaactctagaaatcataggatctcaatcagtcgtatagtgatactgttcatgcttccaaataaaatgtatctttta

SEQ ID NO: 48457 - DNA, 812 bp, Arabidopsis thaliana landsberg
tactttcagctggtcgaatgataagaacaagttcaaatctggtgaaatctctgaaatttcaatcaaagttctgggaaatttcgacaaccatggaaacgcttcgttgggtcagagagcttttaagcctacagttactgttaacggaaaacttgggaacagtacgtatatttctggggtttcgttggatcttggtgaagatatcagcaattggaagatctattttactccaatcatggttggtatcttcaatattgttatagatgaggagaatttcaaagtcctcgattcgtcgctccattttgaagtcgaagcaggttcgcgatttcttgagaatgttcctttaattgttttagtgtcagaaatttactaaaagtatgagtttttatactcttgttgtgaagggttaatgtacccatctgttagtgttgtttcttggatgggtcttgcaaatgtgtttgaagccgggatgaatgcgtcgattttgattcttccgaaggatgcattcgggaacaacatatcgttttccgggaagaagatggagtttcaggagttttctctgtctcttattagtgaaaatggttcatttgctggtgttcttaatagtacacacattagatggattgtatctggttatatttccattgattttgttcttgttacttctggaaaattcttattgcttgtggagaaggagagccaaacattgaatggtggtccattacctcttgaggtgaattcaggtgattgggtttcgattccttaaactgttctcagtttcagaacgttttggacttttaagctgagaaattttg

SEQ ID NO: 48458 - DNA, 279 bp, Arabidopsis thaliana landsberg
tttggaatagcccctcagtcgtgtcgacctaaccgtctctggagaactattataatcactagaccgacttcttgtctctgaggtctcagcttagacatcaagactaatgcttcaaggttggactcacgcgactagcacgctaggatcagatccaacgttatacgtggatctgtgtgcgtctacagtgtacaagaggtaggtatcatcaatgtccgtcacgattcgtcgctcttgatgcgccggtcaagtcatagctcgaggcggtaatgcctctaagct

SEQ ID NO: 48459 - DNA, 645 bp, Arabidopsis thaliana landsberg
gagttccttgagatgttcttgtatctgcattacaagatgatgtgttaatccaaagactcaaaaaagctttggaagtttgatatccatctaatgtatatatcaccttttgtgcttcatgaagttgaaggccaagcaacagcaaaacctgcaaaaaaagattgaatcaaagtgtttgtcatcatcacagactatctatcaacactcaacagtatacaaagttgaaagggacaaataaactgactggagggccgaatcgaggatcttgaggatctaaaggtacaaacttggaatcttcctcaagtgtctttggaatctcttgagctgaatttctaacacatagcttttgcttcttgagctttgtgtttgtgtggtgagatttactctttgtccataacaaagaagacgtaactagcccaaagatgcgagaagagcttcctaagtacgtatatgaagatgatgaagaagttggctttgagattgcagaccccaacgaagaaatcgacattgctccttgtctcctaatctcatctctatcttgcttgttagataaaatcgttcatgtagccaatcatgttttgccatgtgtcatgtacataaaccgcatcaaaacctgttcattactcttgcaagcctacctcggcttta

SEQ ID NO: 48460 - DNA, 997 bp, Arabidopsis thaliana landsberg
atgttatgactttggttatcgtctttcttttgtaaagataagatataagtacatttgagtcaaaataatgataataattattacaaactatatataactaaagaaatctggatcgaaactcaaactaatctttataatatgtaaaataataggatgttattatcagtttacacatttgcaaatttcaaccataattataatcgaagtgaaaaaaactcaaactctaattaattttgatgtacttatgatgaattagatcatagaaaaaaaacgtgcaaagaagtattaagaaataagaattaagccattttccaacataaaaatagaatattaataataactgaagtagtctataaataataattatgcaacacaataattcttaaactgaacgaagcactttcagtgaatcagggcatgttaagattgcacgagccgtgtcgaccgccgaccaaatcccacactatgtccctcccacacatttgcatgccttttgtcttaatcaatatctctgctttatttcatttttattattcaaactttcatttgtaaccatataaacatttgtgaaattcatttatttaatctatatatatctgaactctatctatacaatatttctttatagatgcgttggtccaagttgtcttatcaaaaccattattaaatctggactagttatcatagaaaaagcaaaacaaattctgaactaataactagtgatttcatgcgatgtattattcataaggagcgacatgctagacttataatggagtatattatcaaaaaatcgaatcgaatcatctagatacttagctacagcaggaaacatgttcctaactcacatagtcgatcataaatatgtcttaatcaataaataatatggacattcaactagtggttgcatttaatgattatgacatgttaaattaaataagaaaaagaaaaatttttttttaataatggtacatacaaatcttataaaaaagtttcatgt

SEQ ID NO: 48461 - DNA, 934 bp, Arabidopsis thaliana landsberg
  unsure (1)..(934): unsure at all n locations
agctaaaacatgattaactattatgtcttctaacagcacttttttttttctgcagtaacatcacttgttgatctgctgatctggggatatcaagtttgctaacatgagtctcttagcattgatctggtgatttggaggaatcattgcgtcagtgcaaagaaaagatttcatgtgtttgtacatctcttttggtttctcttcattaatcgcatgtcctgtcttcttcagtagcgccaattgtgctctgtcttcccctaaatatctgaagcaacaacacaagacaattcatttagaaaaaaatgatgatgattttggaaaaatatgataattaaattataggaccttttcaatcgatgagctaattcaactggaaatacttgatcttcctctccccatatcatcaatgtcggctgcatatcaatgttaccaggattcaaacaatgataatctttaaatttatatagatttgtatgaactgagagagagatcacctgtgttatctttggaagattggcgaatcttctacccttatgcagagcttccacaagttctttcctttcttgaagatagtctttacacattaccttgcaacaaatcctcacaacatcagaattcaaatactcttttcaaacgaactactcttagtctagcttacatcaaagagtgatgcttttgaaactaaactaaacaactcaacaccataataatcacacaaacattttgtctgtaaaactcaaaagtatgtggtgggcccatttaaatgaaagaatacacaaaaggactaaacttattgatactaagcttcatcggaagattatttcattccatccctaataacaataaacgagcctatatatgaaagattcccatttttaaacattnaacaagcatcaatcatcatagaaaaattagaaataggaagagtgaaaaaagg

SEQ ID NO: 48462 - DNA, 238 bp, Arabidopsis thaliana landsberg
gcttcacaccaatctgggacaccctgaaagaagtcagagcgggatgtgcgggctagatctggatagactctagccaagcgagtggtagtaacgaatacacgaaatccgaatgcgcgaattgggcataacctgtttccaagagtggatccgtgcatgatggcacaagcccgtgttcgtccaggatgaagcggtattgccacttggatgcatcaacaggtagcatcggacgatgaaggag

SEQ ID NO: 48463 - DNA, 527 bp, Arabidopsis thaliana landsberg
atgtatctcgacaagtaactttcttgcttctgggcttagctgcaacacaacagatgaatatagagaaaagatgttagcatctccagcaaaagagcctttagcaatcaaaaacttttttcgggttagtcaacaacctttggctttaacgttttggcatatgcaatgtagcgcttgagttgtacggtagtgaattcaggagatagcgctgcttcatgcttctggtgaactcgcacaatatgatgggcaatgtggtaatccgttacctcatcagggtcatcaatcataacgtacacaagatcaaacctcgaaagaatggcaggtggaagattaacgttatactgaaaaagagcatgatcaaaccacaattagatataaaaccttccatgaaagttcttaagcaaagaaaggaatacaaatatgcatttgcttggtctaattcttggatcaccttaccttaagctgggatagatttatcatatcgcccaccaacaggattagctgctgccagaattgatgtcctagcattc

SEQ ID NO: 48464 - DNA, 297 bp, Arabidopsis thaliana landsberg
cgtgtagctacagccaagtatgcaggcttagattcacgggtcagaactcagctagacgacattatgactccgtgaagcattcacatttcttgcactcccgaggacttatcagaccgttccaagctttgcgctccatcgcaacgccaactaagcgccactctatcgccaggacttggcgggatttgaccgtattcccatgggttcatcagtttggtctcttatcactgtggtgacgttagagacgacggcagtgacgtcatcatgctttccgccgttaccacctgtagcgagcctccg

SEQ ID NO: 48465 - DNA, 1001 bp, Arabidopsis thaliana landsberg
aagctcttcagctctctaagatcctgtgtaattcctttggtcgaggatgcttctctcccggagaattattcttttctaaaccatcatcggtctcaatccagctaacacctgcttctttcttaaaccctgtgtctctcatagcaacttttagccttgcagcatcatcaaatcttcctgcatctccatatatgtttgagagcataacgaaattagccgggtttcttggttcaatcttgttcaactcttcaagcgcaagttcgccaatgtccaccttcttataaacctttgacgctccaagaagagtagcccatataacagcatccgcttttaccggcattttgtttataaactcaacagctagtgttaaaaatccagcccgtgatagtagatccactacacaaccgcaatgctcaatctcaggcattattgagaaatcagtaaacatggaattaaaataagccaagccatcttcaaccaaacccatgtgtttacaggcacataaaacaccgacgaatgttaccttgtccgctctaattccggaatttttcatctcatggaataaatctaaggcctcagttccatgtccatgtgcagctaaaccgttgatcatggtattccaacttatcaaatctcttctctttatgcctttgaagacttccatagctatctctatagctccgcattttccatacatatcaatcaaagcattcttaacattaacatctaccttattgtaaccaagattttctccatacttatgtacccatttcccgaaatcaaaagctcctaactttgcacaagcggataagactaaagtcaatgttgcatcgttaggaacaacattcccttcatctaccattctcttaaacgaatccaacacttcagaaacccgcccattttgagcatatcccttgatcaaaccattccaagagaacacatttctctctggcatatcatcaaaaaccctttcacatgctttcatatctcccatatttgcataa

SEQ ID NO: 48466 - DNA, 692 bp, Arabidopsis thaliana landsberg
ccacagagctttcggccactatgcaggacagtaggcctcaacaccacactctagcccatacagtaagagtcttccaatggttatggatcgcatgttgaacgagctaaaactcttgaccaaagactttcaagatgatgaacatataaaaacaaaggcaagaaaagctgttgcattccgtgcatatcaagccaatttattatataactattacactattagggcctattcaatctgaactgttgcccaacaaaaaacataatattgtgacctttaccttcttttttttaaatgttgaaaattttactaaaatattttataaacaacaatttttagttaacaatcaataaatttggtcataaatatgtaactattagtctattactctaaaaaatattcaaaaaaaaaaaattgttggcacatatcattttcttaatccgctagtcttctagacaagggcctgactgttctcactacccaggtttacttgagctttctttcattgtgactgtcctgttaaacactagcttttccggggtagaatctttgtcaaccacaaaataaccagttaagaaagaagcacacccattttattatctatgtcttgatttcaataaacgaataatgagacacttgggatgttttgatgtttacctagtctctcgaactggaatttgtccccaagggcaggtttt

SEQ ID NO: 48467 - DNA, 259 bp, Arabidopsis thaliana landsberg
  unsure (1)..(259): unsure at all n locations
cttgttattgcagttagataagagagcttagaatgaaaatattgcatcagatcaaaaggattgcattagtcagtcggtaataaatattgacatcggtattgaggccttgcagttcggcaattagtcgaacccggttgctaagatctcgtatagtatatagtatttccagcnnnnnnnnnnnnnnnnnnnnnnnnnnnnnnnnnnnnttgcgtgatctctgaaagcgtggagaagttggtcatgacggccatcttgtgat

SEQ ID NO: 48468 - DNA, 1167 bp, Arabidopsis thaliana landsberg
tagttagtgtgtacgattcctatgacgtagttgaacttagttttccatttttggccatgatgaaaccatgtgagatgctcaggctcctcgaggacagcaatgtctgcctcttcatcaggaatggcatcagatatatccccaacaggaagaatactccttttgtcaatagcaaactgccataagataaatttgaattgctaaggttggcacaacacagtcacagagtactacgtaaaagaaatggaagaattcaactctatatcacacggaaatgaaacaatcgactctatgaaaggaagcagtatgtgtttggtacccaaaagaagattcttgagagtcatacctttccaggatagaaacgtatctcaaaggctaaacgaaaagagactctctcctcaagccactggcggacataagcttcttgctctgacggggaactaaaagtgatgctatttgggtagacaagcttttggtgcttcaaagtcagccatggaatcaccaacgtgacccgtctttccccatcatttgcaaggtaggcagcacggaagagaggattaacagcagttcccgtaagccatggaatactagctgttgtaaatatcgcaatgtgttgctcctgctgattcgtcatatcatctcaagctaaacctctacaaattatcaaacaaaaagactaaaccaatagattcttgtaattgagtttgatctgattattgcatcttcccaataaggataacattcgactacaaattcttaatttttctgcaaattcaaacaatcttttcacacgattcaagcgattttcgattacatcaaaaaaaaaaaaaaaaaaaaaattgaagccatacctgtaagattccaattcagaaacaatctttgagttgacagaatttataaaagctgatgattcgcgtcgagttggggcaaataagcaaacgtagaaggaagagagacgaaacaatattctagggtatgcgtgagaaggagagaatattctcggaagatcttcttcgtttcattgtttatacaaaattaacagactggttggtcttcgcaggatcctccaatctccaacattctttttccgccaagtctagaacgaagaagaatctaaaaacgactttgcgtgtctagactacgtgtcgtttcgttacatttaacacacag

SEQ ID NO: 48469 - DNA, 508 bp, Arabidopsis thaliana landsberg
caataaggaaaaattattggaactgcgacaggagattcgcaagcagaatgtttgaggaagataagattagacgcacatgattttatttgcaataatcatacaaagccgttaaacgttataaaagactaataaaaagagagggcctctcaaggttagcttcttcttccattgcaagccgctcctccacaagctcatcaatacatgttacctccggaatctttgcccgtggctcttccatcgccttattgttacaccggcagttgatctatgaaagagtctcaatgaggctcttgtggattatcaaagtatatctgccaccaaaaccaaaacatatgtttagaagaacaataccttaattggtttggttcatatacgatcaagcaatcatcacctagagcatggaaaaaagatctaaagttgtctgcttttttacagtccaccattttgaaggcagagaagccaacagatgttaagcatggcaatcaactctagatggtaagcaagattg

SEQ ID NO: 48470 - DNA, 669 bp, Arabidopsis thaliana landsberg
tgaatacatgggatcgagctctcactggcttcggcttcgacgagacttggttattttcaggtttggattccggtttcagatccgtggatgacatgatcccaatgccgtaagagagataatcactcttcatataaaaaaacaaacataaaaagatatattaacaaaagatgcagtcggtataaaatatataaagattttgttgttgtttactgttacttattaaaataattaatacatatgagtattttccttgccgttttttccacatttagtcctttatattttgtttttcccttcagatctaatatagttggttgacaaagcaataattatattcattaattttattgaaacatttattagtatattatagcatctcatccttataaacataataatataaacagtacaactacgtatcagaacattatgattcacaatagaaacatttgaaggaaaaaaaatatgtatggcttttatttttatttttttattttgaacaaaaagttgtttttattctgttctttaaattataacgcaaatacgaagataagaagatgctgaaatcccaaaatttaaagaacaatagaaagggcatacctcaaagctacaataaaaaaggtagaaagatatatctttgagagggttgagctaaaaacaaaaatgttt

SEQ ID NO: 48471 - DNA, 389 bp, Arabidopsis thaliana landsberg
catgttatagaaattggataagcgaacatctttacaactagtggatcagcttacatgctcggaagtacgagcacagtgtgagtgtaggcatcggactcgacacctagcggatagcgactagttagacacaggtgcggaagatctcgaatagaaccgcgtagttacaggggtgatttaaaccttcccctagtattgcccaggctattgcctgctctctcaaaccgtggctcagtagctcatgtcgaccatctcttcatgcgtcatcgtctgtactttagtcagtagcaggagctttggtaaatataagatcttgtctctcgtatgttgtacggacctgcgtagtttgtaagcatggattcgctcagactgttccgagtagcaactaggtg

SEQ ID NO: 48472 - DNA, 651 bp, Arabidopsis thaliana landsberg
taaggaccgaacttgagagaagcagatgctgtacctttttaaaacattttatccaattgctttttaagaaactgagactggattttaaaatactgacacttccagtttttgtacaagtatttcctatatttggttgttacagagccaattaagtcttgtagatcgtacaattgctcatacgactaaaaatatatatacacaggtcttatgaattgtagttttataccaaaagatgtgtttgttacattatatactattaccaacgtatactaatgttttagatttttttcttacaaactaatgtagtaatggttattagtttctatatataatgatagagtagatactattactaatctatcaactattccccaaataattgtcgacgtccccacgtggttatgctctttcaaactctatcaatgtcttcccgatataggtgttaacatcggtattaaatgagataggacccataatgccacaatctgttcaccggtgtagcagtaaatgcaatttgagtttaagaaaacacattatgaaataaagacttcaaaattcgagaaaatgaacacgtaaagtttcaatatatatatcttctcaaaacagctatagagcctagagatatataatcatataaaagcctaagcattt

SEQ ID NO: 48473 - DNA, 914 bp, Arabidopsis thaliana landsberg
  unsure (1)..(914): unsure at all n locations
aaaataagcccacgatgaaaatgacccaacaccctaactcaaccataatccaaactataatcggtattacatgcaacatggacttataacattatgcaaagatatgttactgtttggtaacattatgaaaaaaacaaactattataacgatattataagtcaaagcttgagagataatcttaaaaaccagcgcagtaacacagagatgttttattggtgtttttttttgtttaaatctgtttgatagtttttcaaaatgtttatctgatctattattttttatatttcgaaactatttatatgattccagtattttgtttggttgaactatattattatataggaaatgcataaataaatggttaattttataatcttgttgttttagctaaagcattctagaaaagaaaaaaatattaatggagcaagtataatctgatgataatggtgattggcggcaacaatcaaaagatttataatttcatacgttggttgcatgtataccagatcaatcattaatcaaaaattcaacgtataaagtataaacgtaatagataaagtaatcgtcatctttgtaaactaaccgatatgaaatgtttcgtcgtcgacaatcccacattttacggtgaatctatttcccaaggtaccaccttatctgaattctcatttgtttatagtatatatcgatccgttaattaatactctgattcgttaatgtattgattagtgccggtgtccgctagattaatcactactagatactaaaattacaggtaggccgtagttgtttgcatataatttgtgtgtgcatgtatagacgtaataattggtagagtatacgtacttggttgcaaagagacttacacaataattggtagtttgttaattaatactagtatnttatatagacaatg

SEQ ID NO: 48474 - DNA, 507 bp, Arabidopsis thaliana landsberg
ttatgtttcaattgtcagttattgtttatttttgctcaattttaactacattttgaaactaggctttcaccatgtgttagagataggtttgggtattaaatttttttgtttattagttgctaggaaagtttggcttatgtttcttttgccaaattttgttcatttttcctccattttagccacattttggatatagggtttcaccatgtgttagagataaagtagtctaactacttttattggaagacataaagtagtctaactattgttgccaatgcgctcggagcaggtccagcacttaccgtccgtgcggatgagcactttgcacatccagaatgcccgttcttgcactgattttacacagagcagagcatcatgcggagctaccgatcaatatgtactgtatatatacatgcatggtaatctaacttgccatgaaaacttcggactggaagggtaggcaacagatgtcgcactccagcgcgtccttctccatggatagtgcac

SEQ ID NO: 48475 - DNA, 384 bp, Arabidopsis thaliana landsberg
  unsure (1)..(384): unsure at all n locations
gttgctgccatgccacgtgtctttcgcggttactggtcctagtcttcttaatcccggagcaggacgtagtggcgttctggttgatgccatcactctgtagcttcgtgccgctgggatttcagctgatcgcgatgatcagttgtgcgaatcagcggtnnnnnnnnnnnnnnnnnnnnnnnnnnnnnnnnnnnnnnnnnnnnnnnnnnnnnnnnnnnnnnnnnnnnnnnnnnnnnnnnnnnnnnnnnnnnnnnnnnnnnnnnnnnnnnnnnnnnnnnnnnnnnnnnnnnnnnnnnnnnnnnnnnnnnnnnnnnnnnnnnnnnnnnnnnnnnnnnnnnnnnnnnnnnnnnnnnnnnnnnnnnnnnnnnnnnnnnnnnnnnnnnnnnn

SEQ ID NO: 48476 - DNA, 439 bp, Arabidopsis thaliana landsberg
caaacaaaactaacaacacgatggctggcatgcacaaagtaagaagaaatttacctaaagtatacactactagcagttgtcacatttcttatttccaattgcaagccatcacaatgcttcatgatggagatgcgaataacttggtagatccacaactacatggtgagttcaacttggaagaggctataggagtatgcaaagttgcactttggtgtattcaagataatgaacttgattggcctacatgatattggtatgccccccatgccaagacaacttgtagctataacaaaaagagagttttgatacaaattagaagcatttatttcccctccacgatttatagcaatgacaagcaattatactttctctttgtttacgtctttgtgaatatatatacggagtatagcactatatatatacggagtatagcactata

SEQ ID NO: 48477 - DNA, 607 bp, Arabidopsis thaliana landsberg
gaatgagccgatgtgtatagagagaaagagaaagagttgaaacctcgtcataaggaggacgattatggttgtcaactaaaacaggaggaggaggaggatggtgatgaatgggcggcggatgtggttgagcagctgatgatactgcggcgggaggaggtggcgcacctgccggcggccactgctggtggtatgggtggattccggcgccggccatgagattaaaaaaaaaaaacctaattactcagagagtcagagattgattgttcgaaaaaacttctgcggaagaattgacggcaaagaaggcagacttattttttaagtcacatgcatcgcacgtgaacactgtaccactttaattttatttctttctttttctgttaaaaaactttaaaaagaaaattagtttttaatgtttttagaattataattactttaagtttttcttttttcaacccttgtttttattggaaaagaaactttaattgtattttcttacttctgtaaaaatattaaatacctaacaccaacattatagtatctaaatccacgatcttaaacactcttaatgatattataatccaattcagaccccgcccaacaaaaacat

SEQ ID NO: 48478 - DNA, 555 bp, Arabidopsis thaliana landsberg
tgggctcactttctttctattgctaacacataatactggaataacgttttcttatttgattatgaaagaatttaaccaactaaaaaaaaatctgcataatatttatcaagacgcaaaaatgtagaatttgtatttttgtctaaaaatatatatattaaaaaatattatgcaaataagtgaatatacaactgtgtattttagtatatatttttcatttttcaaatttttttttgcaatttatgtcattatactgtgttactaatcgaagtatgagattgaggttatgcttgtgttttcaaaccagttcctaattgaaccaaactttatccgaaattttcaaaaccaaaccattataataagatgaaccggatgagaaccaaaaccaaagtgagggcaaataacccacgtgtcatctagttattggacacgtgttgatcggcgtcgtcgtatgcacctgaggagccgcgacatccgcttactcggcaaaggatttgtttgtcattttgcgcttaggttacgttacctgacgtgttatacttatactataagacaaca

SEQ ID NO: 48479 - DNA, 763 bp, Arabidopsis thaliana landsberg
ggtattttaatcttgaatcttttggtacttacggaagaaacaagaaatttggtagcatgtaatgatctaactccagatttacatccctacaaaacaagatcataacaagagtttctagattcagatctagtgaacataattgaaatatactttcacatgatcaggacaagactctgttattaccacgacaagatgatcggtttggttacagagagatgaaacatgtttcaagaaattagggttaatctcttgaacttgtggagtatataaccagtaaggaacattgaagacattttctgaatcaacacggcctttcttgaactcttcaacagttctgtgtttaacagctcttaaaatttcagaaatcaccagacaataaaggcatgactgaatctgaaaggtttaaagatttacctgacatcaagaaacgtgtagccagaatcaagaaggttctgagcttggcttacatcgatggtaatgacttttggttctgactttgatgtagttgtgcgaggaagatgaataaaaacaatgaaaataagaagaaagggtctaagaacgtgtaaagaatccattttgttgctgaattattttctagagtctctgaacaagaatcagtttaaattgtgtatgtatatatactagtagacgtgttgatccgccgttggattcgagcactctgttttcattttggcggcagtggtgtatacgtggcatatccgccgtcggattcgcttaccaggttgattttttttttcattgt

SEQ ID NO: 48480 - DNA, 510 bp, Arabidopsis thaliana landsberg
aatctgaattttgtaacagtagtagaaccgaatcaggttaaaagggttatgcataatttaccaggtttttattaaggtgattagtcataaataagttagcagtaagatgttgataaaatattttgattttctttttagcttttttcttcacataaattcagaaaaatatcgtagactaatttttctcatacgtacggtgaatgtgaattcaattgcgtactttgttgaatacaaaaacaaatgaaaatgaaataagtagtatatgtttcttttgttttcgttttttcgtcaagtagtatgtttctttatcaaaataaaataagtattatctctattttcctgaacaaattacgttttcgtatacccttattaggaaattcaagctcaccacgacagccgtccaaacaatttgccaaacagtccatctttaaaacacaattgatacatatatttttgttacaggcatatcacaaagacacaatgttacgtaaatttgggaaattatggagc

SEQ ID NO: 48481 - DNA, 397 bp, Arabidopsis thaliana landsberg
acgagagctagcttctgaattctgatccagcagttcgtgtggcactggttttcggcagcatgtccgttctttctgtgcttcagaaactcaagagtccaggggcctgttcggctggctacaagccgacactgttgcagctgtttggactgctgcagctgcaatccatagagagaaaaatactgtagaagccgcagccgcagccggattgcagccgcagcaagccgcagcgaacaagctgcagattcctaaatcctcttgttctagcaattgtaagcttttgtcaactattcaaaatcgcaccaacaaagtaattaataagaagccaagcatctcaaagaagaaagaatccaacaatacgaatttcgatacatcctctcaaagaaagcttttttttttg

SEQ ID NO: 48482 - DNA, 1292 bp, Arabidopsis thaliana landsberg
tttttgcatatttgcatccatcttactctattgacacttgtcttttgggcttatctcactaccatatacatccatacaaaaaaaaacacatgcaatgttcaaaacgaaaatatgtttatattataattatacgctcgaattgggttttctgagatcagattgcgttgcgactcttatacgtaactcgaattgtataactcatattctacgttaaaatgtttcgtgcaaatgtttcctcgattatcgggtgtgaaccaatatattgatttggtggacccagttatttcttgatacgtagataaataaaatgacacaaatcatatatttttctatcacagaaaataatcaacgaaaatcacatactgtatttggccctctcggtaaattgtctaccttcaaaagctttttccccaaataaactcaatttctaatagttgtagagaacaccaaaaagatgggatgcttaggacggagaaaaagtttagtctagtatatgttttccttaagaatgtgtttttaagttttaaccaattctagaagctcaaatttgttcacattggattttctggttgaataaaacagcctaaatgagtcttagtcattttaattcttcatatatacaaggttaaaataattactctggaagagtggttaataaatcccaccaacctaatggaatgtgtgtattatatatgttcagtagcaggcagagttattgggagaatttttatacatggatatgttgggtcgtcatatatgcatgtaactagattgtcaatcctaccattagaaaactttaacaattaattcaattcatctccatacttttctcgtccttgtttctaggctttctagaatcacactacacatgttaatatttttttttatatgaatgcactaatagagaatttcctaccaaaaatcaatatggataatggattgaataattacttctttttttttactgtgtagcttatgagtttcaagattctaattaacaatgtactttcttttgtttcatttgtcaagtttttcagttaaatggttgaaattatcagttttatttgaatcagtgttatatatgcaattatataatagctacttgaatcagtcataacctgcaactggtatattatttacactaacttaataaacattaaaaaattaaaatatgataatcgagttgaagtgacaccaggaaatatcaccttataattgatataaaatcgtaagattggagtccacataatctacaaatttgtctacacgttagatttttcttttctaatgta

SEQ ID NO: 48483 - DNA, 675 bp, Arabidopsis thaliana landsberg
tcactgtcagaacaccagcaacctatgctttctgcagcatagcacccatgtatagggatcagagacatgcgagaatgggcataaaacacaataggtaatcaagggatcatgtgaagatgcaaatgtataggttacaaacatactcacgataactctagtaccactgtctataggtgtaatcaacatgtcactgagcctaagtaaaattctataacaaattgagctagtatatatagataaaagtacctcctcgtctccagagttttcactatcatcatcatctgaagaatcttcttcactaccgtcagcgtcatcatcttgcttggctttgacatcttcatttggcaactgaaagttcacctgtttcgcagcagatttcggagcagctggctcaaccaaggccaaataaatttataagagattgatgttcttaaataaactaaaataagacaactggagacaaatcattgcaggactggatataaaagtccccatttacctttgaaaccagcagcctcaagttgatcatcaatcaaatcctcaggctcggtgagatagagtcaaggaagtcaaaaacagagtaaagcaacaagtccccaaaacattttcatcaacaaagcttaaagcgataacaacaaaaatgttcaaatagtaaaggatatggatcagatgcat

SEQ ID NO: 48484 - DNA, 421 bp, Arabidopsis thaliana landsberg
cgtgaagagtcattatcctatagatcttatcatcgagtcattatcctatagatcttgatatataaaatacaacaagaactaaacatacaacaacttcgctgtagtctagttggttgtgtctgttgtagtctttgcagtctaatttgttaggatattcaactctcagctgggagacccgagttcaagcccctactattaggatacttttttttcaataatttgctctaaaaatacatacaaaaattgttgcgaaaatactgttgtataaaaatatgctattaggactcaaacttggatctctcagcttagtatcctaactagactataataatgttgttgcatgtatctcgaaacaataatgattcatagggtaacggctcggcggcaatctacgacgtcgagctcagcgctaaaatctatg

SEQ ID NO: 48485 - DNA, 822 bp, Arabidopsis thaliana landsberg
atctccttttccaaaaccataagtgctgtaaaggtaatacacataaggaccctgaagccaatccccagctgaaacaacataatcatcgatacaaacaagtgtatcagcatgatatgattcatcaacgtattcaagaacaacatactaccatccttaattgcttcatactcgtaataataacttgtatcatagtcactggtcctaattattccatcaatatcatccaaatatttgatcaatgacacatttgatcaaacctagttatgatacatgaaacaaatatgccagaattaaaataaggattatcgtcaatcactgataccagatatggaaagagcaaagcaaaccatcgtattcaaatgataaattgcagatttgatatgagctataacaacaaatccaatcagtggatgaagaaaacgacggcataaattgtatctacttctggattcgatctagcacgtacttaagtggatgacgctaaaacaaaaaaaagaagaagtatcgaaatgaactctcgtctcgtccaaacacagaatcacttagatcagatcgatgacaggtaacatcaatcaaattgcaggtgccgatcaatcaatcaatcaatcacagagctgattccgcaataaggaataagagagtgaaatcgagaagcgataatggcggagagacgtacccatcataatagagaaaacgaggaggtaattgttcttgaatgaattgaaggaagacgaagtgttgatccgatccttgttcgtcttgctaagctccaacgctgtcactacggcagccatgactccaaacaccaagtagtagaaaacc

SEQ ID NO: 48486 - DNA, 1414 bp, Arabidopsis thaliana landsberg
gaacattcattataataaaaaaaaaaaaaatttcatagttacttcaacaagtaacaacatcagttgttctggattcgaaagagagagatatcgaaaactttggtgacccaggacttaagaaagtgaaatccaaatttgatattgggcctgttgtccattaaccgtagtagaataaattacacgcgtcttctaagtgatattttagttgtcgtcttcaatcatttttttttttttttgtcttcttcactgctatttaaaaacttcatgtcatgtacatatatgatatatgattggaaatatttgaatatgtgaagaatccacttcacacatggctactgttagagaagaaaatatgtgattataaaaagcctacgaatcatagagaagcaaatagaaataaggtagaatctcattaaaacaaaatgtctcatgtctcataaactcatttgccaaactccaaaatataattccaccaccattggggagctctctctcacctgcctaaaccggactccgatccggacatgtggtcgtctacattagacgttcttttgaagtagtataattttctacaataatagcttgttttgtagaaaaaataaataaaaaggttttgataaaatcatataaataaaacgtgctaaaaagaaaaagagaaaaacgacaaggaacaagaactagtaattaagtgtggacaaaagaaaaaaaaagacgaagaaaatgcatcaatcagataatattgattcgaaaggaggcaagcacgacgacctactaaatagccagccacaaagcccacacttagccgagagccgagccgtgcatccattactcgagtaggacctaataagaatgtccaagtcggctgatttgacacgtgtcgtttaataatttggtatcgaaaaacattactccctccaatttcaattattaattaagaaaagaagacaagaaaaagagagagagagaaactacttttgttttttttgggtaaacgtcttcgtcttcttcgtctctctttttttttttccattacttttcagaagattaaacattcctctcgccggagaactaactgctcgatagatagagataaagagagctctgataactgccattctgtctctatctgcttcctctagataaacgttaggcttttgttttgtttgaaaggggctaaatttcgtacacacgacctatttcaatcttcttattggattttgtagagaaaactttattataggtttctggggaatcttatgagccgtttagaacaaggatttaggcaataatatggtcagttagtttcttgtgctagcaattttgaatgggagattgcgacgacgacgactagtctctcctcgaatcagggtttatagtagttgttgatagagagtcttgaatggaacccaaaaac

SEQ ID NO: 48487 - DNA, 554 bp, Arabidopsis thaliana landsberg
ctagtcgcggatagtcatctggtcatggccacagttttttcttatggagaaaataacaaaatttggccctataaacagaaaaaaataaagtgcaagaatcggcagcatgagaattgtttgtatccaagactatctttagtagcttacccatcctatttatatttaactctacaacagcgtagtttatagtacagaaaagtatataaatagtgttttaagtaaactattaaactctactctacatttaaactctactattaaactctactctataaatagtgtaatctataaaataatattttaattaaactatgagtaaactactgactttctaagtgttattactgaggattcctacaccacgataaaatatacttagtctgttctagcttttatttttatgtccatatttaaatggataacaatgaatctagaatgcacatactaatatcctaaaataaatactattctaaaaaacaaattataatgaataataataactatatatacacccacaggtgtaggacaatttggttattataattattattata

SEQ ID NO: 48488 - DNA, 1664 bp, Arabidopsis thaliana landsberg
agtcttagtctttagttcttctgctacaaaaattggtacatcaacactagtatgtctttgttactcttcaatgatctagttgtagttctcagtgtatagctatctatgcaactgctttcattagttcttagtcttaatttctgctgtcaacttatgtggcttgtgttcttggctgcagggagatcagaaatcagtgtcacggagacagtggatgacggcatgtgtgtgcgcatctgcagctttaattagcaattcttatacctttgtctctgtacaaagcgcagccgctttagacaagaaaccaggaggttcatgtcgtaactgccagggcagtggtgctgttctttgtgagtgacaagttcttttgttttagtttcttatctggaactctgatatagaaacatatccttaaacgtatattgtatagtatatttgccttgtgtttctttagaatctgtagggtcttatagcttaagattgaaagatataagacctgattgtgacttttaacaacaaacatatggaactcttgataatagttttcgtagacaccttcctatgtgaaaagttcataatgattctctgtttccatttgatatgatgcaaaatgcctcatgagcttactactgatacccatttggtttaattggattttgttatgatataggtgatatgtgtggtggtacaggaaaatggaaagctctcaaccgaacacgtgcgaaagatgtatatgagtttacggaatgtccaaactgttacggtttgtttccttcccgatatctctttagtcttgtttggtttcgtaacacttgaaatttcctgattagttggtggcttctattgcaaacaggtcgaggtaagcttgtttgtccggtctgtttaggtacaggtttaccaaacaacaaaggccttcttagaaggcctggtgctcgtgagctactcgaaaagatgtacaatggtcggcttcttcctgattcatgagaaggtaggtataggtcctttttactacaacttcacattgagattattgggttcacgaattaaaagcttggtgaggacaagcgtgttcctctctcttatctttccatctcttgaaatggttgcagattgttactgcaaatatgattttaagcacagagccagtagacatgatgatagaagcggatgaaaacttacacattgaggatgcatggaaagctatagaagaatgtatcgaattcaacatgtttttataatgctgctaggtttgtgttgtaaattctataaacataaaactttccttcttccccatacagactagacgaatcagtttcgactaagatactcactcactcacctatgcatttaggcatatagaatcacacactttgattattctctttagacctaactacacacacatctactcaatcacacaactatttcatatttcctggaaccataatattccttacatcaacatcatttcatactaaaaagcaatcagtctagttggactaataccggtaagcataacaaataaagaggatatagtgaaatgtgaaggttaagaagaatatgtaaagatgtaaacatacagctggtttcgaaatcattagtcgaattcaatgagctctaaccaagctgcatgagagacacatgttcatgtgcatgcctctatattt

SEQ ID NO: 48489 - DNA, 1037 bp, Arabidopsis thaliana landsberg
gttctctatggtcctggtgatgtggtccagtggtggtggtaccattgacgccgttagagtacttgctcgaagtcggtgcagcaactgtgttacctccacggctcttacggcgaagaacaatgaaccaagtaagtggctcgagaataaggatacaagcaccaagaaagatgaggatcccaatgtaagcccatcgccatttatcctccgggtccaaaatgtcgaatcctttgaaaatgttgacaatagagaggatgatggtcgtgtatccaacggtgtgatggtacacgttccagtacgttcgatatttgtggtctggctttggccttacaagcagagcaaatacttgaagtgtggcaaatgtgaagagtgctattccaaggttacgatgggttgagtaagatgtgcctggtgagtcgttaccaagcttgattccggtggcccaaccggctaccccgatgacgtaacccgacacttgaaaggcgatgtggagatagaaccaggttggatcggcgaagactttcatgtaccgagccatcattgctcccattggcattagtactccccagctgaccgcatttagtactccatgcgtctgttttcataaagtttccaatgtttagtttatttttcatagagtaataaattttatattccaacaaataaaattttatagtctaataaattagctcctaaagtttattagtttaataaatttcataattcttcatcaattctacaaataagacttttcaaataataattttgattatggaagtggagacataatttgtgagtttggttaaagtgaaaccgtgacagagaagtccactttctttttcaaagaaaacctaacaaatgcgtcattaatatttgactagcttttcaagaaattagcacattacaatttactatatatgaaaagatatatacatgctaggtgcttctattaaaatattaatttataaaataattgaaatgctaaataagccatcatatttcactttcagtatgttgacaaaacacgtcaatatgtgttt

SEQ ID NO: 48490 - DNA, 486 bp, Arabidopsis thaliana landsberg
cacgtggaattttaacacgaatgcgggttgctccgccggtaatgactggaggttaacgttggaagggagatcggagaaggcggagtcggtggggacgaagactgtgatgccggcgccacgttcgtcgttttcgaattctgttatgacaccggaagcgacgaggagggatagagcgacgttgaagttgtgtccgttgattagtatctgagtgagattgattcccgccggtggaggggagagagatgttgacatcggcggtggagtgagagtctccgatgcggtgatatcgattccggtggggacgatgagggagtccacggtgaggacggttatgttgggagggtttggtctcgagaagctttaacacagtgacgtttttggtggctggagatccgatcgtgacggatcctgaagccgggtcacgggttacgttaacggatccagatccaaagaatgtacgaccggaagcttcgtagagagtagtga

SEQ ID NO: 48491 - DNA, 352 bp, Arabidopsis thaliana landsberg
atcagaatgcatactttcttaacaaatgatctccatagacataaacgctatgtttacagagtgaataccagcctgacgattcgatcttgatgattccatcagttattggatctcacctctaaccgaaactatgtactctcgcgttgaggaataacctaggctacttaatgctttacattgtgggggtaggaggatacatgttgatgtgatggattgatcatattatggcagcaactgccccaaaagaacattcgctgactatagtcttaacatatgaaaggtattcgatatgacatcggcatcttaggaaggactggggaaccagaaatcaaatgcaatgttaatgatatgg

SEQ ID NO: 48492 - DNA, 528 bp, Arabidopsis thaliana landsberg
ataacatccgtcgcggcggtggcaccatctcctccaccgcgtcctcgtctcaaaatatcacctcctccgcttccaccgacagtggtgagaacaggtatcatcgacgagaatggtgccatgtctgattccttcgaaatcggcggattcgatccagattccatcgacgagcttaaatcagccaccggaaattcgtcggttgaggaaaaagaatcgccggaagtcggttttcagattgagaaactcaaattgtgtgacaagacgaagatagattacattccttgcttagacaacgaagaagagataaagagattgaacaatacagatcgaggagaaaattacgagagacattgtcctaaacagagcttagattgcttgattccacctccagatggttataagaaaccaatccaatggccacagagcagagacaaggtgaaatagtgtgatcaagttcttacctttatctaagccttaagtgtaaagtcactaactttgatatgtgctttgtagatatggttcactaatgtg

SEQ ID NO: 48493 - DNA, 435 bp, Arabidopsis thaliana landsberg
tatgttgtgcaacgaggtaattacagagtggaacaatttttcctgagttacaccagattttctacccagtcaagggctaacaagcgggcccggtttgtacggggacaggcccaccttggcgggatcatggatgatgcatatgtgccttcgcttctgctgaaaaggagagctcaacgcatccaagcttgatggaggtatccatggaacctttgattggtggggcccttcgccagcaaatctcttcgcggagctcgccccttcagagaagcagtaggttaacccttaaagggagaagtccactgccttcttcaccttcgaaggtggagtgaagagccttaagcctctgtagtcatcgtgaaggcatagcccccagcgcttgccttcgttatctccctagttgttttcgctgcatcggacactttgacaaatattagt

SEQ ID NO: 48494 - DNA, 670 bp, Arabidopsis thaliana landsberg
cattacagcctttggtgacagagtaagtgcctacaacttaaaactacactagcccctacccatcaagatccttagtacttaatgttgaaattaatacattttttaataaataaatacaaagtatatatttatttgaaacttgagcaagtctttgagtaaaaaaggtatgaatcgcacgtgtgattgcgtacattcgcacgcatcctatcctttcacattagttccaaagtcattttcaccaaccaaatgcgacatctccaatactcctttctatgatcctactagcaacagatttgacaaagtaagacaaattatatttcttaaccttaatcatttctgaccaaaaaaaacctgaatcattatttattagaataatcttattttatcagaattcgtaattctttagctgactaactcctaattaaaatgaaccattcaatataaaaatataaacgaacgtattatgtataaaggcagatacagaagatcttctttgaaactggggtaatttccccatcatgacacctgtatatacatacgtaccttaaaaaaatactgatctatatgtacttttgcatgaacgagtaatgcataattcttatttagattagacattctttaatgataaaaaagggaagacgggtattatacatatattaaggcactatta

SEQ ID NO: 48495 - DNA, 1735 bp, Arabidopsis thaliana landsberg
ttcaacagaaaaaaaaatatatacataaaattcatattaagttacaagtatattggttgagtggagttgtcataacattaatattaagaaagaacagtgtcatctgataatactttatctgtatatgtaagttcaactgattctagtttacgtacgaacttagttatcgagttgaatttaggtagagagtggagacacatcgatgatgatagcaaaaaccattacactagggtaaataaaagtttaatattacgtatacatatagggtaataatagacatcataaggtatgtgggatattttgtgacttaaattaaattatatttgtgacaaattttttttttatctaaagattaacattttaaaatactcatttgttacatatcagtgaaatcaccttcaaatcaaatttcaaatcaaaaagaagaagaagaagaaagtgataatccaaagctgacactttgagtaatttcccatatattaataatgattaatgcttatagccttatgtatcaatatcactcatgcatgcgtaagtttaaacgtaaaacctagatgaaaagaagaaaaagaatcacaaagatttgggcaagacaggtgttacgtataactttctcacggaagcaagcaatgtcccagaagtttcttctagaaaccaatactctagaaagactatatatcaaataaacaaatacaaaaattgacgaagaggaaaaatatattaaaagatgataatttggatacactatattcatattttcactgaataaatatacgtatatatacgctatttgttcaacttaaagtatagttgtaaagaactatgatcttcaaactctaagtagtatcataaatctgttttttttttttttcttttattattatgactttatagaaaggacactatgatgatgcaattgacatggacaaaagtcactacgacggtctatcgtttcgccccacttttgcattagagccaagtactagccacagcctcttgcagtgacaatgtcgcgttctaggcaatgtctcgccgttcgtttttctttcttagttttatattttgaaaattttgtttcttgtccttttcacttttagtctttagacttacttttttgcactacatcaacacctatctacaacatatttctgtagatacgtatatacacttctttttctagaagctcattttataacttatataacatataaagtatcctagcttcatgtcatgttggctcgtttcgttgtcgtcgacatagaatatataatgctccttcaatacttagatttagatgttgctgaataattgaatagcaaatgcttatatctaatgtaaatattagtttatcactgaccaaacttataatctagtggttaatacaactttgaattaagtgcttttgtattcgtgctgctatcgtatcatcatcgaatttagtgctattgtactagagttcgtgtttgtaaattagtgataaaatataattttactaacttatagcttaacatttcttaaacgttatattgtaattagggatgaaaacacaaatgcaacagttagtttttttattggaatataatcactacatttatcaacatttcaatttcgcaaaagatattttctaacttgtaaataagtaaattatttttttctatttgtctgtagctacgcaaaataaggttttggagaaatatgaatgtcatacagtaaacctaagaataaacaataataa

SEQ ID NO: 48496 - DNA, 467 bp, Arabidopsis thaliana landsberg
tcaaaatccaaggtttggtatccattggttcattagaagacaaaaactttttttcttttcttccaagttagacgagacaagtagcatatagcccatccatatatgagtgccaaaccctatgtaacgtgaaagccgtcggatgattaatgaatgggccacttaatattgaatcactttgacaattttgttttcctgagacaaatcaataatcttctcaaaagtcagcagttgaagactgcataattaatcattcaaactttgaaactgagtttcaacaactttgtgtggttgtgacgaatgatatatgatacttttgttttaagtacagagattgatttatcctatttctctacttaatcaatgtttctttctacaagacaatatacacaaaaagatgtatcttctttacggaaacaaaatcgatagagacaaaaattagggaaatctattgagaagagagatagacg

SEQ ID NO: 48497 - DNA, 1622 bp, Arabidopsis thaliana landsberg
  unsure (1)..(1622): unsure at all n locations
cgttgttaatttgataattatatttaataactctagttttgaattagtttgttaataattattttgtctaataacttttaattatttgggtatttaccttataggggggtgctggaggagaggaatgaaaaagagaaaaggatataaatatgaaattctcaatgtcccagagaccgatgagcgcgaacaaagcaaatgacaaaaagctttgttaatacaagaatcctttaaaaccatgcctcgatttccccattttgaccctccccttttctttttcctttttttttttctctctatgaccaaaaaaaaagtgatgaataatttttgcaaaagagattcttttcttcagactaatattttagttctataatataatctgtattctattgatccaagtaattattagttcagaactttattaacgcgatgtctcgtggtgtaaaaaagttaataatgtgaacacttcgacttgttctaattatagcaagttgattactaaagtcaaaaataatttctaagttcgactttgtgatttttatacaataaagtctagaagcaactgtgatcgaaataaaacgagtactctattttactttaatatcactaattatatgcgagcaaattggtctttttaatcttctctctttttctttcataaaatatttcagattaaaacgcaaagattattttttaattaaaatatcattaatatctaaatagtcacaaatattaaattaaatattacatacaatttttttaaaatgaagcacaagaaacctctaaatcattttataaaatagaacggttggaatattacttagtactatttagtcaaacaattcatatataacttcgttataatattattggcttagtttaaaaagataatttgtaattaagagagaatgttagtggtatttacgtaatcaagtcacgaaagaaaaagaaagttaaaaaaagagtcaaagtttgtgctaattcgaaaccactaaagtcgtctcagcttaaaaagaaaacatattttaaatccaaaagaagacgacaaaagtctcgctctctctttttctttctctctttcaattcaaaatctccccatacattttttgttttctcttataaaagattttctcgacaatctgcaaaaaaaaaaaaaaaaaagtgtgttttgaaaatcaaatgtgatgggaagtggattctcctccttgttaccttgcttcaatcaaggtcaccgtaaccgccgtcgtcactcctcggcggcgaatccctctcattccgatctgattgactctttccgtgagccgttggatgagactttaggccattcttactgttacgttccttcttcttctaatcgcttcatttctccttttccttccgatcgattcgtttctcctactgcttctttccggttatctcctccgcatgaaccgggtcgaatccgaggttccggatcatccgagcagcttcacaccgggtttagagcgatttctggtgcttctgttagcgccaacacttccaattccaaaactgtccttcagcttgaagatatttacgacgatgcccctgagagcagtttcngcggcggcgttaggaagagtgtggtgaatgcccatggcctttga

SEQ ID NO: 48498 - DNA, 1469 bp, Arabidopsis thaliana landsberg
ttttaattatcccttttcgacagagggatgatgaaggacattccgcaaaggactaaatcaatagtcatcctttttctcattttaaaactttatgagtgatcaatcaattttcaaaaaaaaacaaattcactcattttttacgtagaattggtaaaagggaaaaaatgtaatcagtagacattggaagaaggaaaaaaaaaactctaataatgaccaaatcagtagagagtcttgagaatgagttcttctaagaattgagagtgaaaatggatgacgtggcccacacaaactgacaaaaaagcaaacttgtcaccttgtgagttgtgtacacgcgtcccaaggcgcgttcaaactgacaacttaagattaaattctcgtcccgacattgattctctgcttctgtccttcttaatgtttcgtagtcacatgtaagaataaaatccggccgtcatcttacgtacgattaatttatcatctactacgtaattaaaatgtgattgaaaaaaagagttattattttattttcacacaactacatcttgatgataatattactttaacaaaaaaagacactattttactttggacatagaaaagaaaatatggaattattaaacctaagattccttacttttgatttggtttcgtcaattcaacccaatccacaacaagtttttttcttttgtttctatttcaccactcttttgttccatattcaaatcttcaatctcaagaattaaacaatattccttgtaaataatgcgtttatttgggtaaagtatacctttaaatcagaccaaattatatgaaaaagcatgttgaatcaaatgaaaagattttgtatcagacattgaaagtatatgtacatgatttctacgatatatccacaaataagaacaattcattttagattcctctattttgggattcgttagtagagatttgaagggaaatttggctaattgtggattcattaaagcaaataaaagagacgtatatttcctctttcagtttatatcatttattcaaattcgatcagtgaagactgaagaggagagcgaactgcggagaaactatttgaccaaactagtgttctttaggcgatttccggttaaaacagtgtggtttacaaatttaacatatataatcatttggcttcaaagtatgccagaaattactagtcactaaatatgaaataactaactacaaattaaacgatatataagtcctaggacaataaaagtaacggattagacaaaattagtatgaaattaaattaagtactcgtccaatatatcagaatttttaattaagatcgatagaaagatctatttaatacattaagttcatttgatagtagtgccaaactcgaaagatacgaaagacattgtcgaaaaatacaagggtagctcaaacatcatacttggctctagactagacatgtgatggacgagaagtgtacacatact

SEQ ID NO: 48499 - DNA, 637 bp, Arabidopsis thaliana landsberg
aagtaaggttttcttttaataaaggcccaatatttttttcctattcagcctggattttataagaccggctacgatcgctctattcaccttcattgtaaaccgataaaacaatcatatacatatatataattttggcacaacaatcatatattaaaccgatagttttttttttggtgtgtttgagatgggtatcaattgttatcttaaaaggaacctagaagtaaatttcgtgacctttacacaccacacatgttgacgtagatacgcccaaacgcatgtggtgttgtatcaagacacaaagtcacaaactgtctaaaaagtcaaaacccaatccaaaaccatcatcatgttttcggcttctttaaaatcccggtttagggttctttcgtagcaacatagagtagacggtcctgactcgtgctctgcctctttaatatccggtttagtactctttcgtagtaagtagaaactctatccatatagacccaaagaagggccactcttctattctcaaaggactcggtaaaaaaacaaatgcgaacgagacaacaaaaacaagtaagaacactctacgcgctccctccaatgcgcgtaaaccccacgtgagactgatatccaagacaagtgagtaaacgct

SEQ ID NO: 48500 - DNA, 864 bp, Arabidopsis thaliana landsberg
agccgccagagagagaggtcaggtttagaatctcacgaatgtatttctcgcttgcgggatcgtcgtcgtgacttgtagctttcacgatggctacttctagatctggagccatgttgcttgctactttagcgattcctatgcttgtttggtctttaaccgcaccaatcgcttttcgaatactcggagccatctccgatcaggatttcgaatttctgagaaaaagttaaacacaaactgttcaaaaaaaaaagaagaatcgaaaatgattttgacattgatgagagattcgtgcgaaatctgagttttgattgataaagaatctaccgggaaacacaatttgaaatcgatttttctttgagctatatttagaaattaccgttaggttcgttttttgactagatctacggaggaggattcgtcggagtagaaaacggtgtcggatttgttggagatctccgggatgtatagatctgtggaaacgccaaaatttggcgttgtgagattcggcgaaggagtaaaagagaatggtggtggctgaagagagagagagagagcagagatggatttaagaggaaagttggagtccgtgatgacgtggcgacttttaagtcgttgattttggagagaaggagatgctaaagctttttttaccggcactgtcgggagttgtgtgcttgtcggaaggtaaagatgtactttgttttttactttttttttgttgtgcatacatgtaatttgcttaataacagattattattttctgaggggaaaattaactctagtttttttttgaaatgtgggtgcaaagtactacaagaaagaatatacatttgtgttgtcgtcaaagcagaaaatattaggacc

SEQ ID NO: 48501 - DNA, 562 bp, Arabidopsis thaliana landsberg
gaaaatgttacacgcctctgggacacctccaacacgagtgctgacagttaataatccgcaactagccgcctctaatatagctatgcagaaggcttctgttaaagaactgtcagaggatcaagactatagtagcgttaactgataaaaagtaatgttgagttttgtgaattttaaacacaaaaagtgtaagaatcagcacacctgtttaagaaaatatgaccggtaaccaaaacagagcgcacacgagaatgcggaactgcacctagcatttcgactctatcttgtagagaatgcttctctctcatttcctcgagtcgcacatgttttggtccatcccctccaactacaaaacgaacctttcaaaaaccaaataaaaagaaagtaaatgcggatactaatgagaaatggcagaatgattctgctactaatgtgagctggggttttgtaactcacatttgggtataaacggcatacttctggaatgacttccacgagcacatccgcaccttttcgataaaccaatctacttatgacaactatagtataatatcagtactgggtc

SEQ ID NO: 48502 - DNA, 841 bp, Arabidopsis thaliana landsberg
  unsure (1)..(841): unsure at all n locations
gaccgatcaatcgagatacctactgaatcttgtgtaatcattgatcttttgcggctaattgctagacaggggggaaaatatgatgcattttgtgcgtaacgcaagcgactcccaaaagagatgtggcattactcattagcaatcatagattcatagtactatgaattccggcgttaaaatgataagagaggtgtaaaaagcctacgagacaaacaaaaaggagacagaattccgccgttaaaatgatatcctaaactcaattattagcatttgcaatcatatttataaggcttctttagaattgtttattgctgatttattgtattgcttagaaaatattttgttgaccatcattggatacaacgaatttaatcagtgtgtagccgcgaaaaggctacatcccttgtttttgactacattttagtatttataatctacacatccattacgaagaagtacacatagaatataggctctatctaaaaagtttcactataataattgtaaagcacaaaaatatatatataaaaagttctcataagagattaattaagtaaaagaaaagatcataccatgttcaacacgactaatgtatgttataagcatttcgaatgcgtataaattttacaacaaaacaaatggaagagctctagtcatgttttcagtcaaatttcaccggccaattcattntacattgatttctttttctttcttttttgctaaaattcattttacattgacattttacacgagtttctctaaagcgtgtagattttagtattgagtgtatatgatagnggcttaatatatagttcggtctttatacaatttaaaaattaag

SEQ ID NO: 48503 - DNA, 332 bp, Arabidopsis thaliana landsberg
agcgagctcgaaaacacagtcatgactcagagctgtttccccagggagcgtgatagctgctcacctctcacaacagcatacgaaccggtcgcatctaccgtaaaggcttacagcgcatactcagtgtgcctccgcagtttacctgcgtgccgcgcatcgcccgcaactcagactgcgcagcagtagcgcgaaccgcctgatcgaaacggccagctcgcgaggacaaacaaattggtgcatgacacgcagggcgctaattgaggtcgtcagtgtcacttgcaacttgaagaagcccttcgccaccatgtccttagccaggtctcccaagcgga

SEQ ID NO: 48504 - DNA, 566 bp, Arabidopsis thaliana landsberg
tatttaaataagaccctgttttgctgcccactggaaactaaggttaaatacgtgttaatcgttgcagcattatttcacaataaattctaatccaaataagtttgttattgttttattaacatcactttagtgtgctacgtattctaattcattgatctgcagcaatgtttagtattgtcatattcttttgaattacgttgtaataatgtgtagctttcaagtaataaattaaaacagaacttaactcctatattaaaagaatggttatcggtttagtatatttactcatagaatatagactagtttattattcaagctatgcatatatacgagtgtagtatgttttatacgccttggtatttcaaaaaccataaaaatagttaactaatataatttgtaagtacgatgttagagtatatattattttcgaattaaaagtagttcacccgtgaaatatatatcttgcataaaattgaaggtaatattatctattttaggtcttcttttatgaacatatccttggacctatacttagtgtgtgtaaaaaatagtaatacatgttatat

SEQ ID NO: 48505 - DNA, 543 bp, Arabidopsis thaliana landsberg
  unsure (1)..(543): unsure at all n locations
tgcaacacaaaagttgattttgttaattagtatttataaatcataaattttaaaatgcaataattaaatatatcaaattactgttagtttataattattaaaaagtatttcttatcaaaataattaaataataataattattaaaatacctacgatctttataaaattattattttaggaacagaggaattactaaattttggttaccaaaacttttagtcaaccgctgactaacggctttgactaggcaaaggctcataattagtccatggtcagtgtaaggattttaaatgaagaaacggaattaaactancacgattttcacgtccggaaatcgcagacgcagaacgctagtggaagaccgtttgacgtaattcacacagagagcgttgggcttctccacacaagagccaagaatctccgtaacgtggtcgcgtcttggcatggaatcgcttacgaaacttttcactctgacatcatccaagaactccttcgtcaagcagacatcgccgccgccaccgctgctggaacctgagaagaaca

SEQ ID NO: 48506 - DNA, 835 bp, Arabidopsis thaliana landsberg
catctcccatgtcgtgattccagttcaatagcggccataactgcttaaggatgatgtgtaaattttagctcacgtacgccgttatgtttcaccataatgctagctagaataatctaattaacacttgattataagattttcaggttaggtttcattttatgaaaagtgtgtagtcaagattttaataaaattgttattttcagagttgatataaatgttgttttgtgctaatctctttacaaaaatggaataaaagatggattattaggggaaataaaatatgcttaaatttacttttttttttaaaaagggcaaaggtattgaaacatcaaaactgtcatggaactatgattgaatctcacatgctctgttttttcttcatctttattctttctcctctattttgtttaatggaaaagccttttctaaaagtaattacagtaaatttgttatgtttacataatgattatatatcaatcgttctactgtttaatcactaaaattgaattattttttatattagccggctcctatgaaatggttgcatttcgaaatttcaatttggataaagaaaaaaattctttaggttctaatttatttatgcttattttttggtttggttaggcgtgaagtgggcgagacacggtcacgcgccaagtcaggcgagtggtcgtttctcttcgaaagagagaaaatgtaaccgaaaccacgtggcagatatcgattcgttggtgttattgacttgggtgacagtcggtcgtagcaccaaccacattcgattttctttgtgagacgtgggtcctcgtcaaagacgctctacgtggggttacatgct

SEQ ID NO: 48507 - DNA, 491 bp, Arabidopsis thaliana landsberg
caagacggaaccatcgggggtagagacggtgactcgacaatccgatttagcaaccacgtgatgtgtgaacacgtgcagcactttgacccgacccgctaactccatcttcgactctatctccattgttggtccgacccgattcccatacccgaaacccggattcgcatatccatctcctagcgttggccccgtccctcctccgccgaatggcgtacccggaaatcccggcggacctccgattccaggaaaccccggtggacccatgcttctcgggttacccgacccgggattacctggaaaaaccggtggatttgggtttctcggaatcaccggagcacctggatttctcggtggatttattggaaattccggcgagcctggatttctcggtatactcggagctcctgggtttcctggaaactccggcgagcctggatttctcgggaaactcggaggacccggattcccagaaaaatccggtgaacctggat

SEQ ID NO: 48508 - DNA, 828 bp, Arabidopsis thaliana landsberg
atcggcctcatcaagacaacaacaactaattaaagttaatctacataacaaacttctgttagaaatgttgagttgcattgtatggtactcaaatatacgtttatatgactcagaacgatggtgactgattagacaaagcgaataaaacaaataaaaagtaggattaagtgattttttttttttttcaagtattattgtttagttgttagttgttacgaagattaaaatgatattttctcataaatggtcagcactttaaaaaaagaaaaatgcacagctctttcatatcttttaattttatttactaaattgaagaaaatgatgataattttattggtatactaaaactcattatgcatgtattggtgcacaaaatttaaaaatgcgagaatttgtcatttcaaattaaaacctatgaacttgtgcatattatgcaaaaaagacttctcaccatatcacattccacagttacactctctctacatattctgagttctgacataaccattcggttaaaatcataatgtaccgtattttaataaattttcgtcattatgtatcattgttctaaaaactcatcttcattcctccacataactttactaagaccaaaatgacaaatattgttatgtaaattcaaaattttcattaaccttttttatttttaataattaattttcattaacttaaccaatcgtatataggttgtccaaaaaaaaaaatctcattaatatatgcacacacataaatgtatatttttatatatttgcatgtaatctgcatgtgagttgtctcttttgcagtcaacgaattaattttaaaatgtgc

SEQ ID NO: 48509 - DNA, 1053 bp, Arabidopsis thaliana landsberg
  unsure (1)..(1053): unsure at all n locations
gatttaaatcagcctgtagatactgaagtaatagaatgtaacagtagagaaattatctgattggtttccagaaattttttttttacaaaaaaaggtttgaccagcttagaaaatttcacgagaaaatctttaaatggagggttattcggagtcgtacctgaaccgcaacgtcttcttgaagcgaattcaaatcagaatctgaagataatctccgctctgtcgaagccaaattactccggagaagatcgaaaactccaagaaacagcgaaatatactcttcgactggagaggaactttaaatacaagcataaatcacggggtaagaatccgggtagtcgggtcacccagtaactgttacggagctccgggttttgtttagagaagtatgacggagagaaagagagaaggcatttggaggaccgaccgtgagtaatttataaggtggaggaaaatatagagatattaacggcgttagattacttacgacgtgagttgacggagatactttttttctttctctttgagtaaaccttgaaatttggtctcgataagagatggcagggagggcccattggtgtttgccggtgacggagataaaaagagagagagagagagttctcttacgtgtgcaggaagtagcctagtggcggcttttaattggatgacgttagttcaaacgggtcgtgttacggtcatgattttacacactatacaactcccccaatgggtacggtcgcatcagtcacaaacgttttttagttgttgtttggatctctttatcaaagtttttgctttaaatcgttttctcttgttttagatagaatcatgtgttttgcccaaaaaaacatagaatcatgtctatcaaatatttgttcaatttgttatgtagggaaaattgtatcttttgattggatgacatgatagaccgatgaatgccattgctttcttttgacatttataggcttcgaattgttgttttgtttatcaaataaatccaaaaaggcccagaatcttggtgcaataggaggcccanaacaggccaaactaagaaga

SEQ ID NO: 48510 - DNA, 1135 bp, Arabidopsis thaliana landsberg
  unsure (1)..(1135): unsure at all n locations
gcaaatgataagttgacagggccacgaggttcaaaaaacgacatatatggtaatgtgtcttcgaaaaagtcaatatttgtatgtccctatgatgtcaatgtgaaccattcggctaacgaaaagaataataatattataacattcatacacaatgttgaaatgtcccgtcaatattttataaaaatggacacggtctaattaattaaaatgaattcggttttgatgtgaattataaaaatgaagtggcacataatgttagactggtccattaactcttaaaaaatttttaatcacaatttctttatttatttgctcatttcgaatatcgattaccttgtctacactacacacgttacatatgtaattgtttatgaatgatgcatagttagttgcatactttcaaaattggataccgccaacttttttatcaaccatgttttttagtagaagtgtttttaaacctcttttatttttaactgtggtctcctttattttggttgtaagctgtaacaaggtcttgtcctctctttatggttctccttacgggcctagttaaacttggtcaaaataatgaaagaagtaaagtggtgttcttaaataaaaggaaaccaaaggaaatttgttacccaccttcttattaatcgattttcaattcattgtacgacagcataatgaatatgaatttttggggatttaaatgaaatatccttcacgaattggccaatttactttaaaaacccttagttaaattattaatagaaaaaccttttaaatataaaagttttaattataaaaaagttagatattagtccatctatttaaaaactcctaactaaattactaatgagaaactctcgaatacaaaattctagtgaaaaaactctttcatataacttcatttaaatatattttgtttttaaacctcactaacattgatttaaaccgttattttacaccgttttaagtttctttccgctgaaaaatactatggtttccggttcaaaatgtgtgggcccttttacgcgcatgtgggtcagatgtatgggcccattctatttttttcctccaaagttaaaggcagagtggcggngtcatttaaaccacgtggcaagtttttttttttatcaactactgt

SEQ ID NO: 48511 - DNA, 372 bp, Arabidopsis thaliana landsberg
tgcctctgttaggtgttgaaaagatgaagctagttcaatgcattatgcatgtaccaatcagccatgctctctgcctcgaatttctcgcgtgactggttgactgcctcttgcagccctgacagcacgtcgcggaccaaaattttggccggctttcgctgccgctgcaccatgcaatgtcccatggagagcttctgcgcttttgtcttcttgtctagcacatccctagctagagaggggaaggaaaaaaatggtctggtctcgttggctttggctatccacttaatcctgatggccgctttctgggtcatgttcatgcatgtggagtgactagacgcagtcacttcatcgctgcagatggtccaacagtacacg

SEQ ID NO: 48512 - DNA, 616 bp, Arabidopsis thaliana landsberg
ttaaagaatattttggtaaccgattggtgcacctcctcatatcaccgaaccggtcactgatttcaaaaacaagtttctgaacggttttaagaatacccaaattaccaaaattccggttcggatgggtccggtacatctgcccaggtcttcgcattagtgaacgacgtcgtttttggtctttcatcccaatatgtatgtgtagtctcccaataaatcaacgcagaaaaccaaaaccctcctcaccggagatccaccgtctaaatcgtctctaaaaatggagaaatcgttgctcgattctggcgaaacaacggagataattaccacagataaaaacgaggaaacagtgaaagacactctcagagaagttaaatctcaggacatagaccacggtgaagcacccgtaccggagaaagtgcctccggcgtataaaagaaaagtttccgttgctgaagaagaacgctttctttataaggttacgacttttgcttactctactctctatgttctattctagtgaatggttttgattttcgatttgttctgtgagatatttttctggaatctgtttttatatgtttaatagttctcggagacgaagatgtgatggttaataaat

SEQ ID NO: 48513 - DNA, 408 bp, Arabidopsis thaliana landsberg
gggaagagaggtttgagggggcggattcaaacaccaaagcttgagagatgacatgttagagcaatgagtttgaccacacctcgacgatgcaagtgatcacactatactgagctactataaccctgctgggttatgcatcaaccctactctcacatgcacattgcttatcgaccaacccttccatttaacattctctactacatgaatcactgattgcatctgtagcgaacttatttggtcttggacaggtgatcacacatatatggtgcctctgtacagctaaacatgttcatgggatgggacattaattgactaaggactgagctttaaagactgctttgggtcagaggcaacctactgattcatgaatgacgactcacttaccttgtgacattatccgagaataac

SEQ ID NO: 48514 - DNA, 111 bp, Arabidopsis thaliana landsberg
ccagaaaagaacagagaatagaagcatatatgagcaggagaacatagaaaacaacatatcagaagatcaacacagaacagaaacaaacatatttaccagacaatccagaag

SEQ ID NO: 48515 - DNA, 519 bp, Arabidopsis thaliana landsberg
ggaagtcatgatttgtttttgtcacactactaatgcatataagctctgtaattgtttttgcagattcgttcagttatgttattcaaaagaagtattggaaaggacctcttccattaattcattgctattgtttcatccgtgcaagcgaaaccacagagtttataattgcagtaagtatcaaccgctcccctcctgcttgtcccttctagttttgttgtcttcactatatcatatctttgtaccaaagatctggtagcgtttttctgcgagcctttaaatctgatatacagcttctgttgatatttttaaggaagctgaaactgctttgaagttccatatagaagatccagtcttccacaaggttagagatgttgctccaaacaaggtaagatcccactcgtctgtttttctttttgatatattatcaaaacatagcatctgtagttcctgagctagatttcttttgtactttgcaggctatgttttgcctaagctttagactacctgaagcatgcttgt

SEQ ID NO: 48516 - DNA, 939 bp, Arabidopsis thaliana landsberg
taatttgttgggactagaatcaatcacttgagttttaaattgatatatgcctagatggttgttaggaccaatattcctaaacaataccaaattttaatatagaaatgtaaaataattcgccgacacattatttcgttattgacattgaatatttcaatgatatcaactctgtttatttacatctatttagtataatttcttgagcaacaaaaaaagtagttttaaagttattttccctagatttttctattgtaaaagcctatatatcacaacaaaaattaaccattttctcttttggtaagtttaaaatttttataatgaatataccatttaaaaaaaaaaattatccaaactaaattaaccattttctcttttggcaacaaaaattaaccatttaaaaaaaaaaaaaaaaagtttaaaatttttataacaacagaaagtaatattatccaaactatggaataattaaaaaatctgtccacatacgatcatatatttctctccaccgacagccgaaaacactgtcaatggcccacgttcctttaaaagctgtcgtcttcggtaatattttccggtaataaactaacttccgatcacaattacacaaaagcccctttctcgtttataatcataggctatgattcatagcaaacttacagagttggttattaagaagtcaaaaatacagattccttaaaatattttttttctgttcatatattttttatcgagaaacaattacttaaacataagaagcaagacaagaattaatgttcttattaacatgatgctaatataatcggaaaacaaaatcaaatcatgatagaagggtaaaatggtcaaatcagcgttcccggctcagatttactaaaacagccactagccagccagatccccaaaatgtctcattgcttctctcgttctaaaaaaaaatctgct

SEQ ID NO: 48517 - DNA, 582 bp, Arabidopsis thaliana landsberg
actctaattcatgacagaggtaaaactatctcaaatcaccataaacttatgatattagccggtaatccaagtattaacataccagtttgtattaggtggtaactttgatgcaaaacttatgaattcaaatttttaatacctctaagggtattatcactatatgtaaacagatattagccgttaacaaaatgttaacgtaacagttgtattaggtgctaactctaattcataacaaaagtgaaactatctgaaatcacaaggaacttatgatattagccgataacccaagtattaacatatcagtttgtataaggtagtaactctgatgcaaaacttatgagggtattatcactatatgtaaacaaatattagccgttaacaaaaagttaacgtaacatttatattaggtgctaactctaattcataacaaaagtgaagccatctgttcaaaccctcctagtccaaaaacagtcccatccttccatcttgaacgaaaaaaacatttcctctcgttacttacgacgtgacacattatttttgatagcagcactttcttttataaatacattacttatgacttag

SEQ ID NO: 48518 - DNA, 321 bp, Arabidopsis thaliana landsberg
gaatgtttcgggggaagtggaaacaagtactagttagacgcagggaaacgagcagagaccgtaagtcgccgttagacgagtgaaggcgacccgaaggggccggcccgccagagtaagcaaaaaaggctctagtagatctcgtagtggagagagaagtcgagatatccagataggatggtctctttatgtcactaataatgctatctgttaaagactagcaaatattatgacaaaggttgtctggctctagactataacatggatagaggtgggaataccacatgggaggaaggggaagtttgcctggtagatctatctact

SEQ ID NO: 48519 - DNA, 737 bp, Arabidopsis thaliana landsberg
gtggcacgtccaagccatgtctttactaaacgatcaggagaaaccgcgtttggtttttaaatcagttaagtgggattcccatatttaatctcggattacacaggtcatttcgcgactaaaacttaggaaacttagatctcaaattcccaacctttgatagcaccgaataattaagatacgaaatcctgaactaaatatacagctagatatcgaaaacgtttgtcaactctgccattctcttccatcattttcctctcggaaccaaatgttagttacagtcagattacaaggcagttcaatctctaaccagagctaaaaatatcattatcttgtagtatttcaaatactagtattttgttatgggtaattctcctcagaaactaaaatgttgttacttaatatgcttctatatggacatatcaaaaatatttttcattaactacttcaccaaaaaatagctatatgacattaaagtgttttagtatttcaactaggaaattatgttcccctgtgtttagacctatattcaattattatagaattttcaagagcaataaaaaaagaaagatccaactaagaaagataacgaacacatgcatgagattgtggtgcatgtaagtgaaaataagtcgtaataatcaccgacaaaacgcgttaatacttattatagatccttataaaacgagtccaaatgtcttccttcttcttcaagcaaataagcaatcaattgtgaactc

SEQ ID NO: 48520 - DNA, 1066 bp, Arabidopsis thaliana landsberg
ggaggaaaatgtatcaaaactacagaaaagtgtccaaacgggtatgtacttctccaagcaccaggaaagggtttatccaagcaccgggaaaggttaatggtcaagatgaagatcagtaagagccactgcattgacgtgtcctgacgcctaattaatgttaaacaccaaattaaaggagttatcgtcttgattaccacatgtagccatgccaaggaagaggaaaggcagagtagtctcaataaaggtccaccttgcaccagagggacacaacccatgaaagtctctctttgatcaaagaggaaattgaaaactaaactctccacaaggtaagacaagcttggggcagagaagggcatcacccaaaacctcttttcagtacagccatagggatctatatgtactaccatcgatctagcagttgggtagctacatcgaaaatcatgcttagccaaacagatttctaaaaccataattacacaagcatgggatataggtatccaaatttcatcagaaaagagagtaacctccagcctttaccgtaacaaaaacgaggatgtgtttggagaaacattgaactgaggacactcaacacttctcttagatattttatggcagaggagtagatagccaagccaattaaataaccaaattcgccaaaaaacaaaaattaacgattccacagcacaattataacctggcataagttgaaatatattacatgtgacttccagaaattaaccattccacatcacaattataagaaacatcttttttttttggtttcaccgatattaccatattcttttgattgtcttgtcgttgtgttgtacaatttccattccgacaatagtggaaaagaaaaattgtaagtctgtgacgtctactgtgaatagtgactacatccaaaaaaaattagagtcacttcaaagcttatataatttaggcattacaatctgattgtccatccctacatattttttgatttttttcctcaaacataaatacaagaaaataaaattgtattactaaaagtacacttacccaacttccccggtataggaaattt

SEQ ID NO: 48521 - DNA, 500 bp, Arabidopsis thaliana landsberg
taaaatttgtttcaaagttaaaaatttcactatctaactacattatattgactattgagtaaaactctttgatgaaaactttatataaaacataaaaattgagtaaaaaaatttgtgctagaccaagaaaaccgatacccaaaacgtatagtttaaatttcttcacctatttttggttaatttcttatattaatggtcttattatattacaaaaatttatatttgctatacattttctcgacatgtttcctttgcttcattttcattaacaatagtttcctttttgtgccctatagaaaatgtattaagctagatctgttttgtataagaaatattaatattttgttttaaaaagggtaaatttatagaatattttaaaagtacctctatataatttattttttagttagagataaactatttgataatatgtctagctacatttttctgctttcataatatttaccgtatagttcggtaaaagaaaaatatatgacatt

SEQ ID NO: 48522 - DNA, 943 bp, Arabidopsis thaliana landsberg
tttatttttagtttaaacaatatatatgagtgcacaaagggtattgtgtttttattatgtaatttgatcataatgttcttatactaatgttcgatttttctctcgttaatggcatttttatttgtctgaattcaggttactctcattcttctctctgtctcaatttttattccgttttttttagggtttcgagatattcaaagaagccttcaaattaggattagagattcgaatttagttcgggattgcttctgctttacttttactttttgctcaattagctgcaagtaattgtttcatgccttttcatctttctttattttttctgtccaataaatttggcaatcaggttatcaaatttggtgtataaccttccctgcattggccattctttgtgatatgcttgcttgactgtttcaaaactgatactttaacaccacattaagcacatgtgcttggattctttataattaagtataacatgtgtttggatcggttctgcatattcaaaaatcgaaaaaaataaaaagataatttaattcgaaaatattttagaataaattttatcaaatataagtataaatttatagctagtttaattattttgggtaccgtagtattttactctagtaataattgatattttaagatttgtaattgtaattttagataaaggagttatatcaaattttaaaataataaatattttggattaacatgtaattatatttctcaaaagtcctactgatatttttgtttaagattttcggtgccatttgtggcccagcttctttttgtcaccaataactctttttatcctttattttaaaccatgatttgtcaacatggcgactaacccaattttccttcctttgcgactttgcattttcttcttcttcatcagccctttattacttttcaggaattgctttttcctcaatct

SEQ ID NO: 48523 - DNA, 611 bp, Arabidopsis thaliana landsberg
ttatcgaatgaaagacatgtgatgtgaaagtatttatcaataggttggttgtaagatgggttgctcattctgtgctactggtaccatgggatttaaaagcaatttaacatctggagaaattgtggagcagcttgttcacgcctctcgcattgctgatatacgcaacatcgttttcatggtatatttctgcttctgttattgcattttatctacactatgtgcaccttgccttatggttatttattttatatactctgcattgatgaattttattcaccagttgttgccttggtttgatgattgtgatcagggaatgggagaacctttaaataactacaatgctgttgttgaagctgttcgtgtcatgttaaaccaaccatttcagctgtcgcccaaaagaattaccatatcaactgtaagtactcagaaagctaccttgaaacattcgtaaaacagagaaacttattcactgaattttgtaggaatactttagattatggaatttgataaagggaactgataaataaacttcaatccattaaacctcgcagtatgcagcttccaagacatctttcagctttttttgtctagttggttacttttaaaatttg

SEQ ID NO: 48524 - DNA, 872 bp, Arabidopsis thaliana landsberg
ttataaatacgttagtgcgttatatgaaaacaatagaagtctatgtatagtatgaaatgtagcatgaccgggttattaattaccttggggacaatttagcaaaacaacaaaccaaaagacgagtttgtgagttataggaagtcgtccgcttacgacgttgtccatcttgattcttataaactcttgtcggaatccatggtcgtccgggtaatttgtgaaccctctgatggcccgcgaaccgaggtctttagtcgggtttaatcctagaaatctagagactacagaatttgacccatcgcagccaatcaaaacctaaattaaaagaaaagtatattatcagaacataagaccatgcatttcatgctaaacatgttgctttcagtgtaaaacaaacaaacacaaaccattaaatccgatcacgacccataaacgtcactgtcggctaatataaagtatatactaaaaaattccactacggcacttactcaataattgatcaataaatatatctactgttgttaaacgtgcctttgtttggataggttctccgtttttaacgtgtacaatcggaaacgatgttttttcgtcgagcttaaccgacaaaatttggcaaccaagccggagagtgccgagaggaagagcatgagccaaagctcgaaccaagtcgttccttagtacacctcttacttctccataggatgccggtccaaccgattctcttcgtttaatccttttctcgatcaaagcatctcttatcctgttttagtaccataccggaaatcattataactagataaggttagttaaaatagaaatatttatatacttactgatgaattgggagagacttaagacgaagcttattcgcgaca

SEQ ID NO: 48525 - DNA, 626 bp, Arabidopsis thaliana landsberg
aataagcagaggcaactcaactattataggcccggttatttaaggcccataacatttagagtcaaatactacaaagcccattaagtcgattttacagtttccaagttcttttcactgaactgatttgtagtttttgagttctttgtcgattaaacaaaaactcagcgtccaaagttacttggctactactacaacaaataaccatctgaaacttaaaacttcaaatacctaaatttgatacggagtagattatgtatgtttgagtcatagataagcaaaatttgaaggcatggttgatgtgtaaacaagaaggaagctatttcgtgctgatcaaagaagagatacacaattcgtccccaaaaacaagaaccttactcatatggctaaatctcgtcttgtttcttaattataactttgcaataagaacaaaaacacaagctttcaataaaacgaccacaaatcaaccacaaatcaactgaaattggcaaacttttacaaaaggatagcaaatcaacaaacaaaactcaagatcgatcagacggacttgatcgcggtggtgggatcaggatcggaattatcgggaggatgattagggatgagaggagcacgaacatcggaagatgagt

SEQ ID NO: 48526 - DNA, 1015 bp, Arabidopsis thaliana landsberg
ctgtgcgcttgatatgcttcccgaagttttttctggatgctatgttgcaaatatgttgcctcttcttagtcatcatatctcaaatctttttctacgattggtccttttttaaaagatatacatctcttttaaaaaggaatgtaaaatcttttagtggtccatttccaatagttcttttctttcttaaatggtgataaaattagaaaatatcgaagcaaatgctaataagtacattattatactatggtttacaaagatgtattgtcgatttttattcatcgtcgtacataagaagacataaaatctcgactaaatctgagacattttagtagagccaaaatgaaacattacggtttctttcacctcactgaagcttctacgttgagcatatcgcaatgaatcctcattcacctagtgttaacaactatttatcatgtgcggaaggaaaggaatggttgaatccgcaatcacaccgctccacaactcactcggcgagcaaatcgacaagctacaactcaatcagttctctacgttggccaaaaatgccgcacctagaagactttcttcatcaatggttttaatgcataaaacttgttagactatgctttcttcatgtgaataattctttatgatgagtaccttaacattttaacccaaaaaaaaaagagaaagaaatattatatttcaagtaactaattgttttctaaaacgtggcacaaaatatttccttatttgccccaccaagtagcaggtcgggatgtcaaaaggggtaagggcaaaaccgaatttatacaagatttcgaccgtacagaggcaatgaatgatcttggaagacaaacaaagcaaacagaacatgggagatgattcagcaagcaaaagcacaagtgcctttggataataccaaacacaaaatcctcaaagacacagtccagttcgggtcaagcacaaagaatggatggccataaccaatgagctttctcttgacgacgcgtagtaataagcctcaagacaaagt

SEQ ID NO: 48527 - DNA, 1021 bp, Arabidopsis thaliana landsberg
aatctatctattatatcgactttgctcagaatttgatgggtcggggaatacaacgtacttatttactatttgaaatcaggtcaagaaaaaagtccatataaatagcagtttacaaacctaaagtaaagataggtgtaattttttacccataaaactgattcgatccggtgtagctggttattataattcatcacatgttttagccaaatataatcaatattattatagttttagtcataagatgagtccgtgtgatcgaatagtttcttatttactttatttttgttgtcttgccaattggtagcgtgaaaagatctcaggttcatgcgaggcgttgattgttgaatatcaactggatgaccccctgtacacgtgagaattttgtatgggggtctatctgtgagtaagcaatataaattatcaagtatcatacgtcaattttggcttttgggtatgttaagttggacaacgaagatagagaggcagtccttggttatatatgaagcaactatatgtactactagtattaatcaaatcaactatcttaaacttatatctttggattttttatatatttatatattttctctagatagtcacgagtttgatgggttttttttaataaaatttttgtttccataatcacggtttgtattggttaagttattgctgaatttgtaccgacatatacagatagatcttcgtgagtcgtctgtatatttctagttatgctgaaaaataaaacgagagtactagaaatgtagtattaatttagtcgtatatgaccaagatgtgacgaccaaaaaagaaagaagaaaaaaaaaagaaagagaaattgaacaagtttacgtgaaaaaggggatagttgtaccaaaaataaggcagatttgaatgcgatgattccgctatcttaagaaatcaaaaatatcatcttcattattaattcatgaaagtgacgggtaagattttcaaatcgtatcgacttttcgtcttttcttcgagacttcgacccctaaatact

SEQ ID NO: 48528 - DNA, 1700 bp, Arabidopsis thaliana landsberg
ttttattacttttctgtgctctggatttaataatgcttgctagtcctctgaggttccttggattttcaaatttcttatgggtcactttgtcttttgtacatggaaatatggcgtggtgggtagatcacctagtgaggagaaggaagaggttcaagttgcacagtcagacgtaaatattcgtaatgttttcggatcttcggatgatgaagacgcagaagaatatgttcggaatgacgttgagcaggatgaacatgtgagtcttgcatctaatattacatttcagtttacagaatatctgtttcctttccagtgtttgcttccttttagaaaccatatgaaattgcatgtatgtatgatgagatgtctaattttgtagagatcgccaatcgaagatgaagagggctctgagaaggatctgagacccgatgatatggtgcttgatgatataatccctgaagaagatcctcaatacgagtcagaagctgaacatgttgaagctaggtacagggagaggccagttggtccccctttggaagtggaggttcctttccgccctcctccaggtgaccccgttaaggtatacctgctttatgttgctaaaagattattcgctgacatggcttcaaatcaatagtttcctttctggtatttccaagttaccaaaatctctcatatcattgtggttcgaagagtgagtatctgatgtcttttatgtggagaaccattgcactgaaacatgcttcgacatttacttagcatgaagggccatttggtgtacatgagcgtgctattctgttttatatctgaaaccccattttctagttgtctatctgtagtgaagatgttctgtagcaaaattgcgcttcctcatataccgttttctctttgatctttttcagatgaacatgataaaagtttctaatatcatggggattgatccaaagccttttgatgccaaaacattcgttgaagaagacacattcatgacagatgaacccggagcaaagaatcgtatccgtttggacaataatattgttcgccataggtttgttaagagtcgagatggcaaaacatatgtaagtgaacacttcttcaaagcttttctgcttttaaattttccatcaaacctgcaatgaagctatgtagtttgcctattactagtacttctgatgcaatgatgtattataagtacatacttttgatgcaatttatgtattccgaattagtttactttgtgcttttcactacggacatgtgttcatatagttggagatgaaattttatgatatctctgttcaacagttcttcttattctttaggcttcattagaaatctgttcataaacaagaattcttggttttgttgcttattgcacacacttcttctactttttccgttacttttgctgtagtaaactcaagtcactcaatattcgtatgcagagtgaaagtaatgctcggtttgtaaggtggtcagatggaagcttacagctattgataggaaacgaagttcttaacataactgaacaagatgcaaaagaagaccagaatcacctctttatcaaacatgaaaaggtgttacttcgtcattccttctgccttagttagcgatcaatttgtagttgctccagccttctagatacgctgattcattttagagcacccatacgattctctatactaaatgacaaaacttctcat

SEQ ID NO: 48529 - DNA, 727 bp, Arabidopsis thaliana landsberg
  unsure (1)..(727): unsure at all n locations
aaacacccattctagcattacgtttgtttgcactcaaaatagctttcttcctccaaagtgttctaaaacctgtagagactcgataaagaactaaacgactttaaaatgcactttaactcaataaaatatatgaaataagaaagaaaagatagactcaaaatcgataaaaacatgatacatcaaatttatagaataatgttcttccacaaaaagtaagaataagataatttcgttttttaccaatccgagaaatcacaattttacaaatttctcgccaaaaccgcaatcctagaattctattttttaccaaatccgtgaactttcaattttgatagatgaaaaaatagtacaatttcatattctcaccaaaaatagtagaatactgtttaccgttctacaaaattcgtgaaatcataattttgaaagatatgttatgcatacattttcccgccaaaaccttatattcaaggtcttatgtattttgcaccaaaactttaaaactaggggtagacatccgggtacgcggatcgggttcggctaaaacccgatcaggtaaggatctttcggttagagagggccaatttttaagaccaatacccaaattttatagtaactactcgtattttaggtaagattttgggttttcgggtaatttggatattctaatcaaatatncgggtatatttgggttcgtgttgggttcttgtttggttgtttgggtcgagga

SEQ ID NO: 48530 - DNA, 852 bp, Arabidopsis thaliana landsberg
  unsure (1)..(852): unsure at all n locations
acaaatatcgtaagcaaacatgctaaaattaaccactgtaaaacatatatttgtttctgtcgaacattttaataaaatatttttacaagactatttcaaaaaataacaaaaatataaaagtgtttgtcaacgaaaaataatttttaattaaataaggaaataatataataaaaaagtataaagtaaacttgaaatcggaaaaaaactaaaaaaggagaaagaacaaagcaataaatgaaaacctgcaaagtttcgtctttgcaccaaaaaacacatcaccactctcttcctctctttcctcacttcgctctttcttcttctcctcctacttcccaacttctctcctctctcttcacattattatattctctctgtttcttccaatccaatccaatctctttctctctcagaaactaaactgaaatattgcagagttttgaatacacggccatgaaccaatcaccatctcttatcgaacagggtatttctcaacaggtcagttttttgttcttctgtgtttctcatagtaaccaaatcctctgttttatcatgttctgtttcaactctgttctgtctgttgcaatgagaattttctcaaaaatcacttttttcttctgggtttttgattttgggaacaatgcgaatttatgtggtcgagattggattttcgtatttgaagaagaagaacaagtggaagattaagggttctatttttgctctgtttttgcttcatttttggattgttttcccaagtaggattggtaggtcctcctgcttgaaccatatcgactntggtatttaccggaatttaaacaaagacgtgaacgcttttcatgtttggtgatattagat

SEQ ID NO: 48531 - DNA, 897 bp, Arabidopsis thaliana landsberg
ttacaatttgtaagctttacagagaaaaacgtgttgaaatgagtggtctaaacacactatgttaagatgggtcgggtgtctcacgagacaataattttggaactttatatgatttaacagtaagatgagccctacacataactttctccagtcaaagacagagcatctctatttcacttgtgtccagctcttatccattacatttataccgtagcttcttattactaatctaccgcattcaaagatgcttttatattaactgtatacaattcattttatgcgtatagaagtgattttatgcccataaaatctagaatttatttgtgccaagaccaaaacttaaggtaattagtcttgttcggatcttgaatttcggtcgtattcaattgatatcaaccaataatgaaatttctgaaaagatgagatgacttggtccacacgtcccgaatgccaaagaaaaatctaactgtgtacgtatttttatgtataatggaaagtttgcattaacgtgtagtgttttatttttttctaactgtgtacgtatttttatgtataatggaaagtttgcattaacgtgtagtgttttatttcacggagtcatcatcaatacaattgtaactggtttgttacctataataaaattagtctgattaataattagctgttcttgaaaacttatactccacacagaataatactaaaaaatatcacttccttaaatttaataatatggacgaaatatgaatagaagaaaagagaaattcacgtgcgtctcatgtgaacacattaactctaatactttcgacgtttccataatcaaaacaaaaaaccattttcaaatgaccaaataaataacagtcaaaaagtttacaaaagaagtaaaataaataaataaac

SEQ ID NO: 48532 - DNA, 1045 bp, Arabidopsis thaliana landsberg
agcatcagaacactccattggctctttttcttacggaagtttcacaacatacgataagatacccatcaaaagtgtgagtaccatcaatcaatgatcacgtaaagtacacgttttgcatcgttttagtactaacccattttatatattcacagggtagagaagaagaggagatgattacaccagtgagacgttcaagccggattaagaacaacaaaccttctggttctggtctatgataaagagatagacatttcatttcaatcattgcatcactatgcaatctttttagtttcctaagaattagaattagctttatgactccttaaaatcttctgatttgtaccaaactagttgtgatacaatccaaagtttgtttctttgtgtcagtctcagtcgtttaaagtaaaagaagaaacaaaagcatgagactttttttttttttttggtaacaaagcatgagactaaacatcacaagactcaatttctccagcttcctccttgagatcgcccctgaccaccgtaacctccgtctccataaccaccttcacgacgatcacctccataaccaccaccgtatccacctccaccgccacggttgtaaccaccttgatcacgtctacctctgtaaccaccacttccgtaaccaccaaccataccaccgcgagtaccactaccacgagcctgagcctagttaacagtaatgttacgaccatcaagttcttgaccattcattctatcgatcgcagtcctcatggaatcctcatctttaaaagtcacaaatctaaaccccttagacctcccggtctcacgatcaatgatgatctgatccaatccataaaccatataaagtcgagatttttatgatacaaagagagaaacagagcaacacaaaaacagagtcacactttaacggaccttggagtcgaaaacttcaccaaactcgctgaaacacctctctatagactgttcatcggtggcccaagctaaacctccgacgaagcatcgatactcgttgtctgcatgagccacgtccagagatttgagg

SEQ ID NO: 48533 - DNA, 645 bp, Arabidopsis thaliana landsberg
tgcaaggcatggtggcaattgtggatgagcagtggtgacctcacacataggggcggtgtcagcgtcaggctcataggtagcgctctaaagtggcgatgaagacctgattagtaggaccaagatattatgcagatggatggtacaataaagtttatgcaacataatcatcaatgcatagggaatgatgatatagatgcaatgagaaagcgaacacttggaggcagtgttgaggcttaatgaggagcaggaaacacgacaatagctctattactcggagaagatgcgcttggtactcgataatggatgtcacatgtgctaaggaaaggcgctctgatatatgtttgtgatgattgttcgataacgtagacatgtagatgagatgaccaagaagagatgagggaaggcgtcctcttgatactagtgtaatattacttatattgaagtagtacacgtgatatgaatgtatagtggacgactcaatcccaatcagtgacggggcaaactataaagaatgtacagtaagatctaccacgtgctacgtcatccgatgcatctagcaacaatattgacacaatgatgatgagtgcatacactaaggtggttgctcacccgatgatggacactggtacaatgcatggtgagatg

SEQ ID NO: 48534 - DNA, 567 bp, Arabidopsis thaliana landsberg
cgtgataaactgcgaaatgagattcgtgtaacgcctcgtgtcaacaatctcctctggatcaatcccagctataggattaccaaccgggttcctcacgttatccataccactctgtaaactcgttaacccaacagaagcaagacctttcaagatctcaggcacatcacgtaacacaacaccacggatctgccaattctgtctagtagtcacatcagcacatccatcttcaccatacttcctaatcacactcgctaaataccgagtctgtgcacttgtagtcacaccatttggtaacttcaacctcatcataaacttcccatctacaacaacaacaacaacaacaacacactcataaatccaaatgtactaaagattaagagtaaagactaaacctttacacaatctggtcaccaattcaatcacaagtcattgaaagaagcatacataggactaaagacgaaacctttacacagttcaatcacaagtcaatgaaagagaatagagacggacatacactgatgctttctacggtgaaagagaccaagccacttgagtctaacatcaata

SEQ ID NO: 48535 - DNA, 511 bp, Arabidopsis thaliana landsberg
ggcggaagctttatcctgtctagcgatcttcggctgagtgtacaacggattcgcggctttgtaaacggctcctagggatgcaaaggctagaaaaacggagcaaactccggcaagttccggaggagaagcattacgacgttcccgtggctaatccccatacggtggattccggcagctatccttacatatcaactatcacattgacgtaattcacaatccatgctacgctacatgataagatacaggtccttgaggaatttcctacgccatcggcggagaacctttggaagacctcattcacgagaggctggtgcttagggatgaagatatgaggcacctcatatcgcgctaggtaaccttgagaaggttcttcttcttgcttgctctgacctatctaagttgtgagaaattgcatttgttatacgagcaccatgtgtgcggagattctaattgatcttactcctctcctatttaaacgtcattctgtgctaagattaccgtttatattttg

SEQ ID NO: 48536 - DNA, 428 bp, Arabidopsis thaliana landsberg
cgtttccgttttcatgcaacatagtgaagaacaatatgttgattaaaaatgaattttacttagaaataataaagtttatttagaataataaagtttttttttgtatttgagtctttgtatgtttaatttgaatatacttgaacattaaaaaacaatatgttggataaaaaatgaattttaaactacattttaaaatactatatgaataacacaaaattttgacaaggattttgaattcagtgatctcaaattcaagagttttgcatacttttttgttaaagagtttcaaataatgtataaagagttttgcatattttgttccgattggtaattccctggtaaaatttttttcttcacaaaattaatacttcttttaataaaacaaactaaatctcgaaataattaaactacaaaaaaaaaaagagaga

SEQ ID NO: 48537 - DNA, 507 bp, Arabidopsis thaliana landsberg
  unsure (1)..(507): unsure at all n locations
nnnnnnnnnnnnnnnnnnnnnnnnnnnnnnnnnnnnnnnnnnnnnnnnnnnnnnnnnnnnnnnnnnnnnnnnnnnnnnnnnnnnnnnnnnnnnnnnnnnnnnnnnnnnnnnnnnnnnnnnnnnnnnnnnnnnnnnnnnnnnnnnnnnnnnnnnnnnnnnnnnnnnnnnnnnnnnnnnnnnnnnnnnnnnnnnnnnnnnnnnnnnnnnnnnnnnnnnnnnnnnnnnnnnnnnnnnnnnnnnnnnnnnnnnnnnnnnnnnnnnnnnnnnnnnnnnnnnnnnnnnnnnnnnnnnnnnnnnnnnnnnnnnnnnnnnnnnnnnnnnnnnnnnnnnnnnnnnnnnnnnnnnnnnnnnnnnnnnnnnnnnnnnnnnnnnnnnnnnnnnnnnnnnnnngggtaatgtgctcgaactcgttatcatggttcaagctgaatcctgagtgagattgttatatgctcacaatgtctcacaatatacgagccgtgagcttacagtgtgaagcctgtggcg

SEQ ID NO: 48538 - DNA, 558 bp, Arabidopsis thaliana landsberg
agtttgcataggaaagacaatagttccaagcaatctatcatgttcatatgaatttagatgtttagcaatctgaattatatgatgcatcatcaatgaagatgttggatagtagacaccagatagaacacaggttgagtcataaaatagttcaaggaataccaagattttttcagcaacataccagtgatcatcagacaaaagcataggttcacctgtagctctagggtagtgagtttgaatgaacacatcaaatgtgttcctgtaaggcagtagatgcttaagcataaggtaagtggagttccaccttacctccatatccaatccaaacttacgaggacgtgtattcatagcaatgcaatatgatttgtataaagcaatgcgttgattagaagagttcaaaaatgatatagcagttctaaatgattctagataaggttgaatcctttttaaaccagacttaacaatcaaattcagaatatgacatgcacacctttgatgcaaaaaaacatccccaacgataccactaagtagatgagtagtctcccatagcagatgtat

SEQ ID NO: 48539 - DNA, 589 bp, Arabidopsis thaliana landsberg
aaaaatctttgcattagtcattatagagagctttaaagagtgcgtttaataagtaataacatgtggttaatatgatatgtgggagattccaggagtcaaagaatttaaaagaatcacgacaaatagttttgaaataattaaagtgaataatcagaaaaagtccttgatccatcaacatccaaaagcagtgaaaatagatgtcgacaaaggacatctgtttcttatccaatttaagaaaaaatttatgttcgcaatttatatctgtaagatttatatttctgagcagacattaaaagatcgtaatatgagttgcaaaatgttgtttttcttttttgggtagtgctggtatattataaagttgaatattctgagagaaacataatggtaactattgtgatgagtgcactaacctttgacctttgacttaaagagtaccaaagagaagagaaggactacttttcataaatcagatgttgacttttcttaagaggtcaaaaatgaaagtgaaaaaaaaaaaaaatcttcttgagttttactatacgtgccacttgactaagtcaacgagtcctcactgtcgaagtgtcaatcc

SEQ ID NO: 48540 - DNA, 571 bp, Arabidopsis thaliana landsberg
  unsure (1)..(571): unsure at all n locations
ggtctttgttccctaaggtctcgttttgggtcttttttattttgtatcttgtaattctcttgggcttttagccaactaagcccattttgggattgaatatatatttaaaaatatatatatatatatatattaagaaaattacttttgaaatttgtattttgattagtgttgctaattatggtttaagcatgagagtccatccaattcgacccgagtactatatacagtatggttcagcaaaagggtttgggcctggccatagttttttatggcaacaagctatatgaaaccatatataataaatacaatttcgtattttgatacagtcagtatgagactagaaaaactagccactaggccactgaccaaaaaataaaataagaaaaaaactaatctttatctcaccatatttnttagatctttgaaattccaaaaacataattagagtttctctttcctttagttcttgtgtagtttgtatgtttcagtaggttttttttccttattttatgtaaataaatggaataagattcagttntctgttatgggacatcccctcgtaattcttggt

SEQ ID NO: 48541 - DNA, 727 bp, Arabidopsis thaliana landsberg
tgatgatcttggagggagcccctggaaacaacacaaccaaaagtcagaagaaaaccacaggattattaagaataaaataaggaagcagcgagttaagtgacaaggggtcaaaggtgtttatcaaaatgtaaaattttcttctttttttccacaacatgtcaggcgagagctcagtacagctaacaggacattcagctctcaaaacagtcactaacttagtttgcttgcaaaatagtcggataaaaagtattaaactgttcacctaagagaaatagttccatattacctctgccatctcaatagctgaaacaccaagagcccatacatcaacctgtattaaagagtcaaaatttcatcaagttgtaaacaggaaatccttaattctctactctctagaaaactttgcagtcttagtttctcactaggttatgtatcagatgctaatttactttcaaataggacacctaccttcccatcataacgattttcctgaataacctctggggccatccaatgtggagtcccaatgaacttcaaacaagccacaacattaaagaatccaccatcaggcgcaaaaagtctataaggctttgattgcctgattgttcaaagaaagtttgacgaaataaccataggaaactttattcatataggtatttaccgtgtttcgcttagacatagtgcgagtaagttgagctgcaaccccaaagtcacctggaaagatggg

SEQ ID NO: 48542 - DNA, 686 bp, Arabidopsis thaliana landsberg
aatgttttgtgtttaaagtgtaactttaatgagactcatagaaagaaaacaaatattcctaaacccgcttgtcattatgtgagatgaggtgttagtgtccaaagttcaaacacgtctttcatcgagaaaactaattaaacacaaaaaaaattttgactcgattcgatttgccatatgaatcatggttactcaaaatatttagccattctatgtaatattttcataaaagatgtagttgatgtgaattcatttccaacatataggtgttctgatctatatacatattaaaaacaaattaggccattttgtttttgtaatatcatcgaatgtaccagttccatataataaatacttaaaaatcatactaaatcattctaatgctacgtactgtgctagtataacatacccttttgacgtgaatcttccatgagtatgtttctttagtcttgaccagacacaattcatttaaatcagtacataaattggattttagttccaaaatatgattttcttgaaagaaatatattttatatttttattagaaagagttattagttcgtcataaatggttctttgaatatgactttctgttgtttattttgtttttttgtttactgtctaaaataagtataactttttaaaagtataattttaaaagaaatattatattgatagttttatttttc

SEQ ID NO: 48543 - DNA, 897 bp, Arabidopsis thaliana landsberg
tatgtgtggtacagaaggtgataaaggtatggtcgtataaaaaaaaatgtactatctcttcttagttcttattagtttagtatagcgacttaattaggtcaattcgaatatcccatgtatctgatttgttaatgttagacatatacagaccaataaaagcattgaacttagttaatgaattgtattttcccttgttttaatcataattactgctctttaaataagtatcaagagccatattgtcctttaacttgtgtgaaaggtcacgttaactcatgcttaaagcttaacaaatccctatattattttatacctaatgaatcctaatccggttcctggtcatttggatctatcgtcaaaacactctgtatataaattactattatatttcaaaagtaaaatacttgactaattacattaattaattcgtttgtttattctgcacatggaatgactagccaggttgatccgatcttgaaaacgaaagatcatcttaattataaataagtgctttagaaaaatctgcacatattgaaaatctatctcaaaatgcaactatatataattttaagaaataatgtatctacttaattaatggaagcaaataagaaatttgcatcaaataattccaaaaacaattcagcataagtttttaagtacctttctagtagagttgactactatcgtaaaaatggtaatggacaaaaacttgaagagatatttattatcaaaaacaaaataaacatcgttaaaccccatatttatttagtatcttagatgtactgtatcacttatttctatattggacacaccgataatatggtagagacattctaaaggccacatagcctgtatagagccacctggaaagctaaccctaatggtacggattggaca

SEQ ID NO: 48544 - DNA, 781 bp, Arabidopsis thaliana landsberg
gctttaaagatttgttggtttgcgaaaattttacacttaatctactatagtacgttaaaggatgatcgtcatatttttgttttaaattgaatctcgggttaaaaatgaatttacgactagtgtatatatcgcactctaagtcataatggacttggattctaatatttaatcttttatcaaaaagaatatacttaaatttactattaaggtattcaaattgtcatgcataaaatgactcatccctacactcgagcggaatgaaaactaaacccaacatattcatattttgggtaaaagtaaacgaatatagataaccaaaaacaaaactctaagaaatcaaaacattatatgcaaaccaacatatataatagcgaaattgagattgtttctcataatacccaccaggcaccagctcatttgattttcaggtccagaatagatctgattccttcataattatttccaaaataaaaaataaattcaattaactgtccacatagttatcaaccatgtatattacattgtcttataatgtacttataccaaacctctatctatatatatgcacacacaaacaaaccaaaaatatacaaatctgaacaaacattaaaactcatctctctcatcatctttggccatggcaaaagacttggatgtgaacgagagtggaccaccggcggcgagagactacaaggatccgcctcccgcaccatttttcgacatggaggagcttaggaaatggccgctttatagagcggtcatagctgagtttgtagcacac

SEQ ID NO: 48545 - DNA, 587 bp, Arabidopsis thaliana landsberg
aaatattttttagttgatatccagtaatataccaaatataggacctagtcttggaaactttcaaattctttcaaaaattcacaaatatgtttggaaactttcgcctaaatgttgaaaatcttttacaaacttttggaaactttcaagacttgttgattttcttcactatcaattatctaattttgattccttttcttcaatttctttctatctcaatgtttcaaacttatatatatgtcgtgacgagctgtgatacaaaccacaagtccataaccggcctttgttgcacatgtctttttgccacctccacctccaacaaaattataggctacacgtaaaataaaaggctgctacataaactccaatttctctatctctatctcttttattttttaatgttagaataattcagattagtatattaatactataatattatgagctgtacgtgttctattcggttccatctattgatgtccgtcgtgggacattcctcacgcgctttggttgcccaatctgaacacattggtaaatgtgttttcaactataaaccatcgaagatttgatgaaaaagaaactcgttttta

SEQ ID NO: 48546 - DNA, 951 bp, Arabidopsis thaliana landsberg
cctgccatacctcttttcttaaaaaactcaataccatacaaaaacttaattagtggtttggttaggattacatcaaaagtatgataacaacggcaaaaatgatctttaagcgtgtcattttagtatttgcggacttgaatatgtatatagttcatattccgaccattaattaatgatatcaatgactttggtaaagaaagaataaaactcgtaattagtgggaggtaaagcttgtagtattagtcaagatcagcttttagtcttttacataattgtttgtcgactactactaatctgaattatctaaagtatcatcaatgaaagtttggaacaacacataaagtcaaatctcatttatttagaaaaaatcaccaaaattcgtattctttttagaaatatgtcgacaaagggaccaaaactttaacaaaatgccgtaacttacaaaatctcatggggccatattagattcatattttatctttatcttaatactatgggccataaggcccatttatcccaaagcaaaaaaagcgacgtgataatcataaattaatcagcatctttaaaaagatgcggaatctcgatttcgtttcaaatctgatatgcataaattagagggacctaatataaacaattttgattagtacagtataaatgtataatgaactaaccgaaatttagcatttgactacagaaaattgtaaaattgcgtaattgtcaaagttggaattattgaaatttttattttttgtgacaatccgaagaattttcatgaagaaaaaaagaagagtgataaagagagtgagaaatgtgaaaataagacatgcgtcttaactaagccaaaaccaaatctctcttattaccctttttacacacacctctctttcctcaaaaaccctagatctctccctctctctctctctctctctccatctcttgtctttgcctttt

SEQ ID NO: 48547 - DNA, 1319 bp, Arabidopsis thaliana landsberg
actactccattgataatataattgttaattattgactcgacttatctactgattatgaaactaccaacaaatgaagaaagtaaagggagtgtgaaaacaagaatcttaaggtataacgaagatttgttccgcgtggaaaaggcattaaaagtgccacgtcactctctctttttattttatgattttcgtatctcttcttctacttgcttcccacgtttccatcaagtttccgtacatatcttcttgttatctgatccacgcgatctttcaacgcgtacttttcacgtatttgtgttgtcatgcctttgctgggattgtgttagatgctcattgctgacggtagttttaagagaacactctataaagaaactatttttctaacaaaaccacgaactttgttttctagttattccactttctagaatacacctgaccaaattagaattctagaaatgaattttaaataaaccaaaacacctaaacgaaaaccaaaccaaatatttttggttttaacatatttcaaattcataaaagtgaaaccaaactacaccatattaaccaatacttattagagttttatatgttttatgatattgttcaaaacttcaaaagagatttattcatataacatacctataccataccaatgaatattaaaattatgaattagtatccttatattatatgaagtcaatcaaaaaacttagaagcatttcaaacggaatcaaaccattcatatatgaagtattattattatatctagaaggtgttgattttaaactattccgtataatatatctagaagacggctccgcgcgtggggaatgcatcaaactcagagagtttaatagctttttttggttgacgtcaactactcaaaagagtttagtttttgatgtgtatatatccaaataaaatatctttaaaaagaaaaaaataataataaatggtttcgagaaaacacgaggaagattctcatccaaccgaaacgactctttcgtttttagtagtctcttaagctacgcggtgtcgcaaatcgtgaccacataacccgttttttccttcttttaccccttatctttccacgtatttacgttaatacctacactcttcgctgccacttccttacccaccaagtcacaagggtatattcgtcactttccacacgtctttagtccacacaaactcggtatctatatatagttcccaaacggacacgaacacatcatcacaactactatcacaccaaactcaaaacacacaaaccacaagaggatcatttcattttttattgtttcgttttaatcatcatagagaac

SEQ ID NO: 48548 - DNA, 893 bp, Arabidopsis thaliana landsberg
ggaagaagaggaagaagatgatgaagaaaaagaagatgctcatgaagaaaatgttcgtggagagaagaactatgggattagatatgatcactttcgtcgttgtggtcagatttctgatgacaattactaaataaatgggacatttttatgatcgatgggtactattagggtttatctaagtggggtatgtttgatatgtatttacctcttcgtcacgttagctagtgagtcttaaagtaaccttttccgaaaatatatgtagtggtggctttggattatataagtgcctctaacgttgtctccaacaagcaatttctgcatttttggtaaatcttcagacccaaaaaaaaatcaattggttgtatataattaataccaagagatctaagatcaaggtccgacaatatgcttttattactgaactgaagatctagcgttgaaattaccatcattgatagagaccaaagatcataattaacactcacacacatttaagtcttaagcatggtggaattcacacaaggacaaaaatcgtttaactacagttctaggaaaagaaaaatataatacaagaaaataaatatgctgtagtagactagtagtgaatactgaagactcctaaagagcgcatctctggtgataaataatggaggtaaaatataatggtaactaaattatcgaaagtggcagttcgatttatccaaagacagaaaatgtctgttgtcactttatgtagtgatgtctaacgttacacacatttgtctatcttacacttggagagagaaatttcacgactcttaggttacttcagtttctctggcactctctctatctctctgtctttactgacttttcttttatttctatagtattccatgtagaagttgagatgc

SEQ ID NO: 48549 - DNA, 990 bp, Arabidopsis thaliana landsberg
  unsure (1)..(990): unsure at all n locations
atacatatgtgaaaaaatagaaaattcctaacggaagtcgtgccaaaaagtgttttctatgcaaaagacaacaacactttcaagttacatacatccattccattatttttattggtaaagtaaatttgacatctaaagaaaaaaaattgacatcacattcctattctaacaagttaaacttgactattctgttgggataatttaatcaaccaattaagaatattatgaaaagaacttaaaaatggattagtcttgtgcattaagaactttgggggcataagccaaaaactatgtatagtttgttttcattttcattaaccaaacaccaaattatagattacaaatcacgtcaacctcttgtatatttagcatggttgcttgatataatattcgaaggaaaattaattaagtggtggagttttctgaccaatattgttttccttgtgatataatcaatgattttagccaaatttgttgttacttattaagaaatattatgttgcatcacatcgtttatttacgaaaacaataaggtattgcgagataaatctgtaacatacttgtatttgcaatgccaaatataaatagcgatgcttctggaacaacggatcatatccatcatcatctattgctgttccaaagagaataaaattactttagtattacattatggacataattttttttgataatatttcacttttcttgttgaaatatagaagacaaagtatgtaaatattggttgtcattcagacagatttaatggacatctcaccaacgagcacataactctctttaactgtcggttcaattattttaaggtctctatatagtattttcaattgtttttgttaaaagatatatagcccatatattgctacctcatcgcctttcaaaattatgatttgtttgttctcaacagaataatactaacccacanactagtcaacctgtatcgtcgcgtctcgtggatgagcgtangcattgatg

SEQ ID NO: 48550 - DNA, 474 bp, Arabidopsis thaliana landsberg
tttttttggcttggtggttgatattagtacgcaattctctttccagtaccggtactacacaattacatcggaatttgtttggtttactttgaaaacaaaaactttggattggttgcatattttgataaaataattgtaccaaatgaatataaattagttgtgaatcttatattataaaattgacttgacgacaaaaaaaaacaaatattataaaaattgacttaaatcaagtaataagaacatcgaaatcagagagatcccattctgcaattgcttcatcttctttataaatctcggtgccaacatccaccgatgtccaaatcctcctcgctggaatcgtaccgggatcctacaacataaacaaatcaaaaaccaaaaccggaatattcaaaagaaacaacagaaaaaccaaccggtttactgatcaattaatcacctggtagaagaaaagcctactggacaagccaccaacat

SEQ ID NO: 48551 - DNA, 331 bp, Arabidopsis thaliana landsberg
gagggggggggttctcaagaggaaatatataaatagatttataactctttacttctcaaaaggctaacttttgaaccaagcaatcacgagaaacctttgaaaatctcttactttggatccgttcccttgttcacttggtttcttctttaacttccaaaactcaacttgtaaccaaaactttctggtgcttttctttcttctcgtgtcctttatttccccggaaaatttaagctcctcttcgttagtttccccggaaagtttcatcattgttatacactaggaaaaaagaagaagatgaaacccatttgtttccttctctgtttctgcttcc

SEQ ID NO: 48552 - DNA, 447 bp, Arabidopsis thaliana landsberg
ttcacctttcaccagctaaaatcaattcgatctatatatatacatcacattgatcacacagaaaaagctactaatgaatctacagagattctgaatctaaccttcaaactaaagagatacacctaagattcttaagagcctaccaaagaagtatccaacgtctacgtctacctttcaaattatcttgtacgttaagacaaactataaactccaactatacaagaaacgacaagtagacaagtagatgtaacttccaatcttcatcaacatcaacaatattttaagcaattaggtagtgtatggataatataaaatatatggtcttgaagcaactaatgttacatcattcaatcacagccgttgaatcataaatggccatcacaatcaatatcaccaaaacgtcattttcaaatgacgtcctccattaaactaacactattggttttt

SEQ ID NO: 48553 - DNA, 558 bp, Arabidopsis thaliana landsberg
  unsure (1)..(558): unsure at all n locations
gcttagtagtttccaggtgtaccaaaagtaatatctttcatggcatcatgcaggaaaaaatgttgactacagactacaattatcataagcaacatttttttagtactgaccaatgtaaccaaacagttagcctgttttggcaacttaatgaccatttgctacagtagtacgactattctaataatgagttgtggtgtctgaagaggtgggtgtatatnnnnnnnnnnnnnnnnnnnnnnnnnnnnnnnnnnnnnnnnnnnnnnnnnnnnnnnnnnnnnnnnnnnncagccagtgcagttttgaatgtaattgttttttacttatctttaacgtatggactatggagaattggagataccaaataacattaagtagttcttgagatgcaatttttacgtcacgtccttgtttttatgatacgtccttgttttatacatgtttgcatcatcaccttaatttactgttgaaagcaaagatacatttattggtttcaataggttttatctattgacttcttaatagtcgtttcgcactggcagaacagtctttgagcactga

SEQ ID NO: 48554 - DNA, 519 bp, Arabidopsis thaliana landsberg
gcgttttgttactccaaaaactgcccaccacatgttgtcaaaatgcctgactgagttcttctttgactttattgtacagagggaagtgttgcctccacttttaacctcagccacgagttagctcatgcttttcaaaccccgtcgtaccacgacatacgttcacggcttcttgttattgacccaacacaagaaaatctcgagctgtttctttctcaagagctcagaccaaacaacgaatccgttcaagaagctcttagtcttagacacgccaagcaaactacacttaccaatcttgtctctacttacttccaacacagcgaagacgccacccgattttgcttgaatctttaccaaaacgtccacagtgctcgctgccacctctacacacccctcttagacctcttcaatatctttccccgtgattcccattccgcaattgacgagtccttctgtaacttagcattcgacgtttttcttaaacttaacacgtttgaaaaccctttcgcatctcctgaatct

SEQ ID NO: 48555 - DNA, 640 bp, Arabidopsis thaliana landsberg
atgatctctgcaagaacggaggtttttttttggtcaataagaagaacaaatttatgtactaaaatgttcctttagaaagaagtgaacaagtgggagaccgtgcttgtaaatcccttatagtagactttctttcatttaagaaatttaaaaatgatttcaaatagaataaaataataaattaaactttgacatttcatgtaaaattttacgtcgatattgtaaaacaattacatatttattagcaaatatctctcaacgtcaaaggcccggcaaacaattcctaatctccgcccgttacggtgcaacacacataatgataattgaaattactatttttttataactatattacgttaaatgatttattgatatataaaaaacgtaatttaatgttccattaaacaactatataaaccaacttagcgaccacttaagcatttcccttactatttacgttctcttctttctcctccgacacactccaaaactcataaatctatctgatgcgaatttgactaactctttcgtaaattaggatcttacttcaaatctttaactcaccaatcttcttcttattcaaagattagagagaaaatggacaacgagctggttatgaacacagagtttccatcaccgcgga

SEQ ID NO: 48556 - DNA, 833 bp, Arabidopsis thaliana landsberg
tgctctcaggtgagcaaaggaaccaaccagagactgtctctgtcacatgaacccttgagaaaatcacatcatctttgtagaatatatcaacggctgagattaactccgaggtatcacaggacggtgggagattgatcacaacatcatgttcaagaaacggaaaggaatcggagaaaaacgtccggtgaccgtctgggaacgttgagatgatgctctgtacacgtctgtccaaggtagaaggccatgtagcggaacattgttgcctccagagggactcgtcggagcaaaaagagtttaggttggagcacgtgcagcttagggcggcgagagaggaaccgtcgaggcgggttaggatgttagaccgtaaaacatcggaggacacggcgttgattcccggacttccgccacgtgatggttgctccaccgttgacgaagacgaagacgaaagcatgagataaagattgagttgaaaatgcaagaaaagaagaatatattgaatagtccaagcattttccattagttcattatttatggtgagtagtagtactatacagataaaatctattcgaatttataaatatattaatttgggagaattagctaaaaaacaaatcttttcttgatataataaattaataatacacctaattataaaatgttttacgcacgtttcttaagaagaccgactacctgggccacatatgtctgttaattggttggaatcagcattcttaaataaatactactattaaacgcgtttgcttttgtagcattacagcttcacgttttttatatgagaatacaaatgtacagtgatgtcgacttacatggtc

SEQ ID NO: 48557 - DNA, 747 bp, Arabidopsis thaliana landsberg
ttagcatagtttgaggtcgatgtaataccattgtaccatatatttcatatatactttgaaaaattattacgctttaatattttttctttcttagtaactagattattaaagaataagaatctttatcaaggaattctactttctgatcatgctaaaatcaatagttaagacacacacataatcgatggaacttatgatcatgtggcataattaataaacatttttggatatcgacctagcaagggcctagggtatcatcggaatgaatcggtataagattgatatttgtgttttggacgatgttctttaacttatgagctttattttccacataaaatgctttgaccatttatacaccataagaagcggtccacatgtaggcgaatgagatattcctcgctatggctactatgcgtgaatgtaacaatctctcttaacaaaccgatataaatccataacagaaaaagggattagtcttctagttaggattcaaggttcgaattagcgaatttatttacaattgacatggagatcgcttctttatccatggatatgaatatgaaggtgaccaagttgtgaatatcttgctaatgattacatcatctggtaaagaaaaaacacctagaactgttatctttatgctttcattagcatatgtaccaaaaaaaacaccagattatatttggtttttacgttatttgatagttctgcttgtgtcagaattatttcctttacatttttttttga

SEQ ID NO: 48558 - DNA, 136 bp, Arabidopsis thaliana landsberg
ccagaacgaaacaaactcgatagtcgatccaccgcttgatcatcttaggtattctttctatttctcttgattcttgtttctttttttttttttttatctaactcacgctttatacacacacagtaaagaggttttt

SEQ ID NO: 48559 - DNA, 782 bp, Arabidopsis thaliana landsberg
tatatgcctggggagtggtgcctttatctatggaacactccattatccgagccagcagccatttctgcgatttggatcccgacaatgacgatgaagaagaagaaaaagatgatattttctacttagaagaaggtgggatcaaggaaggaaatgaagaacacaatgagacggaggaaaaagcaatgcttgcttcttccgcaagcaaacacagtgagaaaccgcagcaacccccgattccaaagaaacgcccttcaagactatcaatcatacttcttgatcaaggattgttcaccgtttacaaacatctctttgtcctttcattgtctctaaacgtcctagctctggttctcgcggccaccggaaatttcgcttacgctagaaacagagcagctctattttcaatcgccaatatccttgccctaattctctgcagaagcgaagccttcttgagactcgttttctacctaacagtaaagcttctcggacactcctttgtacccctccgcataaaaatcgctgtcacagctctcttacaaagcctcggtggtatccacagcggctgcggtgtttcctcggtagcttggctcatctacgcattggttctcactcttaaagacagagacaacacttcaacagcgatcatagcagttgcgtccacgattctctctctcctctgcctcacttgtgctgcggcgttccctcttgttcgccatttacaccacaatgtcttcgaacgcgtccatagattcgccggttggactgcttaggccttgttgggcgtt

SEQ ID NO: 48560 - DNA, 339 bp, Arabidopsis thaliana landsberg
tttatgagaatcttccaacagacccagctttctacctgatatgagatgtttctttacctgtacaacagttggcgatagattcatagatcgagtgagaatgttccacgcaagttcttaagagtgtgcattaccgtgatggactcctgcttctgctcttgctcctaccacggatagggctcttcgctgggctcagctgcttgctaaggctcttacttgcatccagctcgtcgtgctccacacacaattcattccagatgatcacaacgtacttagctagacatagatcacggcgatccgatactacggcatcggaaccgacgatattgtgctcatagtata

SEQ ID NO: 48561 - DNA, 198 bp, Arabidopsis thaliana landsberg
cctttatctcttgagattcttcaagggttattttaatctcttacaaaaatcataacttcgaatatcagccaaaaaaaggatcagtctcgttggacaccacttgtttgtttcctttgttttttttaaaagaggtctttatccagctatcccactctgctcttcttctttaagcattttgcattcttgtttcttggtttt

SEQ ID NO: 48562 - DNA, 416 bp, Arabidopsis thaliana landsberg
gtgaaaatattctcgagagattttccgggaaaatgatcagggaattgattatgaaagaaaagagaatcgagagaagaagagaaaggaggaggaaatgtttggaaatgatgaagcgtgttgctcagttctgctagttgtcttatgggatcatccattgtaaatgtctgaaaatcagaagagagattcgccatttctgagtttcaatttttttttttttttttgaaaattggtgaaaatagaaagtggctgttttcgagcgagtggcaatgtttatatatagactagagttttcttattattatttttttgaaaaaaattggaataaaagtggggttaatcaaaaagatgagaaaataaaaaaggagggccaatgaaagtgagagttatgggatttttgtataggagtgggtcaccca

SEQ ID NO: 48563 - DNA, 720 bp, Arabidopsis thaliana landsberg
  unsure (1)..(720): unsure at all n locations
cgtgacggtttgttttttcagccaatcaaaaagcttttaagtggatctcactagatttcatagcatacgctaacgacctaacgttaaagtcaggcaaaatctatgtttaaaatttgcgtcgttcaaaaaccattccacaaaaaatacaagctaaactggcggcagagtctcagttcaatgaatccattacgagctttgtttgaagaaatatttaacccactgactcattaataaagcaaccaaaacaaaatcctttaactataaaataattaaacgaaagtaaagaacacacgaaaacaacaataaaagaagaaaaagcaaaagtaaacgacaacaaaattaccttaaatatatattctctcgtaacaagttggcatatctaatctagttatattgagatagtgtcatgcatcatgatattagatgttttatcttataacattgcttttatttttaccgatttaacaaaatcgtatattgtatgcaggtagtcaaaattgatacagacttgttttatatcagccaaacatatcaattcagtcaagtgagttaacaatgtatgtcaacaagggggaattgagcaatttaaagagttaaaagaccattaactaaacagacaaagagtttaggagcaaaaagtaataaagtaataataaaaggtcaanaagtggtagaaaaaaagaaaagaagaggagggttctgtgcacgtaacttgaattc

SEQ ID NO: 48564 - DNA, 674 bp, Arabidopsis thaliana landsberg
  unsure (1)..(674): unsure at all n locations
cccgtcatgctcctccatgggcgtggtgatcacctatgccgtcgtagccatgccttggcgccacaccggccgtcagcctcatctctctgctcgcctgtctccttgcctccctgtgctcaccacgccggacgccgctcccaaccctccacacttccctccccaggccgcggcggcattcgctccagctctgcctcgccatcgactgagtccccacgtccctgcgcggcgacgtgctcgcccaggccctgccaaggactcctgcgaactccaacctcatcgcctagccccgccaccgtttctaaagtggtgatccacaacttcccnnnnnnnnnnnnnnnnnnnntttttgccagtaccttgctgatgtatgtgtgtaccgtgtacgtgtgtgcaattggagcataggaatcccatgaatgtgtggagaagcaagccccaacacgacgcccgctagattttcgataaaatgagtgaactagggtttcgtcgttgttcttgcaaatatcgaatttagtcttggtgggctaattctctatttttgttcgttggttgattgatggactgataattctctaggagtgtgtaggtcatgatcatttcttattctgattctgaaacaagtggtcctagtaagaattttacttgagtgggtgtggcagatttgtattgccaaa

SEQ ID NO: 48565 - DNA, 971 bp, Arabidopsis thaliana landsberg
attcactaggtctctgatgaaacaattatgtactgattcgactaattcaatgtaatgactaaaaaactggataatgaattaatatgaacaaaaaagaattaatatgacaaacatatttttaactaaataataaatatcaaaattagaaattgttaaattggtactggtagttttttttaacagtaccaaaaatattaaaattataaattgcccttgtctctagtaatattggacctaattgtttcttcttcacaagcaattttattaaaaaggtggactagctttaatttgctcatcatcccttcgacaaaaacccaaaaattgaaatggtctcggcattcgcaatttgagcttgaatatatttttccgtaagcagatcaggaacttgctctccaacgcaaattcggaaacgtaggaatcctaagtctaacttaggtaaacgccaatgtatgcggcatggaattggtaagctgttggaatattctttccgtagtaatgcgtactatactacaagaacaattatatatgtgtgtacatgtctatcgtcacgatatatttgataataaagatttggtacgtatctcttgaaatgaagtcacaacagtgccttttaaaaagatcagtagaattataaaatggagattttgttagaaaattttggatacgaaatctggataacatataatatttttttatttatgatataaagtgagacaaatgtgtatccatgccatggtccttccggttggtggtgcggtgtggacgggatatgccgccgaaatatcataaatccagctgacgaccaatcttttactcacacactctcttttcctttttcttttttatatatcatattattacattaacacactatttcgtcaatgagtttggataggaccaatcattttcattttattattgtcgtcctaatcaaactcactgttaaggggccttccaattttgtctttttc

SEQ ID NO: 48566 - DNA, 638 bp, Arabidopsis thaliana landsberg
tttgaaaattgaaggtcgtagacgaatcataaggaaagagagaagtggtttgagatttcttttttgacggacgaaaacggagataagctttgggggaaatggcgacgccgttaccagattttgagacggcgagaggcggcggagcagtggcgtcttcttcaaccacggttcttccgagttctgtgtcttcttcttcttcttcatctcgtccgttgcctgtggcgaattcgttctcggatgacgcggaagagatttctccgatcctgattttcttgttctttcataaggcagtatgtagtgagcttgaagctcttcatagattggctcttgagtttgctactggtcaccatgtcgatctccggctgcttcgtgaacggtaccggttcttgagatccatctataagcatcactgcaatgccgaagacgaggtaatgcgaaaacctggtcctcttcttttaaatttgatctcatcatgttctgaaaactgctgaattagaatttggaaccatctctacttggattttgaactcaatacatatagctgcaaatttgtgtaaatctgacttgattttatcttaaacgaattgtaagtctcaattaggctcttgctgatcatcctattgattctatgagtgcgt

SEQ ID NO: 48567 - DNA, 1130 bp, Arabidopsis thaliana landsberg
aacactataaactgcaaaatgattcaaaagattttaatcgaattcaaacattaattctctgacaatcagaaaacaaagaaaaatgagaacaactcttatcttcttcacgagactgactaaacaatcatagatttttccgttttttgggtttcgtctggtgttactctctccttctggttagttctttttttccgaattcttacaaattattgcggtttcattaagatgaattatgatttggatcaccatccgttgtttttgtgtccggttttgattcttaggtctaatcgcgtttcatgttttttttttgtgttcttctgggtttgataattttatagttgaagttttatgaaatttgatttcaattgcaaataatgatgatttgtttagtaagttgataaattgacaaagaatctggctttggtttttgtttgcttctaagaaaattaggaactaattcttcaatttacctggaaagcaaaacatatcagattctctaaaaagtagttttgtaataagcttttttggtgatggatctgtcggcaatcagaaagattcttcctttgaaataaatgattcatattatttttcctataaatagattcaaaacggttaataagattttgctaaatctacctaatttctaaatcacattgatcttgaattgaattctcagtctcttgtcttatctttagagttatggtgaaataatggcagcagctgaagcaagagcagtgtggcaaagaacagttaatcgttgctttgtccaagaagacgctaaaagagctcccaagttaacttattgccaatcatcttcatcctcaactgcttcttcaactaagcaagtggaagtttctggttcttctcctcgagtttctgttgaaccacggactcaatcatcttgtgcaggtttcatgcctcttcctcgaaacccgaatttccctgatctgttaccccacaacaccagactgtggagtcatcctcatcatcagtttcaggtgaataagaagcagccattggaggatgaggttaacaatcaaggtgtatctgagaagaagtctgaattgcgagctggagagaaacaaggaaagtcttttaattccgaaagctttcaagagttatagagttga

SEQ ID NO: 48568 - DNA, 739 bp, Arabidopsis thaliana landsberg
gaaaaagactcatttctttcatttagtattcgaatctagaggatagttgactctccgattgtcgttgcctctctgatttttcagctctttgattatgattaatttagccatttctatcatttagcaaggaagatttgaaaatttggcaaaattttagtgggacaatgtcgctttcaatctggagtattttatcagactctagaatctacccctaactttataaacgagtggtgggaatgtaaccaaaacacgtcggtatcttttttctcctcagaaacaaactttaaaatcaaagattataacattttggtaactattatataatttagattcttcaaaattagattactatttctataaataattaaaataatgcaaaataagattgaaactagacagaagctttaggaaattagtagcgacttcagggagccaaaactagctagagatgctcaaacaaaagcactacaattcattgaattctaggaaattagtattttttactacttccagtagaagtgcacttggacgcaaaaggtgttgcaatttcttagccaacaaaaaaaaaaatggtggaaaactcccgtaaaatttacatagacaataaccaacccccacttgtcaaaagaagacaagaaaaaccacctcttcccacttcgtggtctaagtcaattataccccacaattacgccaccaataattccaccttttatttgcaaccatagggaaatttcaattt

SEQ ID NO: 48569 - DNA, 913 bp, Arabidopsis thaliana landsberg
aaactgaagttcatcggatgaaacaagagaggcgaaagtaaagagatgtagcaagattattccgatacgacgcccggagtttcgtagaagacgataatcacccatcgatctcttccttgtgggtttcaggaataaaaaaagtttcagggcgcggaaagcaaattagaataaatcctgagggtatttatggtaaattcaaagaatataaaaaaccgtgtattgtcggccttgtaaatgggcctaatgtggcccaatgacagagtttaacattttcttttataataattctaaaaactcaagtgtgatattggctttctctttaaaccttcagctttccgagacgaattctgtcggactgtcacccagttctgaattatttcttagtgaagaaaaaataattttacgtccaatgcgtgatgcttagaaaatatggttgcttggatgattaatggtggactattgaagagactgaaaatgattgagccgttaattacgttacgtcgacttaactgaacaaaatggaatgatgcattagtgattaattgaattattgactgcgtaactatgattgacaaaaaaggccgaccaaatgatctgccaaccatattttaaaagcatactacatttacatttcttacaaattaaaatgtaaaactatagtttatccagtaattaccattgccttaaaactcgctcaagttagttgactcttgactggttgtttaagtctaacatcctcacatgaaacgttatgattggataatacgggatgacgtaaaaatccaattaggtccaacacaaacaacgatttccaaacgtatacgaactgtcggtttacacttttcattatttcctacattggtttaaagaaagaaaagatttgggggaatcttggaatctgcaaaaaaaaaaa

SEQ ID NO: 48570 - DNA, 557 bp, Arabidopsis thaliana landsberg
tgcatggagtgctactggaatgccacggcggcgggaacgagacgagcggcagcggcgggggagatgggtacacgagggacatgaacttcgacgcaaacatggtgatcatacttgcggctcttctctgcgcgctgatactagcgcttgggctgaattcgattctccggtgcgcgatgcgatgcggtttcgggttatcatcctctgcggcggcggggacggtggccgacagagctggattaaagaagagagaactgaagaagtttccagtagctgagtacgggtcgggggaagtgaagatagcggcgacggagtgcgcaatctgtctgggggaattcgcggacggcgagagagtgcgagtactgccgccgtgtaatcacagtttccacatgtcatgcatcgacacgtggcttgtctctcactcttcatgtcccaattgtcggcattcactcatcgaggtccacgtggcggggtctgagtgatttaattatcgtcgcgagggttaggttggcagtagtagtaatcataattagagtttaatgagtttatcattatcgtca

SEQ ID NO: 48571 - DNA, 573 bp, Arabidopsis thaliana landsberg
gaagaggaaatgttctcatctgcctggtttgttgctggtgttgccatcaacgttctcatataccaatctttctttataccatcgatattatagtatctcaatttactgttcttggaaggaaggccgacatacaatattctcgcgcatacaaatattcttccattactacatacaacatcttgcatatagccgactccccctggattggttgtataacattatgattcaaaatattgtttaggcaatcatcacttttaaaaagaattatatatcgaacttaaattttgtaaattgctttaacataaatatatatatatatatatatatatattttttcttagtaattttattttcaccataatagatataaacgatgtatagtaaatcattgacgaaaatattttttctacaattttttatctattccataacatttagtttcgtctattttaaataaaatatatcgctttttattgccgataactaatgttaatacaaaaactgtacattactacatttttaaaaaattacttaactactatgttcatctcagtatttcgatagaattttttt

SEQ ID NO: 48572 - DNA, 409 bp, Arabidopsis thaliana landsberg
  unsure (1)..(409): unsure at all n locations
gaacaaagactcctgtgcggtgggttgcacctncaagcttgatcacccgagcccgtgcactctctatttcagcacaagcaaacgactattattggtgaactaactaattcgcgtcgcgtgaagcctgaggaaacacaatgaagcagccttagctagactgtctacaaatgtctaacaaaattataatgcagtaaacatgaaaaggaaacttataagaccttcttgaggaagcttgccagattcttcacttcaaacttatcatgagttagagcaccttcattttgagttaactaaacggctagtgcctcaacctgcaagacacacaacactgcgtagttgtattcacacccttcacagttgttacaatcatacaagtcattgcaaaggcgtaaaaccgtcaagaaagtga

SEQ ID NO: 48573 - DNA, 680 bp, Arabidopsis thaliana landsberg
gcaataaattcgactaactatataccatcccgaatccttagcatgactaaagagtctcatagactctcagttccagatttctctctctttaacttttgcttctgttgataatttaaccaccctgttgagaaaactgaacagcggcggttcggatcaagtttaccagctcgtcgtctagctcatcgagctcacctgagtcacgaagctgatgataaataggagctgcatgattagcagcagcttccaccagtttccacatcgagaaactcgcagctaattcgattgttttgatagataactctctagcggattccaagcaagagagaatcacatgagcgcaatcgttttgaagttcttccataatccaccattcagaaagcgagtatatctccacgtaagcttgaagctcatccagctttgcctcagtgtccatgttgttccacttgcaacccgatggaggctttggcaactcatcagagtagaaccaactcacaagttttgttaaccccagccagctcacaggaacgtttagtctatccaaatggctgcagatttttaagagccaattattagatgtttagtcttttattcctcaataaaacaccaaaaagcatacattaatctctgcttacattccagtaacacaggagcagaaaataccaaataacttcttaggtttc

SEQ ID NO: 48574 - DNA, 502 bp, Arabidopsis thaliana landsberg
ttttctgcggcagggtcattaacaaaagattgatgcaagaaagtctaacatacccaataagatccagtccaattttggcctcctttattgataacactatgcacattctctacatagcaaggtttttaaaaaatcagaggatagaatagtacaaaaaccctaatccaaaacagaggaattagggttataagaagtctcactagttgaatcaaggagaagatatctggaagaagcagtatccactataacaatctcattgtatctgcttcttactgctgtaacaacccaatactcttcttcttcttcttcttcttcttctttggcagagtcttgttgaatttgcctctcgtcatgattactttgcttgagacaaaatgaaattgagaatctgggtttgttctgagattggtttaggaacaagggttttgaaaatggggatgaaaggaagcaattctcgtatcgagaaagtgaatgtagagatgagatggtcaaatgagaacac

SEQ ID NO: 48575 - DNA, 404 bp, Arabidopsis thaliana landsberg
  unsure (1)..(404): unsure at all n locations
acattatttacaattatcagttcaatggccattaagttcttgtgtttcttaatttatatgtatcactgttgaaaaatctacatatctcttttcattgaaagatatatttagttttccttgatgctaactaatggagtctataattgtaacaactaccgttttggggtcaattacgacacattattcatatctttggtacattagaaattacaaaaatctaaactggtcaaaacactaagaaaaaggtagagaggtcatcattaagtaatgaatatgactcaacgaaacacacattacatgatagcctccaaaaccccttccatccatccttatgtctctcccacacatgacacannatatgtaatatatatatatatatatatatatatatgtataaaatgagt

SEQ ID NO: 48576 - DNA, 487 bp, Arabidopsis thaliana landsberg
atacataatttaatgtattgttgctgtttcatcatactgtggatggaacccaaggccagggatgcaccatgcaagcactttgccagcaagacacttctcccgctgcatactgtagaatatttgttctttccttgcactgggggttgaacccagagtctcacctaggctgggcaagcgctctatccctaactctattttttgtttgtttgtttgttttgtttttgtgagccaaagccttgctatgcagcccagactgtccttgaactcatgtgagttctactgcctcagcttcccaaatgctgggattataggaggaatacccagtttacaacgttaaatgtttcatttcatggtgactgccatctgaacacatctatgaattagcatggcttctcagaccttcctaagacctagattttcccccaaataaactacatccatgaaccgctctagtgggagaggttcaacttactaaaatgttacagtt

SEQ ID NO: 48577 - DNA, 826 bp, Arabidopsis thaliana landsberg
aatatttagaggtggttccaaattttaaagacatagaatcggactaaaaatcttatttgggacatccagaaattaaacttttgagacatagaaacaagacattgtgatgagaagagtaaaagaaaacataaaaagataccaacctacacttaggttccaacccacaaagagaaacatatactttccctctaagctttgaagctttagtttcaccaaactgacgaagcacaagaacccaacatttgcatctttataaggcaatgatcatgaatcattttcgaatcacaaaaccaagagagaaagttgagaaatcatcagtagaagatcaaaagaggaaaagtcatagtatacatttaaagacacatcaaaagcttcaagggaaatggtatttccaattcggattttggttcttttcgcattgctcgccttcccggcatgcgtccacggtgcaatccgcaagtacaccttcaacgtaagtccgcatgatcaatgttatcatcataatatattatatgatttcatcaaggttgtatcattctttttgagtctaaaaatttcttaaataaaagtagtaaaacgtacgtacgtaattatctaaaaataacaggtggtaacgaaacaagtgacgcggatttggtcaacgaaacagatcgttaccgttaacggtaaattcccaggacccacaatctacgctaatgaagacgacacaattctcgttaacgtcgttaacaacgtcaagtataacgtctctatccattggtgagactgtcctcgtatttttaaattatcaacttttcctcccttaattatcacaaaattaacctaa

SEQ ID NO: 48578 - DNA, 322 bp, Arabidopsis thaliana landsberg
aaatgttgtaaaggttttttctgtcgttactaagttatctcatacattaatatatattatatatatgtatgtaaaaagacaaattatggtttacgaaaccatacttaaaataatagttttttatcaaataaaccctattttatatacaaaagaacctttgaaaaattatttggttggattggataaaaagagaagacttcaaacaaaacttattaggcccataaaagtcctaaactccgacccttctccccccgttcagctatcggtttctctattttcatcaattccctatatttaattttttgggataggtccgattttt

SEQ ID NO: 48579 - DNA, 1047 bp, Arabidopsis thaliana landsberg
aacatgcttctattgaacaaatacatatatgaaaatagtcatatagttatttattcctaacttaggctaataatctcaagtgatctttaagaataggattctaaaatatgagtagaataggtcataggtgttaagattcatatacttttcttattgttgtccattagaagtagaaccaaccaaccttacttgagaaaaaagagaagaagcattatccctcgaaaagagaaaaagcgaaacaaagatatttgggacatcgaacattttccctcttttcatgggcaaagcatttaaatctaatcttcactaattactagttataccttttccttactaattatcagacaattgaacatattgaccaagtcaacatattttatctgtaataattaattatctaccttacaatcaaaagatgaattcacaactaactaaataaatcacaagaaaaaataccagaaacaattccatgacattaatactcaataaacattcaactaagtgtctgctacaaaaaactcaggtttatttctcattattacttttgtgtttattatttttttgtaataaagatgcacaccaagaattaactttttgaaataaacaatattagaagagatccaagcgacaaaattcactgtaagctactaaagaaaaatagtagaaaacatagtactactacttaattgtctaatttgcttactaattaattagtttattgactaatcagaaaaagtaacatgtttgaagttagtgtttaagaattaatacaaatgttgcgtcatcatctctcgctgtcttgtcaaatctgtaactgcatatttatttataaatctctcttctctttactcattctcttctctctcactttctcaaacaatctctctctctggcatttggatttggaagtgctttttgtatatatatccaacaaaggaatcagatcggagatgtcggatgtttccggtgacggagatttatcggcgacggttactgaacatgaagtaactccacaaccgccggttttcttcggcgacgtatccgtca

SEQ ID NO: 48580 - DNA, 313 bp, Arabidopsis thaliana landsberg
ggatagaatctagaggataataaaaagttaatatgctcacatagatgtgaagtataatttgtgtagagtaaataagataaaattttggtaataaaggatgtattatagtatgaaatagaattagtaggggaattaagaatatttatggatatgaatgggtttagattttaaagtagattaatagatgatgtaataatgtatgcacccaggtgaaataaggtataatagagtatgtacttggaaattagtatagtaggatttaagaatatatggaaatatgtggtagaaaaatgatatggaggaagagagtgaa

SEQ ID NO: 48581 - DNA, 876 bp, Arabidopsis thaliana landsberg
tgatcatgaactcatgatcaatgacccattggaatactcggctcatcatccaactcaatccttacctcagctagtcttttttccttgtaaacgtaccacttggagaaaactaggaaaatgaggaagttcaaggcaacaagtacggccacaagccagtagaaattgtaaagacggcccttgttgagatcatcggcaatccatggatgagctttcccggtgaatttctcgacgattgtcacgagaaccgagctgaagaaaaagcctaatgccaatgtgctcaacaatagacccgtgctcatccctttcatacctttagggcactctctcaagaagaaatctaactgtcctgtgtagattaacgcttcgccgataccgacaataagatattgtgggatgagtagataaaaccctagaggaagcgttttgactgttggaccatgagcgtgtgcagttctaagacgtttgagctcgaccaaagcagccacagccatagccattgatccgaagaaaagccccaaaccgatccgttgaagcggtcttagaccatgggggtagttgaatagctttttgcatagacgaatggcgacgcggtcatagacggcggtggttaggaggaggccaccgacgtagaagactgccatcgatgctggagggatctcgaagctcccgatggaacggtctaatgtctcggattgtgcgactgataatgacgtcaattgagcgtggacggtccagaagatcgatcatgttgaccaaacggagtaacatgcgcacgatttgattcacttcctcaatatctgttagagttgaaagtgtccacaggttgaatacattcgaggtaactcccgcattcctgatcccattatagctgcctta

SEQ ID NO: 48582 - DNA, 315 bp, Arabidopsis thaliana landsberg
cctggaagggtgagaacgtggcgaccaccgaggtcgagggcgcgctcaacttttacccgggtgtggagcaggcggtggtctatggcgtgcaggtgaccggcgccgatggccgcgccggtatggcggcgctgacctgcgccgacggcagtttttatggcgcggcgctggcgcagcatctgtgtgctgagctgcccgcctacgcggtgccggtgttcattcgtctacgcgagcagcaggaactgaccgtgaccttcaagttccgcaaggttgaactcaaggcagaagggtttgatccggcaaaagtcaatgagccaa

SEQ ID NO: 48583 - DNA, 470 bp, Arabidopsis thaliana landsberg
ctctcaagtattgttttagcatctgtgtaggcatgtaaagctcaccgtagcatccgtttgcccaatccgggcctgtataattgggaacatgggatcgacgccgcggttctcgccgtggacgtggacaggccattcgcagggtgctcttgtcaaattaatgcgtgttccgaggtcgtcctaggtcagtgaagcctccccgatggttaatccgggcagtcgtcgctggccatggccggtacagacctcgtcggtgatgggcggggagcgcgccgtggccaggggtactcgtggagaagaaatagaaacccgagggcatttctgcaatccgtcagtgactcagtcaaacagtggtcagggtcaatactggtttagttttagcgcagggttgtttttgcatgaatgccagcgcaggcgcgcgggcttccccgccgtgggctgattttgcgcgatgttgggccggttgggctgat

SEQ ID NO: 48584 - DNA, 571 bp, Arabidopsis thaliana landsberg
ggatccatttcaacatcaacaaaaatttgatcatcttcaaaaagttaaaaaccagacctgataaataatcaaaagcttgttcttttgtttaagacagactcaattgtagaaaatctgataattatatatgtttttagttgtttttaagtcataaactcgcaagacagagactcaagcttgttttcacttggctaagacagacttaattcaaaagtagaaaaccttatctaatttgcgctatgtttaaagttgttcttaaagtcaaaaccctatgtagaagaaagaaaactaaaaactagtgtattacacagacttgtttgtttattcatcatcttgtgacttagttttcttcttcttcttgctatggccattatctgttgctgtcaattcctctccttctactgctttgcttttctttttctttttctttgatttctcctcttccttctcctcctccttctcctctgtctttctcttctttttcttctccgaagcatccactgttttttctccctcgtcttaaaaaaagaagaaacaacccatcaaacaaaaccgtttaccacaacagatc

SEQ ID NO: 48585 - DNA, 569 bp, Arabidopsis thaliana landsberg
  unsure (1)..(569): unsure at all n locations
ttgcttattcctcctctttttttgccatcccccattgactttttatttcattttacaataaattgtaacctaaattggctggcttgtttcaattttcaaaactatggttaatataactgttaatcaaccgaaaggtagatgaagatttttaggtttttaattttgtcaacaaaaagaagattactgtttttggtaccgacaaaacctaaagtgccattaacggtccgttgttggattttgtacattgttttaggatgcaacttttgtgatacttttggacccatactcccttgttatgctctacttttgtctaggcgcttccacaatattttggatattcatattttcagttatttttcctctcttttttccttttatctttatatatatngttggcttgatcttagtgccaatggatatgcctctcatctattggcaaatgcataaactatatacgttttttatctgcttttggttatcactgaagttntggtattctttttgagtctgatatctattttggtcactaacattcgattaattcctaaaacccgacattccttttaaac

SEQ ID NO: 48586 - DNA, 407 bp, Arabidopsis thaliana landsberg
aaaaaaaaaagagaagagtaactatgaatcatcaattgaataacaaaagattttttaaaaagatcaaactcttcaaaaatcttaatccaatacccttaaatacagcaatcaatttaatcaggaattggatatacatatatatatatatatatatatagatagatatagatataggatcttaatgccccaaacgtattggtattgtcaaactctaaaaaaatagtttgtgtaaattataagattttttttttgaattattgttgtagaaaaatgaaacttcctgccttttttcctggaaatctgttactaagctacttgatatataaaaaataaaatatttccattacatttttaaaattagaggaagttttctaagtcaacgatataatcaagaaaaaaaaaaaaga

SEQ ID NO: 48587 - DNA, 646 bp, Arabidopsis thaliana landsberg
acgatgtaacgttacattaatctcaatttgttaaattatagtatcatatatatatatatagagagagagacagagagatgcgtatgaaattggtttgttgactgtaaattacatcggagaattgtagtgatcggagaaaatgagtggcgtggttgggtttgttggtcttgattctttcagcttcgaattagcttcttcgcttcttcgttctgggtttaaggttcaagcattcgaggtctgttgcttcttcttctttttttttttctttttttttctggggatcggcatgttctggaaatatcatattgatcggggttcaattattcggaattaaacatgtgaaatttgtgggttctgtagtaatttcgaaatactcggtctatctctcgggaattcagctgttttactggtttatttcaatcattcactacacacgtgaaattgatttgattagtagtgtggaatttttgttgattttttttgctttgtctattggaaaaaataaggagggaagctaaattgttgtatctaattcgacagataagtacagaattagtggagaagttcattgaattgggaggacacaaatgtgacagccctgcagatgttgggaaaggtatagcagcatctgagtgtgttgttagtt

SEQ ID NO: 48588 - DNA, 586 bp, Arabidopsis thaliana landsberg
  unsure (1)..(586): unsure at all n locations
tcgttggtgcgggaggcacggagccgcacggggctatgcgggagacggcggggcgcgcgaggcgacggaggggacgttgaggccacatgtgctgtgcgagggagggcggcgcgngtggggccacgcagggtgactcaggaggcatcgaggccgcacgtggctgtgcgggggagggcgtcacaagcggggcctcacgaggcggacatgtggacggacctgcacggaagggggcacgacagtgggggacacagagtcggggtcgaggaacacgtcgagttcggtgagagaggcaacggaagaggaggaaaaggggaaatctgactcgtcgaaaacgacgtgacgaaagatgaggactctgtgggagttgaggtcgagacaccgataccccttatggtcgggggagtatctgaggaagacacagcgagtggagcggggggctagcttatgaggagcaggggaggcgagattagggtagcaagcgcacccaaaaacacgaagatggttataggaggggtgtatgttgaaaagagcgaagtaaggagtggggtgggcaccgcgtttgtgggaaacaattgaggaggttggt

SEQ ID NO: 48589 - DNA, 430 bp, Arabidopsis thaliana landsberg
tcacctacctcacgcaccatgctgcaactcaaccgggccgaatttcttattgatgctcatacttgttcgattcctactgactgctctcttattggcgcctgtcatccgcatcatgccgtagcttaggcggctgcggtcatttattacacgttatccaatactgacgggggaggggtattccttgtattaacgttgatcacggagaccttgcattcgggctcgcagtggaactcatagggttcaaaattctttcatggatgaaatcaagtactgtcgagttctggacataacacctagtttactacgggatcacagcaaatgtctctattgtacgactcaagatcagctttgccagcattactactgtgtgacgaactctattctggtgtacgcgctgtagatctacggaggataatggttcacgggaagg

SEQ ID NO: 48590 - DNA, 648 bp, Arabidopsis thaliana landsberg
gttgcaagtgtcatttgtagaatatccaaattacctggcaatgtttgtcatgtgttgcaagggtcattcatagtatttatgtcacctaacaacatttgtcatgtgttgcaagtgcgatccatagtatttgtgttacctagcaacgtttatcacgcattgcaagcattatatgcaacatttatgcaaattagtatattggtttgatacttacaaagtcctaattttgacaacaagttgcacttacttatgttattaaaaatcataattaatatttatttttatggtggtttaatgtttccaatacttttgtaaatttttaataggacgagtcggtcaaaattggtgtgaaaaagtcaagcagcctataagttgagatttggggagtaattttattggttcccgtaattcgaaagtaaaactagcgcacgcaagtaaaaatttactagtacttcctaagtttctgcttttctttgtaccatttttatatcccaatgtgattccctctactattttgcagagtctagtaagagcttgtaacccacggtacatttttctatatattaagcaatggctcaaacttcgcaccttgtgtttgcacgtcatgcttttttttactacattggatcgtcattttctatatagtaaagt

SEQ ID NO: 48591 - DNA, 780 bp, Arabidopsis thaliana landsberg
ttactttattcacttccgtagttccgtcatccatgaaggatcccttaaactaatccacatttatataatgataacacttcttttttcccactaaaatgataatacttttagacattatatgtataaatataattcacatatagaatagaaaaagttacgctcgtatttatattaatttacatcaacagttccagacgccattgtcattaatcaccttttaacatttctgatttaaattaaatcatagtctatatactctgattcagcctacaagatgataaatagagaatcgtcagtgttaaaatgcactcttacgtaaagaggaaacataagcacgttctggtcggaccgaagctaaccagcaatttcatcactctatttcacattctagttaatccacaaaattttgatatacaaaattataattattattcattgtataatttaaaagtgaaaggtttgttaaatatagtagtagaattacaatttaattaccaacataaagtcaaatgccgaataaagtattcgaaataaaattgtaaagtccgatggagacgtagactagaaataacaagtaccatacgagttgacttgtgtagaaggcaacacaaactttctcgccgagtacggcggaggagcagccgcaagtggatccagccgacactaaggaagcttttaatttgcacaagatgcgatacacttacacctccccttcaatttcctacttatataatacatagtttcagttttcacatcccacacccaaccctttcactaata

SEQ ID NO: 48592 - DNA, 456 bp, Arabidopsis thaliana landsberg
ttaggtgatcatgtattgtctttgatatgatcatgtttttgtgcctggactgattcagtgctaattattttgattttaacaactggcagcccttccccccagcttaaatttcttgtcaattacgggagacaatatcgagggtggaatattgacagcatcctacggatacataggagggcatgaaggtaaaagcaaatacgaatggcattatcataaggtatatatctttcaagctcttctatgctggtatttccctctgaaatttagtcttaactttagtttctatgttcagctccaggcacggtactgtgtcttttgagatgaagttcagattatccatgtgaaagtataattcagaaaagaaaaaaaaaagcctatgttttctgtaaaaaattagttgccaaaaaaatcttagtgtggccttgccttcgggaaatttagttgcatctgattgct

SEQ ID NO: 48593 - DNA, 1048 bp, Arabidopsis thaliana landsberg
ttcataacaaacattctaaagatgacttcccataaaagaatgtatggatcagactatgggacgtagtgtctaacccgtaaatcatttatatgaaagttgattaattctcttcataagagtgaaacatcatcagtcaaaagaccgatacgtgtcattaaacataattaactaaactctttatctttcattccaaaagttaatgatacatttattattgtactattttactatatgttattagttttatcatgtttgaggttttttcgttttttttttttgtagttttaacttaaaatatgaatagaatgatagtatagctagctaatagtttgaatatgttattttctttaatttttatcaatacaaaatacatttagagagtaatgagtacataagaggaactacatcatcaagttatatataaaattagtttaggataaaaatgatttcaagagtgtatgagtgatacattgttgggaaagttgctagaaaatttgtttcgatacttggtgatacgttagtttcaattacatgaatgaatgattagaaaactaaaaatttacatttatcaaaatatgacactaaataaaataaattttgaaaaaagcgtgagtaatctttgtttgttttttgaatatctgaaaatttcaatcccaaaagccctttctagagacgggactcacaccaaattaaattcatctcattaaaagaataaatcatttccaacggacgttgaatttatcagctgagagatttaccattaggccaacaccggattgggataatcacctagtagaaatgaatatgcaaaaaaaaatttaaattggtaatccttccaaattaatttgcaaatgaaaatttacaaccatgtttagttctctatagaacaaactgttctacaaatgtttagattgcaataaatccatcaagatcttattaacaaatgaggagaaagaaacaatatattattagttagcgagtgtattcgcataagtccaaggttttgaaaaatataattgtcattaatcaattggtgtcacaccaagct

SEQ ID NO: 48594 - DNA, 543 bp, Arabidopsis thaliana landsberg
  unsure (1)..(543): unsure at all n locations
aaagttttttgaaggaccatgacatgttcttctgatgtactggttactgtacagctaaatttctactgatccttctagacaaacaattagttttacccttatatatcaaagatctaataaactaacatacaaacacaaacctgcgggattccagcctgtaatgctgcagcaacagaaccgctgatttccacgggggacaaaattcatagagaaagacaagaaaaaatcagttcactttatttatatgagtccatgttcaccaagaaaaggcatccaggtgacattttnnnnnnnnnnnnnnnnnnnnnnnnnnnnnnnnnnnnnnnaacatccaattgtatggcaccattctaattcagagagacaaagaattaagcaagttacatggccacagtgtagatcgccaactaaatattgggcaaattggtgctcacccagagaagcagaaaagcttgccgttgaaaatagagattcccgcatgtaagggttgtttcgcacttgaatctgattcatcagcaatggtccaaatggctgaatctaaag

SEQ ID NO: 48595 - DNA, 489 bp, Arabidopsis thaliana landsberg
  unsure (1)..(489): unsure at all n locations
tggtgagnnnnnnnnnnnnnnnnnnnnnnactcaatctcgcgttgcccggagatgtagatgttcatgatngacaggacacgcgcgacgagatactgacaatgcctacactaacggtccattggttattagggatgacataggagtgcnntcggatgcacgacttatcctgnaaccgnaagcacgcaagatcagcacgaatacgtagcacgtaangaacaccgtgtccattaagagttcgggcatcagaaacccatgaccgatgcagtgttcgctgagatatatgatgtcaggaccatcgaacgactcatgtggttgcggataccgttaaaacaaaggttagccggctggacaagggntgcaggtagagccatgggcttgaacaggactccatgacggacacagcggaagacgacggtgtagtagcaggaaaanagaatctgaacgttgaattgcttacatgattaacgttgcattctgaagcattccaa

SEQ ID NO: 48596 - DNA, 440 bp, Arabidopsis thaliana landsberg
gtttgataaaaaaccggtataattcgtaaacaaatggagtttgctttaaccgcaacaatttaaactcttaaaagaaataagttgtttaaaaacatttttagatacttgctacaaaatagaaaaacaaaagagttttagattccctaggaagacaaagcctgcactactttccactcatgagtctttcccatatccttccatgatctttctctgggccatagacaaacccatacacatgtattatgcataatgtacataatccactactcaacatacgtgttttcttcatgtgatctgtgtacccacgacggtgaaaactcatatttgtcttctactctaaaatgtgattctgtctttttaaaacagttgaacccaaagttttacatgaactgtctatgccgtttataaaaatagactgtcgatgccgactattatcagat

SEQ ID NO: 48597 - DNA, 691 bp, Arabidopsis thaliana landsberg
cttctggcagggatttggtgcagtgaaaatgggcacagagactcttgatccgatgtttgtggttcgaaccctatgctccgcacttttgtacttcccattgctcaaaatctgttgaaatttttacatatttttattagaatttcagaaataaacatggatacaacatctatatcaggccattcattgttaattcgtttaaacaaattacctgcaaagtgtcgccgatgttgatgaccaaagctccatggacaggagggatctcggcccattcaccgttgtctagtttaacgtagagaccaccaatgccgtcttgtaataaaacggtcaacattcccatgtctgagtgacggccgacgccgacggtcagctcggggctcggacaagtagggtagtagttcatgttgaccatcttggttcccatcaaaccattcattttctcttcttctagtgtcactccaacattctccatcagaatgttaactacatttttcaccatttccatcgatgaatttaggaactcaagtgccacctccctgtcacacatattatatgttacgttttatgagtatatatattgaaacaaacatatgatgcattttattttatttttttattttatttttttaaatatgatgtatttatatcaataagaaatttagtccatatatatatatataacctgcatggttga

SEQ ID NO: 48598 - DNA, 1046 bp, Arabidopsis thaliana landsberg
aaccaattacctttactcatcaaatgtcatagaaaagactaataaattaaactcacaaggatttaatgccaaatcttctagttgatatatatctaaatccagtattactaaattagtttatacttgcactatgcatagcgaatctaatatatataaggcttaataaaacatgtgtatctttttgtcttttatcaaaaacaagatttacgcggcgcaatacttaatgaaccagtaacgagtaaacgctatatctaatcaaatgtaataataaaataatctgcaaaaaagaaagtcaagtcaccgtcaaacccatcccgcttagcttaccgcgttcacaccttcacgcgcttccttcgtcctttgcgtctctctctattttctcacaaacacagacaaataaacctttttcatatatatatatcgtctgaaaccaaaaccaaaaccataaaactcaaaaatctttggtcttcaaacttcaaacacttgagaaaaaagcttttgatttcacatcttaatctaacaagtcaaacacttttcaaaccacaaaattcgtcaaagctctgaaacaaataaacattttttaatttctccctttttaatggaaatctcttctttcccatttccatacctacaagacgacgagtgttcccatttccttggtctatttcaagacatggactcttctccttctgctttcggattagaaggttttaatagcaacgacaataatactaatcaaaagaaacgcccaagaaaagacgactaaggcggtggtggtggcggcggaggaacagaagttctaggagctgttaatggtaataataaggctgcttttggagatatactcgcgacgcttctgttgttagacgaggaagcttaacagcaacaagaacagtgggattttgaatttattaaagagaagtctttacttgaagctaatcataagaagaaagtgaaaacaatggatggttattacaatcaaatgcaagatcattactctgcaactggtgaaaccgatggttcgcgttcaaacgcgcacggaaaac

SEQ ID NO: 48599 - DNA, 894 bp, Arabidopsis thaliana landsberg
tttgatccgttacaaaacaattagataacttagtggaatttctgcgtttgttagagtagcaatttactaatagcatcaatgtaagacaaaaaaaacacaccaaaatttagactaattcagcatcagacatatcgtcgaacagttggtacacaatcaatctaacgatttcgctagacttaggcatctctcaagttccaaattagggtttgaaaactaaccagtagaggcggattgatctgcgagagaccgagacggagctatacgactgtgacaagaaatgagtctagtagaagaagaagacagcaacggcttgcaggaagtagttcgagcttgaggagagagcaagggaagaagacgaggaacgaatccagttaaagttagagaagcagacgcagagaagatctccattgacgacgacgaatgctctcttaagctccttctctccctccttcctctagtcccaagatatccgccacgtattaatttattttatcatatgtttgtggaaattttattaagaaataaattttaaaaatatatatatatcaaataaaaaattaaaataaatttatagacttaatttttgttattctgcataaataaatttaagagggagggaaaacctgtccattgcttatccatcctgattttctcgttttacatccgtttcttttcaaataggtgtaggtgatcgcctaaaaccactgggatttgaatgaatgttatagtaaaagtagtctaaacagctaacgaattaggccatcttattcttaaggtgaacatcaatccatcgcggcagatttcttttatttttctcgatcgtgctacagactgaaaattgtgaacgataaataaaagcggtctaatccgcaaatcctacatgtcgagatgacg

SEQ ID NO: 48600 - DNA, 571 bp, Arabidopsis thaliana landsberg
ctatgcatttgaagcagatgtacattacctctccttgccaggggatactatataaagatccatcggagagtcccaaaagcatagttttgctgtccctaacaaaattgctcctgcagagagagaaagaattggccttacatttataatcccagagttttaactgtgtagactcctacggcaaatgttgagcacggcagagacacgtacagaaaaagcacttacacagacaagtccttgccagcaaaagggacctgctcacttagcaaaagagatatggttgcaaaacacaactccgagggttgtctctctccgggttttactcttttatcggtaaacttaattttatatatatgaaggaagaacgatgatgtctgcgaatcaaaaaataattggtgagaagacatacaaaaaactggttttttcacaagttccgaattttcatgcatcttgatcaaacgattcaaataagatactactgaaattagaggctttagaatgtctgaaatcatcaaccaatcaaacctaaaaacatgttctttctcatccttacacataaagaacaatctggaga

SEQ ID NO: 48601 - DNA, 531 bp, Arabidopsis thaliana landsberg
ctgtcagctagtgaccacgtcccatggggcattcaacaaccctaagtgtcaaaagcactaacatgtgcagcatcgccccatctcaccaagccagaactagaaaaacatggctcctgtttgttccacatatatacaatgacagcaagtattgtctggctagccagccaaatatgtaatttcaatagcatagtagtaagaatcccatctacagcactaagcaatactccttggtgtatgcattctacccttctgccacctatggaaggcctcagctgcgcctctcaatggcacagtggtactggtatgcacctaccagtcaagactatatttgcactgatctggaaggcagtaaattccgcatcatggagatttaacgcatcccatccgaagccaccactaattcctgggccgatctaagcaggatccttcaaccaacacaacagcagccgcccattaacggcccctagcctccgaccgagctccggagcacagaagcactaagatccagcaggaagcaacaacgagtgacac

SEQ ID NO: 48602 - DNA, 467 bp, Arabidopsis thaliana landsberg
  unsure (1)..(467): unsure at all n locations
gatctcctatctgtgacattgtttattagatagcttgtctattgattcaacattgtataagtgacttcgacgtacaagcaaggcttatgctaagttctgctttttgagtagagtagcaaagtcgcttggcttagttcatagagttgagattgnttcaatctacgaactcgtacttaagcagtgtcaggtatatgatttatccttttttatgattttggtttctttctgagaaatccatctgatactaagccactaattgattgtggaatttttgatatatttggtgtttgtagatctggaggttgataacaaagttgtttttantcggtggtttctctagtaattttcgcatangtcttttgatgatgtgagnatactattttgacatatacagatgcacaaagctaatttcgattttcatcatgttaacacantcttttaaatgattgcgaagagaagacatcgag

SEQ ID NO: 48603 - DNA, 455 bp, Arabidopsis thaliana landsberg
tatgatatgtctccacacgaacatatttttacaataaaagatttccaagaatcatgaactcataagagaactttttaaaaagaaaattaactaattaatataaaaaaatcttcacatcttggtaccggtgcgatctaaaaaaaataccaattgactaataaacatgtcttcgtataaacccaaaaacatgtcttgtcaattgtcataactcataaccggtctgagagagtcgttgtgtctaggccgatggtgattaatatctggtatcttacatgttatctatctctgtttttacacaaatccgacggatcagttcagagattcgatgagttttggtatagaagaagagaaactctagatttgttgaaaattctcaacatgataatccaaaacgtaacaggctcaataagataagcgggcctgaaaattaaaacaagcccaaagaacagaatcag

SEQ ID NO: 48604 - DNA, 1197 bp, Arabidopsis thaliana landsberg
ccctttgatcgaccagactgtggaaaccggagcctccacgtcttgtaccacgacggagaagcactgagaaggaccaaccacgtgcgtgtgggaaagctccacgtgctccggcacatcagccatcccgcgcgtgaggctcactttttgaacctgtttctgatggtggtggggatagtttcttacggtggcgttggctgcttctgcggcggtggaggatctctgaaactgtatcgacgttggcattattaaagcaaatcttttctctatatctcttttaatattcttggctctctctaagaaaacaaatggttttcttcgtgaggttgtattaatgagagatatttacatgtaatatacagaactatataaggacagagtgtttatatataaaaatgcaagtatgtggattaggaaagagagttagtttgtgtgggttcttcggttgtccacttgggatttgtttggagtttgtgtactgcttcaattaagaaacgtctctctctttctttatatcaaggaccggcccgggttcccatgaaattctacggactggttctcgatatttaatataaccgggtattaaattttaattttgtttttccttgctttgttactgaggctgtctatttgtcaatggtgctatatatttcaccagtttattacaatgaatgagcatgttgtcgtaaccacacaagcattactataattagaatggacgtttttatgttttaaccaaaaacactcttgaatgaaagttgagaaaatgaaatcaatatcatttaagataccgagaaaaaaattctgaactcatctctatctcaccgattatatcaatattcagaatataaaaacattgaacattatctttgaggttttgcatagatatttcaatcttctactgtctcgaggctatatatatagctaactctaaaacgttattaaagattataagaacatgatcgctatgtgtcgagttggttaagctatatatattggttaagagctatacttaatttatgcataggtttgaaaaaattcttgaaacaaataggttgggaggaccgacctttgtctttgtgattgccgatcccccttcagttggtactattcttggatgcgtttttgaagaattaataattttgttggaaccttctgactaaggtaaaaaattcacaaataactccataggactttcaa

SEQ ID NO: 48605 - DNA, 785 bp, Arabidopsis thaliana landsberg
ttctactaaatatgattacacagaaaggattgtagggagatcaaataataattttaccaaaagacagtcttagttattcgtactaatttaaataataaatagaagcaaaattatttgttcattttctgataatatgatactatattttttaaaataagatactatagcttttgaaatgaaataattattaattagttaataaacaaacccaaaggaaaccaagggaagaacgaagggtcacgaagaaccgtggaaatgcttcagtccatgtgcatcacatgacttttattattagggatcataaaataccaaaaactaatagtgtggactaataattatcttttcttttgttaacttctctaatgattgttccttttcagcattaataaataggtaattctttgaatgattcataaagaatgtattatttaacacagtaatgaatcatatttaaaaggggccaaacttgaagattctttatttttcttttagcattttaaaccccaaggcttgatcaatctcaaagacttttaaatacatttgattacaaatatcttcagatcatactactaaatcatataatgacttacaaagtgagacattaaataacgatatttcaaaagataataatattaaaaagaaataatttgacttttctcaaatgaaaaattcaaattatttattttaatattacttaaaaatttgggtcaaattatgtatttcttatgattaattttcgttgagaaaataaagattataaaaattcacgccctttcgtttgggca

SEQ ID NO: 48606 - DNA, 428 bp, Arabidopsis thaliana landsberg
  unsure (1)..(428): unsure at all n locations
tccttcccacgaaaaaggcgcaacatcgaacaaaatcggtaatgtctgaaacacatacgcaggtatgaacaggtacgtgaacaaaacagtaggtatgaaactgtaacgtcatcaagaaacgaatcaggtaccaaagtgtaaagtnatgaagcaagcagtcggaatgcaattttacnggtgctnaagaacacaagtaggtatgcacaacgtcggcgagtatttatangtaactggtctacggtacggtgagcatcatacgtacagttatctagtgactantcgctacagctacaacatactatacgtagacttcaatgggtgatatgntgatgacnccaacagtagagataccagtgtaacgtngcggaatacttcatacgtaactggctaggtaggtctgtnttntacgtanagttatatcactgatt

SEQ ID NO: 48607 - DNA, 714 bp, Arabidopsis thaliana landsberg
actaaaaaaaaaaaaaactgatggtcatattcatcatataaacaccaaaagtaacaatcaaatgttccataacttagatcaaaataattggaattcaagcaattcgaacataaacaatcaaacatgtatacaacttcttctttggcgactaacgagaacagatccaaggattcgattcacacggtagcaattacacatacaatcaaaaatctaatcctctaaaagaaaaatctatccaatcgctcgaatttcaaatcaggaaagccacgaaacataattgaaattgggcgcgtgcgttttcatgtacaacaatcgagcaagagagatcgagagagacgaggaagacgaaggaaacggagcttacatgagagtcgagcagaatgggattggttgggagagagactgcaaaaatgatcgagaaaagtttatacacggagtttttttctttgaagatttgcttcttttttttggttaaaacttaagcatataagtaatgaacaaaacaaataaaagtcaaagctaaatattagttggcaaaaaaaaaatcatatatgtatttacatatttaacacgtatgtactaatataatttttcattgattattacacttcaatattcaatttactcccctttactttaaaaaaatatattcaatatactttctctcaaaatttttgttagttgatttgttcattttaatttttttatatatac

SEQ ID NO: 48608 - DNA, 710 bp, Arabidopsis thaliana landsberg
atcgactattaatgaacaatgcgacttatgtcgatgagtacacatttgggtgtgtattgtcttacagactatacactattatcttaaaacccctcccaaattttttttttgtaagattcgccataagctataaagtataaagtttcaataggcatgcatcgaaacattaatagacatagtatattcactacatagagactataacatatagagaatgaactgaaatatagactaattatagcagccagcattcaccatgttatttatacagtggtccagtgaataacattcactaaccaatagaacaagagtacgaccacttcttcgtattggttgatgttaactgattttccactaagtatttttatacaaatctttcatttactcgtaaccaaatggggaaactaaaagaaaaaaaaaaaaaaaaacaacttagcattaaacttgttgaggatcgaattaattggaagaatggatataatattaaacttagcattaaacttgttgagaatcatctatactgttcggaccggaatcaatttttgagtcggttaaattgaaaaacaaatttctaaccagtgaatataaaattaaggaaaaagcaaatacaatttgatttggtattcacaaagcaaattactttacaaagaatattcaagtgctctgctaagatattaaaataattaaatgagaatatggaaggttaattg

SEQ ID NO: 48609 - DNA, 486 bp, Arabidopsis thaliana landsberg
tagccagcgttgagtttaagtcgaccacattctaaatatagttagaaaagatcatatcacacttattggctcgggccctcttttctttttccttttgaatatttctgggttactaatatttaatttgttggttcttcggtttctccgactctttccccttgaacctagcttaagaggtaagtgaatcacctccatacatcaataaattctttaagaaaatatgtacatatacatgcatatttagggtgacttatccgtgaagattttgtcaagagaaattaagcttttggatttaggctgaatttaggatatacttagcttctctgatcactcactggtgtttaatatttacatagtagtcttgacgaccctttgtttttcttaaacctggatgaaactttgaattaagctcacgttatctttgtggcatgtctattacagtagtaataagttaaaattctacatgtcttttttatttacttagag

SEQ ID NO: 48610 - DNA, 778 bp, Arabidopsis thaliana landsberg
tcagaactcgctggaagcttcccaactatgaatcaaacacacatgtgaaaattgggtttatatgatacaaaaagaaaataagaggtgtgaattgagaagaaagagatcatacaaggggtgtaaacaaaatcttgagaaatattgcagagatgaagaagaacaatggagataggtatgttgttccatttctttaaagcccaatgaatcgtcttgtaaccttcttgtacatcgtttcctacagctatatatactttctttcttgatcctgattctgcttctacttccaattcgtgagtctttgtttcctccatcttcttctggcttgtgttgatgatcgtttagtgttttgtctggtgaatggctcttttaaagacaaaagttttgttcttcattgtaacttgagagatcaagattattgactttgtctatcatgtttagttgactatacggaaacaggtgaatttccatctatctttaatttattataaatggtgagtaatcataatactataaatatgaaaatgtacgtttgggatcattaaattattcattaaaaaaaaagttacactctagtaaaattctatgtttaatagtgtagaagagaggaaaattcagacaacgtgttagcttgtaacatctatctaggtgagtcacctcgagtgaccaagcaaatctatccaattagcgtctaggttgactaggtttcaagaacttcattttctttctcattagctaaggtaaacttaaaaaaacaatcccgaagtttaattggcttttg

SEQ ID NO: 48611 - DNA, 1027 bp, Arabidopsis thaliana landsberg
  unsure (1)..(1027): unsure at all n locations
agtctccttactatgtcattggtgttcacaagttatgattttagtatttgattattggctagcttttattttcttaattgtgtatatgagttattcaaaatttgattcctatttaaaatgaaatatgtgtcatctatcacatgagtcatgagacgtccaaacttctgtaagtagtagataaacgccttgccgtttcttgatatgtaaacgacgtgacgtctgatgtgatttcaaacaaacctttaccagctcttctacagcacggagagattcgtcggagatagcaaacatggagaagaaacgcgaaggagtaatcgaaggaatgagtcggatcgtatcagatccttactacttcctccatttcatggcctttttctcttacctcccgattcgtagctccgccgcaccgtacacttctcatcgactcttcgacagagaaatccaagcatttctagcgtttcttatgttttccgccattaaggtttgaattttgcttaaatctctaacttcattgcttcctgtttcaccgatttcgtttttgtagatggtgagggaggaaacatgggaagctttcgttgctgatagtttactctatgctaaggtaactctagctgatttcagattctttgtcagtcacttttatgattcatgtgaaatctactgattacacattttctttgcctagatctttcttattgcggtttcgttgattatggattatcgagtggcggtctggtttagtatcatattttcaggtcagctcaatttctatatcttgattaaatatatctgaaaatatatgggagatgcagatttgaatgttgattgatttgaatgtttccttttgcagttatatatctattagctcaacaaccagcatttagtaaactaggtatgggaagattcttcaagttcttgctttaagttgtgtttttgtaaaatgcttaaacgttttgcaggaactgcgaagaagctaacacctatgcagttggaggatttgttatcagatggtaacacaacnaaatac

SEQ ID NO: 48612 - DNA, 1755 bp, Arabidopsis thaliana landsberg
  unsure (1)..(1755): unsure at all n locations
taacaaacataagacccaactgaaaaattttctgtgaagaagaattctgctgataagatatcagatgatcccacacacactacacaagatacttttgatgacacactatctcgatgattcatgtcaaacaataagattttactatttagatatgggatttaccttatcagatgcgcagtgtcttccaatggctgtctcctgtaagatgtgagctgcaatctatcattacaccagtgtgcaaaaagaaaagttagaacacatgacgtatggttccaggtaaagccgtaatatatttcagaatcttacaagttcagagataaatgaaaacaagatggaacatctacctcaccaccattgatgccaccctcatagcaaggtttcaagctaactgcacgttcaagatatggcgtccattggcccattaataggtctctcctgatcatctcaacaccacattgataaaactgccaaagaaatttgaccagaaaatcttaacatacgatccacatttttggattgaaagaacaggtaataaaggacaagaaaaccaatataaaaagaggatttagctgaacctcaagcatatttctcagaaaaggttcctcattgaaataatctctgcgtacaaagacaaacggcaccttgtaggatagggcttcactgacagtgccataaccaattttccctgaaaccatggaagcatatattatagaaacgcactagccatctaaattcattgactatttcttaatcaggttacttaccaagcatacagtcagatgccgctataatatcaggcgtataagcatccttagcaagctttataaaatttggtggaagctccagggtctcagatgcgccacaaacctgaacaacatattgataagtttaataaacagcataaaatcctcaacttgagagtaactagacattaaacagacgcaagataactgttaagagataccagacacagccacccagtcggtagtgatgtttccttcaagttccaccctgagggctgcccatgagaaaaaggcatgatcaatgagaaacaacgcaaatgcacattaaaggtaaaatcagagcattagttttgagaaattaaaacaaaaccatgaaactatcaaatataagaacagacagccatacctgtccaccaaaattgagtataacaacattcacatcttcagcaatgccgagttctttcctcacctgataaagaagggcattagatgttatttggattagttgtaccactgaatataagatcaatgaaatgttgttgacagacctccttgcgagatttgtgaagtctcctcacaactaacggtacatcgatgacatcacgaaaagcaggcactacgagataacaaggaaataaagttaaggcagtaagcagaatgcactaggaaaaaataaaagaaaagattactagaaactgtaattagaaatgttgcttacttggacaatatcctgggaggcgaattaggaactcgcaatgagaataatcttcagctatctatgttagggaataaaagtaattgaatatttatcacaacctactagccaaataaaagatagtatataaagcttgtataagaattttacctgccaaacgatggagcgatggtgatatccagcagccatcacgtactcagcatagataatatcccagctaaaagtacatacaaatttanaataaagttttacatttttttactaaaccatctcctctagtaacaaaacagagatttg

SEQ ID NO: 48613 - DNA, 1514 bp, Arabidopsis thaliana landsberg
aacccgagcaaattcctctccggcggacgtttctccaccgtgatcagaatgtcagcctcttcctcaccgcctcctccaaccaccgccacctcgaagtccaagaagggaacgaagaaagagattcaagagtcgcttcttactccgaggttctacacgacggacttcgaggaaatggaacagcttttcaacacggagatcaacaagaaccttaacgaagcagagttcgaggctctgcttcaagagttcaagaccgattacaaccagacacatttcgtgaggaacaaggagtttaaagaagctgcagacaaattgcaaggacctctccgacagatcttcgttgagttccttgagcggtcttgtactgctgagttctctggtttccttctctacaaggagcttggtcgaagactcaaggtgagaatttaagaatatatatggctttaagtaatagtcaagtctcaattgttatgagttttcaagtgtggttgttggtttgatgttccttgtctacgttatgcttgaagctatgctcattaggtggaagttagagcacatgtgagacttgttgttgtttctttggatcattttattggcttgattttgaatctttgatctgatggcattgcagaaaacaaaccctgttgtggctgagatcttctctcttatgtctagagatgaagcaagacatgccgggtaagatctcttaacactaaggacctctctttttaatctaagtgtttcaattttgatgataaactttttttggcaggttcttgaacaagggattgtctgatttcaacttggctcttgatttgggtttcctgacaaaggcaaggaaatacactttcttcaagccaaaattcatcttctacgcgacttacttatccgagaaaatcgggtactggagatacatcacaatctacagacacctcaaggaaaaccctgagttccaatgttacccaatcttcaagtactttgagaactggtgtcaagacgagaaccgtcatggtgatttcttctctgctttgatgaaagctcagcctcagttcctcaatgactggcaagccaagctctggtctcgcttcttctgcctctcggtaattaaactaaactctctttagttctcaatgtgtcttgcacattggcctaaccagtaagaggattggctttacaggtttatgtgacaatgtacctcaatgactgccaaagaactaatttctacgagggtatcgggttaaacacaaaggagttcgatatgcatgtcatcatcgaggtaaaggaacttgaaacaagaagattaatattaacctgtgttatgttcctttttctgaaaatgttgagatttgtttcagacaaaccgaaccacggcaagaatattccctgcggtgttggatgttgagaaccctgagttcaagaggaaactggatagaatggttgtgagctttgataagctgctggctataggagaaacaaatgatgcttctcttattaagacccttaagatgattcctttg

SEQ ID NO: 48614 - DNA, 806 bp, Arabidopsis thaliana landsberg
agaccgaatacacactcactagtggacgaactagtaatgacacgacataaatgctttatactaccataccaaatgatcatccaatcgggacataaatccatttatatttgtcttcttatcaattattttccacaataataaagaatttgggatatgtagtacttgatcaataattagtggatgacgagttgtgggaacactccaaatgctctgttaaagttaggcaagcctatatctttctataaaaaaatataaaaacactatcacttggttcacaatctcttgacattaaaggtattacaacctaattgttaaataaaaatcaacaaataaatgaacacaagagaaatcattgaaatgttttgcagttctgtatacctgtatccccaaaatgttttggcagtttaacctacagttgatatatgttactaaattataaaatttaacatgagagaactctgccattgaattgaatatatattttttttcctatttttgtttctcgatatatctacccaaaaaaataccaactcacattagtagattatatgtcgacctctttctattccatttagaggtaatggaatataattccatttacaggttaaagatagggaaaaatggaggatgacgaacaatctaagcatttacattttagttaccaacatatatccttcctattttatttttttagatttttacctgattatgtatcactcagtataaggtattttcctaaatgcccgactttttttccaatgaaatggtaatgacgttttggacaaatttgctaatatctaggatgg

SEQ ID NO: 48615 - DNA, 880 bp, Arabidopsis thaliana landsberg
gtcttttgcccttcgtttttttatatggactacaagtaatgaagcaaaaagagatttgatccattatacatctaatcagtttaagaaggagcctttttgattattaaaaaataaaaagattgttttcatcaaatatctaaatagaaaatgatataatttactaaaaatatgttttacaaaaaaatggatgtcattaaaaataataggctttggaggagtctaaaacggttgttttcactaggctatccctagggcccgttatgtatggtccgattgtttcgtctaatttgcaacatgaaattggtgcacattatttcttcatatatggagtttgtaacaaagcaaaagataatattcacgttaacaaaaaaaaaaaaccacgattttagtataaaactttagaccaaaaaatataacatttattattggtcttatctggcaaaaggatcttatgtctttttttgtgtgatcaaaatcaatcaattcttcttcttgatcattcttatctcagctttggttgctccaatgttataatgtgaaaaaatattgttgaatgacgaagaagacaataaacatctcctacttgtatgtgaattttgagttttgggcattgcgctggtcttatttcgtattgtttgaatcttgcatatgaacaacgcgtaacaaattggaagagctaatggtcgaggtccttgtgaattgtgagtatagtggagatgtacgtaaaatctgagaaggatatgcagaaaatgaagaagggagcctcatgctctaatttttgataattcgattaataatcactgtgaaaaatagaaataaaaatgtcccacgagacctctggagccaataatcgcgtgttagataaaacacaaaagagaca

SEQ ID NO: 48616 - DNA, 850 bp, Arabidopsis thaliana landsberg
cgggcctatatacggcctttattcaaacgtccatattctggactattcgaacaagaagagcattcaataataaaagagaaaaaaaaaagaaaaggatactatacaaatatttgttagtgggtttttctagcttattcaagccattttgcaagcccacggaacataaatgcattgtagtctcatgtattgaaccaaagttttggtacactttgaacaagtcttgagtcttgacatcataaacaagcccctagaataatcaaacgtaaaccagcgaaggtataacagcgtaatcaactaaacaacattgatcatggagtctagcgccactttcagggctcaagcttgaggcgtattatgtaaaacgtgaacctcaaataccttcacgatctgttataaataaaataaaaatactgatgaatcatgaaaaaaaacagagattgtttgagaatcgtttctcaattctctttgttctgtgtcatttactaagccctaaagattttctgaggagatgggaagatgcggaggagagcatcaaagaaggcggagacgaggcggatgaaggaggaggagacacggcggaggaatgaagggttggaggaaggagttggagtagaaggctgaaggtaggagcaagcagcttgctttacaaggcgattgcggatcgtgatggtgggactgatagcacggagcgacacggaaggatatggcgggggaacgacggtggtggaggaggaagggaggatgtctttgagggaagtgtacatggaagaggacctcggaggatttgttgacggcacgagctctaaatctagggtttgtgaacggcgccgctttgcgttggagaagagaa

SEQ ID NO: 48617 - DNA, 653 bp, Arabidopsis thaliana landsberg
tatttacgtgaagaaaagtcaagatttccacttggtggggagtacaaagatcgtcggttacgagtaaagtcgaatatgataagcattgaacgaaaaaaaagcagcgggtaccaaaaaatttgtgtattgtaccaaaatgatgagcatttatcatcctatcgagtatgagtgcaaattaagtcgaaagatagcaaacaattttggagaaatataaaccttgtccgaatactaaagtgaagtactctcgcctctgttgccagccttggtggcctaaagctagacggatatatcaaataaagcccatatctaaaactattaatatgggccactggagaaaggtccataaaatagtgtcgtggatgttgatggtaatataacaacataagcaaccgaacacaacaatctcactcgcaatgatggcggatgtcttaaaatcttctgtaacagaatatccaaattaatttatcacaaaaagattttaatacgattacacattaacacgtaattgatttctttagatttttccatttgcatgttaaaacttagcctcttaaattgacaactatctccacaaaatatcatctgtttagcccttgaaatataataaacacacttaaaaagatttttagtatatactctctactaacatatat

SEQ ID NO: 48618 - DNA, 418 bp, Arabidopsis thaliana landsberg
gctattttgaagaaagcacaccgttgtggcatttggggggtatcataatctaatgtctaagatattgattatttcaagtgaaattagggaagctacgattcaactgaaaacgaattttcgacaaaactatatgaggaaagaaactagagagcaagatttgagaactgagaagcttctctacatacgccgacgatacgtctgtcaaatgggcgagatgctgttatattctcttcatcctcctcagcttcgctgggtttagagaaaatgtaaagcttttacatgtataagcagttcaagatttctacaagcctaaacaagaaatgatcgaggaagaacgcattacgtgtctgaggttggagcgatcggcagacggcgagaaggcctcggaggatttggctggaacctccgctgacgagaa

SEQ ID NO: 48619 - DNA, 884 bp, Arabidopsis thaliana landsberg
ggattcctgcattgcagtgttgttcgtcctttctttataattgtctggcttttatatcactgttacaaatttatacttttgcgacagtatgagagttcattgtagattaggtttttagtagctccagaattaattttcagaaccgatgctggaactgttgcaggatacatttgaagtacacatgtttttgaattgagagttgatccgtccaactcattagcagatttgcatttctgtgttatatgctatatcagcttgtacattttattcctgatagtttcttttcatacctatttggggtacttccctatccttcataacgtagataagtgttttcagttttgagcttcagatatgtgatttgttttatatataatccagagtggatttcaatatagataagtaagctctgatacttggatttctgtttgtagttttacttttcgattttcctaggagatcatggaatctttcagttcccaatatattgatcgatctaattaagacacttgacaatctctttcctatcaccagataggagaagtacctcgatcttgtattatatgcatttatgtagagcggacagtatgttatgctggtgtgcattagtttgagttatactgtttagaccatgtttgtgtatgttgttatatactgatggttaccttctattttcagcctgttctgcctatcagagctgaagttgatataaagctaggaggtaccacatgcaatctattcatttctaggctacagccatggttgcgccttcatttcttaaaaaaagaaaaaacttggtgctttcagaaaaaactcacaatctcgagaaaacataatctgctgatatgaaggccatcatgtggacaggcacagttcagcccccg

SEQ ID NO: 48620 - DNA, 1212 bp, Arabidopsis thaliana landsberg
  unsure (1)..(1212): unsure at all n locations
ttatataaactaacagtgtctcgggggtttattggttgcttattttgttttatcttatgtggattttctttggtggttgcagtgcttacaccgcgtcagtagagtttacagtttatgggaatggtgaaagttccagcaacaatggagagaggtgagagaactttcattcttttactgaggattgaaaggtcaaatccgagcagcctggaaccacattttgaaaccattttgtaataaaagtttgaatttcttaagaaaatgaaaatcgagtaggactcagttctttgctggagagactggaagatttagatgaaagagaggctgatgagtttttaagcaagtgtggtcgttcctttttgtcttttgcactcacagggaggtttattattattatcatatgtttttttttttttttttcctacaaatatctacttagatttcatcagattgttttttttttttccttttcttttatctggcctgtaacatgattttttcacttttcatcgttgcatatataatccttttgaagacttgatctctaaaaatatatttattctcatgttctactaacacttgaaatttttgaacataggaatgttttgagttaaatatgatttgttgaattcggtcgaggattatgtctaataaaaagtctcaagtatacaatgtgtattattgaaatctataatctcgtaactaatgataaatttataaaacaaaattaaaagtatatgtaattgttgagtattttttcactaaaatgtgacaaaattattctgaactcgttaaataaaatgttgagagacgtatgtcgacgctcttcttctattaaacctcttcttcgtctctggctcagggcgttagtttttttttccgcttctctgctactgctccctcgcggtaagtctttcccattttctcctcgccgggcattttcgtctaagcttaagttatcttcatccccagttactangagtnttctttttttctttaatataaccttctcgccgtgttgtttgttgaggaaatagttatcggccatttctttattttattcttgacagtttgccttgatggttagggtttttagaatttaactcgtatttgacccatttgggttgcgatcgaattttaaatctcttcgaataatgggcgcgttgctttgattcctcgggtcttattttgttgaaagctaaaatcaattggaat

SEQ ID NO: 48621 - DNA, 674 bp, Arabidopsis thaliana landsberg
tataagttagcttataacaaaagtattgaatttcatggcaactatgagtctatgatttaccaagcatgacatttgttataataaggaaaggaaacattttatatttgaacaacttgtgttgctatcataccagcggttaccgagatcaaatccatgattacattggattcacaagacatgatcatttagtaaccgagatttttcttttttctttctgttgataatacaatatactaaccgatgaccaatatacaatattattgatcctatacgtaagaaatcagtgcttgcttactgatgaccaaaacaaaaaatcagtgcttgcttagaaacatgtagaaaaattctaccgacaatctagaaaaagtaaagttcatactttgcacactctcctttaatggcatgacacatcaatggagatagatttctcagtaaagtacaagatgatatcttttgagaataaaaagaagaataaagaactcttacaaaaaactttcatagacacccgaactttaataatttatttccgaaagtgaaaaagtttaaacctttttctctacagaataagagaaaaaaaaatgtcaaacaggttttatccacacaaaagaaaagaaaaaagaaacgggttttcagtgagaagaatgaatgatttaagtttgttcaactagaaaaag

SEQ ID NO: 48622 - DNA, 559 bp, Arabidopsis thaliana landsberg
tgtttgcacaaatctgaaaaagattagcagtgtcaaaagactaatcaattaccctctggcgagatcaagagcgagtttgggacggctttaaaagcgagtttcttgctcttatgacgaatcaagtgttgtttcaatgttccaccaggaagatattccacaaccacacaacatgcttgttgaggcaacgagcctttcgaatcagctgatcgtatattaagattcgttgttcccatcgacgctccaacaaactgtttcatttcaatatttcaatactcaattcagtgaattaactaactaacttattaaccaactaacctttgtgacatttggatggttgagtttgtgccaaacagtgacctcttgacggaacaaagctcgatttgtagcggtcttggccgttgtttcattcccatcatcttcccaatcaagcaccttcactgcaaattactcaaacaacaaccaaacacagtcacaatctctaacaaaaacataagtcaagatcaagattttggatttagtttattattattacctgcaacatcttgtccatcataaatgc

SEQ ID NO: 48623 - DNA, 480 bp, Arabidopsis thaliana landsberg
tacacatgggtaaaagatatttgaacatggacctgaaaaatcaaaatagatagtccatattgattcaaatgggccaactctgtactctttttttttttatatatatatataaccgttattctattgaaaaaggataagaaaatatatgttacaagcttttaaggcctgatcggctaaatagcccaatacaggcataaaagcccaaataaaagtttagtcgatggcccaagtaaaagaaatcaagtacccaatttttgattctttagatttgatgaaaacgatggaaggagaaagacgaggagttgacggagagatagatgcggtgaagattgaaatcaaatattgcagtggagttacgatatctatttgtttcccgccaaaaagaagaactccatcctacaatcaaaagaactagttaaatatttctgtatgaagtagaaattctacaacctaaaagtaagaataatatacttacatgtc

SEQ ID NO: 48624 - DNA, 780 bp, Arabidopsis thaliana landsberg
tggtgcacgctaagtcccatgtatctgaatctgttttctgttttttctttgtgttgtctcttctgaataaaacgttaacacaagtttgattttgaggagttccgtttcgacgaaagagattacatttccacgtgtgaataataaaaaaaaagaattcatctcacactgtcaacattttttattgttttgtgttacatttttgcataaatattctggagtttaatgttatgtattcctagtatatataattaccataaagttcgcaagagcgaccagagaaaaaaaatcagctactagttcaagaggctttcgattaatagatatataatttaatcttattcatccacatataaatggatcagagctatgagcatacatgcatagtctaatttaatattaataggcaacgaaagtagaaccactcatatattggatatttgggtaattaggttaattctcttctcacttgcaatgaaaaacttgacataaagaattcctttccaagcgcaaaatggtagattagttcgcatttagtaaaatctgtaagtggttctccatgaaactaaactacttacttttagatgacgtaacgatcagaataaatcttggtaaggatcaaatcaaagtttcaatattagattgattttgaataaaaagttcctaaagatattgctgaggaaagagatgttcaaatttttgggaccactctcggtcttggggtggcttttagacgtcggcttacttcctggccacacctgaccacaccccgcctatgatttc

SEQ ID NO: 48625 - DNA, 585 bp, Arabidopsis thaliana landsberg
gatatttttcttttatatgaaatagcgatagtcttatattcatatcgagataaaaaagacatattttgatgacaaaaaaaaaggaaactcaaaagtaacatattataagcatgaataaagtctaagatcccacaaaacgacttatgttccctagagtgaactttgtatttgctgataaaccgaaaccagaagctagtaaccttagcagatattatttctcatgtgcctattaataacgttaatattttctagatctaacccaaaccaaagtttcttaatatcattttctatctttcttgatatcttcaaatgataagtcagctattcgctctttttggcgatcgtaaaacttcagcttaaacaagttcccacgacaaaagtctctcttctttctgtcccaacatatttctcccatagtccggccatatgtttcatcagaactcttttgctttgagtctagctatactttaagttcaatattatatgtttgtgttcgtcatgcttatggtctcattagcgaagcagccgcgtgaaattgtataggaggccgatggctagattacaagatgcatgtgctctttttac

SEQ ID NO: 48626 - DNA, 433 bp, Arabidopsis thaliana landsberg
gattaacatttactcaattgagcctaagtttattcacacgttttagttaacggtttcctttagcacaaatctagtttcggatttaacaatggatatggcacaagtccagggttttttcaactaaatttcgttgttcaaattagatgtacagctgtctcacgaccaaatgaattaggatattgtccgatagaaatgagatagcgttatcattctctgagggtaatggagatgaggttattacctggttcatttgatttatgagtgaaaatacggtaaagttttaaataccgcgatatatttatgatgattttatggatttcgtttaacttggacataagaacattgttattatacctaacatgcactataaagccagattcgaatgccgagacaatacagacttggcaaacagatcatagtaattgaactatag

SEQ ID NO: 48627 - DNA, 2403 bp, Arabidopsis thaliana landsberg
gtttcttctggcaaaaatctaatggtttcgactggtttacatttggttagataagaatggttaggtaattgggtttgttagcactaatcagttagttaatgtgtaattaccatagtaatacttgtaaggttaagagttctaataaacaattttcacattattctctgttcttggcttctcctattcagagttaataatatagtacttggcttaggccgaactgcaaaagaactcctcagcgaggttgtttccttgaaatttattatcgtcgtttgctgttgtcactgaagtcacaagtacatagcaatttctctgatttgaatttcagatctcggtagtgttttgtggaactggtatagttaaagtcaatgcgatgcgcgtcattgcagcagatgtgcttagccgagaaaatataaccggactgatactggttttgcaaagtcatataacgaaccaagctcttaaagccgttgaacttttctcctttaaggtcgagttattcgaggtaatatatctttatcttgagtaccgtgttaggttatgtgttcccacatttggctcataacatcttggttgcgcttgttgtgttgttagattaccgatttgttggttaacgtaagcaaacatgtcttgaggccaaaacatcaggttctgaacgataaagagaaggaatcacttctcaagaagttcagtattgaggagaaacaagtaagcaagttttttggtatttggatcattactagtactagtagctctgactctgagccagcttttctctgaattagaatgttttttttggttagcttcctcggttatcgagcaaagacccgattgtgcgatactatggactagagacagggcaagtcatgaaggtcacatacaaagacgagctcagtgagtcgcatgttacataccgatgcgtttcttaaactcgttttgtttatattttcagctctttctttgtgtagcaatttatctgtaacatgttttgatgtaaaaacctgtaatgtgtttcttgtggtctctaaaccaaacaattttgatagttaattaatgtgtggttaacataaatacacaactctgtttaatagtttacaaaaacatagaaagcttggtcaaaacaaaacaatggtcaactatggacgatggtcgaatctggctgattcatgtttgacccatgagttgactttctcagcttcacggccaagtctttgctcctcccgtctggccgccttaagctgatgctcttgctccttcacggaaaaggtgcttgtgtccgatagatacttgtcgtcgccggtttgccacctccggtcgctagtgctccccatcgtactacgtctggtgctatctggatcgcgagaacagcacaaacttgatcccatgtggttcaaaactaaaatctttgatgaaaagaattattcacatacgaaaatagatgaaagtttaagaacaaatgagatagagacagaagggttggtttagtgttggaccaaattatgtatttgctgaaataattagtggttttgaaattttttgcttcacattttatacataaaaatattggagtgtgacgtcaataaacaaaacaatttattaacaatttatttcaatcacgaaatcattttgtcattactatcatttcacaggttaacacttttaatgcttccaaaccatttaacaaatgatatgagagcattaaaattttgagatttgttgttaattgttagtcacaaagaatattatgagaattttaaaccaacaaaaaaaactttatgagaaattggccttttttgaattaactgttatattcaaaatccgccaataacatcgctctaattatctctctttcccaaatctggaaaatttagggttccaacaaaaacgcgatcgcattacccaaaaattcaaatttgcaactgatttcgtcctgtttgaatcactccaattctattgctttcttcgtcgtttgatccaaaacagtgagaagcgatacaccattttttctgggtgtgtgaatttttattttaccccaaattagattagagacgatgagcgacgtcaccggtgatctcgcggcggtgagtgaagccaagggaggttctgacgccgcccggatatcggaggtgaaggcgtggctcacctctcagttcgaagctgtcggcaaagaagtacccaatttcgagtacactcatcgaagcattacccatttgtataatacggctaccgcttctcaagctaagtctcaggctgccaccattgtcgctaacgactttcgtctcaaggcttcagaatatcgtgctcaaggtacttgcttgtaatccttaactcctaatttgctcgcgtggctgacacaaattatgaaaatctccttttgggccttatcaccttcttgatctcgta

SEQ ID NO: 48628 - DNA, 560 bp, Arabidopsis thaliana landsberg
  unsure (1)..(560): unsure at all n locations
actaactttttataattctataacagttgatagtagacgtaataaaaaacctaatggttgttttgtgataaatatacaattattttgataacatttgttgtatgcaattattagaccattttgatgaaacgaagctcgaagcaggtnnnnnnnnnnnnnnnnnnnnnnnnnnnnnnnnnnnnntggattgtgcttacgtgatacttccaaaagggttgtcgcaccatttattgcacgattctcaacaaattgccgaaaaaagcagaaatttactacgcccgattattgcaaaagaggcacttgcgttctgcgttcagatgttacaaccggatgaaattgccggattaaacattgtaaaagcttctatgaccggcatgcatcgagcagctatggacctgaaagtgagacctgaactgctactcattgacgggaacaagaccttgctttcaaatgaaattccttctgtngccattataagaggagatgaacaatnnnnnnnnnnnnnnnnnnnnnnnnnnnnnnnnnnnngtaccgggatgaatacatggtgcaactccatg

SEQ ID NO: 48629 - DNA, 919 bp, Arabidopsis thaliana landsberg
  unsure (1)..(919): unsure at all n locations
tacttggcgacaagaacgccgagagatttgtcttgcggctgtaaacctggggagcgagagcgagagaatccataacctgggtggggtgggtgagacaacaaaagatattttctcggtgacctgcgagagaaagagagacaagacttgtgtttggatctgagctttgttgtgacctcggaaaccttttataattataggcggggtcttttcaaattaggaaatactatcacttgttttcccggggttaaatgttattgtctaattttacactttgctttttgattttttacttttttttaataggtattacttttaaattaatttgtaaatatttagtgtatatatttatgtaattagaggttttaaacatgttaataatcatgtaatcataattttatagcaaaaagatttggttgttattgtcctttttatgatatccattattcgataaggtttctttttacatgttgataatactttctatcattagtttttcaaaaaaaaatataacgtgtctctgtagctcacgtttttgttacttatttctatcattagttttttggaaaaaaaacttatgtgtctttataccttgagctttttgttacttatttgatatttccatcattcattgttcaaacaaaaatattacgtgtgtctatagaacgcgctttttatttatacttaaaaaggattttatgatatgagtcacacatttattcatatgaacacgagattgatatatttcctcagaataaagattttagcaagtaaagcaatgaagcggaaaagtttctcattaacatgacgtatcaaattcatcgttattgatcagcggtttaaacttcaatggttaatatgcattaaaaatgtttagactttcaaccctntattagtgtacatgtaggactttcgtataaaa

SEQ ID NO: 48630 - DNA, 607 bp, Arabidopsis thaliana landsberg
tatagaagttggactgttagtctgaagatgaagttaggaagcttcttcattccttgttccctgtccagttcacatttgatttcttcatctgtccagcaggtcagggtcaggtcaggtcagctccaccgagtgtcaggccggcgtcacgcaggcatcttttcatgtgtcacagtactgtatttttgatctttcaacaagaagatggatcactagcgacctcttcttccaggtcttccaactcaagaagcgtcatggaacccactgggagcagagcactgaggcgactgacccaccaacatgggcttcttttttctctctctctccagcacagaacaagaagagtgacaggctactttcaagcctcatctatctctccagagtaaaagacttggaccgcttcaaagaagcttcagatcgatcagatgttgtggccttcgtcgtgtgtggctgaatgtcactggaggacaggaatgcaaatgcaaccatatggacttgactctctccggcaagaggcaacatccatcgataccagcaaccatggacttgcttgtgcaccatggaagaaccggtccaagcgacagggatggatggatgggatggatgggat

SEQ ID NO: 48631 - DNA, 706 bp, Arabidopsis thaliana landsberg
caaataaaaccatcatgtgtaactacttaatgcattaattccttagattccgataagaaacatggtggaatggcagaattgagaacccaaaaaaaaaagcagaatggaatgataaatgattataatggaaatatgaatattttttactagttgtacaaaactattgtatatttaaaaagtgaacaagttattgaaattccttataaaattcaaatagttgtagaatccgtatcagttggagggaagtcacgatttattgatctccagcccctagtcacgatttatccagttttattcaaaacaaagaaacaaaattacgtaagaattcgtcttgcttgtatagacccaagattatcctccctacaaatcaagttttaaaaaaaaaaaaaaaaacccgaaagaccgaaacaatagtaaacaaatgccttggtcgtacggaccctagacacaatgcaaatgtcacaatttttatcgacctgaaattctataacatataaaatcaaaacataatacaaatttaatcgtccactttcctataatctaggaagacttattcaacaaggacttagtcaacaaggacttattataaaaatcagaacatgacctttttattctccatgaacccgattattaaactaatttagaattttctaaagaaattccggttcgagtcaattaccgtaagatatgtaaggaaaaaaaaaaa

SEQ ID NO: 48632 - DNA, 1723 bp, Arabidopsis thaliana landsberg
aacaggaacgattagtgaaagaagaagaggaagaagaagaagttcaaccaataactaaagaactaactaaagctccggttaaatctgaaatcaatggtgaagcacctaaaccaattcttgcatcgactctaataaggtgtagtagatcaaatggttgtggccgatcaagacagaatttaagtgaggtatatgattattacaaggccaaaagttttgtctaccatattcctttttttgtgacacttgaacttacttgctaatactaatctctaggctgaaagagaagaacgtagaatcagaaggatattagctaacagagaatctgcgaggcagacaattcggcgaagacaggtattttttactgataccttgtttctatcaacaaggtccatattgagaaaattagctgaatagtagactagtgttgttaagtattaattataccgtatatatccaggcaatgtgtgaggagttgagtaaaaaagcagctgatctgacatatgagaatgagaatttgaggagggtgagtaaactattcgatttacatttccatcgagtgaaccttagagaccgttgttatagctaatgacatttctgctgtggtaggaaaaggattgggctttgaaagagtttcagtctttggagacgattaacaagcatttaaaggaacaggttacataatctatcaaagaccatatcagtatcaggagaactattgctcacactgctatatctgatttactgtctgttttaataggtattgaagtcagtaaaacccgatacaaaagagcctgaagaatcacccaagccatcacaagttgagatgtctacatcatctactccgttttacttctacaaccagaatccatatcagcttttctgctggcctcatgttactcaatcatcaaatccaatgatatcaccacttgaattccctacttcgggaggagcttctgctaaaactattaccacccaggagcatgaaaatgctgcagatgataatgggcaaaaaactcacttttacgttgtaccttgcccctggtttctccctcctcctgatcacagcaatggtgttcctttcgggcttcaagatacacaaagaggtactttttcaaacaggcaccatatcgatgattcttctgcaagaccgatggatgtcacagaaactccgcggtcccatctaccaactagaatcaaagaagaggactctggttcacccgaaaccagacctttatatgatctcaacgaatctgctactgaagtcctctcagaaggaggagatggttttcctgtaacgcagcaagcttatagtttaaagcatgaagatgtttctgagacaactaatggagttacactgatgccgcctggtcatcatgttttgatttctctaccggagaaaaagcatggatcgttggctgcagcggaagctagaaagagacggaaagaactcacaaggctcaagaacctccatggccgtcaatgtcggatgcaggtcggataactcatatattcttcatcttaccagttaaaacactgaaggtacttcatgatccctttctttttgtccggggcattttcgcattgtttcggctttcttacttaaacaccaaaacaaagagtcatactcatccaccaaacaaaagttggattattgttatacttatccaagattagtattcgggagtttctggtttttgttttacaaggtaatagcaaatgttgt

SEQ ID NO: 48633 - DNA, 750 bp, Arabidopsis thaliana landsberg
gcatgatgtttcgaactgatgagaagcgtactctgttttcctcgctacttgacttgggaaacaaatgaggtacattttggcttttaaagcccatgttagattgggttgaaataaactattatcaggcctttgaaacaattttgttaaggataataaacaaatttcatatcaactttctctatctgaatatccaccaattctctatcaaattctaatttcataacaacttttctattagctgaatctgacacaaaatttagacgctataataatgagaataacaatttaagtacttgaactatcatagcctttgtgtctgtaacacaacttgtggcatatgaaagaaggaaagaaaagacaaaatcaataattgtacagatagagatgaatttggactaatcaatcaaccaacaaacagcaacaactactattttgttgtcttgatctatccaatgttaatgcatctgatatataatctaaatgttgttgttggatctttcttgatgcagcaattattgaaattgcaagttaggtctaatgtcacgcgtggaataacctaaattattaggacaaataatctcgagtactgtgtctaatgaaacaatattgggatcaatgtacaatacagggagaggaaggtgaagctaaagagaagtagttgatacgacgccccgtcgtctttgagacaaaaagctgcaagtcagtgactgacaacaatcatcgtcttgggcatccaacaaaacattcttc

SEQ ID NO: 48634 - DNA, 168 bp, Arabidopsis thaliana landsberg
ggtccttgccattactggttgggtgtctaattgtggcaggcggtaatgatagtatcttgtacctgaaccggcggctcactttaataaagtaatggggaaaaggacccaaacatgccactgagggagtctactgagacaaagatgggctgtccacaacctacacgaggt

SEQ ID NO: 48635 - DNA, 521 bp, Arabidopsis thaliana landsberg
  unsure (1)..(521): unsure at all n locations
atagatggcacaaatataattttcattcttatctataaatgaatttggtataactgtctaccaaagattccaaaattagtatttaacaaaaaaaatatttcaaaagtgaaataaaatgtatacctcccatctcttagatctaattttaattttattacatattttaaggatatgccaatttttcgattttttgttagagacaagttatcatatttcaacatttttaggtatctttatataaagatttattctatatttggaaaattattctttcctaaattattattaaaatctgaaacttaaaaaatatattaaaaattaaatatatgaattaaaatttatacaatctttttcatataaattgtgctttttgtacctcggaccataatagttctctttgcatctgaagtgctgttgtaaccgatccgaagatggtaaacattacaaggaanatattattttggagtgngcccttatacaaaactatcaaatcctacctaagctcgngatcataatttttg

SEQ ID NO: 48636 - DNA, 738 bp, Arabidopsis thaliana landsberg
cccacattaaaaatttacggctaaccctgatggaaaatgaggagcgctcccaggaaaatatagccaactatatcaagtactttaagtggtacctctgtgatagtcacgttaacatcattaaggataactgatgccctttcaaatggaatctccggattatttctctcctgatttcctaaccggtgatatttaagagatccattgataggggacaatagatagtgacgattcaaggcccattttgactttattttatgctcggtctgctcctttatgccatcttcaaacatctgaaggaagactgtcgaaagttagatacatatcactcaaaaacatttcatttgactaataaaccaggcaaaaaacacaacataatccccaaggaaaaggtatgtatgaacaaacctcaatccattcctcaggagtaatattgtcccattgcttctctatttcccagggaaagctattagaatcatgatacagagcgagcctctcaagctgcaacgactgttacagaaaccatgtgctaacatgaatttttggttcaagtcaataagtagcatcatcattattcatcacacttcagatattcaatcaacagaccacgtaagatagtatacctcagttgaaatcacagcatcccattaattatcttaaattataactagtataaaaaacgaacacagcaaaagaatagggaaacacagcagtagagcaaagagctaattgaaaaaaaca

SEQ ID NO: 48637 - DNA, 536 bp, Arabidopsis thaliana landsberg
agagccataataggatactaacataatcactatgggaatccaggcatgcctgccgatgccgggtttgctcgttcctaaggttatttccaatagcttattctttcatctcctattttaaacttcccgcctgtcactagccatattcacaatgaaatcagggctgtcagtcagtagccatacaagcccagaaggaaattcacgtcagagcgagtcgcgcctggccgtgcctgatttgcttgttcctggacgatacacgcagggacgacgacggtgtttgcaccccacatctccacaggtagatggagtagggtggtatgcaagatctccatgccaggacttcgaacttccctcgaggcgttgtgcttccagcatgaacatcttgtacagttatcttgggcagatcaggctgctggactgaacacgcttcataattactgtaggctatgagcacactgtcactcttgagtagtctcaaaggtatacaggctgacctttcttcaagcgatcaactggaccctcactgaacaggtggagat

SEQ ID NO: 48638 - DNA, 636 bp, Arabidopsis thaliana landsberg
aagaatataatccaactgataatgaaactgacaattacttggctaattgggaagattacattacatttctacaagaccaaatttgaccccaaatctggttcggatcctcccaacctctttattaaaccttatataaaacccatttaagctccaaaccataacggccaaactttttctcgtctaaagagaaaaagaattttagagaagtggttgtaagtttttgttagactagagaaaaaaatggtgtctttgattaacattgtgtccgtagtgtttcttttatttacaacattctaccactttggtgaggctagaatcattaatgtgggaggatcattagacgcatggaaggttccagaatctcccaaccactctctcaaccattgggctgagtccgtccggttccaagtcggagagctctttgttcgtatctaattctttcttctaaattatacttttgacgtttttttattggttttgaatattttgatctacatgctatctagttttatcaagtgacattattaccatggtttccacaaaattccacatgattaaatgaacttaattttttagcatgtaataaattgccataggttgaatttttttaaaaaattggtctacatagtttggcat

SEQ ID NO: 48639 - DNA, 461 bp, Arabidopsis thaliana landsberg
cttagtttgatcataatcataagcaccaaattgagccgtgcacatcggtcatgaattgggcccaggaaggaaaaccccccttgaggcgctgcacctccatccacctcctagcattatccctcatatgcattgttgcagaagtaacccaaaggtgctcaggaacattgtagaacagaaagaaatcctcacactgctgccgccagatacatggatcacgcccattaaactctggaaagttcaacttgggtgtggtatgacgatacccttgcataccttcattccaatcgcgaggaataactggtgggggcgatgatgatgatgctcaccagggtggtaaccagcgggacggggtggacgctgatgcaagagggttgcgcctccgtgaagaactgtgaggaagtgtcccactccaccgaaggtcggcgctcgcgtgtgagaagatccaccgccttgcctgtggc

SEQ ID NO: 48640 - DNA, 628 bp, Arabidopsis thaliana landsberg
cagaccgagcctgagggcttcgctgcgtctttcgggggatgtcggtgatcttcagggaggggaaaacccccctcggttgcggtgatttctcgccggagacattggggcaccatggacccgccccgcgccgtggattggggggctgcgctacccgattgccggtgagtaccctacacccgtgttcgcaataacataagcatcgtgtagacctatccaatttggttttgtcgctcggagttggccaatagccgtcgcactcgcgtgctccaccttgtgagcttggcggcgacacctctgttcgggattggtagggaagaaagctggtggccgctggatccttgatggggggttgtgatgtgttgtggtgatcggccgttggatcagccacgaacgctcaggatcatacgtgaggatacccttcgccccattaaataccagtcgttgatttctaatcttgcgactcacagcgcgtaccggttcggataaagggggggatctaatcagtcctagattcaggatcggacggctaagctctactcgtacccttcgacgtgcgcttctttcaaatgagacctgagaaattgacaaacaaaccgccgtcctgtgcgggggaaactgagcttaacaa

SEQ ID NO: 48641 - DNA, 442 bp, Arabidopsis thaliana landsberg
caactccagccgctcaaggatacggaaccagacaaccccaaaccgtcagccgccctaccccgcgtggcgtcgttgacgaacgagaggcaggaaaagaaatgcaagggccggcaccgcacggcagcagggccccgcgtgcgcgtagtgccggcggcatcggggtatcggcatcggcacaccccggaggaccgaaccgaaccaaagcggataacaacggcgtcgcggtcgctcccgccttgtcgggctgtggtggcgggccccgcgctacgcgacacggacacacgggacgcaccgcccgtgcggcacggcttctctttctcacactccgctcgaggtcataggctcgcagcgctcgcttcgcgtatctagcaggggggagggggagtctgtccgcgtcgccacgtggccgctgctctcacacgcatgtcggcgtgtgctagct

SEQ ID NO: 48642 - DNA, 541 bp, Arabidopsis thaliana landsberg
ttaaaacaaatcaaaagtataagggtaatttagcaaattcttgaaacaaacaggaaaaaactgtaaaataaaaaagcgccaagtaggcgattactgttacaaatgaaccaatcaaagaccaaaacctctaactaacttggctacttcaaagattacgcaatcgcctgtttttaggacacagtggcacactcgtaataacgtagtccagagtgatctctttcgtcatttcacatccttcgtctttcttcttctcttcaccttcactgccactcacacctacacgcgcgacttctctctcttctgaagcactcaaagagtaaagtttctctgcatttcagcttctctctctcttctctctgtagaaatggcgggtcggatccaatcccaccagctaccaaatggactctacgtatcgggaaagctcgagcaaccaaaagagcgaccaccgacaatggcggctcgagctgtgccttacaccggaggcgacatcaagaaatccggcgagctcggaaggatgttcgacatctccgtcgtcgatgca

SEQ ID NO: 48643 - DNA, 433 bp, Arabidopsis thaliana landsberg
ctcgacctcacatacttgttcatgcggaccacactatcacctactactcctattccgtacactacaaatctacaaccctgcttctacttcttcctgtgggcccgtccctgacatgcgtcgccccgttcctgccgattgttcatcgcctcgggtactatagcatccatctagctagctattgctaggagtggagctatagcgttttcggctttacgccagacaggtgacgtaccgtgtaatgttcgttggctttaccatagacgtgtttcatgctcggtgaccggaaggcagaatcagataggaccgagagcaccacgtgagagacagagaagagatcacactgctgaccccttccggttccggcccatggatctagtcgcgtcacggccctttttttcggatcgacactgacccaagcgtaggcatcgcgata

SEQ ID NO: 48644 - DNA, 926 bp, Arabidopsis thaliana landsberg
caaacaaatttactctagcagaaaatttacataaatcaaaaaccatatacatactttacacacaagcataacaaatgtatggatcaatcaataaactcaggtctatgaatatgaatagaaaatgaaactctctataacacatgttaataatctaaaggctctgatcaaacaccatgttattaagcttttgtagatttttaccgtacacttccacgttagcatcatgtagtaatgttgcagcttcttggtttggtgacgacgatgatgatgctgatctccagtagtagttggcaatgtctggcttcacttctgcttctataacagtttctgagctttggttgtgttctgtgtaatgaagaatctctgatgcccatgacttcatgtcttgatgatgatgatgttgatctactagtggattattattgttcatggtttggctagcttctgtgtattgattaccaaagaaggcactgtagatactgttgctctgacttggtactgtgttgcagtagttgagttgttcccagttgtttggagcaggactgaagtttgaagtcattggtgtcggagatgatgacgtagacattgaagagattaaagatacgatctggtctgaaaccgttgtagtattacttgaactaaagcaaaacgcagagttttgattagtcgtagttgtattcgccgggaaccaccatggaccttgttgcgatgagacgaccattgactgatcatgtaggttgtttatcgaacccgttgactttactacttctgatgacgtcagtttctgatctatgacgttaagagattgaagctcgtttgttattaagggtttatgtgttgttgggtcaatgccttttcttctcagattcttaataagacatgagttccaaaagtttttgatctcgtgtgctgttcgtcccgaaccc

SEQ ID NO: 48645 - DNA, 807 bp, Arabidopsis thaliana landsberg
cctgcccaaacatcagagttatgcgagacacacattaggagcaggtatgagttattaccatcttgagttctttatagaattcaaacaacacttgtaagataataaaaatccccttttgttgtaacccaacaaaaatcaaacccatttccgaagcaccaactggttttctcaaagagctagtttcttcagcgataattcgatacacattccttccagtttcaatcaactcaatcaaatcaacataagcattctcatattcgtcaaacttcacacaagaaacactcaaacagcctgtgatcaacccttccttatgcaaattaagtagtgcctcacatatttgcataccaattattcctaaacgtaaagtctcatcttcgaggctatcaaactcctccaacgaaaatccaatgagcttttcacccactaaatacaaaacaccattcttcaaatcaccccacaagccaaaaactttagaaacacctctctgtttaacagagatgatcgcatcaagctcatctctttcctcctctcgcataccccacagacaactcatcatcctctggacataactatacttgaggacagaatcacaatcaccatgctcgaacgaagcaacccgtaaaagactcaccttcgaatcatccctcagacttccacataaacgcgaagatgaatcaaaatcactactttcactctccctaatttccacggaaacggcgtcgtgcactataatccgatcctttcaagtggcgtaaaagtcgtcggaccatgatcgaatgacaaattcaacgactctttcaaaattcc

SEQ ID NO: 48646 - DNA, 1689 bp, Arabidopsis thaliana landsberg
atgagaatttgttcttccgtctatctagaccatactcggaacattaatagtaaatagatataagtttcttaatattgaagacgggcttacgcactttattctgtgtatgaacgcacctgagtgttttgcgcatatctaatatagttaagcattttaaaagataacaacttgacatttttgtaaatgaattaacacaactttcagggatgtgatgcgtctgttcttctagactacgaagggacagagagaagatctccggctagcaaaacactaagaggcttcgagctaattgacgatatcaagtccgagatggagaaatcatgccccggaaaagtatcctgcgccgacatcctaacatcagccagccgtgccgccaccgtccaacttggtggtccttactggcccaacgtctacggtcgtcgtgactccaaacactcttacgctagagacgtagagaaagtcccttcaggccgccgtgatgttaccgcccttctcgaaacgtttcagtcatacggtctcaacgtcctcgacctagttgtcctatccggggcccacaccatcggaaaagcctcctgtggcaccatccagtcgaggctttacaactacaacgcaaccagtggttcagatccttcgattgacacaaaatacgctgattacttgcaacgcaggtgtcgctgggcctctgagaccgtcgatctcgacgctgtaactccagcagtgttcgataatcagtactacattaatcttcagaagcatatgggagttttgtcgactgatcaggagcttgttaaggacccaaggactgctccgcttgtaaagactttcgcagagcaatcacctcagatattcagacagcagtttgctgtgtcgatggctaagctggtcaacgttggtgttctcactggtgaagatcgcgtcggagagatcaggaaggtttgcagcaaatctaactccagagcttactaaattataatcatcatccctcatgagaaggatcttttgtttcttgaaataatttcttgtttggtttttgagctcttttctattgcaattttgtaatttgttgtatgaacaagaacaaaaactgtgaattattttcgttgcaacttcgatttacatgagttctacacttaccgtcattatatttgatatcggtccaacatgatcaatttatgtcaaagggttcatgatgttaatggtaataaccctaaacgtcaactataaatcaagttgtgctgatagcttttggtgcaagaaaaatgaaagatgggagacacaattcagaggcgatcacgtttttagggtttctatagtactgaaactcatggaaaaaacacagtacaaaagatgctatattctaagacattgaagaaccccaaaattaagagagaacataaattatgcaagtagaaaacaaacccagtagaagaaagccaagaccagttttagtttcgtttgcctcgaaggacacccttactacgacgattcttcatccccagcttaaacttcttcttcaacttcttcccaataggttttagcgacttgtttttcttctcatcatccatttcctcatctacaagcaaacaacaatagtatcccaaaacagaacaaatccttaataccaaaactttcaaagatatacttgtagatgcacacaaaattcattataaagaaaccaaacaaagcttt

SEQ ID NO: 48647 - DNA, 666 bp, Arabidopsis thaliana landsberg
tggtaagataatcatgagtttaggttatgtaaaattagtttctgattatggaaagtcttttgttttgggtaaatacaaaaaagggtattttggacagccagttcttgcagctgcaacaactacaagatgaaagcaatccagattttgtttcacaagttgtcacactcttcttccaagactctgataggattctcaatgatctctcactttccctgtaatcttctttacacattctctctttaatctttttttttttgttcttttccaaaacttgtgtttctcactgtttttttatgcttcgggcagagatcaacaagttgtagactttaaaaaagttgatccccatgttcatcaactcaaaggtagcagctccaggtaacaacaaaaacaaaactggctatttctgattttaatccaatgataatgacattttcttgatcttgaaatgtgtacaatatatattgccaaaaaataacagtataggagcacagagagttaagaatgattgtgttgtctccgcagcttttgcgagcacaaaatgtcgaagcgtgagtttaatcgatatgttcgttggtcgattcgttatttctttgttttagatctgattaggaaaaacatcgttgaaaaattcagatgctatgatgtttgcacaagtgagcgagagta

SEQ ID NO: 48648 - DNA, 1293 bp, Arabidopsis thaliana landsberg
ttggaaataaattacgcctagaacaaaaatatcatgttactttcattcttcatattatagtgtgtgacaaaacaagaatatgaaagtctcccacatttagtgaataatgtgtgatatcgagtattgcatttgatatatatgaaaacttggtttacggaaattgaggttaattctgtcactagaagtagtttttgatgaaatatgcaaaaagaagcataattatggggtgtgaatttggagtaatattaaaagtagttaaataaggagaagccgagaaagtgcagagatagttggtcctcgtcatcatcaacaaaggaagatcggacggtcattaatggccgtaggtaaaacttttaacggatctatggacagtagacctgtatacctgtaagatttttataacaaaattcaactgagagaattccgccaactaaacgacaaacactatttaattgcttttgttttttttgttggaaaaaaaagaagagaaacgtcaaaacaggaggtggaaaatgaaatattctttacaatatgaccccacttaattttggatattttattataactattgtcaatttagatttcaacaattttttgcaaatgttgtttcggaaaattttactccactttgattaatcacataggttagtgacttaagatgatttttatttgattttttgaaatacagatttgaaaaatgtatatagcttgttttaaatgaccatgattgttagttttgagttttgacaattagaagatgttgtgtagcaaaatgtgaattattaattaaaatagggagcaaagtgtagtttctctcattgcccgtaccgttggacccatacaacacgtggcggatagcggaggatgataacaagattagaagaaaaatcaattaaatacggagcaattaaagggagggtcaacggtcgttaggccttcccatttctagttcgaatatatttattacttaatttgttttactttcacaaaatatatccatttttatattacagaaatcaacagatagtgaattttgacaaaagaaaattaattagacaagtttcattaattgaatctgaacagcacgaaatattgactttcggtttagacttcgtaatgatcagttgtgttatgattggttagtacgttcgttctggtagtagaatttttaatcaatcattgctctaatcatttttcaacataaccacactatattttatttcaatacaataatgtaacccacaaaatgcatccagttggacaaaaaatagtaattacattctagatcaagtc

SEQ ID NO: 48649 - DNA, 567 bp, Arabidopsis thaliana landsberg
  unsure (1)..(567): unsure at all n locations
aaagactaaaagctttccctctctttctctttcattttctcgggaaaattctccaacgaagcttttctttgcttcttctctaaattaagttttggggtgaagcaaaaaaaaaaattaaattcgttcatactctacaacgaagcttaccacacaaagctncttctactaccttctctttccaaatccatctccgtcttgttctagggtttatcccaatcgatttcagatcatgcacggccttagccgcctaggtaacggcagtagcaacggtagaatcaatattccgtcaccgtcaccaccttcttcgccttggattctgcataccagaggaaaatctctcgccggaggtgtttataagcaaggattaggagagagacttgcgtttttactcttttcgatagnttttagaaagaaaggtgtcttgttgttagcgccccttctctatatcgctggaatggtactatttatgggatcttttggaatcactgtgttggatctaaggcatggcgttgagattgtgtatagacgtggttctcctggttcggtatatcgagtcctaacgtttta

SEQ ID NO: 48650 - DNA, 871 bp, Arabidopsis thaliana landsberg
aatctgtctttattattataaatactaaaagaacgattgatatgaatatttcatatgcaagttgtctactacatttaactcttgtgataacgatattcttgtttcattgtcacgcgccagtaattttaacctaactatttatgcaccgcatcattggcaactttctatgagtaatgtgtgtttacgaaccgaatcgataagaaatataaccaaaaggaatgttgttttcaatttttcggattagagcttggtaacaaatttaaatcaatcaaaaccggtttaacctgtcggagacaaaccaatcaaaaccgggttattcatgcattattgatatgtgcatataagacaaggtttttatgcattggtaaatgattcccccatgagattgggtgtgtcattttgggccaccaccaccactgcaacaaccacactccattctctcttcttcttttttggatcaaaccacactccattctttataaaacgctttttgtggatgataaaatttgtcagcagcaaaatttatcaatcggtacgataatgtaatactagtaaccatcttctacaatcatctaatatttgggtggtggcctagttcttcctccattttacgaaaggccccacctttgttttaacctattgaattctatcatctagagtctagacgttaaattggatccatttaatataaaaagaaatactagaaaggtgacactgaaatatttaagaatatatatggatggagtcagctttcgcatttcaattttccaccaactccattttctttcattgggtcttaaagatttgaagctaaagactaaaacatatttacatctattcaccgggattctgaattttttaacagttgtag

SEQ ID NO: 48651 - DNA, 863 bp, Arabidopsis thaliana landsberg
agcttaattaacctttacatttatttgtctaacattggctagcattaggaaaacaagttaaaaataattcgctatgtttgaatcgaatttggaattatataatcgatcgttagtttaacattcagtaattattaaaattaaatttttaacgcaaagataataatgtaagtaatcattaatgtgcgtgtatatataagctgtgcccacaactcctagtaatgactttctcaggcattgttgacacatattttgctctgagtaaaacttgggaatagagagagactctgagtgagagagagattctgagtgagagacggagatggaggcagacgaaagcggcatctctctgccgtcgggacccgacggacgtaagcggcgagtcagttacttctacgagccgacgatcggagactactactacggtcaaggccacccgatgaagcctcaccggatccgtatggctcatagcctaatcattcactatcacctccaccgtcgcttagaaatcagtcgccctagcctcgctgacgcctccgatatcggccgattccattcgccggagtatgttgacttcctcgcttccgtttcgccggaatctatgggcgatccttccgctgcacgaaacctaaggcgattcaatgtcggtgaggattgtcctgtcttcgacggactttttgatttttgccgtgcttccgccggaagttctattggtgctgccgtcaaattaaacagacaggacgctgatatcgctatcaattggggcggtgggcttcaccatgctaagaaaagcgaggcttctgggttttgctatgtaaacgacatcgtgctagggattctggagttgctcaagatgtctaaggtaa

SEQ ID NO: 48652 - DNA, 385 bp, Arabidopsis thaliana landsberg
gttttttcaatcttcttgttcctgcatattaaaagtaactcatatcagaggagacatgttgtatcaaacaacaagcaacaacagataaacatttatctttttttttagtttctttttttaaaaccaagttgactatgttttagagcatcttcaatggtgagtttttaatattaattaatcaaaaataataatagaaaaggcaagagaataagaatggttcttattttaaagtatataaaatcttatttaaaatcccaaataccacatatcttagtataatgtcttaatatgatttgttcatttttatttatcacttaaaatttagttaaataacaaaattatatttaaataatattataatattgataagagacacttggtgaat

SEQ ID NO: 48653 - DNA, 913 bp, Arabidopsis thaliana landsberg
cttttcctttttgagtcatatgatcatttgtaaagaagtactcatacatctccaagtttgactgatatgctatgtttgataactagactacatgttacgttataaaaccccgaatacgtaatttacatgattttcttggtagcattcaaacaattgacaagtcaactaccatgcaaaatatatatatgcggacacgaaaatttcgccaaattttactcggtgcagatatgtccaaatatatttataatccgagaggacggacgatattgccaaacagtcgtgtttttagcggatatgtctttgtctatcctaacaagcacatcatgctaaaagaaaatttctaccacatcagaatatcgtgatgtaatcttaccaaacaaagtaagtggcatggtgagttgatcaagcagtaaatcgtactcatcatgtgaacacaaaagtctcgtcaaagtatctttagtgcggatatgtccaaacatctttctaatgtaagagtacggagagaacaaacagacactagtgtttttagcagatacatctcataccataaatagcacatcattccaaataaatgtttctaccatgttagagcgtcgcaatagaacctttccaaacaaagcaagtggcatgaccggccgatccaatagtttatatgagtcatgaatatatcaactatacaaattaaaacacttattcatttcccctagcttatatatgctattgattatgaccatgagatattgatttcctttgcgttgaagtacatttgtaattctggattctctatgtgtgcactagactactcatttatagaatcatatgagcatttataaagaaaaatatagttaatttcaatcaaattgatgttaagctaagcttaaattgacattaattatataaaattgaacccatt

SEQ ID NO: 48654 - DNA, 529 bp, Arabidopsis thaliana landsberg
  unsure (1)..(529): unsure at all n locations
gacacctatatattattaagacggactatccaactaatatctgggatctatcgagataatatcatgtatccgtttcttacccgcccaaattattatccgatgtcgtcctgtatccatcccaaattttaactatacgtatatgatcgtgtattcgagagaattatattagggtaggatacgggatgacatagtatctatcctgttttcactcctacacctgaccatggtgggcgcttcctctaactaatgaaaacctagggctttcattacctcatccttatatatatacacacacgacaatgttattctttacccaccgtgaaggaccatccacctctgtgcatgaggttaccaaactgattcccctgcaccgccgctcatgcgtcctactttggcgccatctgcaattaaccaaaccagctccggtccattcattgcaccatcgcgccacctcaacacaagcaatttctcactattgtgccttcactcatctgccacagctgtcgtctnccatctctgactcaccacc

SEQ ID NO: 48655 - DNA, 590 bp, Arabidopsis thaliana landsberg
  unsure (1)..(590): unsure at all n locations
agaataccaatacgcggttcccggtcgagcaatccaacgtgatgatacaaaccaccnnnnnnnnnnnnnnnnnnnnnnnnncgtcatgagtacctggaactgttcgcccgctgccttgaattgcctgagcctttcccttgtcctttcctcggggattttccattcgctcaggtaccattgggcaatcagcgattgtgcgctatgatcgccaggactgacaagccggaactgaacttcgggattcattcagagcaaatatatcaattttgatgagaaataaaattttcgcaatggtatttttgtcggagaggttaaaatatccacagaaaaattctttaggcggcatttctttaccggtcaatcatgtttttcacttcaaaacgaagtcccgggtgccggcctgatctttccattaccttctcagcgaccgtttgatcttttttgcacggcatgtttgtgccaggttcttttaggcaattgttctttacttgaaaagactccgcaggcctttcgagctcggcttaacaggcacaacgcacacagcanaagcacaaaacgggctatgcaacgttcaggatttattcactctg

SEQ ID NO: 48656 - DNA, 557 bp, Arabidopsis thaliana landsberg
actgtaaaaacaagttaaatctttatttcagccgtcaagttacttcattaaccaaagaggtattacaaagttggccaagatattacaacaggcaggattcacacacaatctctcggttgcttcgctagactacttgtatgcataaaagagaagatacatgtctttgaaatgttgatattagcaagatatgtatcgtaattgccattctgcttcagtttccattggagactgaatgggagttagaaggggtgttccttattcgacatttaaagaagaggtgagattattaacactttcaattaggagctttactcttacagagatttgatctaaccaaagatgcttgattaaagatattgccgttgatgttttttctggtaaaaaaaagaagagaattaatattaactgtgaaaaacacaaaaaaaaacggaaaaataggacacgtggaattggtgctgatgttttacctgccactggttgcctcacagcctcaccaccttttaaagtcgcctgagaatcagagctctctcttttctctctcccatccgttttttttt

SEQ ID NO: 48657 - DNA, 751 bp, Arabidopsis thaliana landsberg
actcgaagctatccttaatgaaaagtgtatgaatttcggtttcgattttgtaatgagataatgataaaatcataagtatttgatatagaatatggaattttgcgtttcctctatttttaaaatttacagataaaacttaaattatttggtgagtatttttatttgaaacttttctaatttaaaaagtcaaaattttggaagataattatgacggcttaccctaaacattaaacataaaaatatcatatgtattcatacttcttaggccatagccgctaaataaatcattacagttgttggcttttttaattatttcggttcctttgaatcgaactattttttttttgttcgagatgatatcgatttcgagaattaattttccgtgagttcttcttattttactatatatcaatattgttttgctgatgattttaaattcgttggtttatgttttaggtttattgagcatgggagtttctatccagaatcatggttgttcgtattttgtatgagaaagaatcaactagtgaatggagagaattaaagaaatcgagattgaacgtaacgagtggataaagaaaaaaacgaggtattattaatgaaaaaaacagcgtcacctagtttcattataaatccgaaattgtagtagatatgaaacataaaggtcccgttcgaatgaatggatgcctttaatgggataaaaggaagaacaaattttattttttgaaaaaggggaaagaaaaaaatacca

SEQ ID NO: 48658 - DNA, 2686 bp, Arabidopsis thaliana landsberg
atttccaacaacaaaaaggaccgccttctccaattcaggatcgaacgtggaggagttaaggacaaaaatatatattttagaaaccggctcacgtaaacctttctatacttctcaaatacttggtttaatatattaaaatgatcttaagctaccaacagctatgcacgcaatggtatgaatccaagagatgagaagttttcaatacaggtaaccttgagtatccttaagtcaaatcacttcacttatttgcaaaggatattggataacatcgaacaccagctttgctgagccacccaaatttctcaatctttcaaacacttgcttgacacgtactgactaaagaggaataaatgtcataggtggaagcctttgctctttcaagtactgcaaattacaaaaaaaaaaaaagaagaactcatttcatcacatacctagagcagtggtacaaagtcctcttaaacatttacttcaaattgcttaaaagcaaggtagaaaaagcttcgaaaagttaagttgaagccaagtatcatagaataggggttaatttttaattctaaggaatgaagtctgcctggagatgattacagcatatatgttacatacctaaataatatgaattgtatcatttaggacgtggtagagtttaaggcatcactaagaggttgtattgtttaaaacatcattaatttgctgacatatgccagtgagtagtaatatggtaaagaatatcttactcacctgttattgaaagtctgaaactataattgtcagcagagaagagatagaaattacgaatttagaagttcacagattccgtaggatagaacaccataagataagtaccttgatgcaatcctttcccgtgttttcatcttctacaactactgcatccataaatcttcccatggcaacagtgacagcaaggttatacttcttccgatttggccgacaaagatcagtcatccgaccatgaactccttgaaatagacgcttgagagactcaacagcctgtgttagcctactatctctctcattttcatacctttcagccgttaaatcacttaactggtcttctaattccgcgattctagtcttcaacttcgcagaggcctccctgttcatcatataagcaggttagcaactatcaagaacaaatataaagttctccctggtgaggtgcacctcaagggaatttgaaggtttctctacgagcctacaagcttcattttggtttagctaggaattcagtacagcagcagatcctgaatttcagtatcaggggatacaaaatgtatttcgcctgctcaagaaggggtttatactatggatagggaagatggaaaataatgtgttcttgacaaatgaattaccaatatctctcaagccatagttcaaaagatgaagcaaccgcaagaagaatctctaaggaggttttaaaaaaacttgcagcaaagtgtcgcatttaaaggatatcataacatcgcaagtaagccatccattgctagacaatctagtgagtagaggacataaactaacctggcatttacgtgcttctcttgcagtgcacgtaactccgttttcagactagttgtttcattcttatatttcgacgaagatgtttcaatctctccttgcctgtctttaaatcgcttaatttgttcatcaagatcattcttcctatttattagttgctgataattttcttccagatttctcaatgcttcaagatcggtacgccgttgcctctctagaacctcgtgctcatctcttagcttaatggttttcattccagcttcttcttttctgagacaaaaccacattgacaaacatgaaggaacatcaattagaaaacaaaggtagtcgtaaggattcaaaagggtgaataatagagcatattacaaaagtcacaacaacagcaccaataatagagcctgtaaacatacagatatatgtcattatgtcaaacaaaacgcgtaactatttgtttgcttagactgttcttcaaagcacagaataagtactcatacccaacaattatttcattaaacttttttgttaaacatgtaaacccatgtagtattcattacaccacaaaaactcaagcaagaagattaaataggcaatatagagaaatcaagttggtgcatatctataacctcaggacagttggaaagcggcaatttttttgcgaagagaaaaaaatccttatttctttcaaacttacagtcgaaaataatcttgcagttgactgtcaagcattgggagttttccgctgctatcttgtctcttctcattaaataattccattttcttattcagctccttaatgcttttctgcatctgttcaatttctttggaatgcttccctttttcttttttcctcttatccacgtcctttctattggtctcaatttttgcttttatgcgagctatctcctccttaaatctcagaagctcaggttgctgctcacaggaaaggtacagatataagttagtcaagtgagaaagtttagtgaaattccagaggattacaaaaaaaataaaatatgtaagacatgtctgaaaatgctatatttaaaagggaaaatagaatctgttaaccacagatttccaaggtatactcacaatttttccaagcttcgagcttttctcagcaatcttcttctcacgttgagcaatttctttc

SEQ ID NO: 48659 - DNA, 1301 bp, Arabidopsis thaliana landsberg
taatttttatcaccgaatttccaaattgaaatacattattcagattttataaccagtcaagatttcatggatctgttatacaaccaaatccataaaacattatcgttaccctaatgagatactttccagtgaaacataatcaaatcatcaactcaaaaaacgcatcagatctatcaaacacatagatttacgaagatctctaacattaaatcatcagagagataagtttagggagcaagctctttcgcttacacagagaatcacagaggaaagagactttaagaaaactacaacttttttgaccactgtgatttctctctgcaagcgaaagtacttagtcaccaacacggtagatatggttttgctatgatatatgggatttgggtttatttgtgagcggaagatctaaagaagaagaaagtatttatataggggagaggaaaatagggtattgggctgagattacgatgagaccgccgctttaagttttgttgactttttaatgctttattcagattcgaatctgacggtctccaaatatttttcctttctcagctataattacaggattttattccttatcattcttatagtacttgctaatatttttattttattttaattactataatggtgcttgggggcaacacgacctctcttttttcacaatttttttgggttacggatgaatttaatggggatcaaatatcatattttaaatattatttgatggttggaaactataaacggtgttcaattattttcaaatgaaataattttcttaaaccttatcttcattttaaattctcctatattactttgtttaccaaacattggaggaactgactgaatttcgtcgtcacatgtttttttttacatatttaacttgaaataagaaaaagatcaactaagttggaagcagactacaattcccacaaacataaattctcatcaagccacatttacgtaaaaaataatgatccaacaactttgaggcaacaaaaacaagaattcgaaagttatatcttatttatgattatggattatctcatcactatatggtagtggactagtggtagtgtgaaataattaaaattatgataaatctaaggcaatacatttgatcttttgtagaatcttttttttttttttttttttttcaaatttgattgacaaatatcataattttgggattctattatatttgaatagataccaaaaatctaagtacattgtttgccaaacatttgactctttttttgtcacatgtttttaacacatcttttcttaacatgtttagc

SEQ ID NO: 48660 - DNA, 438 bp, Arabidopsis thaliana landsberg
gccaacatgcatgcccacacactagctagccacacccacacggtatcgcaaaacctaaaaccagagagttcccatgttctgcaacctctctacgtacgtacgtggtcacatatcacggcggcaacacagggtttcttacttgctaaccacaaattatattaattgctagaactcctctaacccccggtgcagtcccgcctcgctcgtcgtcttccttccactcgtccgtcaccggcgcgcgccgtgacgttttaccgtttcaatggtcgacgccgacgacgcatggctgccgagagcgtgagaagcgactgacgcacgcatgacgatcgatggcgcggctgaaccggtcggctctcacagcccacagccatgcgacccttggcggaagatccgcggcatgcacgcaggagcattaggctgcggccacgaggggggcga

SEQ ID NO: 48661 - DNA, 321 bp, Arabidopsis thaliana landsberg
  unsure (1)..(321): unsure at all n locations
agtgccnggcgcgttgtagatactgggaggaatcgcatagctgccggaggttggctgcgtccccgtccaacccgtatcaccgtctggccccgaagcagcctgacaggaagtcgcatcgctagagcttgtccataccaggttggcgggagttccctgcgtggcgggattgggctgcgccgagaacgcaacagtagggcccttgctggtcacgatcacctgcacgacttgcgccacgctgttgccgcttgggttggtgcacctcaatgcacaggaatagccccctggatcgtggaaccgtccctgcccaacctcattcatgct

SEQ ID NO: 48662 - DNA, 518 bp, Arabidopsis thaliana landsberg
gtaaccgattcggatagacactcaattaagatataagctgttaacctaaaaaggatgcaggtaaaatttaattctgctctcaaaggtttaattctggttaagttgtcaggccattgaactggttcatgcctcacttgctttctgactgtttgttgttgtttgtcacccaggtcttctatggtgttctcttgcagtattttgccgttcttgcaggcaacacgccctttaactttgatttactaaatatgcttgtcaaacctttgattgagatgcgtatggagatcccctactttgctgcaatatgtgctcgccagcggcttttagagacccgttcacaattttgcgaggctatcaagaatccaggtttgagatgattccataaccttgaattttagtgtctattaagatacatgcctctagtatcttagtaccctaaccagaccataaacattctttcagaggatggatgctggccttccttgaaaacattgtttctcttgggctctggtccctgattt

SEQ ID NO: 48663 - DNA, 1006 bp, Arabidopsis thaliana landsberg
atgtgtcttttcggttgcatccttcaggtacaatatgttcttaatatccttttttttatatgtggtccaaaacaatactaaacaaaaccgtaaaagctacaaacaacgatttcaaaataaagataaaattattatatataagcaaatagaatcataatattttgttctttatcaaatctaaaagaattgaccataacacaaacatatagattgaaggatattaatctgaattttatgtaaatacgtgcaacttttgataaatctatatattttcgataaaagagtgtcgaacatatgatgatagaaacatatagaattttgagaaatatatacaaattctttttgaacaggcagaatatacaaatgtgaagaaatttgtgatggccttcttctttgctgttacaacaccatcaggaatcgctcttggtatagccttgtcgagcgtttacaaagacaacagtccaacagcattaatcacggtaggactgctcaatgcttgttctgcaggattgctcatttatatggcacttgtagatcttctagccgcagagtttatgggatctatgctccaaggaagcgtcaagcttcagcttaactgcttcggggcagctttgcttgggtgtggcggaatgtcagtcctggccaagtgggcataaacacattcacattatcctctcgacttttatgaaatataattatatttcagttagcgtaaataatatatttttctggatcataagtaaaaaccatgtgattttcaaccgattgtgcttttgtttttatagttatattttatgtgactttacagttgagtttatactttatcttgaaattttagggacatttcatttcctataacctataaccagttttattgccaaaatatcaaaaatttgagtttacctcggattacaaaaaaatagagtgagaataagccaataaggtatgatcaaatggtacctttgagtaaagtgatatatatgatgttgtatctgagtgaggagag

SEQ ID NO: 48664 - DNA, 1227 bp, Arabidopsis thaliana landsberg
  unsure (1)..(1227): unsure at all n locations
gcatacattatatcattgtatccatcctttcttatttgtcgaataattatgtctcttgtgaataaaaaaaattgaaacaaatgttagcatagatatctaatactatgattttgtttgtatgaataattgttctggtttaattgtgtgtgcatgtagatgatcatcataaatgaaaacttttacaaagatataaagacatattctacacataaaagcaaacgtttatgaaacaattgacagttattaagttattagatgaatatctggcaaaaacgtacaaactgttatatatatctcttgtatgaaactttacggttgttaagaattttaaaataaaaattttgcttcaatggaaaatagaaaattttaatgattaaacatctataaattattttctatgttgaatgtatattattactaacaccaatatatttaaatacataataatattttgacaactattaataatcaatatatctcatcaaaatatatagaataaatttatacgtaacagattcaaaacctactactatatacaggtcataacggatttttgaatattttctaagaaaatatttggggtttactttattttagtttaacgaataatatattttactctttgcttttttttttttcactctttgctttgctttaaagtttaaatcattgcaaatattcagcttttatagatcgaagaaaaactaatataaacatatacattttataatcttaagcttaaccatttggataagatctttgactacgagacccatttttaaaagtcaatactcccttggataagatctatgactacgagacctttttcgaaagtcaaatattcagatgtttttttttccctaaagagttttagctttgatgaaaaatatttgaaagcgtcgttaagagtacgtcgtgatcattaattcatattatgaaacattgacaaacgttacatagcatcaaagttataaagatgaagtatcccattctttaaccaaaaaatacgacattcattttcaattattccgatccacaaagttattaaacgttcattagcatatactagttgttttctaatgtatgtttcaatacaatcaaacaagaaggtgattcaaaaactaaagcagacatgttggaaaactttatactattatagtttattatagctaaaaaaaacacattgcaataattntaatcagatccaacatccaattatatcacatt

SEQ ID NO: 48665 - DNA, 646 bp, Arabidopsis thaliana landsberg
cttactcaagggaaccagaatcagtctcatttgttggtactggcactaaagccaacaaattgtctacacctaagctgtcaggagactgcaatgacgaactacgactagttcttgtccagcgtgagctcgttctagcagggctaaaactgtttccaatctttgccgcttcaatagcaatatctggtgatccacaaactaaagagggaatattcatctgtggaccatctgcacctgcaaagcccaaacctttaccttaagaactatcagagaacaaaccaccattaccgtgagaaagtaatgcggtaacataccattggtattaggtactctgcggaacataatcttgccacttttaacagcaaaaacagagacatccttggcaagattcctggcacaatacttggctaaagaagctgaagaacggatagtgtgatgtttcctagaggaaccaacgattaaacttgtagctccacacgatttaacttcttgtacaagaactttcctagctgacttccctctgaaaaccttcaacttcaaatctacctgttacacaacatcaatcaaatttcagttttaagaaaacttaatccaaccctaaagacaacaaatttcacttagaatcatgacaaattttcataaatggaga

SEQ ID NO: 48666 - DNA, 1033 bp, Arabidopsis thaliana landsberg
tcttaaaatctacctgtctaataatttaattttgaataactattagattaattatttgatagaagaaattaatatatgaatatattgtcaaaagactcaaaactaatcagaaagttgcactttataattgtacgatttacaccaaactactaaataatatatccaactattatttttaatatatgtgctttattttattttttgttaaacaattatatagatgctttatccagtaaagaaattcgttacaaataattaaggaccgtataatatttttattgtattttcaaacagttttagtttttatacgtgaaaactactgcatacacaaatactacatttgctaatttgctacaactgtttttcatcttattcttctacagttctactgtaatgcaattctgcgaaaagacaaaaataacaccagataaaaagatgcctcccaaaacgacaaacaataatggggaataacaattataatctgttgatgtaatatctaaaagagtaaaacgatacaccttcgtattccttttcgtatctcgaatagtctaaatgctctcaggcaacctactagctatggaaggaagcattaactgaatttgtggtccttgattatggtactttactgctaattgccacatatatatagttctcgttttaaatcaaaaatttaacccgtacgtacccggtaccctatttgtacttaatttcatctaacacttatgctagtatgcaacatggtattaattagtatacaaaatagtaagaggagcttattgatatttaaaaagtggagaaatttagccagaggatccgttacgctcgggttttgataccaaaaggagatcaatgtataattaaataacgtaacaagaaagaaattataagtataactatctaaaatcaaatagttaactgatttaattttattgttatctttttcccgaccaaaccgggaataatgttcttgtacatagagtatttgaataagatccgatttttttttttttaaaaaacactattaataggctta

SEQ ID NO: 48667 - DNA, 384 bp, Arabidopsis thaliana landsberg
tgagatgagaaggagacgtcaatcatatgcgaaagaggaaggcacagacagatatatatgtcaatgtgctgtgacaataacgtgatgtgtttgattttctaatggatgtctttttgtgtgatttttcttttcaaatttaatgcatttgtgtgtctagactctagatggccacgaggcccacgactggatcggcaagggagtagaggcatattgaagacggatgaatcctagacgttgaattgtggcccaagttagggttgcttgtgttctaagagactattaagtgggttagaaggatgagtagagctgtagaggcatattggggttgcgtgaagacggatgtatcctagacgttgtactgtggctcaagtcatggctgcttgt

SEQ ID NO: 48668 - DNA, 679 bp, Arabidopsis thaliana landsberg
accaatattacattgaaaggccaaaagggtcacgaaggttaaaacaagaagtcataattggatattacaaattcttgtctaaacacaaaatcgaatctttaataataatgtaattatattataatatataaagtatttatgtgcatattatttgaattcgctctagcagtcaaagaattagaaataaattattcgatttctaattttcactttttaaatgatttttaattctttatttcaattttttcgaatgatattgtataattttatgtggttaccacacacaaaaaaacgtaatatatagtgatatagaaacatgatttcatatattaatacactcattgattccaaataaagaaaaaaacgataagaattaagatgttttagagtttttttgtttgaccaataattctgataagaagtcttactcacttttcataaatggcctttagacccactcatcgctcaaaaaaattcagaaaaaaaaatgaattgtacaaatgcccctaagatcttacaaaaaggcacaaaacaatgcaacttattacaagaccaaatcatcgtgactgctctcaaccccagtcatgctatgtatctcttgcatcgatcgtcaagagcgtaattgtgttacttcatatcagaactccaccatcgtccacgaatggttcgttactcaata

SEQ ID NO: 48669 - DNA, 585 bp, Arabidopsis thaliana landsberg
tcgactccagtatgtccttccctttttacaaagccagtagccagagaattctaatctccttgcatctggacacttcatggtgctacaacaaaacccaaaggatttggcaactggggccagaatttaacgctaaacagacaggttggtcatcggctcatcgctcatcaagccctgccgctaacttgggtccttggatcatcaaacctggcctcaagtcgactcaactcaaacggcatgtatttgttgtggtccagaaagcacgcataaatgtgcatggagcatcacaactaataaggatacaaacaggtggccaattttctagttcattggcctacatactacagcatgtacaaccttaggtacattgatgatcattattatgccatttacaacctacatactattttgtggttccacctctaaggccatgtttcaaacatctgaaactaatatttagtggctaaaattaactgagatgtttagaacggatcagctaatagatgagctaattgttagttatactctcagatactatgttacagtttaaccactagatcacatcaggacttgtcatatactaatgta

SEQ ID NO: 48670 - DNA, 999 bp, Arabidopsis thaliana landsberg
gtttcaaattatccttgctattttatttttcgggctttattataagtttcttctaccccatatttctgccccagttcaatcgattatgtttatatgacaacgaattattatttataaatgtagagcttaatcaatccttcacaaaatgtcactatatatgatatggaaccgtatgatttgtaaacgaaaggaaaccctaagaaaaaaatatatgtattagctacacgtaatctctagcgtatagtgatttcatttttatactttgttcttagaaaggaaaagataattgcgtgatcagtaatgtgacgggctaactaattgttgaataaagtaatagaattaaattgctagtagctactgagtttatttaaactgccttctttttaggattctataacattgagaaataaggaaaattgattgcatgataaacacacttgctatttttatgtataagctagtattattaatggaattggtcagtctctacgtaaactagtctagtaagtattggttggttaaaacacttaaatctaaaaaaggaaagttgacatacatatctcaatctgatgcattaaaatccatacttaatttggaaggactttgaatacttcagaataaccctctgtttataactacgtactgatgagcgctgctagaattacatttctttttaaatagcaaaccacatcacaactactgctattcaattattagatactgtataaaattttcaataggtttaatatatcactaaacccaacaaaagaataaaaatagttatgtcgttatgatttggtcatatggaaatagtaatttatttatatagttatagtacagaatattaatgtaaattatgtaaggatcttatttaggttatcgcaataattatatttcactgaatcttagatatctatcaagtatcaataacagagatgtcagtttaaatgaaaactgtttggtagttggataagttaaatatcaaatgtaaaaaaaaaa

SEQ ID NO: 48671 - DNA, 1143 bp, Arabidopsis thaliana landsberg
atcatcgagtggacaaaacattccttctcttgtggatccttttcagttgcaatattttcaacaggctcaagtggacgcgtatgctcctccgtttcagagcagcactgattcttttgggcagaaagaccaacaagctgttggctatatggcaaatcatgaacctctcaacagtccattgagtccgggttacgggttgcaaagtccgcggcacatgggaaactattttgcagtgccgcctggtgtaagagtaatgccgcagtatccaggatcacctcttgctagtccggtgatgccatcctcaccggttggtggaatgatgagccactttggaagacgaagtgaaacaaggtatcatcaacaagggccaagtagaaacactgggatctaccctggtggatggcaagggaacagagggggagccagcagcatcgttgatgatctaaaaagacattcttttcttgatgaacttaagtctccaaatgctcggaaactcgagctttctgatattgcagggcgtgttgttgaattcaggcagtgtttctgctccgaatctatcattttctttaattctgaagtagtgttttgaaaggttcaaaagaaatgatgtcatagtaatcttaatttactactcatttttctgaacttcagcgtcgatcagcatggcagccggtttattcaacagaagttggagcactgctccgatgaggagaaggcatctgttttcagtgaggttcttccacaagcttcaaaattgatgactgacgtttttggaaattatgtcatccaaaaagtgagccactttttcttcttctttttttctaagctgaaaagatcttgtccataaaatacattgtgatttttgaatcagttcatagaacatggaactccggcacagagagaagaacttgtgaagcaacttgctggtcagatggtttcactaagcttacaaatgtatggatgccgtgtgatacaaaaggtaaatttattaattttactttccttatatcaatgtcagtatcttgaagtaaattgtagttaagtttccatgtgcttgtttgtaccttatgatatttataggcccttgaagtgatagatgttgaccaaaagacagaactaattcgtgagctcgatgggaatgtgcta

SEQ ID NO: 48672 - DNA, 515 bp, Arabidopsis thaliana landsberg
  unsure (1)..(515): unsure at all n locations
nnnnnnnnnnnnnnnnnnnnnnnnnnnnnnnnnnnnnnnnnnnnnnnnnnnnnnnnnnnnnnnnnnnnnnnnnnnnnnnnnnnnnnnnnnnnnnnnnnnnnnnnnnnnnnnnnnnnnnnnnnnnnnnnnnnnnnnnnnnnnnnnnnnnnnnnnnnnnnnnnnnnnnnnnnnnnnnnnnnnnnnnnnnnnnnnnnnnnnnnnnnnnnnnnnnnnnnnnnnnnnnnnnnnnnnnnnnnnnnnnnnnnnnnnnnnnnnnnnnnnnnnnnnnnnnnnnnnnnnnnnnnnnnnnnnnnnnnnnnnnnnnnnnccaaattttggactttaagtactttttctggggaatttcaggattttggctatattaaggagccaaaattacttgatcaaacaatggtttagaaatttttcctgcaacaaagcgctcgttaaggctagatgggggattccacataaggggatggcccacggcgaattggtaccaaatcctcaaaaaagcatatatacgaatggaatgg

SEQ ID NO: 48673 - DNA, 444 bp, Arabidopsis thaliana landsberg
gtaacaggtttacgacgcataatagaataaataataattcacggattataaatgacgtgacatatgaggactaataaacacatgtctcggttaaactacgcaagtattgaatcaaaatatctgcattggtactaatgacgttaacgtatatgtctagtagtacaactcatgactatgcattcgcttgatatgcaaatgacgatcggacaaaccactcatgaactaactatctggaacatgcgctacgagttggttctagtcgtaacgtgtacacgactgaagttgccaactaacgcgcctgagctgtcatctatagcgcgtgaatagatgcgcatatactgacaagtcgtagtcggtctctgctgtggcacggactaacgtgtcgatagcttgccacaccgttggactgagagatcatggccgcaaaggatccgtagggagtat

SEQ ID NO: 48674 - DNA, 764 bp, Arabidopsis thaliana landsberg
cacagttatgttaaatattttatacagagaaaaaaaaaaccaaagctacatttacaacaattaacctacagttgcatctgtaaccaatctaaacatagtaaaagtaaaactacaagaaaatatgtttcaatgatgtgatgtgataaatgtctagacatatattcataaaacgtctatatatacaatcacatatttattttgtatttttttttctcaatttggtatattaagatcattcgttctattttgtatttgtttttcacgattctatcgttacacaataatagcaaccagtgccgatgagatatggtccatatggaagattgaatctggtgtctgatgtttgggaaagttgcatgttctcaaatcttggtcgtttttcaataattattgtttacccatttcaaaatattctctctgccaaagacaatcttgtaacaaaaggagctcaatcagtttcctcaaaatcatataatttggaaaaaaataaaataaaaaaaaattgaaatttgaatgaagggtttaatcgattagattgttatggttatccccaatataatcatgtaacgtgaatagaggtttgaagcctaaactttatatttgtttttggggtcaacagtgaacagcctaaactaatgaatgtttggttgtcacttgttagtgcttctttacatttctcagtttatttttgaattacatattttatttttcgaaaaattttccgaaaaatatttattttttgggaaacccggtcttcaaaaaat

SEQ ID NO: 48675 - DNA, 809 bp, Arabidopsis thaliana landsberg
  unsure (1)..(809): unsure at all n locations
taaccagctagaatttgtttttgtctttttcataaagtaatcaaatttacaatcttggttggtatagtggccctaccaaaaattcatttgccaaagcataagttttactattggatgtcagattataacctcggtatcaataaaatgaatatttcttcctcaaaaacaagacaactaaaattaacattaaccaaattaatctaacaaagtagagctagtgacaagtgagtgagtttaaataacctagggacattgcagttgaaaggtttccaccggaacttgagatagtcggagtcaggtctgccgtaagtctggcagtcgaatcccggatctatgattcctcggccgcattctttagaccggtaaagtgggtaagtctcatcccgcacccactcgccggcgaacagatcacaactactatgattcaccgggaaaaccacctgacttcggcgaggatgcttcacgaagttgctgtggttgctttggatcggccgccggaagagagggagaggtgaagctgacgtcgcgttttggagaagaaacaagaagaggaaagtgagacattgaacagccgccattaaagaagcgcttgaagaaaagagaagaaaagagagagagagaaacgagtaaagaagagaagttgttgttattatatgtttggcctttgcatggaacttactaatacgtaatgttttcgaggactccatcttttaaaaggacgaaaaatatggngtcgggttttaatttattttcttataataattgaatttaagtatttatgctttaccccataataacaacatttaata

SEQ ID NO: 48676 - DNA, 352 bp, Arabidopsis thaliana landsberg
  unsure (1)..(352): unsure at all n locations
tatccagtgctccttctcccttatcgtctccaacgcttggcttccaggctcatctatcccgcatgccgtctccatccatggccgatgtgtgcctcaccagccacctcactggtcgtgtgcgcgagctcctctgcagctgctcgacgcccctgctacctccagtccccgacgctgtcgtgggctcgccccaggtcggacctacgtcggccctgcccctgctcctcttcacgccggcgacaacacccagttagccatctcagagctcactccttgtctgcatcagcgcaaccagccatgccttcgcatcctgcgtncacgaatccanagccgtcttcactttcgtcggtcgatg

SEQ ID NO: 48677 - DNA, 864 bp, Arabidopsis thaliana landsberg
gtgtttgttttgtttattaaccagttgattttatggaaattaaaatctgaacattctgatttttggaattttaattgatgtaagtaaaatttaggggttgaaaatggataaaatagaaaaagtggggcaaaaagtttcaattatttggttgttaatatttgagtgtttgatgaggtgggtgagaaaagcagaggctacaaacacttgaaagtgacattagttgcttgagaattattctcttaatttctttatttatttggaacactactataattttatgaatcacttttgtataaattatattatatgaatttcagataagtttctcatctaaactaaaacggtttatttattaaaattagcaagggattacgtgaatcagaatggttttcgtgtaagggataataagggacatgtaattcatgtgatctttcaggattatgcgttccctaatgtaaaattttgtcattatccaaacatatttccccataaaattaaaactaaaactggattttattttcatgttcattgtctcaagagtttctagaatttccggtaataaggttttgtaattgcattctacatatagaactaggaaaaactgcatttctacaaatacatcatcttatccgagtaaaaataatgatcttatcctgtctaagaattatagttatcttcaacttaaatctgaaatagatatttcccttttgaaaacaagataaatggaaataagtaccatccttgaataattacaagatattaatgttgaaaaaggactgtaatttcaaaggacccgcaaaaggtcaatgtaatgagtaaatgagtaaggaggttttcaagttgggtgtcgttttctgatcaaac

SEQ ID NO: 48678 - DNA, 844 bp, Arabidopsis thaliana landsberg
tgcccatattatttattgttaaagagggtatgatatttagtctcacgacctttactttttgtttgatgtttttttttctagatataaagagccagcattttattcaccagttgttggatttccctaaaagagataccctttcgtgatcgcatgagagcagactggggagatacatatatggagtaggggcgtaggctgaagaagcaatagctagccacaataaaaagaagaacaataacagctacaagatcatcaagggatcaattatgaaccgaaaccaaattgatattctttagtgcctccgaacctcacatatctactgcatccttacgagatattttggtcgttgggaaaaaaaaaagaaaaaaatatgttttgatcagtttacgtgtttgtcggaacaatttagaactgcttttattccatgtttggtaaatatataaactcttatggataccaagaacttaacttagttttctcttatgagttctctaacatcgaattccacgcgacagtaactggactaatggattcattaatacatatataatctttaattaatctgagagaaatgtgttcatgatcaagacgagtagcgacagcgtcataagaacttaggtacagtcacatatttatagacttgcatgacgtgcttaatttgacgggtagttctctctctctatggcttaaaattaaattatatatcacatgaaacaccttttactgttctcttttgggggcatataatacatatcttactcattttcggaaggtcttggtagatacacacattccgctttcgatcgattgataatattggaccagtgtatgattaagagtaccg

SEQ ID NO: 48679 - DNA, 844 bp, Arabidopsis thaliana landsberg
gcggcggatgacatggcagaacttcactgtttatgtccttaaatgacgtttttaccccttaatatgaatttttggactgccagatttggttcttcaaacgaattatttattacttaaataactattttttatagaaaatttccttaatcaaagtcaagtaaaatactattcaatgatttcctctctatatcagagttgttctttaatttatttaaatgtttataaccttataacagtgtagtcaaagatttatcatatatggagctatgaacaggggtagtttgggagttatgttcagatgatagatatgaaagttatctaaatgggccccacgaggcatgtgggccggggtgagcgtaacacgcaaaaggagtttgtgcaacggtcgataaaactctttgccgcaactttccatgcttattagtgtgtaatgaataagacaaaaaacattagagtagtcgggaaaaataaaatattaaagtaaatataaaaaattgatgaacctcatatttagttcttcatttggctttgtttcattattagctctttttacaataagacaagtgaatctattttttttctttttaaggatgttattgtctttgaataattttaaatttgtaccctatttatagattaaagtattgattaacacttacaggcgttaagcactatttctacataaaaaaaatacactgatttgcatagaattctgtacaaacatacataaaatagaaatttattgccctatttggggatcattaaatgattcagggcgtaataacgagagagatgacaaacaaaggcgattatgacagctgacactaagaggcttgatgacaaa

SEQ ID NO: 48680 - DNA, 622 bp, Arabidopsis thaliana landsberg
aaatcacgcgggtttcttcaaagtgttccgcggttttgtttaatcgaaatctgtctagaaaactatcaagaacaggaatgagaaaaaaagattagagagggtagctacgaggaagaaggacggagctagagatctttacaatgtcgcgaccgcttctcttcatctccagtgaccgacccagagaacgacgtcgtgtcattactcataaccctaagatgttatacgatgtcgtttcggatggtcaccaaagtatacgtccgttgacgtcttgataaatttatttggtttgctcggtttagataaattactattcaatttttttggtttacttctctcattttagtagatctatgaaattgaacgattcgtaaaacgtaaaagcagacacaaatgttttattgaaatttttgataaaagaaattgaaagattagtaaaacccgtttggattagcagctatatctgtataatgctaatgcttgatgaccaacatacgaagtggaccatgatgtgtattaataactgtttattgtaacaaaaatagaaatttgagaacacataagttataacaagatcaaatctaaacttattggctggaaattagaagtctccagggtcaccgtc

SEQ ID NO: 48681 - DNA, 791 bp, Arabidopsis thaliana landsberg
tttttcctcacctcagtcacaagctccaatgctcctggaaatccaatcccagattctggcttcgcatactatataataagtaaagcacaagaaaatacgcgaaatcaaaacacaacaaagcacgagtatcaatcacattctctatcaataacatcaacaagttccctcctacagtgtttttctaatcaagaatcaccttatcgagatatatttcaaagaatctctttttagctgcatctggatcaaatcctttaacttctttgactgaagcaacacctcctaaaaacttggcttcacctgttaattgccaaaccaatgaaattaacgaaatcaaccaataaacaagttgattttccaaattttcaaagcatttacctgttcccataaaaggaacgaaatcgtccacagtgacttcaactcccatctccgtaaaaacatccacggcggcgcgtctagaaagatcttcactgttacaaagcacaccgtccatatcaaacagaaccgccgatactttcccccaatcatccgtcgcaattgtcgccgcaggactctccgccgccacactcagttttgtagacgactgaagcgccgtcgttttgcttaaataaacaccggttctcgatcgaaatccggtgaatgtggattttgaccttatcggaattaacgaagaagaagataatctccttgattgtgagaaaactgaaggcggagaagtgagtttcaaagccatttttttgctttggtttttttttttttctaggaatcgttttgaactgattggttgtgagttt

SEQ ID NO: 48682 - DNA, 1058 bp, Arabidopsis thaliana landsberg
  unsure (1)..(1058): unsure at all n locations
cgagagatacaacagtcccataaacagaatggtgaaactggatagatagagattacaacacaaagtgcctggtttcatatttcacaatgtttatgctttaagtatcaaaacaagcttctaaagctaaatccacattcacatatattttcgagatacaaatccgtaatcttgtgaactttaaacctactgatgtaaattcttcaacatcatctaaagatgtaccattccctataaccaaaatgctaagacgatgcaaaagagttgtggctaccttttggtttaactttcttctttttgcgactaatacgatttgcatgttctgcatctctagctgaagcttcattatctgcttctgtgcggttgtttagaaactccggtggccctgaaatctgcaaaattcaatagaagcaaagaatcattcactataagcttttcgagtaagaagtaaccaagccaacgaacactgaaaagttttcactatcagaagatctctttattattcaaaccccaaacctaacctagtctcaggattcctaaccctaaattccgatcacatcaaatctacagatccaagtaacttattttcatctataataaagaaaccattcaatctcacagcgaatctcctcaaggaaaacgacaattcgatgaattgaggtgtataaaatcaaaatcaaagagaaggaagacnnnnnnnnnnnnnnnnnnnnntgaaggaaggggggngnttttagcggaggaggcagatgcagagaaatcaaacacagaagacgattcatatctccgaacatcattatccccatcttcgtcggagttgtcgtaatccccaaaagctctctcctctgcttcttcttcttcagcagaagaatagccttgaagcagcgtcaagctcatgtatgttcgctgctccaaagatctatcggagccgcaaacaaaaataagaagaacctttctttatttatgcttgagccccttatattccttgataatcatatttcaatcctcggatcagaacccggctaagaacaaaaccggattatccggtttagttggtaata

SEQ ID NO: 48683 - DNA, 2212 bp, Arabidopsis thaliana landsberg
ggccgatactgtagccaggtggagtgaaagtgtgaaacataagccaaacattctatcaagttaacagggtatcacatgatgcatccaccaacaaaaggcattcattccatccacaaatcatccaattaagttatctcagctgcacttttccagtacaacttaataagtaacactgttttgtgacacaatagaagctaattcatagactaaaagcccagctacgtcttggtatccaaattttgatattagggggagtaattaaataccaacttcatgaacccatgaaattgaatctcaaagagcaatacaattacaataattcacccaagagagacaaataaaagatcggtaacaaattaggactgcagtatgacatctaagctgctattttattcaaacaaataacacaatcatacctcatcatttaaggaagcaaaaatggcagtcaaactatcagcctgtgctagataatcatcgaaacattggttgccaaataaagcaacgaatatagatttgcgaacagttacatcagcatctgcaacggctgtcctgagaagcttttccacaatctgcagaacccaaacatcatttctcagcaagcagaaaattggaaccgccactggtattgcaattataaatgccatcacgaagcatgtttaacatacttaagttcagatttggaaaataataaaaagaaaccttttgtaatgagaaacagtgaaattaaaagacataataagaaaaaaatgtaatgggctttcagtatgatataaaacctcttccacaaggcgcctgcgtctcccccctgctcgtgttgacctgctcgagccaaattgtgtgatgccagaaagagaatttgcaattagtctgcaacaacacaaagcagcatcttttcttgtggctgcatcctcatcatccaaataaacaacaactgactcccgagcaaattcaagaagatcatgtccctgccagaaatcagaagctcaaagacagaaatttcatattctttagaaaatgttatccgcaaagagcgccaaccttgaaattgaaacgagcaagagtctgcagggctagttgaacttgagctgaacaactagggtcagaagactgtggtgccatgcccactgtactacctcggacaatggtaacaggaggctttgcttgagaataatgggattttgaaagaaccaacgaaatgcaatctagaagccgatcttgtactgttggcagcaaagaaggaatgctgagatacaaagaattgtcagcattaaacgtatacacatcaatgtatgtaataacaaacttctttcgttcaactttacctgatggttatctggtcaagagcgtcaacaagtgtggaagagagactagatgaaaacataacatctaaaagatctcgaacatgagtttccactgtggatcccattgcctttgcgatgttaccaacacaagccacagcttcaagcaaaggtctgcctttacgtggagcaatctacagggacaacatagtcgaacaaagccacttgtctagttcagttttcaaaactaaaacccaatataatactttgacacaaaagtagtaaaacgtaattacaaaataaataaataaaatttgacccaccgcatcccgcagatgagacataattgtcggcaaataatggataagctcaccatccaaagcaccagccatttccccaagggcgatgaacccactggctctttcagccggtattcttaacacagtaagaatatgattcatgcatatctgcaagaaagtaattcgtgtcacgtttccagaaattttttggttttaagaatctctcagtcacttaccgttaaatagtttgtcacaaaccggtcacggagaaagtgagcaatgcgaggcagtaacgaggtgatgctaaggcgaacaaggcgatcacgatgttcaaggtatctgaggacaatttcggcaacttctctatacctagacatcatgaactcacctgtattcctgcaaacgaactctagcattaagctgtaaactctaacacccaatatgccatgaaatcaatctgcttataacagaaaacaacgtaattttcgtcgtcaagagtcttttgttcaggtatacactgagagtggaggaatatacatgaattgcctacttttttaatgatgtaaactacaatacgaagacaaactaacaaaacaacccgagcatcatggggac

SEQ ID NO: 48684 - DNA, 814 bp, Arabidopsis thaliana landsberg
taatataaacttaataatgagaagaacatgcgtctacaaatgtattctttatactttaacaattgttaagtcaaagtattttcttacaatttcaaattacgaataacaaaacaatcatatgatttttggggaaattttgaaaactagctaatgaaacgaccagtcgtcgtcagttccaacgaattcaaaattggcggctaagaatattacgaatcacaatcgtttccattttgctttttggggaatagtatataaaaggtacccaacatttttaactatttgttcagattttgaaatgaaaattccaaaaggacaacttaaggtttcggccgattatttccgcaacctagaaaccatcgtagataacaacaaacagtttccaaatttcaaccaatccaagccttaaaggaaaacagcaagcacacctaaatattacaacatcaagaaaatgcatacaaaggaatggacgactcatattttctatggggacagggtttaggcttgcattaaggtacgtattttatgtttatcatctgttcgttacccttaatttaaactattacgttatcggttatatatagatctttcctacatgcatatacggaagtggatcctcatgaaatctcctcatagacatcaaatttgttattcaacgtccgctgaataagttcattgaccagatgttaaagaacagataagaattttccaacgcaaaaaacaaataatgaattgataataatcatggacacactcattaaacttaaaatgaaagttttaaatgaattaaacgtattttatgaagcgtgacctgtct

SEQ ID NO: 48685 - DNA, 366 bp, Arabidopsis thaliana landsberg
ctgagcaacaaagtgagttttgattcactttctttaaattacagtctaaacgatatggagagactaaatatcaaacttgtcacaggacttctctgtggagcaaaccggtgttcacgtccactgaagtgtacgctaaagtatttactctacaagacaaggtaagaaaagagaatggctacataaaaaaatttcagtaaggtggagggaaaaggttttgacatttgggttaaaattgaattataggtcacaaaggtgaataagatcccaaagccaaagccaaagatagagaaagtaaccaagacggagaacacaacaaaggaggaggaacaatcaaaatcctctgatgaagctgccaaagaagaagaa

SEQ ID NO: 48686 - DNA, 657 bp, Arabidopsis thaliana landsberg
aagaacagtacctgctcacaaacatgttttgcatatttcaaatcatcttcccaagggcactgattccagaaattctcaaagccttcctacacaacattgaaacaatcacaaacccatatgtctatggttccaacaagcaattacgaagaagaagaagaagcacacctgaaaccagattttgagatagaaagcggtacatgagtgaccagcggcgtggaggagacggagagcgacactgctatcgacgccgccactgaggagtacggcgacacgaagaggcttctcaggcatggaacatgagaggtattggtcgacgataaaggcatggcggctatagttacggttcgaggatatgagaggcgtgattgggttagaagattgtggagacggcaattgagaggaagaggaggaggagaagaatgaggggaaaacgcggaaggaaattgagatagaggaaagaggaaggcgaaatagcggtggtgagggagagaggaagggtttggcgacggcggagaacatcggaattcgccggcgattgaaccttcgggtaaaaccggagggtttatcttatctgcactgttttgctttataagacaaaaacctcgaaatgacatttttatgttatcatttggttcggttaaccaaaaagaaccgagc

SEQ ID NO: 48687 - DNA, 1010 bp, Arabidopsis thaliana landsberg
ggtttctaatgaactacaacgaacaagaaccaaagcagtactacgtggatatttgatctatatatttcatacataccacctaaatagctaaacgatcgataacttgataatgatcacacacatacaacaagctgaattagagcagaaattctctcaagttaacttttattttattgtttaaaccaccaaatacccttaatagcccatgggcaaaccactaaataaccttgtagcccatatccaaacaactgtcttttcctttcacattcgccggagttaatgtgtattggtaaccccaattcataacaaaacaaagacgggcgctaaaccctaaaactaattaaggctcatcgctatatcaacatcttattctttggtttaaccacttaattgcacaaccaccaaaaaaacgatccaaaactagttttactgagagctattcttgagatgaatgacgaccacacttatattatcactgctttgtctacccaaagccaaccgcgttagcaacgttgcagccaatacactccttgaaggattttgttctccgtcattgtcgtcttcttgagccattctatttaaatcaaggctcgagggagtttcttcgcggagacaaaacctagctatgtcacaagctagctgactcgagagtacatcccaaagcccatcgcttgctaatactaagcattcatctccagattcccttctcatgaatgttacttctggttcccatgctaccattggttttagatacctgtcccctgctccatgaattgtaacacaacattaggaacaatttccatactaaaacctcatgtttagtctaataaattgtataaccgaaataaattttaagttggttaaatgatcaaacaatgaaagatacaaagataaaacacatttaaatacttttgaagttaagaaaaatacttctcccgttctaatccatgagatggtttgtatgaatgcccacattttttggttttcgtaaaatgattcaattatttttg

SEQ ID NO: 48688 - DNA, 1139 bp, Arabidopsis thaliana landsberg
agtttaataatcattacatagaatggggactaaaagagagcatctcaaagctggtggctatcaggaacaaaaatgggattggtagcacaagctctgtaacgataaaagcggcagaggcggatctctacttggctatgattgatgataaagttatcatgaagattggaccaaagcaagatgtgggaacacttgttccttctaattttgctttagcttattcaggccttgactttgctgtctgggagaagaagtaacgcataactcaaatcataagaaaagtaatcgaatgtatcttcttcctttttaataaaacattttggcagtatctaaagatatgtataatgaaatataaaatgataaagaatacctaaataaaaagagcactagtggtgttaaaggatacaactccagtgaaagaaaagagttcaagtgaagaagtgtcaacttgtagaaataagtattggaaagtttccatcgttttgttttgttgcatataactaatatattatatattggccgactcgtataagatttggagccctactaaaatcagaattatgatgtcttaaccacacaatactgccaaaatcagaacgaattatattattgtagaagaagaaaaaaaaagtatggtgggaagtgggaacagttagacaggtaaattcgaataaaacgacagcgtttttggctaggacaataaaagttgaagacgtcggcttgagaagaagtagaagtgacgacgaaaagaaaggggaaaaaaaaaaggaaggaaaaaagtgaaaaccgtcggcttgagaaggaactttgatatttggtgactcttgaaaaaagcaagctctttcttcttccttctttcgcttttttcacacctcaaaatcaaagatccgaaacacgattccggaggaagcttcgattctgtgtgtttgattcttcctcttttttgttttttgtttttttgttctatcccgtttcgaagcgagctctgattctcgttcctgtctactttttttcagacctattttcagatctgaaatagttgtgtttgagaagcgggattggtgatcggagctggaatatggttggtaatcggaggtcagagagaagtcaacggatatgccggaggaagaatcgatagatat

SEQ ID NO: 48689 - DNA, 192 bp, Arabidopsis thaliana landsberg
tcaccttacgaaaatttgagcatgaaaaaagcttcatgtggtgtaaaaagggggaatgaactattatcattttatagcaaatatgtttttttgtgtcttttaataattaaatccacatattttatgatgggggaccccaatcctaaattgccctaatatatgattacactgtagactcttgtaaaaagtaat

SEQ ID NO: 48690 - DNA, 830 bp, Arabidopsis thaliana landsberg
aaacgggaaactaacggtgaactgtgagaatttgataactatgaaatgacgaagaaactgaagaaaatatgtaaacatattgccataatcgcagctcagcccattagggaaccagagcaaaaccgcaatccgtttacaaggcgtgaacccaatagagaaccagagcaaaaccgcgctcgggttacaaggcgtgaaccgagcagagaacccgagccaaaccgcgctccacttgcaaggcgtgaatccaggcctagagctcactctcgtccgtccatacctcacgctcgtccttcgagagttcgaggcgaaaactcggatggttgtatcatcatgtaattgaacatatcttttgtccaagttgttaagtatctcttaagagtaaatataaaaaaacagtttaaggtagcctttggagcttcatgcatgagctaccgtaccctactgatatattatcgcatcttctagtttccttatttgtaatatttttgtggtgtttattaaatattttcgtttcctttttttaaattcaactggtgattgagtcatccattgtgtttgttcaatagtgtcaaattaaaaaagatttgcaccctttctttttgggggtaaaattttaaacatatttaaaaaaggttgagtttcacaaaaaggttatcaagagttttgagaagaataagagacaacacgtacatacaaaagtagaagatcagtaaaacctagcggttaattgttgtaaagctaatctagatatgtcaacatataaagctaaattatacgaggtcacgtagtatggtggttttctagtttaccaggctttcagtggacaagag

SEQ ID NO: 48691 - DNA, 806 bp, Arabidopsis thaliana landsberg
attcacacgtgtgctcaatttatgtttcttttagttcttccacgtgatttgatgcaagaaaaatgattagactgtatgttaaaaagcatactagagaaattaattataaaacatcaatcagttgaagtaattatcaaaaccgcatgcttttttagctaaatctgtgattgtactgacgcagatgcataaattcaaacgcaaacgctgatctctacattagccaaacaagaatagcgtccaaatttacgactggtttcacgtgcaccaaaccgtagggtataatatctctctctcactctccaacatccccactcttcccaagaaacttctataactgcatcagcccactctctagtctctgactaacgaacttccattttcaaaattcgaatttctaatttctagtttcaagctttcgtacggagaaaaaatgaaggagatcgcgatgaggaattcaaagcgcaagcctgagccgacgccgttcgccgggaagaagctccggtcgacgcgattacgccggaagagagcacagatctctcccgttcttgttcaatcacctctctggagcaaacaaatcggagtctctgctgcttctgtcgattcctgctccgatttgctagctgatgacaacgtttcctgtggttcgagcagagtcgagaagagctcgaatccgaagaagactctaattgaagaggtagaagtttctaaacctggttataatgtgaaggagacgattggtgattcgaaatttcgaaggattccgaggtctccctctaagccacacaaggagaaggagggagataaaa

SEQ ID NO: 48692 - DNA, 504 bp, Arabidopsis thaliana landsberg
tattataaaaaaatctccattacagaaagaataggtagagattatggtacacttttatgaaattaaatttaatgtatttgtgttattttaataaatatttatatagcacggtactaatcttatcattttacatatttgaaagtaaatcatgattcatgaggtaagatgcttctagctggtatccatatacccaaagcagaaatatcacaaatttaaaactctagattacgtaaagaaaagttatgtaataatataaaactctagtgtcggcaatgctttaacccacgtgggatttaagtgtatatgaaatattataatccatttaaacaaattgtgacgaatacccatatcgaggattttcagatccccatcacatggctaatgagtaatggcttgccagtaagattcttaattacagaagacacggaaaaaaaatatttcccttacttatatatgtcggaagaaaatctcttaatactgtatacattagctcgttgatatctt

SEQ ID NO: 48693 - DNA, 1597 bp, Arabidopsis thaliana landsberg
aatctaaccaaaggcattgtgcattggggttggaggtggtggattgctaagtttcttaaggctacagttagggttcgaagttacaggcgtagagatagatcctgaagtcttgaggattgcaaggcaatacttcgggttagaggaaagcttagctcgtgttcacgttgaagatggtattgagttcttaaagagactttctaaaagctgtgatgatgatgccagatttgatgtcttgatggttgatctggactctactgatccaattcacggcatgactgctcctccggttgagtttgtggctaaagatgtgttgctagctgcaagaactgttcttgttccttctggggttttcattatcaatgtcattcctccgaacaagacattttaccaagagcttcaagaccagtttagacatgtctttgccgagttgtatgagatcgatgttggaaatggtgagaattttgttctcatcgcaaccgttgcacctagaaagagcggtttcaacagagagaatctaacacccgctgtctcgggaaagtatcttgatgctatacagaaaatctgaatcattgaaacagaagttttcattgcaaactttaaagtttagttattgatccaatatcaagagtacaacagaacagatttctattcaaaaaaggttatcggaaaagtgttgttcagcttcagcttttagtcttcttcactaaacttgatcctcttcgggactggctgtgtgtttccaacctgaagcagtgacacaaaacatgcagttattagttcaatgttgaagatgtagtgtatagaattgtgtaatcggaaacttacaagctcagggcattcgtattctattccagcggctacgattctcttcctccttttctgatcctttttaactatcttctgcaacattttcctatgctcttccaatgtcctttcctgtatacaacagtgacataaatcaaagttagagccacttgttcaagagaaatggcatattgataacaagaaaagtggagagaataaccttattaagttgtcttcgctcaatctgaaccgaatccactggtttgaagttacatttaaaccctctccacctataacattcaggacatagatacattaagatccacaactacttgaaaagaacaattctcaaaataggtcatgcatgttctcttctggaaacacttgagagtctcgcacatcttttagagtatggagtcattagaaaccaaggtaggggacaagaatcacattttctttaccctaattttatgactcataaataaaaccatctcagccaagaaaacgatctttcaataaactctcttttatcctcacttattttatcacatcctatctagtatcatcctatgactcaaatgtcattaagtctcactctgtaaaccatagaacattgtacttcaaagcttgcgctaaaccacacgagatagtatattgttatatagagctctttcattcaacaatatagcacaaagtacataagcagccaagtaaaatagctaacctacacaattagatatgccaactaactatttgcaaagaagatccctgatcactacgaaaaaaagtcgat

SEQ ID NO: 48694 - DNA, 397 bp, Arabidopsis thaliana landsberg
tcgcattgacccgttaattcgctcggggaatgatttggtattggtattgctgctctggttggtgtgcgcgtgagtgagaagagcactgagttagtgtactactaccacctagacagtgggaccctacaagtaatgttagtagttgtgccaattagctagcctgcgtgatacgcactaccaggcaccagcagcaatcaactgctgcaggtgggttggtagggttcctggccgagtctccgttcgtcgggcgtaccaaagcaaagacacctaactctgatgacccggccgagtgacctcaagtttggccgcatgcgctcactacgctggggcctggcctggctacactggacgagcaccttcgtctcctgataccgaatctcctctctcccactctctc

SEQ ID NO: 48695 - DNA, 898 bp, Arabidopsis thaliana landsberg
attagcaaaccgaagacgaatagaatcaccttgtccaagacagttggatcagtagcacttgcaagctcaagcaaacgaatgagcccaacagcgaagaacctgctgtaactaaacccctccttactaccagctcttcctgcaatgtccttaagaactgcttcaatatctccttctttagaggaaaagtcaactagtgaagcagaagtctgacttcgtgcccattcctccatcttctgagcatcaattctgtacaaaaaaagttatcatctttagaaaaagacattcaacaagaagacattcattatcaaggagaagatggaagcaggaagaagcaaaccggtattgcttaggatcctcattcaaggcttcaatgtaagccttaaaaatggcatctcggtcttgatcactcggatatccttccatgagctgatcatatacagtgacaaatccaagggcaaaaacaggatcataacgataagtcttcttatacctcatcaaatgctgctggacaatgagctcctgcaaaaccgtgttgtagatactcgggatgggtcgcttgtaagcttttaggaatttcgactttgtctctgatacaggaggcacatctgaccaacaaaaccacaagagagtgaatgcagataaagtcagagcctttttcaatacaaaacaaaggagaatgaattgtgaaatgcaatgtgaagttcaagaagagtcaccggcggtaacattggacatgcagtgaataagagatttcgaagtggaacgcgaattcaaagaaaggcgagaaaactttgtgcagatgcgaattgcggaggcgagaggacgagaagatgcgaaattggagatcttgtccgattggacccaagctgggaagggaagagaagagattgcagttgca

SEQ ID NO: 48696 - DNA, 558 bp, Arabidopsis thaliana landsberg
gattcgtgtctccataagctcctgagtgtatccagggatacggccgatgcctgtccaagattagtctgatacatggccatttaatttttgacaaacctcattggcgactaaagcactaagtccggcatgcgtcgtagtcgtcgtaatcatgataaaatcagacccttctaatctattgatttgcagctgctccaacaaggcatcgggggaatagccatagttatctgcgatttcccgaatcaaccggtcgtcttttcgggccaggtcaagtacggaaaacgaatcagccttatgggacaacgctgttattaatccattcttgcctccaggatactgagtaatcagttccgccacacgagaattctccccttcgtaaaaaggcatatttccctgaagatcatgcaatagcaatgcataggagacttgatccaatacttggttagactgcaaagtctggatcacattattaaataatacaatattattttgtgctcgggtgtcttgataaggggatttactttcatgtaacccgtggagagctcggctacagaggtatac

SEQ ID NO: 48697 - DNA, 1994 bp, Arabidopsis thaliana landsberg
aaaaaacaaatttggactggaattatgtgcataacaactattttgtgaaagataatccaaagtaatatgggaacttatttgatattttgcatcactgagttttggtattagtacaacttttggtttcaaattcaagctcacgataatatgttaaatatagttcatgttgcactacaatccagacaaaaaaattggttcgagttagatacggtttcaatttaatatctatagattataaaagaagaagttaaaatacagaaattgttttcaaagtagctatcagattaccaaacaacataaagtggcagatcttcaatctgcatataccaaagtcattttctaaccaattgagtaactatttgtatatgttcaagggtcatatgactacgtataccatttaatattatgttattaatcctgttgttaggggaagcaagaaagatgaaaactcaatttcatgctatgcaacaaatcatcaacacatcaagatgttcaaatcagtcaaaaggtaacactaaggcaaatgatatcctaaacccgtataaatctcaatgtttatataagatgtgtataataacctcttgtggtggcatcaatattcaatcaacaatggtgataaatgattgaaaaaaaaggaagaagaagaatgagaagtaatggccaaagtgatatacaactaacttttactaaatctacatcttatccgcgatttttgccacagcatcagcgagcttattgagaacagcgactaagctatcaccgtgatcttttctttgctctctgtctagttttaagtttaaattctgaacctcaagctgtgccgccaacaactgcccgtttctttctagtatctctatcaactgattctgcatcttctttgtttctccttcttcttcttcctcttccttttcaccaaaagatgtccgtttacgcttcctctcttcttgtgatgtcgatccaccttccacgtttgctgcttctggctgtttctctttcactctaccttcaagttcaaactcaacattttagtataaaaacaagaacatagagacccttcaacataaacgaaaagatcacacaccatagggaagattgttaaactacttttataacacaatttgagatgcattttagaatacgaaaacatcatttatctacatgacaacataactacatagtcaagactcaagagaaacacactctagagctctaaaactagtttgagattagtatatagagcaatagatcaagcaaatacacacagagagataaacaaaccttgatctgctacacaagcttcttgcttctctttgtctataacatcttcatcaaaaaaattgaacttcataagaaatggaatcattctgatgaacatacaaaataaaaacttaaactttgatctgaattttaccagtaactgatttagccaccggagtagaattcaacttctcaggactttctctccgatctaaatcagacaacaatccctcgtccgacgccggagccaatccaagcgaaagaaccggaaccgccggaggaatcacaccaccgtcaacaatatcataaacctccttatcgaaaaaaccaggaagcttcttctctctacgaacatcattcctcataacccaataggactcagtctcttccttaatctgagactcccattctttaatcttcttataatctccggcgagattgctccatcttttccggcactgaaccggcccacgatttacaccgtgacgtttacagtaagacgaaacagaagcccatttaggctccatttgacccgacccgagagccatacccgccgctctccctcgccggactctgttctccgccactctcttcccttgaatcagaaccagaatctcttgtctcgtccaacgaggaagtctcgcccgttttaacgccgacatctccaccgtcattttgacggcgcgctactgttttcttcaccgtcaacggcgcttacttctaatcctaactgttcc

SEQ ID NO: 48698 - DNA, 411 bp, Arabidopsis thaliana landsberg
taaaatcctacccaaaaattccatttcctttagtttgacgactttactttggttttcaaattataacccaccgatcaaagtcgacttcaaatcagacacaatcttaactaaactttgtaaaaaaaaaagtaaacaggctaactcaacaagactgtcaccaagaaaatctgacggacgaatcacaggacctaatccgttgcaacaactgaggactttgaccactactactagagaacgagtacatactacttattgtccactgcgccacatctgataactgctctccccactaaaccctaccacacacgtacctaatccactcatactctaatcttaaattcaattccacgaaaacgccctccaaattataaataacgccagcgataatctctggcattgactaatataccc

SEQ ID NO: 48699 - DNA, 532 bp, Arabidopsis thaliana landsberg
tctgctttggctgtaaaagatcgacccgaccctctttgtccgatttccgcataatatgatcaacggcatcttcgtttacaaatccatggcgacttgtctgtaagaaatcgggagggataggggcaaaaaggaaaaaaaaaagagtaaagattccactatcccagaatttgtttgggactttgaactgcgggaatcgaaaacgcaacctttctactacagtgtcacaatgtcatatcatagaacaaaaattagcttatttttgttataaaacaacattatgtttcaattaagagaaatctaagactacaataagagaacttggtctacaattgcaatattagctctcacatcccatataattttaacatgataattattgatacaattctctgtaaattttatccacaaaaatataacccacaaagaataatgagatcaaagccttgcatcaacattaaaaccaccaccacctcctctcttgatttctgttgtgttcttcaaaacttacccacataaaaacataacacctcaa

SEQ ID NO: 48700 - DNA, 366 bp, Arabidopsis thaliana landsberg
gaatatcctaataacatgacgagggatacgattctgtacttatgttaatatagatgatttttattgaagcgagtctatagaaaccttgtaacggttagctatgaaacccggactcatatagattttacagctacgcctttggtagcacatagcactagtcacgtctatgtacatcccagcccttggtagcactaacatcgatgcttcatcctcagttcaagaaccacaccgatgtgctcgcattcggccttagcatcgccgccgagcgtctaccgccgtcgcacgaacttgaggagttggacacgatcgacaggaactctcgtggtccttgctcaatgggaaatcgtcgtcatcgcgttccgggcc

SEQ ID NO: 48701 - DNA, 178 bp, Arabidopsis thaliana landsberg
aatgttgcgctcacccacaattcaacgtaagcaatgtttttcaagaagagtggaagagttatacgaccaggtacctctttatccgcacagcatctcgattagtcaactatccttgtcatttttgtaaaaatatataacggggttttattctgaattgatccataaggcctgtgacttt

SEQ ID NO: 48702 - DNA, 560 bp, Arabidopsis thaliana landsberg
ataaaactattgtgaaatggatgacaaattcagtttcttctttattttttaaaccctaagtttaaattctttgagacagaaatcgtagtatttgtaaaactgttattttcttgaaatataatttaacgttacattaacaaataaaatggatgacatattacttaaaatttagattaccaataaaaaagcataaattcttcttttaaattgtaagatttaagtcttcccctttacatttagcaataaatagcttgctgcactggtttaaatgcactaatgcattgtttactgaattgccttttgtttcatatatttgtctctactatacttttactaactttcccacctccaattaaaaaaattattacgaaataaacaaagtcatatctctctccacaacataattactttattcaacaaatattaattcctagtcatattttagctcctcttcttccttatatattacatacatacattttctttagaagtcattaccatcaacccatcccctagaaaaacacagagaataacaaatacaagaatacaaaaaccctctc

SEQ ID NO: 48703 - DNA, 604 bp, Arabidopsis thaliana landsberg
caaaaaccaaaactttatagagttcaacgtgatgatacaattatcaacatttgcattgaccaccaccacactaaattttctgagcttggcgttagcgtcacgtcgagttacggtagggtcgtgtgtttgacgtgagtttgagatttattttttgtttattttaatgtcatttgtttttcaaaacacacaatttaactttgctaatttcataagagtatacttatttcttatctctgatagcttcgatagacttaccatacacttaacacgtaattaccgacagctgatattgctttataacaatcctctctctctttttctatgacgtcgactaatttaatttgcatagtaagttttttaatgggatcacaccactatccaaataacataggttatctagttctgttatagaaagttactgaatatatctatgtcaaatcaaatgtatgcgttggaagctatagtttttgtatttctaaaattagcattggaccacaaactccccaaaacaaataaaacattgatgctttggctagaattttgtgatctatcttatagacttgtacggttatatataccaatcatgttttaacggaattgccga

SEQ ID NO: 48704 - DNA, 442 bp, Arabidopsis thaliana landsberg
tgacacctatgggtcaggtgagctaagactcacggtagagcaaaacatcatcatcccaaatgtagaaacctcgaaaaccgaagctttgcttcaagagccgtttctcaagaaccgtttctcccctgaaccatctatcctaatgaaaggcttagttgcttgtaccggtagccagttctgcggacaagcgataatcgagactaagctaagagctttaaaagtgacagaagaagtagagagacttgtatctgtgccaagaccgataaggatgcattggacaggatgtccaacacttgcggacaagtccaagtagcagatatcggattcatgggatgcttaacacgaggcgaggaaggacagccagtcgagggtgctgatgtgtacgtcgggggacgaataggaagtgactcgcatatcggagagatctataagaaaggtgttcgtg

SEQ ID NO: 48705 - DNA, 559 bp, Arabidopsis thaliana landsberg
agatgtatcaaggatcaaacacacccgtgccccgtgagccccacgcattcggtaaggatctaacgagacaagcacggcatcccgaaaaaaagaaagtatttaaacaactttcggtgccgtacaagacgccgagcggaaagaagagggagagagagagagggtgggagagcaggagacgccacattccgcagcgcaagtggggtggcgccgggaacgcagcacgccttacctcctcgtcggggtggttgtcggcgtcggagccggcggagggatcggatccggagccgggcagacaaggatcttgaggcagccgttcttggaccgcgccatggagcgggctgatcgcgaccgccgccgcttcagtcagtcagagtcaagtggccaagtgctctgctccgcggacgagcgcgcgtgcgtttctggagcctgggtgcggaacaggacggcagtggatggccgctctgctgcgcgtctgcctgcttctgcggcggcttgggttgttcgcttgcgccagtgcatgtgcagctctggagggggtttttatatgtttggttggagg

SEQ ID NO: 48706 - DNA, 569 bp, Arabidopsis thaliana landsberg
cgtctgtctgactattttaatttaattctaataatttatgaatgtgactagtttggcttataggcaaagatcaatttttagaggggggttattgaatattgtattctaacggaattgtatgtattttcaaagacacggtgacatccactgtcattcaatttctatttgattttgttacatttgagtttcaatgtatgattgtgtctaaatcactagtaaaacaaatacgagccttttatctctgattttgatgtatttctcataataattataaacaaaataattattcccaaaattgttttatgtctctttcatctaacatagagataaagaatcagaagcattttgagaacaatataatggcgaagaaactgcaagatccaccgatggcatcttcaaaatggagacttcggctttggaggaggaagatcgtattttaagaacagaaattcgatcattcatccagatctgatcccttatgttgcagttccactctcttttagtctttgcatatttgccatttatgatgcagtgactctttgaacatgattgtagtcaaagagactcag

SEQ ID NO: 48707 - DNA, 561 bp, Arabidopsis thaliana landsberg
  unsure (1)..(561): unsure at all n locations
agactccgtctgtagccgatgggatcagagtggaagtcggcgctgatcgtagaatgctgatcggtggattcggatggtatatggctctgacgcagcggtgattgannnnnnnnnnnnnnnnnnnnnnnnnnnnnnnnnnnnnnnnnnnnnnnnnnnnnnnnnnnnnnnnnnnnnnnnnnnnnnnnnnnnnnnnnnnnnnnnnnnnnnnnnnnnnnnnnnnnnnnnnnnnnnnnnnnnnnnnnnnnnnnnnnnnnnnnnnnnnnnnnnnnnnnnnnnnnnnnnnnnnnnnnnnnnnnnnnnnnnnnnnnnnnnnnnnnnnnnnnnnnnnnnnnnnnnnnnnnnnnnnnnnnnnnnnnnnnnnnnnnnnnnnnnnnnnnnnnnnnnnnnnnnnnnnnnnnnnnnnnnnnnnnnnnnnnnnnnnnnnnnnnnnnnnnnnnnnnnnnnnnnnnnnnnnnnnnnnnnnnnnnnnnnnnnnnnnnnnnnnnnnnnnnnnnnnnnnnnnnnnnnnnnnnnnnnnnnnnnnnnnnnnnnnnnnnnnnnnnnnnnnnnnnnnnnnnnnnn

SEQ ID NO: 48708 - DNA, 992 bp, Arabidopsis thaliana landsberg
  unsure (1)..(992): unsure at all n locations
aaactccgacccttaactcggttactcttggtctcgaacttggttagcattttcacagattacgaaacagaaacaagggtacaggaaccagatcaacagagaatgaaaatcatggagaaagatcagttcatagaaatcgaaaaacccgcaaaaggaagaaaaaaaacgtaatccacgtgaaattgaaaacagatctaacgataagaagcagcaagatccgagaaatcgagattcgtacaatgaagaaggagaagaaatagagattcacctcagatcagatcagttcacaaggggaagcgatcaagctcagcttcacggtgacgatcagtagcattaccagagaagcgtggatgcgagagcaagagaaacacaaggatcgtctagaagaagaagaagaagaagaagacggtgagattcagtttcgtcgtatagatctgaatccctccgctcagttatctctgtctccaatttgcgtctcgctaatttaattggcatgaattactcatttttacttttattttatatggaagcatcaactttacatttttttattccaagataattaaaatctgtaaaattttgactacagagcttcatatttttaaatcagataacacttcaaatgctcaatcaaaaaattattacatgagagaaaacaatatattaattggggttattgaactgatattacacaaaaatgtatagataaatacatgatttacgacattaaccctggagtaatttcataatttcattagccctggactcgannnnnnnnnnnnnnnnnnnnnnaattcgctgctggtatgaacccccttcctggtatgatcagaatagctgtggttagaatgatgaattttagaaaacaatatctggttaaaaccccaacccaaaacccggttagcctcgcattcactcctgaagagaataataacaatgcaagcaaatgtgtcatggtatgttacttacagtgtcgatcagtgtgcgctcga

SEQ ID NO: 48709 - DNA, 1004 bp, Arabidopsis thaliana landsberg
gaacaacatggatttagtgatgaagagaaggagacagaccttcgcatttcgtcgactttctctgcaactccggttgtgtctgctcccatcctccaccggccaataccaatttcagtctgagggtttctggtttcacttggtttttgtccgattcctttttttttttgtgtttggttttgctataaatacagtatttatgtaattaaagtaaaattatggagtaccaactaaaaatgataaagtgatgtcatttttatgaaaaccaattttcatgaattttgaatgcatataaaaatatgaaaaaaggtcaaatataattcatattttagttattgtactctttatctacttcatatctaaataaaataaataaataaaacattaaagtatacattttttgagcaccgcataaatattaattttattttgggtcgccgcttgattttctggtggggaagtcgtaatcgttaaattagggtcttcccttcttcttcttctacatctcgtcagccgtttcctacggaggattccgatcgatcccttttctctttttttttttttcttctggtcaccgaatcattgtcataccccactttgagctcacaactcttcttcctcagattgcttgattagggttttcttctgcttgccgaattgatttccaaggaacaactttttatttattttcatcacctaatctttcgttttcagattccgagtatccaaataatatttttatattttctctttcgccgccatgagttcctcgatccagatcgttgttgaggagaagcaagtggatgttttgcctcttcaagatcaggttttgcttttgtattgtcccttatgaatcattgaaattaatctgcgatatctaaaatggaagatgaagtttctgttttgatttgtagttgattccctccatctttagctcttgaattctgaattgatctatgaaatgttctgagaaatagggaatttgcgaatgtcgcttctgatatctc

SEQ ID NO: 48710 - DNA, 702 bp, Arabidopsis thaliana landsberg
aacattatttttggttagatacaattttatatttaatcaaaaaaatatttatttcttaccaaacattacattcctatataaaaaacattggaattatcatcctcaaactaatacagttgcatttaaatattaggaatcctataaaataaaatcgtctcttctttttttgtcaaccataagatccaatgggtcgttatatacgtaatcactaaaactaaaattccattaaagatattaaggagaggagactgaattcatagcaataacaatagaacaacaagatcacaactatacaactcaagagcttaaaattagcataaaaaatagaaaaactgcaaatataatacacttagattcaaagttcaaacgaaaatatgaagaagtaaaataaaaaatactctcaagtttagactttaatgggacaaatctaactttttaaacaaaacccacagaatctcaaaccagttagcaccccttgtttcaccccacggtttgtttaacaaacaacagccaactaccaatttaccattataccctcatcactctttgactatttattagcccacactatagtagttaatttcagtgacctacaaagtaagttaaagtcttctctacttcaccataaaaaatgcttacgcacaagtgtcttcttttccccaccacccaatgggctacactaatgccatcttcgtgtacttt

SEQ ID NO: 48711 - DNA, 360 bp, Arabidopsis thaliana landsberg
ggttactaccttacgattgctttcttcatcttcttctgatcaaatcaatcgccttgctgtttccgtcgagggaccctacggccctagttccactgatttcctacggtaattcacttaaatcacaaacagagaagttcaacattctgtttcttccgacacaagtaacattgatgctctgtttttcttccaacacaagtaaaatgctctgtttttctttaagtgcagacatgaatctctggtgatggtgagtggaggcagtggaaatacaccggttatcttcattatccgggacctttttttcatgagttacaccgcacaaatgtaaaatccccaagatgaccctgatctgcgcgtaaaaaa

SEQ ID NO: 48712 - DNA, 170 bp, Arabidopsis thaliana landsberg
actgcctgacagtaagaagtttctacgttccactatatggcaaggctttaaatcttatgtgcataatccattttttcaaccaaggttgggatcttgagctagccgtatgcaccgcataactgcctgtcttcccaagctacgaataggctcaccaacactgcgagcttgaa

SEQ ID NO: 48713 - DNA, 765 bp, Arabidopsis thaliana landsberg
ctataaaacttagtaagtcaattttcagaagaaaaaaaagaacctataaaagactaacgaaagccgattatatcgaagccattacgagccacatggtattgaagattaattatagagttgaatagtcgatgtcacatgctttgactgtctccttcattatagatatcgacattattattttattattaacatggaatcgtatcttaacttttccacgtaaaacaatatttaatctctttatgaaagatcatgcacacactaggaaaactatataagtgatttcttatatggtaaaccaactttgaatgtaggctaattagtttattaagcaatatagtcttttatgtctatgttcaattcaccattcacctatattgtcctcatttacttataaatcaagtaaaccatcaaagaaagttgtgtaaacagcctatttttctttaagaaataaatcatggcaagaaaatgtgagactttttggttttattttgttaaaatgacaatctattatccttttctttttttcgaacaatctataacgtgtatattactacaaaggtataagagaatccattttttaactgccaagattaacttttttttttcgattctttccaattaattaatgacggattctatcgacaaaatttaggatacgttacatataaaagtaatattaacgcatcctaaatttgtcgtttttaaaagaaaaaagtattaacgacaaaaaataatcctttagcaatgaaaattagtggataaaaa

SEQ ID NO: 48714 - DNA, 823 bp, Arabidopsis thaliana landsberg
tttaacttgcaagaaatcaagtcacatgatcacatgaagacttatcaacaaacagaggttaggattttcggagatgagaattattacaaacgaatcaatcaaaatgcaaagttgatttttctattaatcaacaaggttcacttgtgttcaagccaaattttaaacaagccaactaaatttgagacgagattttcaaatgatttataccaatcatatcattggacaatgaccgtaaattccgaaactcttgatgatctgctaccccctaaatcaaaagagaaaactgatgattccaaggatgaaaagaagcctgcaaaatctttctcattgagcaaagaccaaaaatgggtgtaactttcatatttcaggatttgatagaacataatttgttgtcattttcaggtatgaagaataggttagtatcagttctggtttttaaacatttttagacaagtgaaaagatagtgtgtttattaccttgagagtgtatgtattcatgaccaaggccagttcgcatctcgccacgcaaagcgacatcctccaaaactactactacaaccatctccttttaacccatcaaatttgttggttttatcagaatcagacccatctaacccggggcaacgaagttcttgatcgcgtttcgctgcttcctccctgtatgatgggttcgagtatctcgggtgttgaatgaaaggtacactcttcgaccagagttgaagtgcctaaacaacgaaatgacgttagttgatcaacgtttgagtatttgtacttaaacgattttgagtaaatataagtacttactgccatagatcctatcgca

SEQ ID NO: 48715 - DNA, 308 bp, Arabidopsis thaliana landsberg
  unsure (1)..(308): unsure at all n locations
tattatggtaacaacaatgtcaatagtgtaatttncaaaacgttagaacccgaaaaaagaaataacgttgacagaatccaaagcaaatatgcatctcatctggattttctggtcctttgagatccacgttcttgcgattcttcagaactttgacatttatttacctgaaaattttaaatttatgaacaagtattacttaaaactttgaatatactaataaccacctaactgtatgatacacatggaagcatattacatataacattctattatgatcaggattgactactacgttatatttatcatga

SEQ ID NO: 48716 - DNA, 434 bp, Arabidopsis thaliana landsberg
tgtaggacttgttctaaaggaaaaagcttggttcctgtaaagtttcgtgtttcagatccccagaggtttgtgatgtgtgttttgtgaggttggagtctgtgcagccttatttgatggaccaagtgagtcctgctgctcagttgccaacccatgacttgacagatcttagtacgttgaggtcttgggtgaattttccatggggacaatccatggagtatgagatctataaggcgacaaacactattcggggttatataaccaaggtgagatttgtgggtccttaattcaatgtaaactgcagcaagtattgtgaagttagtagcagtgtaaatgtcagctatgtcactgtgtcaatggccgacgtgtcgtctgactgtgacattcaggatcctaatagtgtggtgataactcgcatatggcgcatcaggctggtg

SEQ ID NO: 48717 - DNA, 628 bp, Arabidopsis thaliana landsberg
atccatgttttatggtattatattttattattatttgttttttaaatttttttgagacttgtaaacaaaatttgattatatattttaaaatcgcatgcttaaattaaagactcatgttgctttgatgaggtatgcaacatcactcactctttatcatcatcgtccaccacattttttctaagaataatatagactatatagtattaatactacaatttgtcttaataatattttttgtagtattaatactacaagttgaaaaatatttttttttaatactactagctgtttctattaagaaaaacacttttgcttctctcttatggaatgcggaatagacatatgttagctcatgaaatatgtgaaatttaaaaacgttgatataagacggagttgtactaaaaagatgacttatcaaaagataatgtcaaaatggactttattgaaagagacaaatgtcttacatgattaaaatgaaaggtgcatattttggtctctacttatctttcgagatctttagaagttacatttatctggtcaaacaataggcaacactacttaccaatctttaccaactaaccaaagccaatcacaagcgactcctgcaaacatccctccacaaatatat

SEQ ID NO: 48718 - DNA, 781 bp, Arabidopsis thaliana landsberg
aggaacctagtgtttacatcttgatcctattctgaattctttcgattatctcctctctttgacacaactgtcagcaatatgaagctagcaactcatggtcgtcctgaggccatgaatgcagtactcatttcctcaattgctgcttcaacatttaacccgcagttggaagcgtgggagccccttctggagccatttgatggaatattcaagtaaagacagtattgtttcttatttatgatatgacttaactagaaaataaaactatttgaaataatattttgattgctcactttcacgttgtaggttggaaacatatgatactgctttgaaccaatcgtcaaagccaggaaaacggctgcgaattgctgctactaacattttgaacataaatgttagtgctgcaaaccttgaaactcttggcgatgccgttgtttcctggagaaggcaattagaacttgaagaaagagcggccaaaatgaaagaagtacattatctttttctttttccgtgaaagtataaattttcataatgtgttacttactaatctgctctggtgcaggaatcagctgcctctcgtgagagtggggatctttcagctttttcagctcttgatgaagatgattttcagacgattgtggtagagaataaactcggccgtgacatttatctgaaaaagctggaggagaactcagatgtagttgtgaaaatgtgtcacgatgaaaacacttctgtctgggttccccctccaaggttctccaatcggttaaatgttgcagacagt

SEQ ID NO: 48719 - DNA, 1205 bp, Arabidopsis thaliana landsberg
attttttataagatcttaagagttaaaactgtccaataattgaattcatctctttcggaaccatgcggaagtcttaccactgttgaagaatccaatagaacaattcaaagttatagaattagttgtagagtctaacttagctttactaatatataatacatattttatttcttgatttttgttttcttcaatatcgaaacgacgaaaccaactaaaacgcactatggatactttcaatatttagcagcaagcagctgacattttccgacatttatagtttaccacataaattttacgataaaataaattatttttacaaagaaaataggaaaatctaaactagttgaaacatacatcttaccgacaataaaagattaaagattctgtcgatatctacttttgcttataagtattattatctctttaagtacatcatcaatacacatcatatatatactgtttatccaaaggcaccggaatgtttccctttacgtttatagtttcacctctctaatttaaataagtttgacttacacgtatgtatagttatctatagtggatctcattatgagattctcatagttctcataactcatagtccaatctttgctaattaattatcctatcaaccagagtatataagcaatggatgaaataaacgaacttaacaattaatatttgaaagctttatacatacagtttaaccagcatatgtgcggcctcaggaacccgtcaaccggactggacaggtcaacaccgttgactttgataacacgcattctttgggaaaatccgagcgaggagaggagttttgcaacttgaccaacggctcacaaccgacgaagccacttctagtgtggtggctcaatacgcagacggcaatgacttattcaaagtgggagccgttagtgtcctcacaggtgaagacggtgagatcagaacaaattgttgggaattcaacgatagttaaatttgttttttttttcttttttcatataatctgattcttgattgtttgttcgtgtgtgttttttccaccccgattattgtcaataagtctatatgttatgttggttcagatttgggtggcctgtgttgtgtttgagttgctattttaattgtctttgaaatgatatatttgaaatttgattttatgataaataattttgatatatatgtactaatttatcagatgacctataaat

SEQ ID NO: 48720 - DNA, 524 bp, Arabidopsis thaliana landsberg
  unsure (1)..(524): unsure at all n locations
cttcttgattttcatgaagaagttgtatgtgttttaggtttgttttgttgaaatgtgtgtgtggattttggggggaatggaagaggcttcatatggagaaatttatagaggcggcgacgaaattcatggagtggaagaagaatccgaatgggagaagtagggaagagtttgagaagtttgtacaagatgattcttctccggcttcggcttgaagaagttgtttgcgttttatctatcttttatgtcttcttgtttcatatatcaaggtgctgctaataaaagggtctttactttcaaagacaaaatagaaaggctttgtttttgagtatttgagaataatgcattttatgtttggtgcattttgtcttcttaagaacaagtttgattttagtccaaaagaagttgtattggtttgaaaatacgagaaaagtaggtgtaccaattttntatgttaactaaaatgtgtataacatggattttgacaatatgagattagtcaaaaacaaaagtagaaccacatcata

SEQ ID NO: 48721 - DNA, 1627 bp, Arabidopsis thaliana landsberg
gggtgttccgaattgatctgtaattgaggatgtaaatcgaaactagggatttcctagatctcgttagctgtgtatttgattattgcagcagagtttttgtttaggtagagatatagggaattttgatatagggacactcagattttggtgtatcaatttgctgcagcagccatgttctatggcacagctgtatgggacccttggcttatcgttggccagattatttgcctccaatgctcttactatctcactcttggactcttcaccatggtctttcttggccttcgtgttcctcgccttagtcttgtctacttcttcgattacgctactctcactacttccaccttcaccggttggtctgttattgcctcattcctcttctcttcactcgctgggtattttgctttgccccctagtaatagtatccatccatttatttccctctttattactagtctttccagattccttgtattcattttaattgcgcagggctgtgtacatgatatttttggtggagcgagcacggaaatgcttagatttctctgcaactctctacatcatacatctcttcttttgcatcatgtatggaggatggccttcctctatggcgtggtgggttgttaatggaaccggactcgctgttatggctttgctagctgagtacttgtgcattaaacgcgaacagcgagagatccctatggatcgcttccactcaagtaagatgatcattctttcttgaaatctctctgtgtgaacaagcatatctttaccttttactttctcaagactgacttaacatgaaattaaatttggctgcctatgctgctgctgcaggggtttgaagattggtgaaagaacaagtgatgaagattcttgtgggttagcagcgcgactcgtagagcctagtactcttaacaattgtgatgtacagagatgaaatcagaggagtagaatgggcgaaaggaagttcagctagccaagcaacaatgttggacactggtgcaccaactctgactgcaatttttagtgacttcaaatactaagactttggaatacgtttcaatttgttcttttgtatgaaaaaaacattagactcgaataggttattgatttcatgttgcttcttttttttgtttatactggattttctcttctatcctctacttggtgcagctttgtgtgttttaaaaccagtgtctcattcatcatactcttttaccaccaattgaatccttccaatttactgttttttgggggggaaaattactgtgtactaacaagtaaaaagggccgtccgtcaaaatgtaacatctcctatatacggtgcggtcatgttaaaaaaaggagcaaaaacgcgtgataaaacgacgtcgaattagagatcctactagacccagattcagatccaaatcgccaacgcgcactggaagtgggatcaccaccactgcgcttcttcttcttcgtcatctctgatcccccctgcgatcaggggccatctccgtcgataatccgatctccggttcagacattcgtttggacttgcaaagatggtgagtgacatgatctctcagtttctgcatagatctacctctgaatcctctttcaattttttacttgaaatctc

SEQ ID NO: 48722 - DNA, 957 bp, Arabidopsis thaliana landsberg
acattccacagaacagtatgccatgttcgatcgagtcgaccctttgttcccctaaatatattgattgatggttgactaataaacaacggaaaggaataaaaagaaaatgattacctggaggaacggcgcaatggtctaggagaccacgagaggcatgagaaggatgccacggagtttgtctccaagcgactttggcgtcactaccggcactgattttgcagcctgaaacgacaagctcaagacaccataactctatccccttttgccacagcacaaagcctcctacttctcctcctccactcttgatactccttgcctttaccattttgctgttcaagcttccttctcctgtgcaaaactctgatgctgtcatcctcacttttcccatcgcatacatgctctctaccgcgtttaacgctcgatcgcctcctaccgctgctatgtactgctttactatgtattgcgccatcgacatctcctgtggttttccaatacaaaaaaatcttatatatgatggcggatttaggaatcaagatattgctaatgtttttaagtcaatcacatttacatgtaaattttcatttaaaacctagacaatcttttatttttttcatcaaatatttttgtacagtgtaaataaaactcaaacatgctttttcctcccgtgtaggttctgacaaagaaaatgttgtttcgatagtaaaaattgtggttttatggcaaaaacaaacgaaacttagaaatccatgccataatataaaatatatcaagcactcgatccatattgttgattgggtttaagatgaaattttggtagatgtagggtgataaaaaaagaaggaagatgtaattacgagaggttggtctttgatgtctttgtggatgggattctcataatcgttatggtggcaggctgaacggggagagggatcaaaggagcccaacaactccgagaag

SEQ ID NO: 48723 - DNA, 340 bp, Arabidopsis thaliana landsberg
atggacaacacaacaaaccgaccgccgtctgccaacacgagcttgttaacaaccggaaaaaaaccagcgcgggagccactggaaaagatactaaacggagcgaaaaagtggacagttccagcaacgctcggaacgaaaccaacatcacatgccgagggtgcaggccaggggattacgggtatcggcccagaaacaacaggtataaaaacagaaacaggatttaataaccggaaaaccaacgatgtacaaaagagaaaacaacaactcatgagctatatgacgtggagtacatatacacaaagatatctaaaggtatgaatgaaaaagcgagaataaaaag

SEQ ID NO: 48724 - DNA, 1266 bp, Arabidopsis thaliana landsberg
ggagactgttactaactcttcggttgaacatttacatggctgctaaagctttgaattggttatagttaggcattgagcttctatttttattgaaggcacaaaattgtgaaagcggcagcaggaaggaaccacacggtagtggttagtgatgatggacagtctcttggttttggctggaataagtatgggcagttgggtttgggttcagccaaaaacggtatgaaatgctttacatacttctgcttgtgtctaactgttctaatggtgtgaaatttgtatcttacaggttttgtttctgtagaagttgaatcgacgcctcttccctgtgttgtgtctgatgaggtcacaaacgttgcctgtggggctgacttcacagtgtggttatcgtctactgaaggagcctctatactgtatggtttcttagtctggtctagtctgttattttgggttttctttcacctttaacgggtctcactttagtaagacttcttgctcaaattcagagtgtttgtttgtttataggactgccggtctcccacagtatggtcaacttggtcatggaactgataatgaggtaacttagttatctgcgcgtagatgtgcaaccaatgcagtcttcaactattatctcttacttgtagttattatcatgattggaggtgtatggagcgtgaattgtttgtgtttatttgaaacttccaaacaagttttgagctcttgtttcttgaattgttatgtaaagtctgctatgcataatttagttactttagtctctctgaattgtacttgatgaatagattaggtaaatatgtctccatcatttactttgaaccaggttacattgtttgtgtattatttcagttcaatatgaaggatagttcagttagactcgcctacgaagctcagccacgttctaaagccatcgcctctcttgcaggggaaaccattgtcaaagttgcatgtggaacaaatcatactggtagaaaccatatttctttctctctctatcctcaatctttacctttcaggggagctaattactcattctgataattaaaatttctcgtaatcagtggccgtagataagaatggatatgtttacacgtaagtaacttatctgttcaaaattttggttaatttgaactgggccttctatgtgtgttatctctgatgcatcattttttgaaacatatcacaggtggggatttggtggatatggaagagtgggactagctcatgtttaatattagaaatgggaactaactt

SEQ ID NO: 48725 - DNA, 524 bp, Arabidopsis thaliana landsberg
cacttttgtatcgggtgtggggcacggattcagtgcatcaggagtcaattccttgccggtgtcgaggagggacttcgttcgcgcatggccgagcttgccttcgcccagggatcctaggtatgaactctcgttcgattaacgatcatctagaagccatgtagcatctatcggccaagtaattgacgagattaggcgccggccaccactccggccgcttggggaaagtgccggggccgcccgccatcatggacattgcgccctgtttcattgcacgcgaattagtatagaagggggtgttcgttgtcgtcctttcggcatgaatcatagtgtgggaggaagaattaggggatgtaggtgctggcccgcgatccacggccatggcgccaccgtgcgcaagcgcggtcccgctgctcgtattcgcgggtgtgctagggcatggctgccgttgcgtggggaaggagcgcctaggattagatctggcatgtgtttgcctcgtccgtcgatcatgcagcggacgactgtga

SEQ ID NO: 48726 - DNA, 495 bp, Arabidopsis thaliana landsberg
  unsure (1)..(495): unsure at all n locations
aactggttgctctggtaatcctaatccatgtgtggttgttggaaatacgactcctggattgtggtttccttgccagaaagtcgtcatcggaggagcnnnnnnnnnnnnnnnnnnnnnnnnnnnnnnnnnnnnnnnnnnnnnnnnnnnnttgtatgtacggtggagagaagtatccacctccggtttctattaaaccgtcttcgttactcttccttctgtatacagcttcctgttgttgttgttcttgatccctaatatgcatcctctgaaattcctgcatttgtctttgaatttccatcggatttacgacgtgatccggttgaatcacacgcggatcgttaaacaaaggcggttctaacgccacaggaaccggtaatttcacctcagccggtggtggcggcggcggactgcaactgtctcggatccaacgaaaaaatccgcattattcggaggagcagttacggatttctccgattcagatagcttaggaacagt

SEQ ID NO: 48727 - DNA, 1766 bp, Arabidopsis thaliana landsberg
tatgattgatccttgctaattgttggatcctgaaacattgatgagaaataatcttagaaacctttcgttgatctattttgtatatgattaagtgtcatccttcttcatatacgacagcggttccatgatgatggctcacgaccggcccccagcgccttattaagacctatctaaatcatcccatagatagttgacaaaactaacagtgatgacatatatatttgctaattttgtagaaagctagtaatcaaatacaatttgattgtgatttctacttgtaatagtgcttgggcacctttaagattcttgttttcctcatggtcaaaaaccttttttagatgtttacattgagcttccattcatgtagggtgatatttcagtgacaattacttggttggtccatagggtcctcgatttgacgacctttctaattctgtgcttttctaagacgattgatatttggataagcttgtctggttcttaaatctatgatcgttcgcacacgcatgcaaatttgatatactagtatagtcttactcaccactagccactactataattattttttaaaaaacttttggatttatttattgttgcacacaaaagttaagagagaaaacaactaatattttatgaaatggataaacaaatgttgcaaaatgttttaacatataaccttgagatcttttctagtggatcaggtctctttagatcacacccaatttagaattattaaaaaaggtagaggtaatctactgatttccaacttaaattattgataaatgcaatatactttatagaatatgttaacgatgaacaacatgcaagggaatatgctcctttttgttaggcagcagagtatagctagtctcttgtttctgtcagaatcttcctttagttttaggtaaatttataatatcaaactaacatatataaaccttttccacgtttaaaactttctaatgtaatttagctatcattcacaataatacagtctatttatgtttcatatgtttaatatatttggaaaatgattactttatgttatgtatataatgtaagtatatatataacaaacaaactttcattgatcaactaataaagactagtacttttaaaatacatcatcattattttgcaaaacactatatataagtctagtgtatgattgtgttaccatgtataaataaatttgtcctaatatagataaaccagtcaccatttattttttattcaaattactaaaatacaacttcgtatatgttgtttgacctaattcttaagtagacattttgtgagcaaatttgttttttcccaaattgagatgtaaaaaacggtaatatgattttagcattcatatgcatatggtgcagatagaatacgatccttgacttaacactgacatagacttatcaagtgctgacgattaactaaatctagaatcatataccgtgttgacttatcgcttgccggacatcaatgttcatgagaatataatgtgccgtcaaatatatttgcgatggatcgttacttaaaaagtaatgcatatgcttttattctacacctgacactgacagttgacttccatagaagctgagtctacttctctatttttggtgaatggaatatttgtatacttcaaaaagggagaaaaaaaaacatctctctataagaatatatataatgacgtaacatggaaattatccaagtgcatgcagttatccttattcgatagatgggtgttgtttcaacggatatggaatccg

SEQ ID NO: 48728 - DNA, 371 bp, Arabidopsis thaliana landsberg
caggcccgcctggggcaggacgtcaccctggaggcgtcctccgcctcggtgggcgtctgggaaagcagcccgggggtattccgccggcacatcatgaaccgcgagttcagccacgtcgtttccggctggtgcatcttcacccccgacggaggcgagccgctggagctgcgcgccggcgacgcggtgttcttcccggccaactgcgagggcgtgtgggacatccgcgaacccttccgcaagacctacgtgatcttctgaggcgccggcgcagcatgatttcccgtattgacgcatcgccccgggccagcaggctggtcatcgccggcgacaggatcgagacctcgggcctggtggccaacgacagcgcggcg

SEQ ID NO: 48729 - DNA, 574 bp, Arabidopsis thaliana landsberg
cagaccttgcttgcctgccctctgcccagaggttcagaagaaccaccctttcctgccttttggagtgtccatgcatatcggttcttcgttttcagccatgccggccacttacagcgcgaacaggatgcagtccgctccgatcgatccattgatgaaaatcgcgccgtcagagtccgatacgccggagaaggccttgatgaagtttctggagatgacgccggcggaaaagatgcagttcctgtggctcaacgcccatcacctgaccagggaagaactggccgccatgtcgccggacgaacgcgccgccatccagaaacagatgacaaccgaaatccagcaaaaggcgcgtgaggatatggagaaaaagagcggccaaagcggtcagtcgctcaatatcctggcgtgaaatgaaaaagcccgatcctggcgtgaaatgaaaaagcccggacatcactatccgggcttatatatctttaagccgctttagatgccgccgatttcaggctgtgcaggcgttcggcaacgaggaacgacagtttcagcgccttgtcggcgttgagcctcggatcgcaat

SEQ ID NO: 48730 - DNA, 1408 bp, Arabidopsis thaliana landsberg
ctctagagaataataataagaagcaaatgggacaaagactaaaaacaccttgatgttgtttattgaatgtaaaaaagaagaatggttggttgaacgatcaaaggttggaacgaggagcaaagtacttggtatgacgaccttgagcaataatcttaccagtcgtcttcttcctcagctccacactcactactgctacagctttaccaacacgcaatgcctttgattctatctctatctcttcctgtgtttttttttctatatatgtcaatcaattttgcaaagaaagacatctaataaatttaagaaagaaggaaaggaagttacatcgagaaaagcagcatcaaggtatgaaacattgatctccactgaaactccggaatgtgaagctccggctgtgtagatcactgctgatcctatcaaatccaccagcgtcgccgttgctcctccgtgtaagaatttccctgcgttctttcctcaacaaattcacaaaagtcattagggattctttttttctcgaaattagggatttgttgttcatgtggttgttaccaggagatgaggagggattttcatggagcagacgatacggccaggttcgatgagatccactttaagaccattggttacgaatcgttcgaggaatctatgtggtaatttcgccaccattggttccttggccttttcgtcttcatctccttccagatactttttcaccgattctagatccattctcttcttctttcccttttctttttccgtatcaacaccttttgagggttttttttttaaatcgaaatttttttgatatgaatcagatttaaatggctcacatttttttctagtttttactcattcaaataaagaagtgatctaatcaaattagacaaagaaagaaagaaacaaattagacaaagaaagaaaaaaataaattagacaaaaaaacacacacacacacacattttatattagacagatttcagtttcttttgattaaagataaagaggagtataatttatttataaaaactattcagggactttcagggaagagtttttctatgcgaaaactatcttatactatatttaaaaaaaaaaaaaccatttgaaacgtagaggatgacaagaagacaactctctttacacaaattgtatattcatgattttttttccttttaaaaaaaaataaaaacattacaaatcccctctctccatttgctgatcaatgaccattcgatggcctgaactcggtgtagccattaataccagacgtaaaacttggattcgaagcgtccaaaccaaagtaactgtgatggtaattagctgctgatgatgttccatcttccattccattgctcctcattgctggcaacgacaagtccatgttcgtcatttgccactgtctcggcat

SEQ ID NO: 48731 - DNA, 680 bp, Arabidopsis thaliana landsberg
catctgttctaaggcagaagagaaggggagggatcggtctaagcagttcatggaggcgttagatattctaagttcgaacaaagaattgttcattacactcttacaagatcctcattcattttcggcgaaaaaaagcttagacttggagggatctaaggtaaaagaaccgcgtgataaatctccatcaatggctgatgatttggatagtattgttctcttgaagcctagattatcaagctcggttgatgataaagtgtacttgagattcaaacatctagccaagaagttgaaacttgttgttggatctaacaaagacagcaatcacgcagaaaacaaacccgaaggtagcggtagaggtagagaaaccgaggctgctgcttttagaacaagtgatgtttctaccagtacagttggtcatagaagcccggagtcaccagtgtttaggcgcaagaaacgggttgaatcagatgttttcaagctaagtatcgaaaacgatgttttgccaaggagattcatggtggaaaggcaacaagagagattaaattcttcaccggtttatgaagttccttatgcattgagtagcttgcagacaaagctcaaagaaagaagacagaagctagagaagaagagagagagcttcaagttgtggtctttggacaaaaacttcgagggttttgatc

SEQ ID NO: 48732 - DNA, 195 bp, Arabidopsis thaliana landsberg
tcacaagttactgcatatggtctctcaaatagtagagatattgtatttaatatcttcattatttgccatgaaatatccaattagtatctccccaaccacaaatgcataaatttgcaaaatattttacttattttcaaatatttgttgggtgagcctaaaagaaaatcctagaaacaggggaaaatatgacaacta

SEQ ID NO: 48733 - DNA, 645 bp, Arabidopsis thaliana landsberg
agctcaggtaaccaaattcaaatgcggtggaataagccttagcgtcaacgtttcccacgcgatcgtagatggccaaagcgcgcttcacttaatatcggaatggggaagactcgcgcgcggtgaaccgttagaaaccgttccatttctagaccggaaaatcctctgggctggtgaaccgctcccaccgtttgtgtcgcccccaaagttcgaccacaaagagtttgatcagccaccgtttttgatcggagaaacggacaatgtagaagagagaaagaagaaaacgattgtggtgatgctaccactgagcacatctcagctgcagaagctacgaagtaaagccaacggaagcaaacactctgacccggcgaaagggtttacaaggtacgagaccgtcaccggacacgtgtggaggtgcgcgtgtaaagcacgtggccactctccggagcaaccaacggctctaggaatctgtatagatactcgtagtcggatggagccacctctgccacgcggctacttcggcaatgctactcttgacgtggtcgcagcaagcacctcaggtacgtgttttttctttcttttctattactatccatagaaattttgtttgttttgtgaatttgaatacacttcttcaaaatttaaggg

SEQ ID NO: 48734 - DNA, 369 bp, Arabidopsis thaliana landsberg
aagcttattctcctattgtgataaggtttgtactttcgatgtgagatttttaacacaattaacttaaacactcctctcattgacattcatatgcatttgattgtgatgtattgtaagaatcatattctttttttttgtgagaatcatattccgttgtctctaaatgagtgttttagaaaaccgaagacactaaatatctcggattaatgaaactttatttcttatttattgcgatgggttatatatagtgatgctctcttgaaatgtcctggtcatataaatttgataggaccgggttctcgtttgttttggctcagtcacgaaataaaagtgttgtttggatattattgattcttgattgtagggcaa

SEQ ID NO: 48735 - DNA, 370 bp, Arabidopsis thaliana landsberg
ttttttgtgaagacgaatctgtttttttttgtgaagacccatttatgaaaaataggccatgaacacgaagtttcctagaaagatgatagaggtgctatgatgacaatatatggactcattattcgatgttaccaattatagcaaaccttcttctagctagctttttctgtatttgacattgacccgtaatgaaaacttcatttattttctcgttttgttaatagccctgcatttcaaattcgacatgttaaggaaaaaattttcacttccccagttggcaaaatttctcaaattttttatgatgtttaccccgcaataaatgttgttgaaaatcaggagtgacaccaaagaatcatgattagtatagaac

SEQ ID NO: 48736 - DNA, 464 bp, Arabidopsis thaliana landsberg
ttctctttttagctgtcttgattcgtggaatctcctagattcttgttttctgggaaacaaacagagtcttgagttctcgttttcccgggtaaatggtaaaaagtttttaacgcacttatcgttacctatataagatgtctctgtttttgaaatatctatatcgaagatttcttcgtcagatggaatcatattggtaactgtagtcgatccataagaaatcgtcttatcttttacattttcataaatcgtaacatggaattgtttttttttatctctgacaaacaaaaaagtaagtttgtttattttgttctaggatcaccattattgatctaacttttgtcggtaactacttttttttgtcacttcccacttagtttgctcattatataagacaaaatctttatagatctcgttcctttaaaatctgtagagcatcaacatcagcattaatttttctaatctat

SEQ ID NO: 48737 - DNA, 630 bp, Arabidopsis thaliana landsberg
catattataaacaactaaatcggaggattggtttcacgtaccatagcaaaacttgcagcagagctagccataaaagaggtatatgtatctatgtcatacaagaattcctctaagtgttcaccatagtaggtattggccagatcgtcgctgcccgctaccacaatggctaggcctttggatattatgtgctcggctttctcttttcccacaaagcctttcactttctctatgtattcttgaaagtatgtcaattgttttgacatcggtatcgcactctacttataacattgataacagatataaaaccaaatcaaatcaaatggaaacattaaaaatgaaggagataatttccaaattcaaagcaatgatgttattactactacgattggtgtcaaaggatcatagccagaaccacccgaagcaaaggatacaccagtgagcaaatcttcctgggtcagtcccggtctcaaatatgccggtacaactggttttactcctatataatccgctgtgaaattcgggaaaagaaaaacaacctttcataagaatatttccattgaaaatatagtacatctatatagaagcatcaagcatgaatattttgtatcttcattctcatgatatgataag

SEQ ID NO: 48738 - DNA, 259 bp, Arabidopsis thaliana landsberg
  unsure (1)..(259): unsure at all n locations
cagctgagacgccaccccaagatttactgaactcgttacaaaagggaagcagacacacggctgcagaggtgaagggcaaggggaaaagcaaagacccacncacaacnnngcgcgaagaacacaccgangaaagcaaagacaccgaccagacggcaccnnngaaacgaaaacgagagggaaaccaagacaaagccaccggcacaaccgacaaggctaacggacaagcgangccacaaaacaacgagagaggaccacacgg

SEQ ID NO: 48739 - DNA, 219 bp, Arabidopsis thaliana landsberg
  unsure (1)..(219): unsure at all n locations
aacccccccngaagggaggggaaggaacccccaaaacgaaaaccaagcaccaaaacaaaagacaacagaaccgaagaccaacaaggacacaaagaaccaaaccaaccgcgaaaaacacgccacgggccaaaaaagcaagacccaagagccaaagcggggcaaaacagagcccgcgcaaagaccggacagaagcgagcaaacgacgggcaaaacacaaga

SEQ ID NO: 48740 - DNA, 928 bp, Arabidopsis thaliana landsberg
ctactgactttaagtaatgtttctccctaagcatttgaaaaagaatttttaagtattgtgtagccatccatccgagaaccgagaagtaaacaagaagcaaacatgcacgtttcacttgtaccaatatattcaccttagaaaactggctcttaactgaacaacaagcttgagggaaccaagattttgcatgtcttaagatccttatgatgaagactgtgattatggaagttgcgaagccagagacaatgccagcgatcacatcatatttccagtactttggtgttgattctccattaagccatgactgtaaaagtttagagattctgaaaaaaaaacaatgaaagaggatcaattctgtaaaaaaacaatgccaggacaaggcaagactgagaaactaaacagatgatagaacattcgtatatcacttcgacctcaatcattgtgctattacagtttgtatgtgtttagttataatgaaaaatgtataataatgagagaaaacagaagaacttacacaatagagtattgcttagcaatgtcagtgaaagaaagatcatctgcttggcaaccgaaaaagctatcccgataaagctttatctttgaaatccctaatgtgtaccagcaatcgtaagtctcattaacctggacaaacaaaaacatattgcgattcagaacagtaaacaaactgatatcaagtccgagagtcaatatagtcaaaagaacttaccttgaagttatctttggtaagtaatgcagcaccaaagttaggtctgcactcaggaggaagagcttcatttggtgcttctgaaaacgctaaccgtgtttgacccattaagttatctttatactctacctcccccccgatatacaatggagttagtaaattaaaatatttaaaacaaaagtcagaaaagtctgttaatagctg

SEQ ID NO: 48741 - DNA, 376 bp, Arabidopsis thaliana landsberg
gttaagtttttcttgcttgtgatcttaattatcttaattctacaatgacatagaatttgatcgagaaaaatctcttgttcgtattaaaagatcttgtgattggaatcagagatcttttgttccaatatcacaagatcttatatcaataatttgcattctttgcttgtgagttgtgatcttatccatagctggccaagcagggtaaatggcttacagccgttaataataacatttaatttcagcaatgttaaagtaaaagtttcctctagttgttacaccataaatactatcacttctaaagtttgaaactccagtccaagaccggctatgttatatgaaaaaacgaaattacgaattcagatggtaccatatttta

SEQ ID NO: 48742 - DNA, 649 bp, Arabidopsis thaliana landsberg
aacgagtgggtagagaatgcagatcgatgggtcgctggatttcttgaaatatttgaagaaggttgccataagatggtaagttcaatcttgaagacacatacagtgcttcaaaaatgtactaatattcatgactatgttctgtataaccttgattaaacttgacaaatgcgtaaaatgttaacagggaactgcaatcgtagacagtatccaagaaaggttaatgagacaaaagtcggcagagaggctggagaacggtcaggatgatgacacagacgaccagttctatgaagaatacttcgatcatgacatgggtagtgacgatgatgaagatgaaaaattctacgacgaggaagaagtaaaggaagaagagacagagaaaaccgttatgacggatgctaaagacaacaagtaagaacaaatttggcttgcagaaacctcagattagctctacttatggccacttctactaaactcccttaagcctcgcactctctctcgaaattcatctacttaacatataataccaatgtttagaaagagagagtgtgtgatgtgtttgtttgtgtgtgttgaacaaacgaacgtgcgtggttgtctttggtgagttggtctcatctttgttgatttttgaatgcgcatgtattttttt

SEQ ID NO: 48743 - DNA, 659 bp, Arabidopsis thaliana landsberg
agaaatttctctaacattttcatttcgtcacttttgattccacaattatgttaattctattttgtccctaccgtaaacgaacatatcattatttttatattctgttttgttactgataacaaccattaacagactcttaaaaattagagtatccattaattatttaattaacatagcctagtgtgatttaggaaaaaaacatgcgaagatcaaaatgcttgtgcatgtcagtaaaaaaaatacgtactgactaaagatcatatacagatatacttcgtagaaaagatgcaaatataaggattaaggacaatgttttctagaagggcttataaaagtgatggtgttttctttgtctctaaggtaacaatgaattaccgtttgaatcttactgcaccggaaaatcgattgataacaaaagggagagataacctgagaaatagaatatattggtctggtcacttagagaacaaagcaacgcacgtgtatgagtgtgataaattttgtagggcatttatttaatcgaatgaccagtaccacaaaaaaagaaccgaatcgacagagtatgtccaaaactcataaagtcacaaataacagacaacggtctccaatagtatacaataatagtttaataccgaaatcttactttatttaagaggtta

SEQ ID NO: 48744 - DNA, 369 bp, Arabidopsis thaliana landsberg
  unsure (1)..(369): unsure at all n locations
ccagcatcgggatcagatcgattcatgatcccgtcatcaccgctcgacctctctgacatccctccacttaccacttagtccaccacatacccaatccaggctcatcaacatcatcatcccagcaacagatgatgataccaataatgtgcgcaccctacatgtccacataccagtaaacgacaccttctcatcaggtcaaagcataaccggacagcgcaggacccaccgggactactatccacgggcatcccatccgctcccagtggagnnnnnnnnnnnnnnnnnnnnnggtccaagagcaacgctacgattgcccataagcggcgccatgcaacaccatctacacctatgaaccagcatggaagccga

SEQ ID NO: 48745 - DNA, 632 bp, Arabidopsis thaliana landsberg
ttcttatcgctttcacaaatccaagtcatatgacaatctaaaataaatgtttgctatctaaaaaacacccaatacgggtacccgaatcatcaatagcagtggggaatggaccaataattggagctctcaccggattggagactgacgagcagccgaagatgtgctcttaagttgtcgcatcatatgcatcctcctcccttagagggtgccgaccgatgcagcccaacagtgattcttcacctcgccttcgtctgacctcgtcgcccagctcctccaccgccctcgcgatgcaacctcgtcgctgctggaggtggctttgcctgccttcgtctgaccacgtcgcccagctcctccactgccctcgcaatgcagcctcggccttcacgactaccacaccgctccatcaaaaagggcctcgcgccggatggtatgcctcgcaatagggtgggaagaagcaacaacgactgcacatagtcatcaccgtggttccatcgctcggtctagcagaggcgtggggtatgtgcggcatggagcaggagagcgcgtgcaatctagggaggaggaagatgaattcgagcgagaggtggataggcctcggctcgtgcaaagcgttggaagaagagcggagattg

SEQ ID NO: 48746 - DNA, 605 bp, Arabidopsis thaliana landsberg
tacttcgcgctctgtttcttcttcttcttctccttctatctcctcttctttcatgctgatattctcaggatcttcttcagggtgctctcttatttcaccactgcctcctacttccaactgcggatcttcgactgggttctttcctgtgttgttaaccttgaacacagtttctgtttcaacctatataaaaaaaccatggttcaaaattatatcctaagattaccatgcccatatgttcaactcagacagaaattaaaaactaataaagaaataaacaaaaccataccgtaacaatctcctcatgtgttaccgtctccactaatacttcagctttgccattttctctattctcaccttccggtggagtacgagtttccttcggacttggcacttttctgatatcatcattgacacgttcttgtttttcagtggcaccctttgatgcttgtgctttatcttcttctgttcctacactgaaaggattttgcatacatatataagtttcacgcgtattgaatttcaaatttcttatgcaacaccctccaactcatttttcagttaaaaagtagtaggggcttcctttctatgtcttccgacctgatatc

SEQ ID NO: 48747 - DNA, 401 bp, Arabidopsis thaliana landsberg
aaagacaacaagctcaagtgcgactcctctaaattaaacgagtataatatctcaaatgaagatgtctttgtctttatacttatgctcaaacataaataaaaccgcaacaatttacagtcactcccctaggtgtcgtagtacgagagtggaacagaagtacggcagtgctacgcgaccggtcattatttattcgtgcacaaacagaagcgtttctgatctcagtgcccccactcgctctattctcgatgcatgtcatgaagacatcatcacgccttgtctccattcgctcatcctcatcaccggcataatttcttcttgcctgtttacactagctatccagccaatattatatatgcatgtagtctcctgtcaacaacaagtacgcaacgatgagttacata

SEQ ID NO: 48748 - DNA, 887 bp, Arabidopsis thaliana landsberg
  unsure (1)..(887): unsure at all n locations
aattcgagcttttcgaaaatttatagtgttttttttagtgacaacactatgatatcacaaatgttttatgcgaattatcactaanaatcaatatgaattatttaaatttgaagtgctaaggatatctcaacctttttaatatgccttgacaagttgtaattgggaatccactcgtcactcgtctgagagatatttctactaaagccctcccaaaacacatgttctttcaaatcttcctcttactttttttttcttctttcaatcacaaccctttctaactgaggcttcaaattatatatacatgaacctttggaagttagaacttaacgaaagaaacgtttttgtcaagtggaatctcaatggaaaacaatcagatccaacgaaaagcagatagaaacacacatagagaaagaagttttacagcctagatattggaatcaaaccaaattcgggtttccagttatgtttcaaaagaaggttttggtcagatcatttagtaaaataaaaggacatgcatcaccaagagacaaggagagaataaccttatacaacctacgacacacttgttgttaactattcgatcctcacttacaatgtaagagatgtgaatagtgagtgagttttctatcaccatggtctgccttttcctccaagccggcgtgcaagttcaaagtcttttctcactgatatgaacaaaaaacagatatagataagcattttatatatgatattcaagtaactaatgattcaaagggatataaaatgtatgcttgtgattcctaagttgagactgaaaaatgtcttcttttagagtacttacttagagtaacacgtcttgcatggatagcacagagcattgaatctgagaacaaaccaaccaagtaatc

SEQ ID NO: 48749 - DNA, 865 bp, Arabidopsis thaliana landsberg
atcatttttatcatttgaataatttatatgttagatttatgtgtttttaaatcagataacttatgactaaaggttttgtctcattctcatacaatccttgaatcaaaatctctctccatgttggtcctttatttaggtatcatataaatttatcattcatgtgttatcgccggatagtctcaaatttgagatggaagataaacatagaaaatggttcgaccaaattagtaattcgttattacacactacacataaatcaattccgaataatcaaataaaatgaaattcattctttttttttataaagatttgataaaattcattcttgtattgtgatcttttcaaaattgttataaaaaaaaaaaaaaatgttgtattcggcgacgatcaatacatgagtgatgagcggtgtcaaattccgacaagagcgacataaaaccttttttgtatttgattatttttttaaaaataataacaataataattcaatggttttaaaaaggaatttatatgacgaaaacaaagtgcatggggcgagcatgtcacgtagactgccagcgtggaatattcgccgtcggacaaggaaaatacaataatctgaaactcacatgttcgacggtgggggtttaatggtatttcaacataggacacgtggacggctttgttactcttttgtcttttacgtttgttgaaattgagacccacaagaaatacacacgtggaaccaaggccgcttcgttcgaccgcaatcgttttgtcctaaccaaacatgagaatgggtgtatttaacaataacaaagctcggtttacaccggtacaatctgactaaaccgaaatatcataaaaaccggaccgaccgggaaac

SEQ ID NO: 48750 - DNA, 2444 bp, Arabidopsis thaliana landsberg
acgtccaccagttgtaatactgtctacaccctcatcactatcaccagctgcctgttcactttctgtgattctagaagtctgttcgcgttgccgcttccttggagtttccccatcagatggttttgaatctctggacacagcttttgttgcttgcgatcttcctctaacagacttacccctacctctacctctacctctacctcgtctaggtttatcactcttcatctctgattggagggaaccttcaggaccttcttgtattctactatctgtgaaactctgttcagtagcagacggttcatgatcctcgcctgacactctatccagagaatcatcaggttgcgaagattctggaagcttaactgttatacccagatcagtgactttatctgtcttcccaattggtgatatgctcagtagctttgaagcgattttcccaagcaaagatgttctcttgctattctctgcactgggagaaatgttcaaagcctcctctgcttttaatttttgtttcccgaaacgtttgtccccatcttcaacatcaggtagtcgaagatcagacagaacaaaattttcggttaattctccacaggaactgcagctcttaagtttttccagaaatactaggaaacgctccctttcacagataaattcttttcgtttctccttcaaagagcttctgagtacatctagctcagtgatgtccttatgcatctcagcttcttgttctttcaacaacttctttcggaccgaaatttgttctctttccctctccagagcaagcttctcgtattgcatttcttccatctctctttgagccagcttctttgtgtaattaatgttgtcaagctcttcttggcttctcttctcatatgttctcgccctttcattaaaatctctttcacccgcttcttcttgcctctgaaattccatgtcaagattccttttttgcatctcaagatcttccatgtcggcttcaaatgattctttctgcatcttgacaccatccaattccctcttcaaattatcccttgaggtcatctcttctctcttcagcctatgcttttcagatatttgcaaatttctcagtttctcgttttcttcagcaacttcattttgctctctagttatgttagccctcttcttatccaaagcttcccactctttctcaaatctttccttatcttgtttcagttcttcacgttccttcaagagcagctcctcctcttgcttaactttatctatctgctgcttcagttcagactgcagcctcagaaactcgactctctcttcttttgtaatcctaagactttcatgttcttcacaaatccttgattcctgctttgttgtctcagtcccgatctcttcaatctcatcttttagtttacgcagacattccttatcttcgagcaatctctcgttttccatatgcagctttttctcttcagctttcagagctttttctttctccttcacggttttgagccttgcatcaagatccttctctttcttcttcactccctcctcctttttctctaaagctgcctctctcttagccaacttctcttctttgtggctgatctcaacttgcagctgctcgatttcagctttctttccctcgagttcttcatcaagggatctcctcatctgttcaagctccatttcaaactctcgccttcttgaatatagaacagccttctgatcatcaagaagcttcccaatctccatctgttaaatttaaatcaccatgtcaattctattttaagtatctctattctggcacttagcagatagaaactaaagaaaaatattaacctgggaaagtgactttaaacatgcaagaaatattaccatagttttaaaatattcctcttaatacaccaacgctctgtatacaaactctgattttgttaactagtcgacgataacatttcaaaaaaaaaaacaggatatccctaaacaactagtgattgtgaatgcgtatatgcgtcactgtataggatttcaaaacataaagcacatcttcttccgtttcattccatcccttaacgtaagattcagtaccattacaatgacctagaaagaaaaggcgatatatattaaacaaatagaagaaagtttcagggaagctgaggctgacctgctccctctcaataagattctcctcaaactcatggagctccttctctttgatatcaactttagccttcatggcctcaaagtcctaaaacagacacaaaattaatatataagccagaaggtaccggaagcaaaaaaagttgcacctagataactcactttttccttcaaagaaatgtcatttagcttaatctttatagattcttctttctctgttaattcggacttggcacccgaaatcttttcctgtaaattttcaaggataatctctttcttaacgatggttctttcattttccatcactc

SEQ ID NO: 48751 - DNA, 591 bp, Arabidopsis thaliana landsberg
ctcagcccacttttcaattctcattcgtctaggtcttgctacctatacatccttccatctctctattttactttacacacaacaccctccctatcttcaaccatgcctcccaagaaagcaaccagcgtgaccaagaaggccgccgccccggctcacgcttcctaccgtggtatgtttcttctgatcctgcacgcgtcccaaatcgcgtaaaaataaattctatatcgctcgtgtcgcgaacgtctgctgattccgttcatatagatatgatcaaggacgctattgtcaacgtgagtagatcaccgccgccgcccgacttgttgtgatctcgggtcgcgcccgaccgtgacacgtccggtccaaggcttgcatctagccaccacatccataaggatgacttttatttattcttttgcattgctaactggcctttctgtcaaaagttgaaagagcgcaatggttccaggtatgtgtttgctgtgcgcaacatctcgacggcccgctctttggacccctcccggggcttggacaacgcgtgatgatttgatatttttttcttggggaatatgtactgacttaactggcccccac

SEQ ID NO: 48752 - DNA, 996 bp, Arabidopsis thaliana landsberg
  unsure (1)..(996): unsure at all n locations
tgaaaatagtacttaagaggattaaaaaaccaaaagcaagaagagtcatagactcaaaaacataacaagacacaaagtacttaaagtagcaaataaattacttgctaacattttcttcttcttttgtctttcnnnnnnnnnnnnnnnnnnnnnnnnntactcatcagccttctctactggagctgtcacggaggcttccacggcgggtttctcctcctctgcctctggcttcttctcttcctccacaaccactggagcttcctctgtcttcttttcttctacttcttcctctttcttcgcctctacaacttcctctgttttgctctcttcctctacaaccaccggagtttcaacaggagtttcaacctgagcttcttcatctttactgatctccacaacctccggagtttcaacttgagcttcctctgtttcttcgattggtttctctgtctcttccacgaccaaatctttagttgttacttcgactggcgcttgagattctgttaccggaactggaagagactcggagacggcggtgacttcctccgactccacagcctttggtggtggcacctcgatgttctcagctgctactggagtcacttgttcaacctacaaaaaccattgtttcaaacttcaaaacttagattatatagatcaattcaaaactgcgtgaggtttttatttgatataataaaggatataataaacggcatgtagtctgttttagttagccttcaacagaatacatgatcattatgtaaactttagcatatagttagtctgtattaaagcaagtgaatacatatattccgattttgatttgtttgcttggatcgctaatcaaacgttagaccaacgaaataaatttggttgaaattttaagaatatatgtttgcatacctcgacggtggccatttgaatatatgtagagaaaagagttaaaagaactgagaaaataagagaagagaaagtgtgtgtgtgagtgttatgtga

SEQ ID NO: 48753 - DNA, 968 bp, Arabidopsis thaliana landsberg
taaataattttgttgatttaaaaatttgacatttcaacaaaaaaaatagtttatttcaaacatttcattttgtttaatagtttaagtctttaagacttgtggtttacttggggaaaaattagatagaagaaagaggggtcaaaaaaatgaaaataagaaagagggcttatctgtaaaaaaaacaacacatactgtgcttaaattgaaaatcacctaaaacaaaagcgcctccggtatatagacggtggatttgcagcgagcaagtaaagaataacttgaaccgggtctgatgtttgttgatgacccttctctacacaccttgaaacgcagacgactcgagatcaccgattcaatggaagcttcttcttcagctcaggtctaacttcattcttcttcttcttctccctcattgatctatatcatctgattcctacttccatttcgattttcatttgatccgaaatttttctgtttcttcttcttctatatttgggggttcccgcaaagttttctagggtttttccatttcttgagtcgaattcaatatttatttgatggattttcgtaaaattaggctaaaattgctgatatgcgagagaaattagggcgagaggttcgtgttttcgagacttcgagtatctcacagagaccaagtcaagtttctagtgctggtaacttttttggatctctgattcttatattgcatttgatctgaatttgaacaagtcttgtgattgattgtttatgaaaattccacagacgatgaatctgatgatttctacgagttcacacctgcagatttttaccgccttttggctactaagaaagaggtaacatgttctgagaatctgatggttagttacattcttaccatttctgaaatttgcaatcttgtcaaccactggttgcatatcgatgatgctgcttaagaacagacctgtgttatctctactgatgtaatactatca

SEQ ID NO: 48754 - DNA, 548 bp, Arabidopsis thaliana landsberg
ggttgctgtcgtgcctgctggtggaaaccaagactgttgcaaatataatatgttagttatagaaccaatatcgagtgtgttgagaagaaataagacactcacgttcattgcttgttgggcctgtacgttgtaagcagccatgtactctgattgctctttgaggaatgtcatcttctgccatgcctgagactgaaccatatcatgaaaacattattcaatttcgtcaagtgtttcggtcctgcatgtataggcaaggataggttctaaacccacaacaagctaacaggatccaaaaaaaattcggcagcataacctcgctgccactaaacaatatattacttatatataaaataaagaatgctatactattaatcaaataaaattaaataccacataccctaataatgtaactattctacatatcaatataatgcacttggaaagtaataatataatagtactacatattaatatgaaattaatgccacaaatacaatatgcccctaatatattaataaaatcaaactaaacaataataataatcacac

SEQ ID NO: 48755 - DNA, 543 bp, Arabidopsis thaliana landsberg
agtctacctccttttaaattaggcaaaccgaaagagtaactctgcacaacaaaactgactacaaaacacagaaaccgatatgaacaaggtcagcagttacctggaaaggggcttgttgtcacagcccagaaatattcgactccgcagtccctttatcatgattgcaactgcaagggaggcaacatcctggcaacaatattatatgtataatcacaactaataatatagtgttggttgtggaacaagctatactcacaccagtccatgtgattgacatggtaaggaccttatgcctatgtcacgacatcaatagctctatagggcaccaaagcattcacgggcatgctaggctcacatcgcacaatactatggtgccactagcatatctgtcacataactgacatgtcacacactcaagtatgttgatgtgatgccggagtgtgagtccctggctaatgcctcttcctcttcttgctgttcttcgggtgcttatattggttccgctcttgcatgcgacttgcttgaactgcatcatcttccttg

SEQ ID NO: 48756 - DNA, 765 bp, Arabidopsis thaliana landsberg
tctattttttcatttatttaatagtctacaatcaaaattattatatttaatatttttttgtaggaaaataaaagaacattaacctctttcatgatatatatctaaagattctaaactgttccaagcatatctcatcaaaatacaatcaacacaaaccttagacatagaaggatgatgctaacagttatggggtttaaaatgtgaaaaaagaaaagtttgaagaccaaactataaataaataaaaacaaggtgagaattgcatgcagagtgcgtggatgaggataaggttaagcaacagtttcttctgtcccctcttcaaaacttttacttatcttcttccatttttaaaatgttaatgatacaagtaataaaacaacgtgataattattataataataaattctcttttttgttttattagtatttaatgtagtaaggaaaaccaccagagcacatagacaagaagatcacattataaagatctcatctttctcttctccttcttccctcctgtatctgtattctcttatcagacaaaaagttccaagatttttctaatagcgatggattgtgttgaatcttatttatccggagataattctgatgaatctccggtgatgcatacttggttttctccgtctccgtctccgtctgactcttcctcttctccttcatcttctgcttcttcttccattgggaggaatagcgacgaccgtgagaaatcgtctgcagacggtggagatgaccccctagagaatgaagttg

SEQ ID NO: 48757 - DNA, 658 bp, Arabidopsis thaliana landsberg
aacccaatgccaaataaagccattgcttgtggagtatgaaggtatatagatgaactaggtgctgctcttgagggaggacatgaaagctgagtgggttgttgtgaaaggccttacaaggacgtagtatgtcaaatttgttgataagatccttattgggcttggcccatagacaaaagtaattttgagccgaaaagaggaatctttccactctaaaccctatgcgtgactcatctccgtctctcacagtaataatcaagtcagagccggcgaagcttgccgtttccgccgttggaggtaagccttatctctctttctcatctccttctccgatttccaactctcagataatagattggcggttcatggatcccattgtttgatttcggaactgtgttagcagctaataacctagactatcaaatctgatacattggaatttatatttgggctattgacgctgaaaccgatcttatgaatcatcctttcttactcaccattttgtttcactgatcttgatatgttcatttgatctggaaagaagaaacctttgaacctaaacctatacaatagaaacatgttttttgaaattatttttatgttaagcacttcttttttgataatcagccttattctgagatcttgatctctttgcattgga

SEQ ID NO: 48758 - DNA, 566 bp, Arabidopsis thaliana landsberg
tattggttattttggtctaaaaatgattgattttttggagttataattgtaattttaagtgactaagttatatcaaatttaggtataattactattttggatattcatttggttctaggttcaaatatgattttttggatacatgagtctaggatccgttattttgtcgatttcaaattcggttcaatttgttttttagatcaatttagtttatgttttcggtttccaaatatttttttcagacctaatcgccactattaacaaaatagaaacattgagacaattcactctttttattcctctttttctgagtctacacctcaaaattaaaaaaaaaatgctttaattttataccaaaatatcgatttatatctaagtatcaaaaatcaagattaaaattttggttaagaaattaaatatatcttactggtttacataactttcaagtcttcaactacctgaaagataacatctaagcattaaccggtaaaactaataaacagatattttaataagaatataacagaagtaaattcttattaattcaacaaagaaaaaatatgttc

SEQ ID NO: 48759 - DNA, 715 bp, Arabidopsis thaliana landsberg
tttaaagatatttaaaaatccttgtatcgactctcattataaatgtcacaataaaagatgtaatagaccatactgtcaagaaataaaaaaatatactccatgctatatttttcttatctgcaaataatgagaagtaaatgtcctgattttgagatgggttacataacgaataactatacaagtcataagtcatctatgttaaccatgaaaatactgatctttacatttacatgtcgaagatgtttacaaaaaaaaaaaagatttcgaagaaaccctaaatgtatatattctttgccggctctatgggagtaaagttagagtctttgtcagaactcaaagatgtgaaaataaagggtcaagacacacacttaatgaatttggaagataaaagcacaataaatgaaaactttttcgtaatgacgtacgtatttgtacaaaaaaagaaattaaataacctgtacttacttacacatcacacattcggaaacttttactcacacgtaaaaaaaagaaatttcccatcatagacaaaaaaggtacaaaacgacatcatcttcttatttacccggaaaaacccggaaaattcattcgccggcaagaatttgccttctaataattttccaagaagaaaggatcttcgtacggaaacgagtccaaaatcgatcgtttttgttgtgatcatcacgtcaagcaaaagatcagggagatcggagaa

SEQ ID NO: 48760 - DNA, 1811 bp, Arabidopsis thaliana landsberg
gcgaatctggattcaaaattgccactttttgttgtgaattttgaaaatttgtaatactaattgaagattgggttttgaaggttttcccaaagttgagctagcttctcttatgctcgattcgtcgagcaaattaatactatagaagaaaaaagtacagagctttattaaagcaaattagcaatggcttcgaatctcgtggaaatgtttaatgctgctttgaattgggttactatgattctggagagtccttcagctagagttgtcttgtttggtgtcccaatccgaggtatagatttgaagaaacaactttaagtgaactttgtctgtctatccaagttttttggttatttgagattactaaagatttcaacttttttgtttttgttttcgttttccagggcacttctttgtggaagggttgttgggtgttgtcattatcattctcctcactcggaagagttataaacctcccaagcgaccattgaccgagcaggttctgtctcagatcctttcttgatattggtttgatagatcacataggatttggttcttggtgacatctttgatgtgtggtatagttgaaatgtattgagttttcggggttttttattacgcaggaaatagatgagttgtgtgatgagtgggttcctgaacctcttataccgccaattactgaagacatgaagcatgagccaccagttcttgaaaggtaacgtagaagacttctatgtagttcgttgtatagccttattctgtgttatgcttaaagattttgttgggtccatacagtgctgctggaccgcatacaacagttaatggaaaagatgtggtgaattttgcctcagctaattatcttgggctcattggccacgagaagttgctggtaacgtgaagctactttgttttcaatacaatctctcttctgtttgaatagttttatttaagatttgtcttatgccaggaatcatgtacttctgcattagaaaaatatggggtcggttcttgtgggcctcgtggattctatggtacaattggtaagaagacaatcattttctaaatagatactttggttcatccattggctcgcttggaaagggttcttactgtttgattacttctcttgactagatgtccaccttgactgcgaaaccagaatatccaaatttttgggtactcctgattcaatcctttactcttatggactttccacgatgttcagcacaattccttgtttctgtaagaaaggcgatgtcattgttgcgtaagtacacaatttcttataacatcgttctacttattagattacgttagtagaaatcccaggattacattgaacatctttgtttgaaacttttttatctcgatattaaactcattcttgtcttttctattttcttagtgatgagggtgttcactggggaatacaaaatggacttcagctttcaagaagtacaattgtgtacttcaagcacaatgacatggaatcccttcgaattacccttgagaaaatcatgacaaagtacaagcgctcaaagaacttgaggcgttatattgtagctgaagctgtatatcaagtacctggcagttttctttcttctcctgcttccatattttgaaaattctccctgaactgtgatgcttacccatttgcctttgggtatgttaaaatctacagaattcaggtcaaattgcgcctctggatgagattgtaaaactaaaagagaagtatcggtttcgtgttatattggatgaaagcaactcttttggtgtgcttggccgttctgggagaggtcttgcagagcatcatagct

SEQ ID NO: 48761 - DNA, 1198 bp, Arabidopsis thaliana landsberg
tatatattcatttaagagtattggctattagctaaatgactaatgcataacacatgtcatccctcatcttatttggttgttattttctttaaaagatctattaaatggtgtataaaaaatcaagataataatagaaaaacaggttttaaatacggaagcaataataatatagatttgatatggttacttttggttgtgagtggggaatatttatattttggttgacgaaaaagaagaaataacaaaaggaaaaaaaaaagaagagggagtttaaaagggggaacaaattccctccaaatgattgggccataaaccagagacaaggctcaagccaactctgcttctatctatctctcactctactcataaaaatctccatatacgcttcttcttcgttctctgatttgttggtgcgcttctccgtcatcgttcgccgatcatagtcgatcccgccgcttccaggttagtcgtttattctcgtctgccttcgatctcctaatctcatcgtgttccgttagattcgctgattttgattcgtttaagctgtttctcctgggattcggttttgtttttgttcttattttcaatcgcgatgatcgtcgattgatttttccccctgattgctgatctgtttttgaaacggttccagattcaaattatcatatctatatatatcgattttgtttgatctctgattcatatcaatatatctagtaattgattagatgattggattcgattttgctctgtttgaataagttgtttccggaatttaagtagaatttgatatgcaagtgattgtatttggatcctagaacttgatcttatgggatcataatccatataaaaagtagactaatgctaatttacgttagattagagtgacacatcttgtttcctgtttaaggcgtttactaatcttatttggtttacttactgatgacttatgagtgatgatcaccacatacataaatttaaaattataggatgctttctgtttcaatatccaaaaagtatagtaatgatggtttgtgttggttgagttataacatcatcaactattgattggataataatctcgtattttttagcactaaaagactcatttgcatgtaaacttttccttagaacaaatcacaatcttttttagtgataaatatcgttacatctttttcacaagggaatattttacctcaat

SEQ ID NO: 48762 - DNA, 1138 bp, Arabidopsis thaliana landsberg
cggagcaaacggattcagaggtgtacgagatcgattacaggggaccagagactcataactctagacctccaccggaaactatgcacggcaagccaccgtacatccaccacaatacctccgccgctgggctcggtgctcatgtaggaggaaagagtaagttgccatctccgcctttactaatatttatttatggcatttacgtaaatatgagtctttggttttttaaggggaaaaaggtaaataacagtcattaaatgatatatttattattatcaaatattcaaattgtatattttattcttattcttcgaaattattatgatccaatcaaatgaagtaaatttccctttcttgcatataatggtgaccaaaacatgcaggattaattaactaactctgaatttgtttccaaattccatgtattttgatatgttctcttctccatttatcagactagagagagagcgagaccttttccaaggagaagactcagaagttgaagaggaagattacgagagttgtgatatatatatgagtaattattaatgatgttgatacacatttatactttaattatttatcatatgaagatgatcatcgatgtgtgatcagtacagttagtgtgaataacacactactctcctgatgtcatgtccggtcttttatttatttcatttttcaattctcatgcaccgttctctatatcatttttttcggtctgaatctttttgaactttttttttttattattaaatcagggtaatgtgtcactaaatgaatatcaatatagtaattgtttaaatatttgtttaaaacgataaatgtataataattttgcactctccatatacaaaatgtttgggatgttgttattacaattacaaatacgtttattatatcatctattttgtatctatgtttacaaataagtttattatatactaacataagtatattggactatattatatttgatattaagaaaatatttagacactccaactccaagaatgcaagattgcaactttgcaggtgccaaggtctgaaacaatccaaacacttatcattgacgactgacgaggtttatttttgttgcggcctctcttttattattatatatgaaaattataattttaaa

SEQ ID NO: 48763 - DNA, 306 bp, Arabidopsis thaliana landsberg
cacgttgccgcgcgggcgccggcagccgttgtccacgcagggcgctggcggcctcgaaggcctgcatcacgcgctcgacattggcgctgtcgacctgcgcatggccgtcgcgaccgggccacaaatcctcgacatgctcgaccatcatggtggcgatgtggagcacgcgctgggtgcgcgcgtcgcaggcgatctgcgcgatggagtgcatcaggcgctgcaccagcgcgtcgatcgggtcgccggtgcactgggccagcccttccagctctttttcaagcggcaggtcacgcgctccatcatggc

SEQ ID NO: 48764 - DNA, 733 bp, Arabidopsis thaliana landsberg
caaaagtatttgggggcagaaattggaccctgatgcagtgccgttgcaaagtaaccatgttgcacgatataaatgtagtcaacacttcgagagctggagatcaatcacttcccttctactcgactcttccaagccaacctctatgtcttcactctcaggtatgtctttcaagcattgatccatagcatgtggagagaacgctagacgccacggtgagcctgcaaatcccggctccaaaagtcacaaaaatcattagaaaaataatgtttggaacagattcagcaccattcaacaactaagcaactctaaacttgacgacggactgcggttttggtttcactcccgtcgtaccgataacttctaagctgctttgcaattattcaaaatttctactctctatgttacatttaatgagaaaaacgttttgtgttgaatataggtttacattcatacaaaaaaaatatagttaacattataacatatcaaatgactataatcaatctttgcagttaagagaattttaagattacgtaacacatatgtttttgttaaaaacctccgtaacacatgttaaaagatatatcaatcaatttcttatttttagatcaaacaattaatttctattttaaatacatctagttttcatacatttatatatttttacgtgtgaatcagtttccataagcatttgaattttgatcatatccttgtttttttactgttatgcttttta

SEQ ID NO: 48765 - DNA, 656 bp, Arabidopsis thaliana landsberg
  unsure (1)..(656): unsure at all n locations
ccttaacattgcaaacatagtagaatgacaaggtcaactcctttttgttcagataaatccctctctaagggatggaagaaccgtgagcaaaagcaagacgtgcacaaaaaaagactcctaagaaaccaccagaagctggtaatggaagctcctatttttgacaagtgtgattggtatgtctctgttctaatatcatgtattccgttttggatttaggcaactgttttttattcagttatatttcaagatattgtggttgtatatttgtagaagtatgaacaccatcatgcactttctatgtatgcccattatcatctctactttagttagtctcattttctctcctttatgggtatgcaggcagtgtgtttgggatcttgcatattctattggaagctatgtgttcagcaatggtttggaccccaagtcacaggcctgaaattttatcatacttcttgannnnnnnnnnnnnnnnnnnnnnnnnnnnnnnnnnnnnnnnnntgattgctggtgtcttttgcctacttaaaattatttaaagattgatacgttattacccactccaaataataacacaaatcaatgtaactctaaaatgttgaactttgttagattcattggtactgatcatttacttaagcgatctacagaaaata

SEQ ID NO: 48766 - DNA, 1498 bp, Arabidopsis thaliana landsberg
taagttggcagttgaaagagagaagcacattaagcataaagcagatcaagcaagagcagagagatttggcggtaatgtggctttgctcctaaacttgctcaactaaaggagaaaagggttgttgttccctctgtgatcacagccacaggtgatcagtctaacgagtcaaatgaatctaacgaaggtaaagccagcgaaaacgctgcaaccgtaaccaaaatgaagcttgtagacattgagaaacgacctcctagagtacctcgcccgcctccaagatcagctggaggtagtaaaagtactaacttgccttcagcaagacctcctttacctggtggtggtccaccacacctcctccaccacctggcggtggaacgcctcctcacctggcggtggaccacctccaccaccacctcctcctggagcacttggaagaggagcgggaggcgggaacaaagttcaccgagctcctgagcttgttgagttttatcaatcattgatgaaacgtgaatcgaagaaagaaggtgcaccttctttgatctcttcaggaactggtaattcatcagcagctaggaacaatatgattggggaaatcgagaaccgatcaacattcctcttagcagtaagttcacactttcaatataatgttaaatgcaattggatttgaaacaaagaatcaattgtttaaacttgattacaggtaaaagcggatgtggagacacaaggggactttgtacagtcgttagcaactgaagtccgagctttcttctttcaccgacatagaagatctcttggcgttcgttagctggctagatgaagagctctccttcttggtcattaactcctcttttcaacattactttctaaccgctatttcgttttttttttaaaaactcacggatcaatctctatcgttttgtgtaggttgatgaaagggcagttcttaaacactttgactggccagaaggtaaagctgatgcgctacgagaagcagcttttgaatatcaagatcttatgaaactggagaagcaagttacgtcctttgttgatgatcataatctctcttgtgaacctgctttgaagaagatgtacaagttgctagagaagtaagtaaaatgtcaatccgaaaaacacacactaaatctttccttactaatgttccatttctgtttctttcacagggttgaacaaagtgtatacgcgcttttacgtacaagagacatggcgatttctcgatataaagaattcgggattccagttgattggttatctgatactggcgtcgtaggaaaggtaaaacacatttgttctttctgatccccttccatttatctttttatctggaaaacaatcttgaaaatgctctgtttggtttttgtttcattttcatcacaacacagatcaagctttcgtcagtccagctcgcgaaaaagtacatgaaacgagtagcttatgagctagattcagtgagcggatccgataaagatccgaacagagagtt

SEQ ID NO: 48767 - DNA, 843 bp, Arabidopsis thaliana landsberg
gtaatacccaacaggtagattactggtggtcaataagttatacattaaatacaaaaagtagagtagttcgtttacactttacagagagtcgtagctcggatccattctaactaatcgaagtagcacctatttacctaatcgccaattattaaattggaccagtggagcaagatcataccagctgttgctgacgtggaaaatcgttattggttagattgatttttaaaatatataagacttaagttgaaccagacccgacccgtgacttctccgacactcatgacccatccactctctctctctcacataacacagcagaagtaggtggaaagcaatgtccccttcttcttttctctctatctatttgctaatacctctctgctattacacatctagcgttcgacggaataaccagagagagctttctgcgacggctttaatggtgttgatgctggttctttgaggcctgtgcggagatttgggttttgggtgaattgtttgtagctgttgtcgttttcaattgtttgtatcgaaagagggtgaaattgaaacccaattggagcaggatttgtcgaatttagctgggtttcgtttcgaggttggatctggagattatgctgttgaggcaatggaggcttctttagcggctttggagcggccacgaggttcagcttctaatacggtaatggaggtttctttggggtttttgctgagtgaaattcagaaatttacttttattgttgtttctatgtttttaattgtccgaaatcgctaaaaataggacaaagtatgaaaatgattgctaaagttttaatcttttataagaaaattggagtctgtaga

SEQ ID NO: 48768 - DNA, 176 bp, Arabidopsis thaliana landsberg
ggtccgagggcaagctcggtcgctcgatgggtccttagggccgaatgctggccgcgcgccgggacgctgcaccgagaacaacaacttgatgtcgcccgacacgtgctgcgcccggcgtgtcattcgccgcagcccctgcttcgagccgactcgccgtgcggcgcggggtgccagac

SEQ ID NO: 48769 - DNA, 803 bp, Arabidopsis thaliana landsberg
taatttctaaacattttcaaaaatgactttttatttattaaaaaaataaaacacccaaattgccttgtgtcataaagttacaaaatagaataaatagtgggatcatgttttagtctctcacaccaccatccatcactaatcactaataaagctttcttctgctcaaagttggttgagccaactccttccgttttcttcttcctcaagactaatcagctgctcttctgcaatgaaaaagcactcaaaggagaacgctctcgctcttcagcaggagactctcgaccttgagaaccctgaatcctctcctcgttcctccggccggagctgttcctctgctttctcgcgtctggttggtctccgatgtctcatcgttttggtcctaagctgtgcgattcttctctctgcgatcttctggctattccctcgtcgatcggtgtctgaattcaaagctgatgggacagttaaactcaatggtaagcttcttacaacaaaaaagttgataacgttttggggatacatttcgtatgatctctcagtaactcaccagggttcttgagtattctgataatcactgttttggcaaaggttatacagaaattaagagaaccctttttgatcagtttactatgcttcagtttagttttgatctatagttgttgtttaaaggtggagactttaagtacagaagctgtctcttgaggcaattctcatttttatgcaaattctcatgacttcctttactgttcgaatttagttcttagtatgatagattgcgaaaagatcttgtatgatatacactatat

SEQ ID NO: 48770 - DNA, 1204 bp, Arabidopsis thaliana landsberg
aaagattttttagtttttgtttttacatgcaaccattagtatgagattccaaacaaaatcagctcatgcatatcttttgtgaatactaccaaattagaaataatgattttataagagatattgtttaggttaatttgagtatttctctgggtttttaactttttttgggcaatttagtttaatgattttgcttatttttggtttttctattccagaaaagtaaattttaaaatttttaaaatgatgcttgcttgtaaaaataggaaaggtgtcagtcactacatgactcttttaagtcgaaacaatcttgttaaataaataaaaagagagagagtgattagatattattttggtagagataaagaagagacacaaagtccagctgaaacatcctacgataagcttaaacatcaaaagaccacttctttggttggttttaatatttgaacaatcctcgtatacataaagttggcactcttgagctttgaagacatccagcaaagccttgatggttgatgctcatcgccacgaagcctgaaccgttttcctttccaatattacattattgtctaccagacccggttcaaccaaatcgaacccgactacatttttgtaacacgaaaccatccgagaacgttgcaaaactgattctagcttcatcattaataggcttttaagagcccaaaactacaaataataagcccacttcaaactgattttatagcttccacattaataggcctaataatggtcatttggatattattgagaatgcaacaaatataaatgtgaaacattaaatcaaagaaagtcacgccaaaataggttatatacatatacttttaatttgcattttatcaacaaaactacaattcaattgaaaagaaattataaatattgtagaaaattatttaaatacaaaaggaaattatgtaaagttaggtgcatctgccacttgttgttattaccttattacaaaaaatgaaaggaaaagctctaaagcttggcccgcaagtcactttagtgttgtagctataaaagggaagttgaccttgggataatctactcctctgctctcaacgtcatcttctatattctatagtttctatttgtccttcgttctctgctcatccatcgatggcgaataatcatcatcccaaggatgaggcttatctctcatccgtcatccccaagcgtatcaggc

SEQ ID NO: 48771 - DNA, 623 bp, Arabidopsis thaliana landsberg
catggtaagtgtaatttatggtcgtgcatatcatgaatcttctatgtgttttatgttattttcttttgcctgtaggaagctagttctggtgttacgccgagtgatgttcaggtttaccttagaggtcacagggggtcggatcctacaaatccagaacagttgtgttctcagtcagctgctgagcgtgtggtgagactttcgcaactagttacaatgcacttctattctaagagtcgagaaaaatataactgcattgtttattatttgtcaggcctcatatggtgcttccatgatgtcggagcatgggcaagactatgattggatgaatcagcctatcgatcctcaggttgtgtatgctagtggaggcggaaaacctcatggacggtgagtttgctattattaattcgtcgatttgatcttttctaacatgatgtgttgcgtgtttaacttctttctatttgtttctagttaccccatgtttggtagtgttatcgactcgactcaggtgaggcctgaaaggtctcgtccatcgaggtcgtctagccgtggtcctcgctctagtaccaaggaaacgtcgagctgatctggatgcaggaagctttgaggcggcaggaggagtatac

SEQ ID NO: 48772 - DNA, 547 bp, Arabidopsis thaliana landsberg
cggcgggtataagctaaggattgttcttgcatgtgacagtgtttaaatacgattcaaagatggattcggtgttacaagtaacaaaagaaaactacgaaaaatgcaacacacagaagcctttggaagaacacaaagacggatacacaacagtgaaactcgatgtctcagggccttactacttcataagtggagctccgagtggtaactgtgctaaaggtgagaaagtgactgtcgtggttcagtcacctaaccacccaaagccaggaccagccgctgttacgcccactcttcctccaaagccatctactactccggctgctccagccccagctccacccactccttctccaaagtcatctacttctacgatggctccggcgccagtccggccaagagcagtgctgttgggttggttgctggaaatggcatcttttgggccatcgactcttgttgctgtcattgggcttgctttcgcttaaggcttttaacaaaagttcttgaagtttaaatttcatgttatgcatccaaaatctatgttttgcagaat

SEQ ID NO: 48773 - DNA, 606 bp, Arabidopsis thaliana landsberg
gtaaacgatgctagcacgtgcaatgtcaataggggtaccatgcttgctgaacttatacaggtgtcctccctcattatatgggacgaggcgccaatgacccatcgttggtgctttgaggctttagataagacaatgcgtgatattctttcagaacatactccttcaaatgcgctcctcccgtttggtggcaagcctgtagttcttggtggcgatttccgacaaacactacctgttgttagaaaaggatgtcgctcttccatagttaacgcctctattacaaactctaatctctggcgccacgttgtcctccttaggctgcgcaccaacatgcgcctttttgatccctctttgcaagtacatgcgcgaaacgagctcgacatgtttgccaaatgggtactatcttttggtgatggtacttgcctgctgaaagaagagcgagcgagcgtgaggctacatggattacaatccctaaagatttgttgctctgggttgagggtgataaggtagatgcgcttgtatcaaaagtataccagattttctgttgaattactgagatccacgtaccttcctcgcgtgccattgtttgccaaataatgcacagtcgat

SEQ ID NO: 48774 - DNA, 614 bp, Arabidopsis thaliana landsberg
  unsure (1)..(614): unsure at all n locations
gttgataaagataaaggaaggactactccctcttggaaaaactccaagcaattcaacaacttatagggtttataaataacaagaatgtatccaaagatggagagttctattatgatggacgaaatctcctccaggccacatcagaagacgaaaacaatgcatattgagaatatagacaagaagatatattttgtagttaggagacttcatagcacttgcttgtacatttgtatatattactattaatatttaatttaatatacatatataactataactataaaacccgcgtattaatgtacacattagttgatgtagacatgtatattaatttgttagtctacacatgtatatatatattaatgtacacatttatatatcatttataaatatgtagaataaaaaatccttggacttttagtatcggttcaagcaaataactagtactaataatcattttcagctgtttcatgttgagaatcgatattanaagttcatctttagtaccatttaaacctagtacatatactagaaaggaaactatttgtactggtttgagcacaaccgaatattaaggcgctctttagtacgagtcatgcaccaggattaagatt

SEQ ID NO: 48775 - DNA, 603 bp, Arabidopsis thaliana landsberg
  unsure (1)..(603): unsure at all n locations
nnnnnnnnnnnnnnnnnnnnnnnnnnnnnnnnnnnnnnnnnnnnnnnnnnnnnnnnnnnnnnnnnnnnnnnnnnnnnnnnnnnnnnnnnnnnnnnnnnnnnnnnnnnnnnnnnnnnnnnnnnnnnnnnnnnnnnnnnnnnnnnnnnnnnnnnnnnnnnnnnnnnnnnnnnnnnnnnnnnnnnnnnnnnnnnnnnnnnnnnnnnnnnnnnnnnnnnnnnnnnnnnnnnnnnnnnnnnnnnnnnnnnnnnnnnnnnnnnnnnnnnnnnnnnnnnnnnnnnnnnnnnnnnnnnnnnnngtcttaacccccccttcccgggggggttttttttttttttccccccacattttatttttcccggcgggggggttgtttttttataaaaaaaactccccccccccccccctcgatgataaaagaaaaaaaagaataagtttggtggtgttttgggttactgacacggggagggggggggggccgcccttcctcgttaaaaacaaaatatatttttttttttctcccccccaccgggggggggggggggggggctcccccccccgcggaagagaggagggttttttttttttttttccccaggaaaaaaa

SEQ ID NO: 48776 - DNA, 483 bp, Arabidopsis thaliana landsberg
  unsure (1)..(483): unsure at all n locations
tttttttgctccatgttatgttatatgttgtaaagttagtttaattagctgatgtgctgatgtgctggtgggctaatggagtgatgctttttgtcatcgttcattcattagcacattatcacattagctaatcagcacattagtattagtagtggcatttttggcaatnnnnnnnnnnnnnnnnnnnaacggtgatgcctttggtgctgtcaatcttgccgtttttaaggtcttcgtggtatttctcgtaaatgctgtaaaatccgttgtctttgaactgcactttggtttcgcggtggcagttgatacaccagcccatgctgaggtcggcgaactgttttacttcatccattttctggatctcgccgtggcaggtctggcaggctacctggccggcgtttacgtgctgcgagtggttaaagtatacatggtcccgcaggctgtggatgcgcacccattcaatgggtttggcattggtaggct

SEQ ID NO: 48777 - DNA, 774 bp, Arabidopsis thaliana landsberg
atactttgagacgcattctcaggagaaagtcacatttgtatggatgaccgtgtattagatcttctacaaattgtcgaccgctgttgggatgagcacacaatggttgcttcaccatatttattattctaaactatctaataatttagaatcatcttcaatgtcatcctccaccatttgccaaaacaattgtactatttgtatttaacaccacataaaaacgtaagaaatatataaaatacgataagatgtgaactaagagaaaaccaatacaataacatttagaaaatcaaatagaatatatgaaatcaaaagcccctcccaaaaaatcctaaagcaaagacagatgattttttttaatgattactcgtcatgtttacgaccaatcatttggtcgagataaagaggtgcaaacttgttttcttgaatccctataaaccatcttcgagcaacttcatcattcgaaagtaaattattggcatccgaatagaatattgagccaaactcaatctctgaattttgatgtatccgtcgtgcagccatggttacgtcagatgtcattacggatgacatctcagttgctgccattgttattgcatttgatcgttcagggaaagcttttgatagatcagtccgattgtcaatgttcgatgcccacgtttacgtttacttcggtgatcagaatgtgatcgttcattggaaggtggattaatggtgccttgtgttgactgattggtctgaatttgtgcatcctctggagtagataacggcacatat

SEQ ID NO: 48778 - DNA, 785 bp, Arabidopsis thaliana landsberg
caaaggtgaaaagtactttgaaatttaaatactagaaactcaagatggctttataaagaacacgtgtaatgttttttgtatattcaaatcgtgttacaaagttgatttattaataaaaatggattaaaaaggtcgaggacttgctggattaatggtggtcgcaatgtctagcattgggtgtggatggtactatgcttcaaaatacagagccaaattgaggcatcaatacgctttgcccgaggcgccttgtgccgatggcgccattcactgcttctgctgtccatgtgctcttactcaagaacaccgcgaactcaaacatcgaggtcttgatccctctctaggtaaacagtctctattcgtcctttctctttttagtataatatattaatgatggtcgttttagtgataagttttgttgtttttgtcaccgttgcaatcattttactacaaacaaagggtggaacattgagaatggaggattaaacagcaacacgcccccgtttgtagcgtcaggcatggaccgttaaggaacatcacaaattaatgcaagtaattgaattccatgaaaagtaaataaataaataaaccatgtgttatatataattgggttcacggaaatgataaatttattcttatatgataattttgttgtaaatatttattttatatgtgtgaagatggaagtggtaaccatgaaaatttatgatgatatctaattttatgttcttacaaaaaaatgtaaaaccaatatctatacaattgggctattggttttcctgagcgag

SEQ ID NO: 48779 - DNA, 1145 bp, Arabidopsis thaliana landsberg
tgttatagagcgataatcttggcaaaaaaatatttaacacaattggtactgtatcaaaattgtgacaaaaaaatcgtgaaaagcaaaactaaaaaggtgtatggccgttttaattttagttgaaaaacattaccggaataaaacttaatcgacatagaagacgaacctattaaattatcattccttataatttcttatatattatttaatattgtttttattagattgaaactttagaagctggattgatatttaattttatttggtttctctatcaaatcaccaaaataaaaatctcgaaaccaaaaacaagttttgacaacccgacaatccgtagacttctttaaatttttttaaggcaagtcaagaagagcaaaaaaacaaatccatggagccagaatataatcgaacaactaaatcttatttacgacagaattgtcatcatactaatacttaggtgtcttttcttgtggtttgcatagatttgagacttggtccgctctcatcagtactcagtgggctaatactaatacaaatgaattacgtaacgttttactctttttagagcatttagttatgtcccatggccatttataacgtgtgattattatttgtatttctttttttttgtcaacttacgtgtgatgtttgttaattttaatcaagttttctgtgattattcttttcgatcatatgttattcttttgttgcatgcgtgcagctgaagtccgatatattccttttatgtcactggtaatattgtgattatcatcattttctaaagggatcacgtataaactatttttataagagagccagagcttatcatcctcttacatgttcatcgtttcacaatatggttaagttttgatatcaatctttatcttcagttccaatatcaccaaaaaaaaaaaaaacgtaaaaaccagagacaatccgataagacttcttcaacgaaagacaacaaggttcttatctttttgggattcgggactaattaaacacacaaatagtttgcccttttaacaaataaacactattccgctatgggttactcttttttttgtgtcaaggatcttttaagagaatattcattctatggcacttttagaaaagtatgtacgaatttagcactttgaaaagat

SEQ ID NO: 48780 - DNA, 1385 bp, Arabidopsis thaliana landsberg
caatttccatgaaagtgatttttttgcagttaatccaattgattggggtatatatacgtgtaacttataaaaaggggtatatatatagttcaatactagtagttagttaaataaggtcaatgactaagtagtaattgacgttcacaaaatagtgatagaccatcatattcgttatctttggcctttttggcgaaaaacttatggattgtaagttgtcgattgatttgttacgcacccacaaccggaaatttaacccgtctaatcttttctaatcctaaatttgtagtactatgtatgtatcttcttttgataaccatacaatgtctataattttattttattttatcatcaacgtgcataaatgcagatttgattcaaggtagtaattcacaacaacaacactaatacaaataattgtattacatgttagaatgctctttgacaatagatcataacatattttcttgtaaaaatctcatataatatccaatcaaaaactttttgtgttgaatctgaatgcggacatgataacaataccagtgaattacctatatccacataattcatatgatcattatgctttattcataaatactagtaaatgttgcaaagaaaaatcgaggggatagtatttttgtgtacgcgaacatgatacttgctgacttcacctactctaatttaataagtcaattctttggcttcattctacaaccatcgatcgtcttaatatttattgggtccgttttaattccttgcgattcaaatcttaatatacatttaaacaagaaaaaaaaactttaaaatagtacgtactaaatattttttgcaatgaatagatggtaatcgagtggtaaaaatatcgttctcaacttttacgcatgagggatgactcatggatctattatctatatattatagatagatatgtatggacagtatattttcttaatgatcgtattttccagaacgatatcgagatgaatcttgaaatttctagtctaaagttgcgatagaatgaaaaagaaacgatcatattgatcgtgattagtattagaaaaaatgatttaaatctataaatccatgagtataggtactatagagcatcaatgtgtttagtctttagtggcatgcatgttttccagctcagatttcaactcacagacaaagacatctccatggcccaagtggtagacttcttgtttcgctaatcttcctcatattttctttctttctttttgtgtttacgtgtgtgtctatatttctataaatatgaacggaatatgttttctttattctcccatgagagttaaaagaagattctatcttctagcattttggtactactacaaatttaaagattataattgatactatagaggtcacct

SEQ ID NO: 48781 - DNA, 493 bp, Arabidopsis thaliana landsberg
ccccttttgataccccgttctctaaagattcgcccgttacattctcacaactgtctgacacaaccttaagaaccttggctactctaagctgtgagtcctttgaaaccccaatcgtgttgagttcaatgtactctatcattttcctagccgtctctctgtctttcaccaaagcccatctgcaaattaaatgaacaagaatgtaacgtttaagagacttgttctctgttttgctcccacaaaagcaaaagattgtacttacccaatccgtatccctgcatggccagtgctctttgaagcagtgaagagcataacatcgtgatcagctggtgatgttatcggtgtatactgtggccaatagtaagccaaatcatggatcaatataccttcagtactgttcactactgattctctcaagaacccatcaaggttgtttggagatgtcacaagctcaatgtttgtaccatcttcttttgtacgtcttttgcattctcca

SEQ ID NO: 48782 - DNA, 742 bp, Arabidopsis thaliana landsberg
cttcaaaacaattatccaaagaaaagtcttcaataattatattgacctaagtcacaaaataaaccagttttaacttttaacataacttatggaaattgtgactaaaataccagtctgatatacctctgaagctgccctctcctacttgaaaaatgtagacgaaatccaaagacgtttcgccaaatttctcaataattcaaagaaaaaaaaaactcaaatcgcaaaattgctcatatacatgtttttagatgtattagttatgcatgtgtactcatccacccaaagaaagagttaacaattacgaaaaaaagaataggactgggtgagatgaggatcttgtgtgactaaatcaaagtttcgaaaaattcttgcaagaatggctccaaaatcgtactttcatcttttcatcagtagtaaaaaaattggatgcagtctcaattcgacataatcccatcaaatttataccataatgcattgatactcttcacttaattttaaagcttttgttggctctctctctctatgtgtgtattagcatataattcttacaacaaaagacaaatttatgaaaaatttctcaagactcgggtgttatctcaggagtctgcaaaggaatgggactgttatcttcttctttcgcgtttggattctcggcttgtttttcttcaggttgggaggctacaccattctctgatgcatcctttgtgtccgtgctgatgaccttttggagatttgttggatg

SEQ ID NO: 48783 - DNA, 607 bp, Arabidopsis thaliana landsberg
gcgagattaaccaatgacattccttctaccctcctcgctcgctgaattcggctgcgtctgcgtttgcgtctcctgcgtttggagcggtagcggctgagaagattgtgaaggtatgaatagttgagcctcatgatgttgttgcggttgatgatgatggtgtaattgctgatccgtatggtaattattattcgtcgaaggactatcaacaaagttacctccaagagacattccggttaccgctgtaccaccagaacttaactgattaaacccagtaaccgtaactgaaccggccggtacagagtcaaaaccattattaaacctcaaaatctcagcttgagcttggttttgatggtgtggactactacttcctcctcctcctccataagctctaaacatctcattctgttgctctctcgcaaccgctgctaactgctgagcctcaaagatctgttgttgttgttgatggtacagttgtcctgttggaatagccatcatcggcaacaagttatgatgatgctgagtcaacacagacgctgaagaagaagacggtcgttgcggttgaggtggtagagacatgaaatgcggttgaggcggttgaagaattggg

SEQ ID NO: 48784 - DNA, 836 bp, Arabidopsis thaliana landsberg
aaagaaaaacacgtgaccctctcgcagacgcagaagtaaaacgccaaaacaaaacgccattttttgtcgattcttcgtcgtcctcctttgaaattcacaccaatttgtctctcttcctagagaaacaaaagattattcgaaactcgggaaagtatcatccggtcaccggaaaattgattatttccgatgccaataggtgaccgtcagaatccgagtgtggagaagaagaagaacctcttcaggctatgtccgttttggcagaggagaagcaccacttcttcatcttcaacacagaatccaagccaaaactaccgtagccgccatggacatcggaatacagatatttccgccgtctctaagccttccttgactatgtcttccgtcgccagatcacttcttccagctcgccgtcgtctccgactagatccttccagttatctctatttcccttgtacgtcttctttgtttaagtttctgccgtctatttagcttgattccgaaatagtctagttctctggaaatcgattgatttggttctggattctgattggtttagaagctctctctggaagtgatttcgtagatttttggatttccattttttagagaacgaagttaggatttgtggatttgtatttgtttcagatgaacctggtaaacaagttcgcagcgcaataaagcttaagaacactagcaaatctcatactgcatttaaggtaatggagttatatattcacatcaatttttgctattgattctcgcatttgtgatacttatttgagaactagttaagaattgcagagaagttgactctttgttgactatagtttggactt

SEQ ID NO: 48785 - DNA, 558 bp, Arabidopsis thaliana landsberg
caccatctgcagccaagtcaccggaaacttcggcaacttcgccatcttcggatgagacaccgtcatgactgcaccttctccttcatcttctggcacaaacatcgtctcagttcctgcactcaccattgttttcgttattgtttcttctgtcgcttacatttcggccttttctaattaaccacagcttttacttttattttctttgtttttgatctatgaattgaattctacattgttatggttgtgatttggaagacatgttatgtttctttgttgcttttaatcatgcaaccgtaatacaatgtgaaatatgcgctgggctgcttaatttgataagaatataagaaatgggacttattactataaaaaatatctacaagatataaaattaaatattacaataactgtctttatattaaaagtatgaatgtaaagcttaattaaaatattggttaaacaacattaaacaaaaatggtttcgtgtatagaagaattgctctttatctataaataaaaaaacattcaagaattgtagtcctcggaaccgtttttcccaaa

SEQ ID NO: 48786 - DNA, 560 bp, Arabidopsis thaliana landsberg
tctttctgtgccaccgtttgtccgcttcggacacgtatttgtcggtgagcttttgaatctcgtcctgggcccggcgctcgtcatcttctgaaatttctttctctttgaccagcttcttgagcgtatcgttggcctcgcggcgcaggtttcgcacggcgatcttggcgtcttcgccttcagagcgagccactttggccagatcgcggcgacgctcttcagtgagcgccggcatcggaacgcgaatattctcgcccatggggaccgggttgagacccagatcggaatcgcggatagccttttcgacaggcccggccatattcttttcccatacctgaacactgagtgtgcgggcatcgatcagggtaacgttcgatacttggctgacaggaaccggcgagccgtagtagtcgaccagcacgtggtcgagaatacccgtgtgcgcgcgtcccgtacgcagtttggacaagcttgtcttgagtgcttcgatcgacttgctcatacgagaatcggcggaattcttgacttcggaaggattcattgatgttcctttatcagacgtg

SEQ ID NO: 48787 - DNA, 636 bp, Arabidopsis thaliana landsberg
gaaccaccaccatatctattgaatacattccaagttacacacacgtaattttaacttatagtttaaagatagctagctgaagagtttgtaaataccctaaactagaagaaggcctttgatcaaaactttgtagcattggaagttggctaaggttgtaagtgtaaccagctccgtgttcaaacgaaaatccttgatctcctgtagttataagaaaagataaaacacgagagacaagaattagtcaatttctcgtcgaattcaattataagatttatagaagccctaacttaaatcagaaggtagaagaaagctaagtaaactaccttgattaggctcatcggtcttcttgcttctgtacatctaagaagaaaaaaaaatgaagtatgatttcagatgaagatctcaatgatgtatatagatatatactctatgtgtatgtggatatttgcaaaacctgaagatgactcttaacatgggcaatacttagccccttgacgttcatcaattggagaacaagcttcggtgttgccctgtttcacaaaattattgaaagagccccaaataaatacaacaagaaaccctagagatttagagatctcacatatgcatgatcttgatatgatcatatatatattg

SEQ ID NO: 48788 - DNA, 641 bp, Arabidopsis thaliana landsberg
  unsure (1)..(641): unsure at all n locations
aacggtttagtttatgttttctatgtttctctttctaaactttgaatatatttaccacatccttattttaaatcatagaattaaacagtttttaaatgattatgatatttttttctattgtcatttctaatattttactaacaaaactttaattttatttgtctattaaatgttatatttttccggtattgttatttctgtatatacttgaactttttcttattaaggttcgtggtttctattttattttatattatatttgctaatgaggaaatctatataaaatcatgaaataaatattgattattaaaagaaaacacataaatattaaacattgaatatttaccacatccctattctaaatcacagaattcaattaattttcaatgattatgagattcttttcaattgtcattactactattttcttattaacaaaacttcaacttttctttttattaaatgttatactttccgatattattatttctctatatactcttatttaaattcngtgtttttgttttctttctatacaatatttttaattgagaaaatctatataaaaccatgaaatgaatattgattatcacaaaaacacacataaatcaattgttatgtcaatatatgaagttttgatg

SEQ ID NO: 48789 - DNA, 655 bp, Arabidopsis thaliana landsberg
  unsure (1)..(655): unsure at all n locations
gccctccttgtggtggccctcatgggaaagaagaacaattatgcaatctccaaaaacttcgtactaagaacgtcattctcaaaacagaggtatgtgtttatgcaaatacttatccaaaaaactatatttttttttcttttgattaatattaattttatgagctcatatgtcactaaatgaatctctaatttctaacactaataaatttagtttgtctactagtaatgttttgaaataaattgtctaattagttaactgaattcaaactttgtgattaagcgcttattagagagataatatgatttattacttttttggttttacaaaatactcgttcattttcgcacgcataatattttttaaaaaagttattgttgttgtatacattatatgatataaaattaaatattaaaatattttaattgctcataacttatataattaaaaatacttctgatattaactaaattttaaacgaaaagattgtctaatgaattcaaatatttagggaccaaacatttttaagcaaatttatttttggtactccagaaaagtaactaaggaagtaaattattggtagtgtaatacttacttaagaatcaaatattaagaaagaattttcttgaggtgatnaccctaaatggagtattacatc

SEQ ID NO: 48790 - DNA, 629 bp, Arabidopsis thaliana landsberg
aaattctctcaggcttcgattatttggaattttcaggcgatggatcagaaacggagctgagagttttgttaccgaaagtggcgtgacgagaaatatgaagatcgtggtgcgctgagccatgagaaacagtgattctgatggtttgagcaaaagcggcggaacagagtcgggatcctggagaggtttgtggtcggaggaagcggcgtcgtctcttcgttggacgagcataccaccaggtctcacctcccattccgattcttcggttgaattatgcatcatcgtttttcgacaatgaatcggagtatgagattaaagtataaaaccctttgggccaaaaaaaattagggttttccttgtcagggtattgatagacggatgatgcacacctcctcaagccatacaaattctcctgataacacacatgtgtttcaattgttatatatttgtcttttttggtaattagaatttttaaggactaaatgaaccaaatattttcagaaattgtaacaatattttttttcttcttaatatagatgttttggttttcacatatgatgatgatttgtgaacgtcagaaaaaaaaaatcaataagtttaagattgccaaaaataggtaacgactgattttg

SEQ ID NO: 48791 - DNA, 568 bp, Arabidopsis thaliana landsberg
gacatcccggttaacaatgagattctattatcagattctggaaatgagccctgaactaaacatgaccttagtgtggtgttggtgtgggatgtggctatcagatatagtattcctactcgaactcatgagtcattattttttttagttttatatataaaactcgtaatttgttaatctaaagatagtgcccattagcataaacttggcatatatgtgactatgtaatatttctaatctctgtaatgaagagttatatatcaaatttatctaataggaaaaaaaatatcccaatctccttggttgtgttttcggcctccaggtactcgtcggagctcctcctcctcctgttcgtccttgtgggctcgtctccgtctgttgacccgtatgtcgatcctccttgccttgaggcaacctctttcttgttataggccagcacaggggtcgaccggcagtgccttctctaggaaggagccgaagacaagggtcaactaccgttttgcctcgggtgaaccacgcgtactcgtggggccgagactacctggcagttgatattatgcgggcgatgatg

SEQ ID NO: 48792 - DNA, 1182 bp, Arabidopsis thaliana landsberg
actttaagattataagatatgaatattattatcaaggtgatgaactttgatagcttactttagttattgtcacaatcttatattagtaataagctagcttccaaaatatcttacaagttgcttgttcctctaacttaaatctcacaaaacttaagatatggtaaattgtctagttcttatcatcttttcctagtcaccaatcaagttcataactagtcaccatagtggtcaatattttccttctattgaacagagcaccataacgattattattttggtatcgtacttatttttgttgaattatacatatgaaagttagttaattctttctgtatgaaaacacgaacgtgttaataaaaaacagttagctaaaagaatctttcaatgtctgtttccactctttttcccattaatgaatcctgttgaagttcaccctaagtctcccatagaagcacatttctggagatgtagcgattccacaaaggtagattagtccaaagaaagaatgagtccttaacaacatcgactcatacttatgtgtgttgtatacattttcgtgggcaggtttagtacgaatggctgtgtctttgcctacactctcaccgattcacaacactaacggaagttcatgctggatgggcctttaggattcttatagaacacagagaagagaagaagattaggagagtagatagagaagtacttcttgttcatataacataagtgtatagagaaaaatggtgataagccacaaagaagacaaagagttgtaagtagaagcaaatcaaagcgtgtagagaactttttttgttgatacgatgtatagctttcatgggtacataatacaaaatcttgactgatgaaaacgtgttgttgtgtgaggtttattggaaaagaatatgatttttttcgtccggaattgtggcaagagaatgcgcgtgaaataatgaatgaaacataaaaccatttattagttatggaaggaagttgttggatacaactaaacacgtattgaacataaacatagtaccatcatttcgatttagaatggaagtggatggatacacctaaacacgtattgattgatagttggaaattaaaataaccttttgatttttctcacttttaaccctttttgtgttttcacctttttatgggtaaataaaaggactgaaaaaatat

SEQ ID NO: 48793 - DNA, 1052 bp, Arabidopsis thaliana landsberg
tattgatgcgctatgccaacatgtggaaaacggtaccttctgcatgcaaatgttgagagcctatcctcccgcggtttctgccaccgatttggtactaatctttaagacacatctattaaatttctcatgtttctgttttaaccttaagaaaaaaggtattacgttttctcttctttctttgatatcacaccaaaagtttacatgccaaagtttcagttgagttcttaaacttatgatttgatttatcattacacaattattctttcgctcttttggaattaaaaaactattgtttagattgttaatttaccttggcaaagttgatcatttttctgcgtgcacttggacacttgtaggcaaaagttttgcaagatgtaacataaactttttattttgcaattgtagttatctttataatttattttcagttcattaacatcaaatttgtatgattttgtttagtaaaccatcaataattgtattttctaatctatagttttccctggctaacatcgtgatcaacctcggcatatcctacgccaacaacacgggggcttttgccgccgaaacggccaagaaagagccaacgttgaaggtgcagttcgagtcattccagcatgaatatgacggtattcagttgtatctaagaatggcaaggggggagctcaaggaatctccgatgagtgcagactatgacatttttcgttgtacggatatcacaatgtacctgaaggatgtggtcggaggaaacagagacaacacctctaaaacgttcatggatatgacattgcaaatggagaaccttatcgatgttgcccttggagccaccgtagctcttggcgggtgaatatgagtcgtggcgttgtcaaaagctggcttaggtttttaatttgtagtttgcatttcctcaaagattgtaatgatttaatcctctgcaataaaaatcaatatattttcaaggtactctaagttttgttgtaaagaagtacaagacaaaggttgatatgtattaagggggtttttcttattaaagcgaaattaatgattttaag

SEQ ID NO: 48794 - DNA, 497 bp, Arabidopsis thaliana landsberg
aattctgctgcgcatatcaggccgccgctcatttggacttccgacaccgctcgacaatatcattgtattattattgggcgcggctaatgagccgcgcggtggttggcgcatcaccgtttttcccggttgtaatcagctgtctcgctattacgctgctgcatcgcttattcggcgctcttatcgctaacagcaaatggttcggtcgttttgttgagggcgaaaagatcccgctttttgaggatgggcagtttcggcgagacaagatgaaaagggatcagatgtgtaaagaagacattatgctaggagcgcgaaaatcatctttaacggaggatatggacgatatagataaaatctatatagaacgtaacggtgaaataagttcaataaaaaagaaacgataattggaataacaattgcattaatacaaacacattataaataacaattaaaatctaccatgatgcctacaaaaacaaacaaaagtgcgggagcagcaa

SEQ ID NO: 48795 - DNA, 592 bp, Arabidopsis thaliana landsberg
gactccatttttactttgaaagcagtaaatagtagttttccttttcattgcattgaatattactactgtctatatattttgcactaatcatgatttaaatagtttaatttgctcaattattcatctaagtagactatatcattatattacctacctgagcgcagattgtctctgtcacattaagaaatctctaaacacgtgtatgcagttatgtggatgcactatcaagatctatacatgtggaatataagcagtttggtattgatgccagtgccaggtactttttctttctttcttttttcttcaaagagtactatccatgtattatatcatattttcgtactccatcaggtaatacgtaaaagaaattaatgttataatacacgtacgtatgtaaatcaaatggacaggttcccttatacgtgtcaacaaggatggtgtcagaagtggcagctatagacaaacctagcttatttgtaccgccgcctgaagtctacgcataagcggcggtggcgcagatcggaattggatcacgttgcttcgccgtttaggctcattcttttcagtggtttcttgtggacttgacccgata

SEQ ID NO: 48796 - DNA, 389 bp, Arabidopsis thaliana landsberg
ctatgatatatctctctttagtaatcgtagcgagtagtttagacgcgagatttgcagataatgaggatacgatccaaatgcttcggcgaagccacgctgagactctctctctcagcctcaacgttaataacgtcaacgtagcatcgaatgcaccggacatggtctgcacgctgtcaagatgccatcagaaaacgacaacaatgccgccggaatcaaccagacgacaacaacttcttacgtctgaccgagaactacgtcacattaatcatcatcatcactacacaagattagcagctatcgaggccactcttggcatactagaacagccagatcgatgattcgcaaaggcctgtaacccgcgatacttctcgtacatgagcaacagactc

SEQ ID NO: 48797 - DNA, 583 bp, Arabidopsis thaliana landsberg
  unsure (1)..(583): unsure at all n locations
taatttaatcgtcgtagctagtgcgaagatcnnnnnnnnnnnnnnnnnnnnnnnnnnnnnnnnnnnnattaactcgctacagaagactcatcgatctgccgccgagtcaccaccgagattcgctctgttttgcggttctaatgattaattcaagacaacgttgggcttcgtgaatcgtgacaatcgacgacatagagagagcttcccgatcacggtggtggaggaatgctttaccgcgatacagatttgtcgtggattagggtgcaatttttcaaagcccaacaacatcaatgctagcccatcaaaacaggtcaattctcagcccattcatcttttaattttttctcatcccaataacaaattcacattacaaatagggttttatacacggattttttatatataaataatacaactttttattcaggtcttcttttttttggaaattttagatagaaaaactttaaagtctttttcttattattttaaaaataaaatattagataaacagttttttaggtataaataatatttttattttttattttttgaagtgttaaatttatatatgtgtaactaatcg

SEQ ID NO: 48798 - DNA, 557 bp, Arabidopsis thaliana landsberg
tccaacatctcatcgactttctcgccgtctctgtaaaactgaaacgtgggtgtgttatgtatgtgacgagcggtttcagggcactcgtcgatatctgcataaacaaacttgagcttcgagaaattgatgctgagcttttggaatgcaggaagaatctggctacaaactccacacctgaaagtttcaaaacaaaaccgttctcattgaggcatttcatcgaacactttataagcatgaaaagcgtaatcgtaaaaacagagaataaggtgtaccaagaagctccatagttaataacagcctgaatataacaaagcataaacaagaatgaacagtcagattacgaaaaaaaaccagtttcggtcttaaaaacgtgtacaaatgtataagttgtcgcgtgtaagaaccggcgatttggaagactttatgtcgtcaagaattgtgaggaaactatgtgtcgttggtgcgatattcacatttccattgtcatttgatttgaattcgaattcaagattcgctgcctctgattcttgcattctcattattttgattcctctctg

SEQ ID NO: 48799 - DNA, 477 bp, Arabidopsis thaliana landsberg
cacaactctaatcaaaaacaatctaaggaacttcaacagaaagatccagagaacaaaaaaaaaactgacctttatcatcgtagctattataagtaaacccagagatataacagtaagcgagaacagtaacaagaagcacaaagcaaagaacaaacacaacagaaccgattccaagtcgacgaatcttatcagctctcacggatcttcgccacctgttgttgttacctttagtagctccaccgacgccgtttcggatcccgatcgttacgtgatcagaagaagctcctccgccgttgccgcgaacactaaatctatctgttcccgattgtctaaattgagccattttagcattgtcgtcgtcgatgagcactctctaccaaatatatatatacacagagacgcgagaagagtggtggtgaaggatttgtgtgaagtatggttgaagcaaggttttttgggggaagagtttggttatag

SEQ ID NO: 48800 - DNA, 317 bp, Arabidopsis thaliana landsberg
ttgatttagggcttctgatactaaataaatatcaccggtaaacatggcccttaggtaataatctgggaaaatttttagagactgatctttttttttttgacgaccaaattcatttatatggaaaacaaagctcatgggcattacaagtggttatctggaagcccaacaacctggactttacatattaaaatacatgaaatatattttataatcaagcccctattttgacaggtgtaagacacgagtgtggacgcaaagcaacaacgattggatctgatctatttaccgacgttcgtttcaatctgcagtcagtttac

SEQ ID NO: 48801 - DNA, 626 bp, Arabidopsis thaliana landsberg
tcatcatcgttgtcactgtttgttccttcgtctgttggaacattccaacaacgcagccgcgaagggatcttttccggtcacggggaagctgttcttcttactggaattgttaggtttaggtttttttccggtggccggaaaggaaatattccggtgaggagggaggggtagcaatagatttgaagattcattgtttcgacggttgttgagtctatgagagtagtctttaggttttccgggaagttgttcccatgaaaaagggacaccgagtagacggagaggagtcgccggagaattcagaggagagtcgccgggaaagacaagggagctagaggagcaggaggaaaaagatgagaaggaagaagaagaagataatgatctccgggatgaaatggatgacttcgccggaaagttgatcggatcggatcttttggatacatttcgagttcttaaagaatccatgaggaagaagaagaagaaaaagaaagagataatgtgatccagagaaaaactctctatttttggcctttattggtttggcccctctgcgacttgtttttaagctgtggagaatgaggataaactgtccgaataattttggttttctcttgttattcactaattgt

SEQ ID NO: 48802 - DNA, 778 bp, Arabidopsis thaliana landsberg
gtccttgtatttatggattaacagtgcctttaacaatagcctgggactaccttcagattggagtccatcacttgatcatatcggttaagatgtaactggacaaatataactcgagagacaagaagtaatggtcaaaacaaaactgctcaaataaaaacaaaaaagtgaaagacaagatactttatctggacagcactaaagccaaaacacacaatatctttggttctggcccacatatttaccaaaataccattttcagaggacttatttgacttcacatacacaaaagagtcacaccgactgatcagatcctctgttcttttcaaacactgatcagatctacattttctttttccatcactttctcttcattttctgtaagtttatatatacatttatgtatgtgtgtgtggtttgcatgttcgttttcgtaatatgttaacaataatatacaactaacccatttgcaaaagttggatgtgacgttttgattcggtttttatatatttggatctttataaatatagttccaaatttatgtactaaaacagggaaaacaatgaataatccaagatcggttagtcctttggtttctccagcaaaccactcagatctattagaaaaccaacgtcaatccggttctggagatttctcaagattagagaaacgaatcggagcgaggaagatgaagtttcattccaagtctatgccccgaggtgccatgtttcttgatcaagaagcatctagaaacttccacgacaagaggtatgacctattc

SEQ ID NO: 48803 - DNA, 632 bp, Arabidopsis thaliana landsberg
tataaagattatgctaatgtaacccgattgtttcatcttgcttgcaaagctgaaagggaagtgcagggacgacgtgctagtgcaaggtctaatgtttctgcaggaaaatctacaccatggcaacagcgcacgactacatccatgaccggccgtacactagcaccaactccctcgccaagtcgaccagcacccccgccttcctccagcgagaaaccacgtgcatcttccacaaattcagcaaccaaatctgcccagaaacccgcaggtagtgcctcttcagtagcttccacaggtagaacaagagatgttctgtgttatcgatgcaagggctatggacacgtgcagcgtgattgtcctaatcagcgtgttttggtggtaaaagacgatggtgggtatcctctgctagtgatttggatgaagctacacttgctttgcttgcggctgatgatgcaggcactaaggaaccacccgaagaacagattggtgcagatgatgcagagcattatgagagcgtcattgtacagcgtgtgcttagtgcacaaatggagaaggcagacagaatcagcgacatacgttgttcaaacaaagtgtgtcattaaggagcgtcatgtcgtttgatcattgatggaggt

SEQ ID NO: 48804 - DNA, 815 bp, Arabidopsis thaliana landsberg
atttctaataaataaattaatgtaaacaataacaaatcaaagattatttttttgggtcagatatgtctctctttacacacatacacatgaaaaataagtgagtctctccatgtggtgaattatacatacatatttatgcatagatatgatatgagtttttttttaaaagatgataagagatttctaacaattggtaacaacaatcaatctttttcatagaaaggaaaacaaattgtaagatggcaaaaacttctttgtgcctatcaatatcataaatctctctctttctcttacctctttgccaacttgacctctcctttccctttcttctccaaatgaattactttccacaaaatctttattatctataaatactataaacgtttccatttccctcttaaatccccaaatcaattattttcctttgatacaacaggcatagaactcaacgacgccgttttcattcccagtctccttctttcaccattgaagcgtccaaaactgtaacaaaacaatgaagacgacgactcggcttctcgatctaacagcggctatggttctagttgtctacgtgtctttctctcctccgctcgtttccggcgacccagggcggcgtgttagcatgacactggttcgagacgccgctgctctcggtgcttgtatgtctcacactcctttaaaatcattggttcatagaattatattaaaatattgacatacttttatatgatgaaacattttcatgataaatgagactgaataattcagttagattgatattgatttattattttcgcggtgagtttcactgtttt

SEQ ID NO: 48805 - DNA, 607 bp, Arabidopsis thaliana landsberg
gtccttcgagaaatgcgccctctgtggtgaagattttgcgttagcatatgttgttttgtataattgacgttgctactattctgattgtgaattttaagcagcattcacaattgaattgagtcttcactttgttcagctctgaatctatcatctctgaatgttggcaagttatagtttcttattatatttcggtgttttggtttgttgtgctaggttttattttatacaatgggtcgtggaaacagctgtggtggaggtcaaagctcattggattatctctttggtggtgacgctcctgctcctaagccagttccagctcctcgtcccgctcctactgagtctaacaacggacctgcaccaccagtaacagctgtgactgcaaccgcactcacgactgctactacttctgttgagcctgcagagcttaacaagcagattcctgctggtatcaaaactcctgttaacaactatgccagagctgaaggacagaacaccggcaacttcctcactgtacgttttcgtgtccgttttactcgaatacccgtgaatcgaaatggtaatgatactcactcactctctccctttctctgtctatctctgcaggacc

SEQ ID NO: 48806 - DNA, 479 bp, Arabidopsis thaliana landsberg
agaaagggatattttttgcattcttaatgatgacagcacccgagggacgtacagacgatacatactaaaactatatgtacgttagtacgtacaataaatataattctaactatgaatatacatatgtataagataaacagttgtcatgtctagtacttgagctacggttccataagagcctaaagagagaatattatgatgcacctagctaaattaagttttcacctcagcttttacgaaactatcaatcatcaaccaatgtgattatacgaggatcactgctaattaaggacatgttatattaggaaactattggtaaagttaatgaagcctaagcagtcacatatatgtggtggtgatgataattaactaatttagtacctggggtgaaggctgtttttgacgaactttgtgaccatatttacgccattttgtagtcatacgtctataacattaacatttcttttggtttggaaaca

SEQ ID NO: 48807 - DNA, 688 bp, Arabidopsis thaliana landsberg
cggagctcgtgccgccggagcaaggagaaggtgcgcttttgaattccgtccctgagatcagtgaaagggggattcctgttgatgtcgtttcctcggtagatggaggaggagaagaaaatgcagcttttaatattcaggagattgattctgttggcggtgacgctgcggcggtggaggaggttcctctgaaatcgtcttcggtggttggggaaggaagagaagaggaagctggggcttcaatcgtcaaagaagaggattttgtagctgaagctaatttgtcaggagataggcttgaggaaaacaaagaagtttccatggaagaagaaccttcatcacatgagctctcggtttgtgaggtaaacggagttgattctttgaatgatgaggaaaagagagaggtaggtgaacagatagtttgtggaagtatgggtggtgaggagatagagagtgatttagagtctaaaaaggaaaaggtagatgtgatagaggaggaaaccacagcgcaagctgcttccttggttaatgcaattgaaattcctgatgataaagaggtagcttgcgtggctgggtttacggaaatttcctctcaagataaagggttagacgaatcaggaaatggatttttagatgaagagccagtgaaagagttgcaaataggtgaaggagctaaagatctgacagatggaga

SEQ ID NO: 48808 - DNA, 793 bp, Arabidopsis thaliana landsberg
acgaacatataaattgggtgtccactaacaaattcaaacacataaccatgatcactctgtccttttttccattttattaaatattcaagtaaacaacatgtaaattataacgaatttaggccgtctcaacatcatgactcattcacatgcgttgacttttaacccactaaacattttttataggacccctctctctctctataaattcgaccccctttgttgatagatcatacagagaacaacaaagaaagaaaccaaataagaagaaaaaggagaagaacattcaaatggcaccaagaagttctttgatccgcttcgccttcatctgcattgtcttggccgtgatggtcatgactgctgagtcgcacaacggaacccaccaccatggcccggctatggctccaatgccacccatggctaaggctccgtctccaagtgccgccactttctccgcctaccctcagctcatcgccaccgcattggtcgctgctatgtctttcgtcttctgatgagatgtgttgccattcatcttcagaatatgttttactctctatgagattttattttaattttcacatgtattccttctttttttgttaattcttcaaagattgtgatgttgtgtcctatcataataaaacatttatctcttgatgtttttattattatcttaatcatattttcctctttttcgaaccaaatcttctaatcaaggcattataatggcccgtttgagaaaaggtggactttctttttaaaatcaactaattcatcttaaggttatagaatagat

SEQ ID NO: 48809 - DNA, 769 bp, Arabidopsis thaliana landsberg
  unsure (1)..(769): unsure at all n locations
caacttctcctctgccttaacgtcatcgagaaatggcgtcaacatcctcttcctcctccatcctttaacactctctccattcccaatttctctagtattcttcctattctatgtagcctatcctccttgctttttttgtgtctgcgttatacaactcattaatggcctctttgaagttgaagaaaagggataatggcgctgaacccgacaagaaaaagctggtcatcgccggtattcgccaccagttactccttctccttcgccgccgtcaccgtctatttccgctggtatctgccgtctccggctgtctcctcctcatcctcttctcattctccaccctctctcctcctccattgatccatcataacaatcaagtggccgtcgaacccaatccaaccactccatttcgtgtacccgtacgtaaactcttttttgtttcattgaggttttacacaaactttccaggtcattcatgatcattaatgcgtgtcacaggaaaatggcggaaggtcggatcgccagttatggagctcgagattgtccaacttgtactatgcctgcagtaatgcaactgacacctttcaaggtaaagatttgatccatttgcgtaaatagacgcgaaaaccagatattccactctctgcataaattgacttaaattgaaattgtggcagttacggatacgagaagccanaccaatcggtatttactgatcgcaacaagcggagggttaaaccacagcggacaagggtgagtcctccttgtgtgt

SEQ ID NO: 48810 - DNA, 800 bp, Arabidopsis thaliana landsberg
caatcaatttccttacttcggatcgtcttctgcatcgactatgacctcctccgttaatctgccttctttccaaggcggcggaggcgtctccggggtgaattactggctaccggcgactgccgaagagaatgagtcaaaggtcggtgtgcttcatgctggacttgactgtatttggaactactgatcacaaaagaggtgacttataattgtgttcccgttagggttttatatatgtatatctagatgattatggtattatgaaatgtgtgtaccgaggagcttaatattgcacttagcttgatgttccgcttaattctctagtgttaagtttatccggttgtgttaattaggaggtaatatgcaaggaaaatgttttctagactatgaacgtgcatatgtataagctatgctcgtttttgtaatgtttgacattatgttaatttcatggctttttcatgtttgagatttctcatgatatttgacatgtgtccctggttgtcaatacaatcatacagtatattaccgacaatatgaatttcttcggtcgcttctagataccttagttttcttcttgttaatacaatttgatatggcggttatatatatgtttccggaattcaaccgttccgaatcttcgcttagatgatttccgtaattacataacatggctaactatttaatttcttaatcaattgaagatgctcaaatgtaaaacatgcatgtagtttttgtttattaattcttgacatgtgtaactgccataatatttcacgaaagtaaaaaaaaaaaaaaaaaaaaaa

SEQ ID NO: 48811 - DNA, 1100 bp, Arabidopsis thaliana landsberg
cctaaccaaagaaacatgccaatttatgcaatccatcattagccctaccttgccactacactttgttttctccagccatttcttacatgtgcatatatgtatgtatatgagattgatgacatgtaccaggattgttgaggatgtgaatgggactctgacacaacatgctaagctgagattcaatacgacgtataaactccattgcttcctgaatgggccttgttagctcctcacgatatttaaccaacatgtcacagtatgcttcctattcataccaaaaaataaaaaaggaaaatcaagacttctaacacatatacacacaaagaaccgacccatttaattaaaattcaactttggttagtaatgaaccatgaattgatctaactccgggtctctagaggaggcagagacagacggtgttgaccgctgttgtcgagcctcaaagtcttgccgtgccgccgtaattctatcaaccacatcaggtggagctccaatctatataaaccatgacccatgaacatacatatatatgtcacacataagtatatattatatcttaaaaaaaagagtatatattataacataacaataagaataaaaccaaaccttttggcagtccaagtaagcttgtaggagggtagagtagtgaggatgagcaatgattttagccttcatggcttcaacatcgcttacgttgtcattgttgttgttgttgttagcttcttgagtattgtggatggctctcattaacatggagtaatgattgattcttaaggagctagcttcagatttaacagatgggttgttgttgttgttgttggattgatcatgatcagatcggaagcaattatcggttgtttgagggagaagagagctcatatgtggaaacaacatgtgttggtggtgatgattgttgttgttagtattattgtatccaggaccataattgctactattattattgttgttgttgttgttggtatcacttgtgttatcgtttttgttggaagaagagattgtatagtccaagagtcttactctttgaggagtgaagctgttgtcatgctggtattcttccatacccagatgagtaaagattt

SEQ ID NO: 48812 - DNA, 571 bp, Arabidopsis thaliana landsberg
  unsure (1)..(571): unsure at all n locations
gaggcgaatgttctggacactcccagcctgaaggtggagctgagccacgagcgggtcagtcgggtcatgccagagcatcgtggggatggtgcggggcctggtcccgacggtcggcgcggtcgggacaccgtacacgccgcccacggtgtcagagaaggtggccccgccgtcgtgggccgcacgatggcgaggagttgttccgccgcggcaatctgagcagcgatacggtcggcggcttcggctcgcctcccacacgagggccgcttcccgcagacgtgcctgttgcgccgcgtgctccgcgtgggcagcggcgagggcgacgacggtgtatccctggtgggcgaccgatggaggaggcggcgaatcaacgacaggatgtgtattgacgaccagcgagggggattggcgggggagggtctccggatctgcaaccccgtgggaaccccagtcgccacagcagtcagggcagaggcggtgctcgcggcggtgagggcccaccggcggcgctaggtcctgaccccactccggccgagcgcaggggagactgggggagcgcgncgacatagggggt

SEQ ID NO: 48813 - DNA, 534 bp, Arabidopsis thaliana landsberg
ttgttattgtcaggagtccatggtgagattgataaaatgaagaaggagttgctgatcatgaagtcctttcttgaggatactcataaacatggtggaaatggatccacaacaacaacaactcaactcttccaaacttttgtggcaaacacgagagatttggcttaccaaatcgaagacattctcgacgagtttggctatcacatccacggttatcgtagctgcgccaaaatttggcgtgcgtttcatttcccgaggtatatgtgggcgaggcactcgatagctcaaaagctaggaatggttaatgtcatgattcaatccatttctgattccatgaaaaggtactatcattcagaaaactaccaagcagcattattaccgcctggcgatgcaaagtgggtgaacaacatcagtgagtcatctcttttctttagtgaaaatagtcttgtagggattgatgcacccaagggaaagctcatcggacggcttctaagtcccgaacctcagcggattgttgtcgcggtggttgggatgggc

SEQ ID NO: 48814 - DNA, 479 bp, Arabidopsis thaliana landsberg
tgctctctataggaagtgcctccgaaccaggaccatgagacgtgttttactttagcttttacaaatagtacagcttattccttttttgtaataatttaaaatcattctttatggatgtttttgaatatccatatcaactaggaattaatctgtaaaacttttagaaaatattataatgcattggacatgacctctaaatagtttgaaacggccgaattgcatacatgggttcattgaattatattcaccttcgcataagaaattggtgcattaacattaacccgaatatattgcccaagattaattgcaaccagtccaataagccatgggcaccaaaaacatggttattgggccagtcggattctgaaatatattttattacattaatcgcgtttattttgtagacgcatgtgtaatcacatgtatatgtatgcctgcatgtgttgttgcgaccgcaagatgaccatgcatagatatgc

SEQ ID NO: 48815 - DNA, 575 bp, Arabidopsis thaliana landsberg
gaagagacttataacattagcctgcaaattgaactatgcaagtgcatgcaacaacagattatactattaacaacctaaccagtaactagttataaccactaagttaggacattttctgattcagtttgaaaaacaaatccgtgtttttattactttgacaatcaatttatcatacaatttgtaaggagaaacaaaaacaatgctgaatatatttcacattttgagaggcttcagcaacttaaaaagtgaggccagacttgacgatgagatcaagaaaacacagaatatttctgatatttggtcgttcattcgaattttccctcacagcaagctcagctaactcagccaatttaagcaaaggctctacatttcttggcaaacaaatgttcctatcgattatcgccgctgcttttcctttcctgatcaaaggaaccgcccattccgcaatccccgcaggatcagactctctatcgatagcttttcgcccgcttagtatctcaagtagaacaataccaaagtcatacacatcaccttctctatcactattgcttgaatccctttcattcgagcttacc

SEQ ID NO: 48816 - DNA, 562 bp, Arabidopsis thaliana landsberg
  unsure (1)..(562): unsure at all n locations
gctacaaaatcttcagtctctcggtgccatcaaactacagcagcacgctcgcaaacccacattggcaggttgctatgactgatgagtatcgggtgcttatcaacaacgatatgtggtgcctcgtcccttagcctcctagcgccaatgtagttacgggcaaaaggaccgtcaagcacaagttctactcgaatagtaagcttgcctgccacaagggacaaggcaagctagatgatctgagaccttttacagcagcacaacgtcgactatgatgaaaccttcaatagttcaacccgatggtcaaacctgtcatcattcatgtcgtcctcagcactgtcgcctctcgtgtttggcccatccatcaactggacgtcaagaatgtgtgccttcatggccacctcgttgacccctctgctcctnnnnnnnnnnnnnnnnnnnnnnnnnnnnnnnnnnnntgaagcaggncctcggctgtggtacgacgctttccacatacatacacaccttgggtttgcatttcggcctcgacacatcctatttgtttgcaagatagagatgtgttgct

SEQ ID NO: 48817 - DNA, 737 bp, Arabidopsis thaliana landsberg
  unsure (1)..(737): unsure at all n locations
tagaaattatctagataatgaacttgagcgaaatttaagtctccattgggtttctgttcaataacaaattatgagtggaatgaagctttaaacaaatttctttctgttttttttcctaacttctctctggttgtttactttatcgacatctgagcatgttcatatatgttatacatatggattttgctcgcctcttctcctttctggatatcgttttctcagttttctgacgtcaaactttaccaggtactgaccgtggcaatagggtaaatgctatgcgggcagcaatctgtgaatcattccctgaaccaaatcgtcgcctattgcaaaggtagtctcttttttgtttcctcgttttacggaagttatttaaatgcataggaagtaaataactttctgtcattaattctgtttattttctctcttgcagaatcctgatgatgatgcaaactgtagcctctaacaaaactgtgaaccggatgaacacaaacgccgttgcagcttgtatggcacctttacttcttcgaccccttctggctggtgactgtgaaattgaaaatgattttgatgtcggcggtgatggttctatgcaacttctgcaagcagctgctgcagcgaaccatgctcaggctatagtgataacattattagaagaatatgaaagtatatttggagtaagatttacttctcttattgattaagagccgncttagtcacatgatcagaatcgatgttta

SEQ ID NO: 48818 - DNA, 338 bp, Arabidopsis thaliana landsberg
aagaaactcttgatctcaattctcaacctttttgttaatttcaatttccttactcctctctgctttctgggtttccgagtctcgagtttctgggatttcttgcttctcacatgaatctgtttcgcaacctaacttattcatcggagtgatatcgatattcttctcaaattttgaagcttttcgtttcgaattgacaattcatggggatctgttatggtaaacccgttgagcaacaatctataaagcctcccagtttccggctaaacttatgaagcttccaagaattcacagccacccgcgaaatcctcttgctttcccctttataatccgcgtcctgt

SEQ ID NO: 48819 - DNA, 628 bp, Arabidopsis thaliana landsberg
ggcttcgacgttttggaggcgtaggcgagggattagctgatatggaaaagcagggaataggccactcgctaaaacgaacaagaacactccattacttggtaacctctttgattaaaataatggatactcacgtcgtctacatccgttacctctccccctagcagtcgtagttcttttctctggaatgcagcagccgtcttcctcgtccttgcaacagctgctagcccaggacgcgtcggaccgagaaacgcggaggactgctggaggccgacgaggtccggtggcggcaagcggcgcgactgcgaggagggcgccaactgcgaacagagcaagaagtgcacggtggcattgatccatggatgcacctcttcttggacctctctgctggctccatctccagcagctagcgagcttgtttctctgcgaagatggaagggaaagcaaagacggtgcaggaacagaatgtcgaagcagcttttcagattaaatttgtctgaatggagatgaaatgcttgtggtttagagtttatttatacataatcgtctcaaggcgaggaactgtggtactgaaaaggttgactacagacgggtttgtggctgcacgactgcttttgataccactagaatg

SEQ ID NO: 48820 - DNA, 624 bp, Arabidopsis thaliana landsberg
tcagtcatttcagtttcgtcccaaacagttgatttgaaatatccagcgagatacttaaatgtcatctcatcataagcaccataatattatgaaatttcaaattctaatattcttgggattttatttaaagatcactcattctaaggattaaacaggtgtttgttttacgtgaggcattaatttgttttgagttgtacaagaataaaatctcccagtatattatatacaaattcacagcaaggtttgaactacaaaaatatattaaggttagactataatgtattaaggttggatatgtgcacggtgccacagttttattcgaagaataatatattacatttctgatcatccatgcatgtaacaaacatactcaaaatagttataaagaaaacaagaagcagacaaaattgtgcaataaattaaccgtttcgtaagaaacacaatttctaatttcacttacaaattgacttgtctccttgcgagtggtcggaaatattttgctatggttacgttccaagttaattacggttactactaattttcttgattagttacgtgtcattttctaaacctaaagtcatttactaagaaagttatgactacaaatacatttctttttttatg

SEQ ID NO: 48821 - DNA, 951 bp, Arabidopsis thaliana landsberg
  unsure (1)..(951): unsure at all n locations
gttctgtccaatagaacattagggatttgtattgccgtgtggatctttgagatgctatactcgtcgtgaatcttcgctaatcctctcgctgctcctaacattagactaatcctcgtcgtccaatccaatggaatccgtcctggtcctcgattccctaaatccaccaataaaaaaatcataactttggccgataatgtagtaaaaatcaacacttttgtcactaagcaaaacagagcattttcagtttgataatcaaagcttagagaagagagttttaccatgaagaagagagtgcaagcttccattaggaagatactcataaaccaagagcttctcttctttagcatagtaataagctcttagcttaacaacgttttggtgtttaagcctaccaataatctccatatactgctcaaactctttcctcggacatggattcgcgtctttaagccgctnnnnnnnnnnnnnnnnnnngccgtcgtctaacaccgccttgtacaccgtccctaaactccctttcccaagcatctccgcagatgctttcaacaaatcatcaagctcaaactgtttcctcctctcgaaaaacacaagtctgctcctatctgtcgccgacgtcgcatcactctctcctccttctccgtaactgcttcgtctcttcccttctcctcctccgacgaaaccagtctctacacttccggattttgatctttcgccgatacggtctaatcttccacaacagaaagcagaaccaaaagatactaaaacaataaccgccacgcaaccaccgataaccgcagcgattattcccggattaatccctctatgactgtgaatttccggttctctaacgctaaccggagaatgcggaatcgaagtaggattcgacggaacaatctgatcagtgttagaagattccgggtcgtttgtgatagtacaaatccggtaaacgga

SEQ ID NO: 48822 - DNA, 626 bp, Arabidopsis thaliana landsberg
tcacaagggggctgattcaagttacacaaatttataactcagattcataaagcaaattacataccatggagagcaatcctggtccagtatgtttagcagtaaaattctcatcctcaaacttgtggccgtagattgacatgcatccactaccatcattctgcacaaattagataatgcagtaagaagagatttaagtaacgaaccaagaacacacaaacaagagaactaaaagccagtgccaattgagaaccaacataagcaatcaagaagtgaggatttataagaagtaaagggtactgaccttaagaaaatcaccactttgaaccataaaatctttgatgactctgtgaaactgacattctttgtaaccaagcggctttccagcttttctgaaattgcaccaaaggcaaccaaaacgtgaaagaagattagattaagaaccaaaaaatactcaattagtccaaaccattgtattgtatctatccgcttaagctagcaaagttcaatagttaggcataaacaattcaatctgtagactgaagcataaacgaagcagcaagctcaaaactatatgaatccaaaaaaaaagctctaaaacctcttgagaagacgctaaatttcaaata

SEQ ID NO: 48823 - DNA, 581 bp, Arabidopsis thaliana landsberg
  unsure (1)..(581): unsure at all n locations
tgggtgtacttaatcacgctataatgacccgcaataacccttgagaggggaatatttcagggataacgtaggtaactaggggcataaccgtatttaacagggtggaactgtgccgtggttacctataattacacccgtgcagcacgatagtgaggggctgaaaataacattgttgctctaatacactgtgtcagcaagcatcaaattgtttctgttctcccactgtttgaattagcttgaccacgagtcggcaagttccaacaagtgttaaccagacatatacgacgtaaatgaatgtggtagaaatacaaaggatatacatacgtacatacaacactgctcacaacaagaaagcacgcgacgcacgtgcagcgacacaaacaaacaatggcatcactctcgcgtacaccggtcaccaccacctgctgtgcacggtgggcacgacgaacgcaaacctgcaggagcgcgccgcgtcactttacgccgacggaggcggtgccacgaacagcatgggcacgttgacggtggggacgacgacatcggcggcaaggcgtnntggggacgacggatggacgacacgg

SEQ ID NO: 48824 - DNA, 620 bp, Arabidopsis thaliana landsberg
ctaaagtagccccatcgatctctgctgcttcatccagactttctggaatcgagattttgatatagccaacatagagaaagagggtctgtggaatcgcataggtcaagtagagcaagatcaaaccaaaggtattagccaaaccgagtttactcatcataaccgtaatcggaatcatgatgacttggaaaggtacgaagattccgaggattaagagggtatacatgatggtaaaggcttttcttttactcatattgcgagcgatggagtaggctgccatagggataaagatcattactgcaagtaaagacaagacagtgatgacgacagagttccaataatagcctccaatcccatcagctaagagacggctaaagttgtcccatgtgaagttggttggaaagccaaagaaattatctacaatatccttagtgggtttgaaggaactaaagagggtagcaaggagcggcactaaaatcagaaccgatcctagaatcaatagaatgtatttgccaatcagggcttttctttcatcttgtttcatcatgcttctcctcttaaatttcaaatttcttagatactctcaattggatgatcgaaatcactacaattaagagacaaga

SEQ ID NO: 48825 - DNA, 355 bp, Arabidopsis thaliana landsberg
tctaagattttctgtgcaatgatcaaaggagacctaaccagttcactgtaatgaaactttgctacctgttgatgttttttactctatgacaaaaccatttccccatagctgaaacttgttgaactgtcttcatcttaggtactggtaagaaacattcctgcagatcctcatgaatcaatatgtgaacttgttgaacatttcttcaaagtcaatcatccagatcactatctcactttccaggtataatcatctttggattttctattgtatacatctctgacttgatttctgagttgatgatggttgatctgcttttaactcatgcagtccacgatgcaaccaaactctcggaatt

SEQ ID NO: 48826 - DNA, 514 bp, Arabidopsis thaliana landsberg
ggttaatataaacaaccaatagtgagctgctgtcacacacaaaaaaaaaaaacgaccaatagtgatatataaattttaatttaaaaatcttggcatatgcttaatgaagtgttagtaacataatttttacgcctacattttttaaaaaaatatacatgttttcaatctcgccaatatcatattttggccaaaaaagaaaaaaccttaccaaacaacaaaggaaaagaaattttggtatggagagaataaataaagcacgtgggatcacgtgagggctcgcgtgccggcgtgacttgccttttactacaaaaaaaaactcgtaacaaagaaaaaattgggaccccaagtggacggagccatgaccccttgtggtggtaataaagacataatatacgtttcattctcatactacaaaacagcatataaactatacaataaaatatttaaaaatattggtctgacagatttgtgtcagagaaacgtatttgtcttctcttgaacatgtgaactctcg

SEQ ID NO: 48827 - DNA, 1851 bp, Arabidopsis thaliana landsberg
tagaagatttgctttatccaatcatatcaaagattaaacgattagaagattcaaatttgctttataaacaccaatcagaccaatcacattaaagattagaagattcacaacactaaaaatcaactcatcccactttacattcccttgtccaagtcaatagtcaaccctatttattttctaggcaaacgcgttcttgaaaattatatctccactacaaacgaaatcttgaaaattatatctccactacaaacgaaatcctaatatatacatatttctactatattgttaatttttatacctccaaagttaagaaaatggagctagccatgagtaagattaacgaggatcaagctaagcctttagctccactttttctcactacccgaagcgaccaaccagacgaagaagatcagtaccaccacgaccgaaccaaatacgtccattcacagaccaaactcatcttatgttgtggtttcatcgcatctttaactatgctcatcgcagtcaccttcatcgtgctctccctcacggttttccatctccatagcccaaacctcaccgtcgattccatatctttcaaccacggttcgattttgtcaacggtaaagtcaacacgaaccaaaacactacagtctcagtcgaaatctcgttacataatcctaatccggcgttgtttatagtgaagaacgttaatgtttcgttttaccacggtgaattggtggtggttggagaaagtattagaagaagtgaaactattccggctaaacggacggttaagatgaatctgacggctgagattgttaagacaaagctactagcatctctaccaggtttaatggaggatttgaacggtagaggagtggatttgaaaagcagtgttgaagttagaggtagagtgaagaaaatgaagattttcaggaaaactgttcatcttcaaacggattgtttcatgaagatgacaacgaacaatttcttaacgcctacatttcaatgtttttaagaaacaataaatggcaaaaaacagagccaaatctaaaagagattaaattttgtttccctttctacgcttattagaggtctgtaaataaaagtagttgattgtgaatagaaaataaatgcattgtagaatcaaaagataggaaatatttcatcttctggcaacactaataataacacataaagaaacctccatccgaaaggacctttcgagttctaagaagatcgatccattcatctttcgtcaacatttggagattgcaccggataatggcagttaatatgactcaccggtgttatttcttttgcgtgtcagacgacttcttttgcgtgtcagtgacacgtcctccggcgaccttaacaatgggttcgtctttggactttataagctttagagccggatgaaccttgaggtctcccattactagcttttgcccgatatccaattggcttagatctacttctatatatggtgggataatctctgctgggcataggaactttactgttcttttaatcgtattcagagatgctcctgccaaaagattaagaaacagtgatcaatatcgaaatctaacaggaaactagatgctgcgatctacaaaattgggtaaagagtaatggggaatgaaacttaaagatcacaaaaaagggtagccagaggacaatacaagccactaaacaaagctagggtcattttacactaagatatataatgcaaaccagaaagtgcccctaaaacctgcacatagatttcttttcactggagttaaagttttgtaaaacatcaaacatattgtcactcgaagtgatgattacttgtcatcaacaaactttagctcaggctgatacttt

SEQ ID NO: 48828 - DNA, 481 bp, Arabidopsis thaliana landsberg
tgctttccaagcttcaaatactcatcggtactgcagacagggcagcgctggaggaggagttggaggaggcagcagctagcatcgaccagttggagacagagctggagcgccatctccaggagaaactagaggctgaaattcagtgtctgttgatgttgaaagcgaggcagaattggcaggtccgagcggtggaccaggtggccttggaggagcacagggcgctgtctgccggggacaagaccagaatgctgctcaagctacgagagacggagagcaagatcgtgatgctgaaagagcaggtggacaagctggaggtccgggagaaggagctcaaccggacgaccgaggtcctgaagatgcagagcaggaccttcagagcgtccctctttggcctcgtccagctggtaatgctatgcctgtccctgaaggtgttcttcgcgcgggtctcggccccatttgacgaggttgtgcgacatgatgc

SEQ ID NO: 48829 - DNA, 789 bp, Arabidopsis thaliana landsberg
tggtaagtcttaagctcttttcatctcctgcttgctgtgataccttataagatgcttcaaaaatcaatgtacatattttgattacttagacagaaaaaacgtcaacatctttggtgttggggacctaactacaataatatctgctttaaagcaaaaggcttaaaaatgaagagaccttaacctatctaaagagatgactcgtccctatcaaaatctctactgatacaaagtcttaccaagaacctaaatgatttaagtttgacaataacatcaaatctttcaacctgaaacatactgaaaatatgttaaaagattcagttttggtatttgcagattgcgaatggaaagcacaagctggaaacatctgtgtagcatcattcgactggagctgcagcggaatctgcagatccgcagatcgcatcaaagaggttcatagacgttgcggtgaaggtgaaaaggctctttggagtgccacgttttgacatataaacagaggaatggtaaaaacataacggttttgctcagcccccaaaaacagctcaaagatcagaggaaggtcgtccagatatacaattccaagagatatccacttttgtattcataggtacatagaatagaagaggcaggaaggattagagataagtgtgaaaacctctggcaagaatcgcaattgcgtattgtgattgtggcgtttccattttggtataaggaaactgaacactacagtgaacacccctgctgctttgttcgttttgggtggattgaaaatgaagcaacttgtggattttt

SEQ ID NO: 48830 - DNA, 727 bp, Arabidopsis thaliana landsberg
caatatctttcctcttattatcaacaagacaacttccatccatagacgaaaccagaacttcaaacctttccatttccttgagaacagcccgaagattatcgcgttcgcgtaaagcaaaactcaccgtcttgcgttcaatcaatccttcaacatacttgtataaaccgcatttcactccctctttcctacaaaaatcaagaactgcctcttcatgcaaaacattgatggctacaccgaatgcagaaactggccagtacttgtctcggagacgaacaccagtatcactttctttcttcatgaccgcacgagctatctttagttcagagctatactcagaaaattgagcgttaaacgctcttatcatagccgattcagcagccgtcctaccttttgatgtcgctcgcctctttagcttctcgctgcgttgcacttccacaacggcttcaataccggcttttgttttcatccattgacaaacttcgtagatttgacggagattcatctcgtggcttagaggacaaatccctagtgagtttgccttggctaacacgctatcgcgtatatgggaagatactaaattatataatgacactgaattgaggtgagtgtgtgaaaaaagtagactattcagttgctgccttaataagtacgctgcttcattttcccaagagggataagaagcacgctgttttattttcccataaagaaaacgaaagaaccgagtagt

SEQ ID NO: 48831 - DNA, 555 bp, Arabidopsis thaliana landsberg
aagtaattttccaaatatcttcacgtatatttaatggtagacatcacatcgggtggtgatgttgagaaagttctccccattggctctatgatcctttctaataatataagttgttgacaaaaaaagaatgacatcggctgcttttcacgcaagtaagggcattgaatacgcgttgtggtctattgtgcaactgtattttgacgtcagttcctatctaatatttggggttaaggtgatgtactggatattccacacctttaaactaagcacactatttcttatttaaaccaaaattcaaaagtcaatagtccttaacaaatctatctatattctaccccagtgacccggccaatcataattagagaggtgtaactcacgttctaacatttaacaataattcataaaacaaagtctttctttatttactaagagctagttcgaataacttgttcaactctagaaagtctttcttaattttattacgtaaaaactaaacagtaagaaattgctatagtaagattatgtttcttgtggcttctgtgtatatatatatgt

SEQ ID NO: 48832 - DNA, 800 bp, Arabidopsis thaliana landsberg
acatctacatgagacaagtttaatcagtacatattagcaaaactgctgttttgaataaacaaaagagattccttacagaaacaagcacaaaactctgagaattgaatttgcttacttggtattaaagccacaatttttacaaaagagcttcagtgaaaatctaattgccaagtctttgaacctctaatcagagctaaatctagtcaatttaacaattctctctttcttctagaacaaaattcatcaattccaaattggaaaaggtgtttccatcaataaaaacacgaacttgacagaattaatcaacaataccatgtaaccaatcacgaatttcaaatactaaccgttgtgggaattggaagcttgaattggtggtttatcaaacaattcagattctcttacaattgtatgtacttgcaccttttgttcgacctcatcatcatcaatgtccatgtcggaatcagacatcttgaagtcttcggcgaggtaaccaacgcagagagtggtaaattgataaaaaaaatactgcggcgtgatcggggtccgaagctcgctgttgagtcctgatgatctccgagaatacgtttggtatatcgaaaccaccattgttacaaagaccaccgaactattttatatctaatgggcctttcctaaataaattaaagctttagtattaaggcccatactagattccaaattttaccaactatttcctaaattaacacatcgttgcctttttatagtaaccggattaaaccaaaacaaaattaaagagaatcgaatcaaaccgtgaaaatcgt

SEQ ID NO: 48833 - DNA, 652 bp, Arabidopsis thaliana landsberg
accaatctcagttgttttcttcttatcaaagaatccctaaatcatactttgtaattcttgtggcataatttcagtaagtagaaagttagatcgaagtaaaaagaagctaataaataaagcaagcatttagggataagatctttcaaaaaaggggcctattcaactcttatcttctttttgctcaccatcatgggattttcaacctccatgatatcatcatcttcactctcgacgttctctgtttctttcttatgattactggcctcggtctcagagagtcttctcttcttagaagcaggctcggatcctgaggaactctctgtaacatcaactgggttctcgttgtttgatgttgatgcgctatcgccattggtagctggagatggtgtccatccagagagtaccattccttcaggttctttttcctcgtcaaattcttccctgtgacagaacagaataagtaaaggatgcgttaattgtctgccagtttcaaacatggtaaggactctcctaatagttacatttgagaatcctaggatgatgtctaatgataacccatcttgatttcgtgattcagtgaaatggaagagtttagggaaagttgatggtaatattatcagaaaccaaactgaatttaaaacaggattcaaaa

SEQ ID NO: 48834 - DNA, 565 bp, Arabidopsis thaliana landsberg
  unsure (1)..(565): unsure at all n locations
gaggatcgaacccagctctgaaagtttcaccnnnnnnnnnnnnnnnnnnnnnnnnnnnnnnnnnnnnnnngggcaattaaagttcataatatttatcttttgctctataagttgtttcatgtttcggggagaagatttctgttgacaaaaaactcgaccttgttcttggtctaagaggaagacatgcgaatcaaatgtaatgtatcgtttagggacttggaaaaatgatttactaattagtgttaaaaacgcatataattatactttggaatacattcaagcaagaataataaaatatttcaactaattgattcttcccacattccttcccactataacccgttttcatatgctgccacatttggtcgtgtgtgtgatttaataattcttttttccgcattaggacctaacctaaccctacctatattacacaatatctatgtgtggctaatatggattaatctttggtcgatatgatgctaagatataaatatttacacacaattagaaaactatatctaccctcaactgataattaaacacaaacacattaggtgatctacag

SEQ ID NO: 48835 - DNA, 589 bp, Arabidopsis thaliana landsberg
tatgcgaaaaacaaaaaacttgtgaacgaatcctatcctttttgaagattgtaatgctttttatttgatattgtgttggtgccaatgcatttatgaacaacaagaatccttttaaagtgagtttcttcaatttggttatttgtttggtgactttggtcttttgttgcataatgggataattgatatgtaatattgggagccaaatgaagcacgtagaacctatcataagtaggatacaaaatttctccttctgctactaagcacaagaaattaaaactagcatgtttgtatcaaaaatctaaatattggatatggttaaatgaatgttattaagttgagacccaaaaaaaaacacttgtattctttggatcagtcaaaagggtaaatcagtcttttaacatgtaagtcttcggagtcactatttataacctcctcttcattagagatcccaaagcttaacattctctcaaaatcattcgcacacaaaactctgaattgcaatctcaaatctcagaaaggtaataagaaccctagattcaacacacaatcgttagatttttatcttcgattcctttcttgtatcttcgca

SEQ ID NO: 48836 - DNA, 547 bp, Arabidopsis thaliana landsberg
tgggcggaccatgggcacctggtcgccaaggacggcacgacgtggtctttttcgagcgcaatggactacgtcacggtgaattctcgttgcgcgtggaacaaggcagtgtaccagacatacctagtgtgtcggcagagcccttgcccccctggtcaagccgagcatcaagtgcggcacgtatcgtggaatgcggatggctccatcttggctgtgcagttgcagcgcgccggcgaacatgtgctgcagttgtggacgagtggtaattaccattggtatttgaaatacgaatctacgtacgagcatttgcatgccatgacatggcacccggaacagccccttacgtggtacgtgtcgcatgcgcgcgtcgaaaaaatgaccatgtgcctggagacagcatgctcccgtggtatgccgcctcatgatgctgcatgcgcctcagtcgtggacggccatatgctatacctgacgccttttcgcttgcaaaatgtaccacacctatgtgtgctgtggcgatcgtcgatacgccgcctaacacagtgccgactgt

SEQ ID NO: 48837 - DNA, 573 bp, Arabidopsis thaliana landsberg
  unsure (1)..(573): unsure at all n locations
cacggtgcgtaggcgcctcgctggccgctcggtgcaggtgctccactctccgctcagctcggcgcgacggcgccgctcgaccggcctggggacgacggctgctcgcattggcgccccactagctgctcgcgttgcgtggagattggagaacaaccaattgggcacttggtttagcggctagggtttagaactgggaggacaagacacaagagagagtgagagaccgagaccgagagggcgctaggccgctgggtgccttggtcgctgggatctggccatctgggagcctactgccgctgaggaccttggaggctgggagcctaggactgggaggcaggaccgcaggaggctggggctagggagttgtcgagctgggccattgaggggctagccgctggggctagcactggaatctgggatacggccatgtctgggtcacatgtcatatgccccatcggtgacggatatggatgtagatacccataccacgaaatttattacccgtgataccgtatagtatcgataccngtaccagcggatatgaaattcaccaatccataccaatgggtaaat

SEQ ID NO: 48838 - DNA, 1215 bp, Arabidopsis thaliana landsberg
tactaacagtagaccttttaacacataaacaagaatcactaatagtgcttttatttgttggcctataacaatatttataaagaattgtgagggaccaatttcagaaagaaatattattatttaccatttgaccacaaatattgtttgactttaatttatcaatataggaagttcactcatatcatgttgaatatgctagtttggtatgttattagagtctaggataaacataaactttaccctctgtcacctatcgattcaaatctaatctgttagtagagtcttaattcttttattttcataaatttgtctttttattgcctaatccaattgtaagtgactttgtaatcagcatcaaagtgaatgattgtattttgggaagtgataagcacatagaagtaaaagaagaaaaaaaggtgggaaagtttttaagcatgattacttgtcaattacgctccgactctttggcccgcaccagctgtttaagatcgccggcgtgacaagtgacaacaattggccacgtgtgtgtgatttattatcttaagtttttgttatttctctgcgaattttaaagaaaattttgaactttgatcaaacttatatgaatgagaggggatgcaaaaataaatacacattatacaaacgagatggtatgaaggataacaaaaaaaaaaaaaaaagatggtatgaagaccaaaatatattaagcatttgattaaactccgatcagctgacatattaacatgatcaaaggttaatgtttagacaaaaggcttttattagttgagaatggtcttatctaattaaacaccacattcgtgtttataaataatcaaatctaatgaaccgacgtcgggtattatatcttatcagtggagtgatctaattaaactaatttcacaataactgattgattcgaatttagagttattttataacatatcttatttaagatagtcttttaaaattccaatgactagaaattaaatattcgtaatttggatttattccagctttgttaggttggtgatagacatagttaagattttcttttctttttaatttaatgttatttaatgaaataaacattctcttgattttaatttaaagaaatttatttgtattgtttctctaaagaatttaccaaccagagtggaggcattttttatcctatgttttcgcccagatttggtgaagatatttacatttttcttt

SEQ ID NO: 48839 - DNA, 491 bp, Arabidopsis thaliana landsberg
ttattatttggacacttcatgcaaatatttttcattgtattttgcaagtagtttttgggattcgattagcttataacatttggacctcctatttgttgatttaattatttattactactttttttattttattacaacttagtttgtaatagtaaaatttattctactttgtgcccaaaactgtcaattgttgttcatttaaatgtctggaattagatttagatacgctaaattaaatcacattttgcgtttatattcccacctaatttgaaaccagcaattattcttcttcataagaaaactttcatgtgctctctcgaaaataaagttttactctaataaccacacgcactttggtcgagatatagcgattcgagtacatttattatggttcaaactattatctaagatccgtttgtgtaaaacataacttcttataacatatatattctgatctacttttgttagtttttattagttaatataagcgt

SEQ ID NO: 48840 - DNA, 446 bp, Arabidopsis thaliana landsberg
aacttatgttaaatttgatttgttatgaaatgataataataatttggaatctgtgttaaatttgatttctctatgttaaatttgatttgttatgaaatcaaatgatggtatcattgtaaactatagtttcaatattgtgtgaaaacaaaccatgccccaagtcagcataatatttgggccttaccatactactgggccttgatctatttttgagaatcaatagccaactgatttcgtttcctagtgtataaacaaccaagtacatgcaaccctcatgatctttatcattcataagacgtgtgataaacaaacaactattgaatcctcaaaggcattatcttaatgtacattatacgtttgatataaaacaagcgtagactcataattatacaaaaacattaatttaacaagatatgagctgtaatcctttatgtaatctgttttta

SEQ ID NO: 48841 - DNA, 448 bp, Arabidopsis thaliana landsberg
gcgtgtccgcgcgcagtttgcgaattaacttatttacttcgttataattgtccgtacgcgttagtcaattagttctcgtattaatcaccgattaattgataattcctttgttatctaaaatattccacacaagtagttacgtcaactaaattgaacttagaaatataattgtcgcgtttaaacgtaatataggttgttcgtcgtcacgtcattacttagccgcggtttgctaattaattaatatgtcgtgcgtcgcgcaactagtgcggcgctcgcgtttgcttgcgcgcagtgcgtcgacgggactccgtctacgttcgcctacacttcgtctactcccagacgactctcgtcatagctcgtctaccccgtctatgctcgctctaaactcgtgctcgtacgtgtcgttcgccatcggcagagcgtcgcgaagtaaatcgtcgcgtgc

SEQ ID NO: 48842 - DNA, 655 bp, Arabidopsis thaliana landsberg
  unsure (1)..(655): unsure at all n locations
gagcttcggtgaaaataataaatacccagaaattaaaggagagatttttaagtgaagaagatgaacaagactaatgattttgttcttgctagaagctttgccctaaattacatggcagtttgcaaaataagaatcttgatacattaaataaagcagagattttaaaatataaataaagggtttgcctcaaaaatcaccaacaagctaagagaaaactcactttggattacaggtgtcaactgtctaagctcagtgtagaacaacaatggcggcgataagtgaaaaacaaatttaattttcttcagattcttgtcatgagcttcttatctcttccttctcatgcttagatctcgtcattataagcattagagaagtgttaagatccacagatctgcaataatagttatatcaaaatagtcacacaaatataagttataacataaaaaaacattcgtttttgagtagtgttttaggacgtttagataaagagtattttcccaggaaaatcagccgagaaagtgaaagaaaattagcagaaaatgggaaatggggagagaggctagagatatgagttttattacctgttagaaaaaaatatcaaacagttgccttcggacaagggaagacaagtgncactgtttggacttatttttgt

SEQ ID NO: 48843 - DNA, 725 bp, Arabidopsis thaliana landsberg
tttatggagagaaccattccttcatggtggtttttcctagaccattcttccgacttgtgtccaagatgtaatgcgtcttgacccggcgagacctacggttatggagtcctttttaacgtcacgttgtcgtatgacagtgaccactcatcaacctcccgaattgttcgtggaagtgcttgcgaccaaccatgacgttgcttgtggcaagatgctctttagctcatgtctccaattgtttgtggatctacagtcgttttatcctaattatctatatgttgcatcgacgtgtgctttgtctttgagtttcaaagctttgatgttctgggaactcttttctatctttgtaatattttgcttcggttgaatgaatgaaatcatgcttttgtcaaaaaaaaaaaaaaaagttaaataaagagaaatattatcacatggaagaccatatttatcaactccaacaaggtaggaagaccatatctatcactaattccaaatatttatcaaaaaaaacaaaatataaactataaaaacttaggattttcaatcgcgaggcttggctgaaatccttagcgtgaaacacttttggcaatctgctcggctgaaataatgttgtaatccattcttccatattttgataaaccctctacattccaacgttctcctaaacaaatggattttagatggagcataatttgtaaatatccacatttgatcatgatttcttttgc

SEQ ID NO: 48844 - DNA, 507 bp, Arabidopsis thaliana landsberg
tctcttagctaattttttattgctacaaatactagaataattttattttatttttgcatcacaagttataacgagaagaaacttatgtagtaattagtacacataaaactcaattgcattttctttttacattttttttttttttttggacaaatcattttctttttactaaagtaaatgtttttagtgaacacattgagtacaaatatggacacaaagtataaattattatgagattttgcagtagatattaatttattttagctatgtaaataaaaccgtaaaagtaaaaagcttttatcaaattcaacccacctggcgtttcagttttcattttttttacctttatgctgtttttatgttcttgcaagtctttctcgcgccacacaaaagaaaagtaatttcttttagagttatgttttattttttttggaccatgtcttaaaaggatctcgagattggcgtctgagataaagacctctactttgcttcctttatcttgctcct

SEQ ID NO: 48845 - DNA, 296 bp, Arabidopsis thaliana landsberg
  unsure (1)..(296): unsure at all n locations
catatctttatccagacggcagacacaaacccaagatttcaatatgtaatcaagaatattagtcaggactaaactttatcttaagtatgtcttctatacaattctattagaaagatcgaatcttgaaatgaaaagtcctgacttttatacctcaggggtggtttggagaagcaaganaacgcattgaaagaagatagttccggtggagacgcgatcaacggtggcggtgtaagcnttaagaccgtcgcaggctgattcgaacatcttcttggcttggtctgccgacagataagcag

SEQ ID NO: 48846 - DNA, 1271 bp, Arabidopsis thaliana landsberg
tgaataaaatcaaaaaaataaaataaaaaatcaaaataattaatagacacggtaacgaaaatttgagtgatgatgaagaaacatatgaagctaccacgtatttcaccccaaagatatcctaatgacatcatcatatgcaaatactagctcgatttgtttatacgtacacgtatactttcaaacacatctacacatacatacagtcacatttatatacgtagatcttacgtgtatataagacattagattctctattgccacatatgtgtctcaatcggtctataaatttcacttttcttcattgttatcttttcttctccatcctcattgatcatatcatctctcttttaacttcaactagtattctcgaaaaaatatacatttcttgatattacaataatgtcagaagaatttcaagaatccgacattatattttccgaccaatccaaaatatcaacttctagccgatatactaaactctataactcaagaaacgacgagaagaagggtacaagacggcatgagacggcggagaaaacatctccggtgagaattccgacgaataatttccgatgtttggaatgggacacgacggaggaggaggatgataagactcctccacatgtaataatcgaacgacgaatgaaagagcaaattgcgttttccgcttgtactttaaaaggaagagacttgagccgtcaccggaactccgttcttaggatgaccggttttttagaagcttaatttatttaaccggccggttcagtttgttttatttcagtaattgaccggttctgttggaagtttttatttattttatcaactgtttgggagttttctttcgccgggccttccttttactcgggttctctattaggttctattttggttgcatctgtttccttttctaacttatcctttgtttaaagatgttgcaacgataatgtacaagcgacaaactcctatgtttctttcattactgtcgacgacataaatatgtgttgtaatttcttccataccagtaaaaatgtttgattcatatcactttgacaatgcatatgtttatatcgtgaattgattggtagattgtttcgaatatacaaaattataatctgtgtttgttagaattttctattactagttgtagaaaatattgtaatgtagtcatagcaaaatattgtgacatatttttcgttaattctattatcatattatcgatagtcatatcatagcaatgaaggttgaatagtagtcaacatttggcagtagct

SEQ ID NO: 48847 - DNA, 631 bp, Arabidopsis thaliana landsberg
  unsure (1)..(631): unsure at all n locations
aggtccgacgagtgggccccgtcaggcggtggggaaaactgggccacgtgacttgggtcacctagacgcgagttgggctgaaagaggggaattcggcccatgtggctgagagattgtctctcttttatattttgcatttctttcttttcccaattcaaatgttcatgccaaattcaaattttttttttgaatttcagatttccaatcaactaataacatcctaatataaattctattgttttataatatttttgtttattattctccctattatttaattatggaagtaataattgattttctttctcattttcggttttgttttcatttataatttgagttcgaacttaagttatgattcctttattcaaatataatgcatcacaaaaataataacatcggcatgagatgcacatttatttatttatttattggttacttgactactttaaccccttaattgagtatgcacaaaaaaaaggaagtcaaggaaccccaaaacatcacatataaattacttatttattttttttcgcctatcaatttagggctttcaaacctacccccttaaaaataactcgccccgagatttgtaagaaaaggattataccanngatggttgtaatgagat

SEQ ID NO: 48848 - DNA, 800 bp, Arabidopsis thaliana landsberg
cctattgttttatctctcctcaccgtagctctcgtcgcttattctcccggtttcctcaccgttctatcttacttctggccactttttctctccacggctctctttctcgctgccgttttcttcttcgcacgcacctccgatctcccggcttcgtctaccatcattccaggcgaaggcgcaggcttaaaagtggcggcggaagggattcttgactatgtcgtcggcggacaacacgaagacattctctttgatagcttcaccaaacttgactaagtatgagacctctctgttcttaattccttaagtatttccgttaattagttgttccttttttaatactagagaaaataaaattacaaaatgtaatattttcacgaggaataaaatcttgcttaagtttatgcttctatattacttattttaatcttatgtttctgtttaggcgcgaggcttcttttctttaggtatctctcattagtttatacgttacaagattacacattgcattgatatatgattttactttcaaaaaaattttaaatgttgaacgaccttaaaatccgtgcgctttacttttaaatctttccgaatgaaacccaaccaccgacgcgacagcttttcatttgttttactaattaaacggaacaaagcaatttaaatgttatcagtgttgtgttttagttcgaaatactattcataatacaagatgcctcttttgttttagaacttttttggtattatgaattcgttattggaataaaataccgttaaagctaaacacgattatccttagattatat

SEQ ID NO: 48849 - DNA, 436 bp, Arabidopsis thaliana landsberg
tacgatatctaatgaactagatcacatgtgagcgagtccactctatactatacaagccactctctttgataatccgaagagagaagtctaactggaaagtaacatttggctacttgcaaatctttatcccaacattgagatccaaaagaacaaaccagatacgtattcactggttatgaactgaccacagcccacaaccaatgatgtggatgtacaaaatctttgggctggttaaacaaataccgggtcatatcttggattctgatccaccaatagattgtactaaaccgacatataacagttacgacacttttatttaaaagcttgagattggacacacccgacgaatttttctattggcctgcaaaatcggggatctgccagctgatgctaacaacggtctaaagatggagagatcttgaaaggcgagctgagt

SEQ ID NO: 48850 - DNA, 579 bp, Arabidopsis thaliana landsberg
atgacatgctaacagtatcacgcatttctatactatgttctaactacataaaatagactatagaagaaaactgaataaaagaaatatgttaagccaagtatacacgtttttattgccaaagattgttgatgttattatgtttccaaagtccaaaataacacaccgagtcatcataacttatacactgatcaacattagtaaatcattcttctctttatcttgatcagtgtcttaatcaaagattagtagtagattttagtttattagaatactttccattttggagtctcacatccaattaaaaaaaggcaatcaaaagaaaggatcaaaccaaaccagttgaagtggttcaggttcacttcatcgattctaaagtggacaacacgcgccaaaagttatcgtcggtcgagtcttgacatgattgaaatctcccaaaaaactatgtaataaaattgaaaaataataatcagaactctcaaataaaatgtagatttggtaaagtactctcatcataaattaaagattgaaaaagctgagagtacccaaaaaaaaaaaaaaaaaaaaagctaaagatccacc

SEQ ID NO: 48851 - DNA, 523 bp, Arabidopsis thaliana landsberg
acaaaaacaaatgttaaagagttttttatttaattttttctccagatgcaaccatcacccatattgaatacgtgaagttgttcttgtagacaaaggtaatagtttggcaatgttctagaaatttgattacagtagtgtaaagttttcacgatcctcatgcacattcattattcaacaaaacaagaacaattcacatactatatgagtttatagaaatcttaattttcttaaataatatttacctaaatttttcatatataggcaataagttaatactaccattttcacccattataccttatataaacatctgtcaaaactcataaagttattaattaacgttatcactgaaagaaaaaagaaactcatcatcgttgaaaccctttcaaaaaaaaaaaaaaactcatcatcattgttacttattattaatattaactttatgaaactcttaaagctattaattagtaagtattaactttaattaatagcttgttttaacttcttaagttaagtgtctaccgtt

SEQ ID NO: 48852 - DNA, 423 bp, Arabidopsis thaliana landsberg
aggtcgtcatggcggtggcgggcgagatgctcggcgtgcggcagcttttcggcaaagaccaggcgctcgggcgcgatgccgagccggcccgcctcggcccgcagcgcctgctcggcccagtcgttcgactggatcagccacagcacgctgccctcgacccggtccagcaggcgcatccagatggcgaattcgcgcggggtgatcttgtagctctggttgaagcggcggaacacgaaggcgccgtccggtaatccgcaggcggcgcgggtggggccggtttccgcgatggcgcgccggtcgtcgttcggctggtagctgccgggcagcaggatcaactgctcgctgtaatggcaccgctcgctttccggcacgacgaccggatcggcgacgagatagtcgatgaaaccggcgccgctcgatccc

SEQ ID NO: 48853 - DNA, 560 bp, Arabidopsis thaliana landsberg
ctcctacaatgaatgatagtttgaataattgatgaaatgattccgaattattctcctccctaaatgcttggcataacatcagaatatctaaaccattagttctttagttggttttggtatggcataaggtgagaattcctaaacatgctttcgcagtttataactctttatttttaacctcaaccctactattgataggattttttttgagatgtcatgttgaacaaacttgctttaatgtggcattgagggagaatctaggaattcaccacttgcacttaaattattcattttcagctcaaatctgaaacaaaattatggtaaagttgttgcctacaaccctacctattgaatgattccagcaccatccgcctgtcatcaacaacttctacaagcaatgacatctccattgcactgcttcaagcatgtcatgcgtgtgtttacgaggtttggcataagagtaccacatgcatccacaacgccacaactcttttccagctgcgctctactacaaagttctcaatgttgtgagaacagagcacatagcatggtccttcacg

SEQ ID NO: 48854 - DNA, 1192 bp, Arabidopsis thaliana landsberg
atttacttctgtttcggtttaatttggttggttgcagttgttttgcacaccctttggttctttacaaaattaggcaaactatacaatcaagtcagaatactagaccacgagagatcaccctcgttgtacttgcgactcggcttaaaagtagtagattatatgtatatgaaaccttaacaatacgtaaacttaagcatttcttgtggtgatgtacctcaggattgacattttgccaatgacttttgttgtgttatatcgataaagaaaaagattgtcctggaaggaaataaaatgaagaaactaactccatctcttttattgtgtctaacatctagataaatttggactttgtcccccatcctatcctcaagtactcttattccaggcagtctttgtgttataactttgacttcttggtttagagagcgggagatatggacatctccaatatgtattttcatgaatactactatgttatacatagagggatatgaacatagttttttttttcctccaaggcattttgaaaccgaaccacaccgacattttcatgcccagtgaaagcttgtaccgtatatctacctctctgtttatatctcccacatctattattgatgtgcctgcgtatgggaccgctcgcttagcttcacctttgtctcctccatatatatcccggatcgaaaaatggagtgcgtaaaaccattaagactctgtgtttctattatcatcttgtttataagaaagttacgaatcaatacttaatttatttcacaatgttgataggattctgtctgattttttcagaattagttatatttattatatttaacataaattacaaatataaaaataaatatcaatttaaaatatatatgtatatatttataatattgttttgagaatttcgtgggttcaagttttagtattttatatatataaaatgagtagaaaaaaattagctcttatgagaaaacaatattagaacaacatgaaagatcccacagctcggaattaggagccacgtgagtcaccatcagagctgtccaaaacaaatctaatttcatatttcagattctccatattatttaatctgaaacgataatctaagctatgaaagccgaaaatgtacaatttcatatgtcaaagacaaattacattgacttcaacctaggttagatatatattaagtgac

SEQ ID NO: 48855 - DNA, 360 bp, Arabidopsis thaliana landsberg
gttatgcattgagctgttgcagtattgaggagacgtgtttctacggtttttgaaccgcccctctgagtacatgcgaaggtggaatcttatgcagatcaagctggataaaaagggttctgctctatcacacaatgagttcgagatggctatgctctacttaagatcagctttacacgacttgtactcagtgcattcagtagtgtacctcgcgtcacatcgggtagaagcgagtcttaactgtttcaaagatccaccgttcccatggggaactgtttcactgtcgggattcgggttaatggctgtcggatacgtgttctcgaaaagagatagactctttaggaacaaacgagaacctgtctg

SEQ ID NO: 48856 - DNA, 440 bp, Arabidopsis thaliana landsberg
gagagttgcggggattgttgaagaaaaggaaatttgtttttagggttttacctgtttatgtgtttgatttggatatcaatacgcctttgttgcttgatcggtatcatcagtctgttgcttttagagatatggtgattgctgttagaactagaggaactcaaacggttagtgattatacttgcaacgggcgtcatgtgtttgttcatacgagagacttagaacgacctctcgttggttccattctgcagagtatgtggggtgtatcttctactcatttgacatggagcccgagacataacacaactctagttgattatacatggagcattgggcaaacaccgtttggaccattctctgatatctcgtctctatcgtttgttcagaaagatgctgctaagagaaacgtgattttgacatctttgaacacaactatcacaagt

SEQ ID NO: 48857 - DNA, 782 bp, Arabidopsis thaliana landsberg
aatttgatttacctgtattcaatataaagctctaagatattcctcgaacacgaattaaatgcaacaactagtccatctagacaatctttcaagacattaaagaaatcgttagcatcatcaccttaaccgctgaaaatttctatggaacagaaaagcaggattgcataaagattaaagagaaaacagtcaagtgctcttttttgttaatgacgaagaagagcaacatcaataacttaccaaattcatcaagcaaaatatactcttatgaataaaaatgaaaatgtctacgaaaaacatggaaacctacttgtgataagagtgtatcctttaccttaaacagacttgttgcccattcatcaacaactgcctgcaaatggaacatcactttttagcattggaacgggttaacaggacactctgattaacttaggctccctttttttctctcagacagaaaatgagaatcaaaattctttaaaaaatttcgactagaacaatctgaaatggattctagagtaagtttcaacaaatttaaatgttcttcttctgcaaacctaaggaagtttcaaaagttaaagtaatgttgacataaaacaattttttatcagttccaaagaaggcaccaatttacacacaaatttcaagtcacctcgagatcagagttgaatcttccagcctttttaatcaaacccgctatataccgaagaattaatgtgtccaaagcaattgcagctcgtacaccagggcgctgcactttgacagcaacaacctttccacttcta

SEQ ID NO: 48858 - DNA, 961 bp, Arabidopsis thaliana landsberg
agggaagtaaacccattggtctttaacatagaaacattttcgatacccaatcgtggcaagcgacaaggaaatgatctgacccatgagtgcggttccagaaggggtatttgatggagagcatgttgacgtaatctctaagaaagatcgataaaggtttgatgttatgtgatccaggaacaaagatacttttctgaagctgtttcacactatatggcatgtagaacaagtgagccttctcagggttctttgtgacaaactgtgtgtttgactccattagcttcataaaccaaccttctgaagcatatataccgttcaaatgcggttcgtggaagatgggtttgtctccgtcaggatatatgtagacctttagtatcagttccataagctcatagctcctgaaacaaggtgataaaaacaagtgttaacttaggtttaaacgcactctggtccttgtgaaagtgtatattaccttttgaaaacagagaggtttctaaacaatggagcaaatagatctgtgtcatttatgacctccggggcacgctgaatctccagttttgcataagtaagagctttctttggtggcaaggaaagagcacgtctctgctcaattccattggagtgaatttagagaaaacaggaagaaacttaaaacctctatttctgataaaacctaacctctgaggaagatagaacatgtcgtggtgctggaggaggatcagtgagaatcagatcatcttttgtcttcttttttttcttcctttttcgcctttttctcgaaataacagcttcacttgcttcagaagcattcaattgcacaataggagttcttgttctaagagtatgaaaattttcaacttttgcttcactactaacaatatggatattcaaatgcagagaaccattcaagtaaataggcgaagaagactcggtttcttctttatcagagaagactgaaaacgtt

SEQ ID NO: 48859 - DNA, 786 bp, Arabidopsis thaliana landsberg
  unsure (1)..(786): unsure at all n locations
tgtaggttaaaactcctacctcaagatccattcctcgagacgtttgaatctccctcttcaatattttatcccgtacaaggtgttacggagtaggagtagaagattaggactcgtcgtcagttctgtttcagctcccaacgttgagctccgtactggacctgatgatctcatttctaccctcctctctaaggttgtgcaacgatttctgatttgtatacaccgatcttgaggatctgacttagtttggcgcatttatttgaaagtttgtgaattgtgaataggttgcgaatagtgatggaggtgtgacgctaagccctgagcagcacaaggaggtggcacaagtggccggagagcttcaaaagtactgtgtcaaggagcctgtcaaaaatcctctcatttttggaggtaaaagtgtaagaacctagctgccattgcttcttccttggatcaatatgtgaacttgtgggatttggtgcnnnnnnnnnnnnnnnnnnnnnnnnnnnnnnnnnnnnnnnnnnnngaggctacagaagcgtgataggccgtctcttcttcaaaacgaaagagatgatacaagccatcgatgctcctgatatcgttaggaacaaagtttccattaatgcttttggttttctagacggagacgtctccttgacaggtgactattgcaaaattcacatatgcattcagtctcatcttctcccgtgtttaatcttctcacctttgtgtgatcttatctgtagggaagctgaaagcgttggacagtgagtgggtgcagtgatattg

SEQ ID NO: 48860 - DNA, 1044 bp, Arabidopsis thaliana landsberg
ttggtactgtcttctcgctcactcttgccaatcttcaattcttttcttgaattttcttatacataattacatatcaaaaatattagcatataagaaaaataagtgttcacacgtaattgaattttttgattccattattttgcatgttttcttgcactagtcattgtattttaatttttaaatagaatataacagcatgccacctactttgtaataatcataataaacaaactcgactttaataattagctagtttatttgaaataagcaggtacaatctctatataaatgcccccatagaagcaagtgttacttcacatcaccactctcaaatattctcaagagtccttaacaacgatatttagttttttcccttttttctgttttctttttatctcccatttttcttccaatataatggaatcgtttatgggtcaaaagaaaacattgtacgcgtgttattttttaatgttggtgttttttttagggttcaattgtgtccatggacgaaccctaaaagttgatgataagattaatggtggtcattatgatagcaagacgatgatggcattggcaaagcacaatgatatgatggttgatgacaaggcaatgcagttctcgccgccaccaccaccaccgccgtcacaatcgggaggtaaagatgctgaagatttcaggcctacaacgcctggccacagccctggcattggccatagtttatcccataattgatcattttcatgcaatttcacatatgtatatatgtgttgtgaacttatgattaaatattgttcgttttaatttttcttaaatttgcttcgtggaataaaatgatttatgtttttttcaagtcgtggttgagtagaacacgatgcgtacgtatattaagaacttattcgggacctagaaaatatacacattgtatatggccaaaatatactacaagaaatgcttatttataacacagtttacatgcgagttatatgtaaattctatatatgtttgttaagagttaggacttactattgaatcatgctcattctg

SEQ ID NO: 48861 - DNA, 816 bp, Arabidopsis thaliana landsberg
cgtagactaaataccacaaaacacaaatcattagccctaactaaaaccctacaattttaacatcagtcttgatgagagatcaccaattacatacctgaatccttccacgattcgtgaactttgaaacacaatgacgttctcgtaaacaagccaagtctttttctcgatcacgcgtcatctgcaccaacaaatcagccaaagcttgacgacctctgattcttggggaacaagcaacctgaggaaaacttcttgcttctgttgtttgaacttctttactattgtcattgccgctgcttccattgtcattattagtaattgtctccgagtcgttgcttagtttccgaataatatccataactctcacaccttctctatctttctctccagattctaaaggtggaggtgcacattcaatctcttcttcttcctcctcattgttacattcttcaatcggttgaatcatttcagattctttcacggattcgagagactccgaattctctagagcgtttgatcccatagaacttgttctgctatcgattagggattggttcgagcttggtggttgctgcgttgtcctcgcctcccatatctgaacgagagaagaagctgcgtttcttgacgggttctcgggttgacctgaattcggatccgagtcggatcctaaagaagaagacgatgatgggacgtcttgccgagattcctctgttttcgagagccgatgatctgaaacagaggatttgttggaagaacattccggaacagctttgatggaatcatcaacaacatcatcaacggagacgctacagttttcga

SEQ ID NO: 48862 - DNA, 1141 bp, Arabidopsis thaliana landsberg
aatcaatgtcagattacaagaatgaatggacaataataagagaagggttaatgatttaacatatcaatgtaataaaaaagtaattacaaagaactacttaattagtgatgacaatcaatcaaagaatttgacgcggccgtgaagagaagaatctgatctttggatgcaaacgcgaatttcggtttctcgcagcatcgttcatcttcgggtgctggaagattcagatctaactggagaaagttctttggccgtatagattcttcatggtgatgatgacttgatgatgatatcgctgttttgattgctgaagtagcgtttgcgtttattgttaaacctctatgtctcctcatatgtcctcctaaggcttgtcctgaagaaaactcggccttgcagattgaacattcatgtgttttctccggtttcttgctaccatcactactagtcacttgtagggaaagaaagcttcctacggctccagcttccactgtttcaaccgtagacgcagacgccgttttcttctcgacgcatttgaaaacgctagctccaagttttggcttcttgtgactagccctgtgccctcctagcgcttggaacgaatggaagcttttatcacacgttttgcactggtaaacaccgtctagccctaaccctagagaagccaccggtttcttgttgctaaagaaacccattctctgcatcgacaaatgatcgtcgctgctctttgcttgatgtccttgcgacaacaagatcagacaattcgccatatcttcgtcttcatcggtagctccgtggaattctacttcaacagcagcttcttcgtctcttacctccactgatgatcgttcaccgctactaacgctggatactgcagcagcgttcatcataagaggagacgcagaacgctgacgtttggtgcgtctgcccttgatgaggagaacaagacagcgcgtggtctgcactctcctcaagagcacttgtcatgatcctccgttttttagctgctctctgtatttcatgaacacatgaggtcgtatatgtatatatggagagacgtatcaaagagcgattggagcgtttggttcacatgtctcagtatgtatatatagctgcatgtgattctacgtgagtataccacaatggg

SEQ ID NO: 48863 - DNA, 329 bp, Arabidopsis thaliana landsberg
gtatagtgtgattctaaaatgtatagtcaggagcatgaataagtcaatctatatgtaactagagtggagttgttgaggtcatatcggatccaaaacgcaggcaactaacccggagctcgtgttccggcaggtgttcttttgctggggctccggtgacaggtgagacgttgcgagctaaggctgtcgcaggagatgcaggtgtatcagtctttagtaactcagggtcttgcatcgtataaatgtatgtctcgagttgcagctagtcgtgtacgctcctgttttgacgaggcccatcaagccgcatctgctagcagcgttatcggtgatat

SEQ ID NO: 48864 - DNA, 561 bp, Arabidopsis thaliana landsberg
ggaagcaatacaggaaaatgtaccttgtggtgatgaagactcatcctcgctatcatcctcatattcctcctcatcatcgctttcgtctccactatcattgttagcaataagacatttacaactagtgaaagacacacctgtcagtgaggtggattcatcgtttggttgccatcgtttttcttctcccttcaaaagattagtaccacaagctacatagggagtagaagtagtacatttggactcagaatattttattttaattttagtccatagatcatgagcatcgacaagaacgtcactattactacctatgacagcaaaataacatctttgctaagggaattgactaggatgtcataggcttgataattttgacgcaaacatcttagatcatgctcaaatgaatttttcatacctagggttgaaaacgggacgggtacccagaacgggtatcggatacgggtaccaaaacgggacgtaattttggatacggatacaggtattttgtttgtcgggacggatgcaggtattcccggatattgaacctcggatatgggtagg

SEQ ID NO: 48865 - DNA, 599 bp, Arabidopsis thaliana landsberg
  unsure (1)..(599): unsure at all n locations
cgcttttcatatttattccattcatttaatacagaatcttcatatgcagggactatgttgttgcttcatggactatgaatggacaatactttcgtttactgtggatgcaatgtgttgtattaattggaatacggactttattgtaatggactttgcactttagactaagtacctgtggaatttggatatgaataatgtgtttcatatttgtatttctcattgtgtgccggagtttgttatatgttgcgcattacaatctgtcaatatagacataattaagggaaactgtgccaaattttccattttttcataaatacataattttcccatcatttcccaaccattttcatcattttctggcgaaaaatcactggaatagaagtttccgttttttggatttgaattttctgttcggtcgaaattcaccgagatccgacgaatttcggttggaatttcgttttcgcaaatcatcaggatttaacttgaaaacggaattgatgacccnnnnnnnnnnnnnnnnnnnnnnnnnnnnnnnnnnnnnnnnnnnnnnnnnnnnntcgatggattagtttggtagtcacgcacgtgtacaggtgttg

SEQ ID NO: 48866 - DNA, 533 bp, Arabidopsis thaliana landsberg
  unsure (1)..(533): unsure at all n locations
cctggtatttcccggtgtttacgcggcacagatggcgtgtgtgtgtcggagaaggacggggcgcggcgaggaagaggagaatagaccgagctggtgattaggggagtcgagaacagtcaaggcctgatgagaaagggagaagagggtgtatggatcatggacgggagcagcgtgatctacgctgccaaaatgcacaggggaggaggagctggcgcggaattccggggagaaagcacttgtcttctccggttctctctcccccgccgcgcgcggcttgcttgagtatgattcggctcgcagtgcggaagaaaagtgggagaccggaaccgagaggcgtcccgtcgtcgtccgtcgtcctcttcttccaccgcccgcgcggcgcaacgatgagggacccgcgggccccgggcgccacgacgggggcgcgctgcccgtgctcgtggggggcaggctggttggagcggaggcnnnnnnnnnnnnnnnnnnnnnnnnnnnnnnnnnnnnnnacggagtggggcgtgacgcagcgctga

SEQ ID NO: 48867 - DNA, 647 bp, Arabidopsis thaliana landsberg
tcaggactaatctttactatatttaagtgtgagttccgtcgtacgccctcgcactcactggggctgggattcaaacccacacccctatgctcaaaggggtctgtcctcaccactacaacatatgcttgtttgtcatattaaagggaggtattatatatgtatactaacaattggaaaacataaaaattagtggtgtctgaataaatatctcattaagcaaagttaacctacatgatatataaaaacattacccgtatcaaaccctgaccgtctaaatacaagctccctcatctaaccactgaagctcttgtttgcttatgtttacagaaagcattggcttggagttaagggtgggccttaaatacacctaaagtcgatcggcggctgcatagatgtatgtagccagtaggcagtgggtggtcgatgtacctagcatatgagcggcgggcctactcgatgacgaatgtttctcgtccagataacgttggatgcctttgatctatatcaattgatacccatgtgatatagaactatagcaatcacgggcgtctgcgtggtttatttataatgtggaagttgcgctaagtagctttgtttgtttagcggactaaggaagcgagacgatcagagtaagtgtaataatatag

SEQ ID NO: 48868 - DNA, 1898 bp, Arabidopsis thaliana landsberg
atcttttgacccttctttaaacaacgtctcactccaccattccatggtgaagcagctcctctattcctttcctcagcctcgccgctgcagctctcatttcaacctcctgcaaccctccaaaggaaacccggagatacccggggctaccacttgcacaccccgggatcaccaccacaccatgcggtgagccagccaccgccaccaccttgaaatcatctctgtgtccctctggcagttttgcccacaggtatatcgctccttctcctcccttaacgttctccttccccagcggctcaagcgcctctttcacaatatccctgttcttcactagactctttacccgttccgttatccacccagaaccttcctctaatgcgtatacagccagtcgctgcgagattatggcagcacagattgggatgttgtcctgaattttcacaagctctgttgcaaacccatctaatctctctgagtaagctatctgcaggtccatcaaatctttttataagacaatcccagtgtttagtttggaatagaattgaatcgagcactcacatatccaagcctccaacccatcatgccataggttttagagaaagagaagacattaacaatgtggtctccctcaacgcaacaatgttttaaaccgtcatacatgaaatacctgcgattttcaaatccccgcttattactacattcaatttggacatcatgggaattaaggaaatgagaaactcactcgtatgtgttatctacaatcagccagcaccctgcatctttgcatatttgagcaatcctcttaagcagcggttcagggacataggtgccacttgggttaccaggattcacaacagttacaactttcggagtcggtttagactcagacagtgtcctctctaaccagtctggaacaaaaatgattcactggtcacaactaaagctatgttaagtcatgaaaaacgtgatacagaatcaaggaggtaccagcgtcaggatagagagtgtctgactggccaggaccaacaattatgttggtgactcctgtcatctgaaaggccatgtaggagttgaagtagtatggctcaaacatgacaaccgaatcaccagcatcacataatgtaataacaaggttcacaaacgcctacattagatgcaaaaacagaaacagagtatgagagtagaagaaaacagaaggaagagcaatcaaaagagtaaacaaagacaggttatacctgattggcacctgcagtaaccatcacttgtgaattggttagcttgttttcttcacgcagcttcagaacaagacaaggaatcaaaaataaaacaagctcagtcacggaattggattcaagagcagcaaaagtggtcactttattggatacaagaaaggttgccagagttagctagaagaatggttcagtcctatgcgattacctttttgagaagagcctgtctcaactcgggaagaccttcatcggggccataagaactaatgataggatcccagacaagctccttgaccttctctaaggccttttgaggaggctgccaatgcaccactccctgaaaagcacatgagcaaaagaatcagcctgcagacaaaacaaaactccagacaaagtatagccaaagaaggtgaccactcacgaaagcccaagtcttttgtgaactaaactagattagataataaataaaacacacatttctagagagggcaaaacctgggcgagagacatggggttcgtcaattccgccatcaaactccgaatctgcacgcaaaaccccaacaatttttcacttcaaagaaaaaaagacaagagaccaatcaaatcaaatcaaatgaaaatggaagtggagaagtacgaggtttgacctgagccatgacgggcatatctgtg

SEQ ID NO: 48869 - DNA, 1059 bp, Arabidopsis thaliana landsberg
gattaatgagaaaacccagggacagagcatttaaagaagaaagagatttcggttatctctttgtctcgctgtgttcatatctattgcagagatagtgattttttaaattgacctttgagcatcccttttacatgttttcgagatttgtttttcttattaaacagccaaaaagtatctggcttttttctcctctctcaaagttttgatttttaagtgatttagggttttttcatccctggaggaagaagtttgagtctttgtatctactttgatcaagtaaggtttgttacttcactgttctatgagaagattcttcttaaagtcttgaccttttgattcatttggattctacttattagatctgtttatattctccatagtcttgtttctattagtttatttgttggtggtactagatccaattttgtgtttttaacctttatttttctgttgtagattcttctttctctgcaaattccaattgtttattgatgttcttatccaaaattttttatttgatagaaaaaaaatgattgatttgattgcattgcagctttgtgagaaaagaagtttaaagctttttttcttttttgtcttctttcttatgacagtgagctaaagattcttcattctttgcttaagagataaaaactttgctacatttgtgtaaccatgattgcaaatttgctaacaaatgattcttacaattgttacaagtaatctagattaagccatgtttttgcaattttttcttgcgtattgttatggtattacagcttttatctaaatgtctttttctttaaattagtaaaaagttggaaagtggtcattgtagtggttgattgcatctttttgctcatgatgatttgtttttggacttgagaaaataaagaatcttttcgttcacatgtgtgactgaccataagttaagttatgtatcctttagaatattttgtgccttaaggtttgtttctgtcacaatcttcctggccccattgctttcgttgaaccaactctttcatattggaggttggctttctggcattctaacctttggag

SEQ ID NO: 48870 - DNA, 607 bp, Arabidopsis thaliana landsberg
tatggtgagcagatctaaccaaagcaattgtaacgacgcaaaccgctagatcatcactacttacttacagtgtaatgtttttggagtaaagagtaataatcaatataatatactttagtttaggaagttattctgttatgagtcaattttcccgggaaaatttaaattactagttgtcacaactcacaagtgtgttgattggcttcagggtataaattaaatagacttggcccaagttactgccttactggctagaatctgaaaagtgtcctacaatatatcattgatctaactcgagaatagtttacttagatttagataaaaaaaagttctgtttagttttctgattataaataaatttagttttacctcttcttttcaataatattatggagatctcattgaatctaaaaaatgatatatttttattctcctacttctgttttttttttttcgtcaacaaggtctattggtttttctactcaactatttgctgtggtggtgtggatacaaactatatatcgcgctcaaagattctgcagagacaataatgtcacttgaccgattctcatacttcaacaaataactttgcaatatatcctagttt

SEQ ID NO: 48871 - DNA, 714 bp, Arabidopsis thaliana landsberg
tttttcctttgggcttttgagagagtttttttattaatctataaaatataaatccccagtggtgaattatttagcaaccagtttccagtctcgttataacattttctacagaacatttaaaggtgtgtttataactccattagttaagattgttaaatggtttttgtcataatctttgaaaaagtaaatgacaattagctaggttgtcattaataataaaaataaataaaaaggtatgaacaaaagtctgaaaaagaaatttgtaatctaacattactaatttctaattaacattttttatgccatttagtacagtgtttttccaaaataaaatatactcctatgatattttgcataagaatatattatactaaaaaaaagaagaggaaaaaagcaaaaaatcaaaagaaaaaaaaaaagtaaaggagcaacaaaagcaaagcaggtggtccgttcccatttctctgtaatttgtcttcgtctctaccttccatctctctcacccgctctcctcggaaaccacagcgacggacggacggacgataaaacttttgcctcttatttgctcctacaaatctggaatcagccggagcgaatctcgaagcttatgatctcgacttgtgaggatcctcttttccttttctttttcttttgtataataataattatctcatccccgatcgatttcgattttcatatggtttctcgccagaa

SEQ ID NO: 48872 - DNA, 797 bp, Arabidopsis thaliana landsberg
gaaggggacgtttgggaggagattcgccgccgcgacgctggtggaggaagtgtcggaagcatctggtggccccaaccatcggaattgaatgggactgtgccgacttcgaatgcttcaaacaccattgttgagatttgcgaagaagatgtgcgcaagtgaaaaatttgtatcctattttgtcaacaatgaaaaccctagcccttaatgggcctcaatgggcttatctcttgtcataagaaactctagcccttttaagcccattattatctcactcagtcaaaatgacgtcggtttaagctaaccaatgcttttggtttgggctatattctctcaatcgaaattttgggttatattcaaccgtacatttattaaggaattaagaaaccggcttagaaccggttcatgatctgttaaccaataactgaacgttgcacttcaattcaaaagtttacgaatttgtactcgtcgcaaaacttattttatttagatccttgtttttatatccatgtctcacttctttcccctaagtttttcattggttacttaaggtccaactatataaagacttttttactctcttctcttcttcagagaaaattcaaaaagaatctccaattttctcgggaaaatttctccattagtctcttctcttttccggcttggaatcgctttgcttcttaatctttaacaaacacgttccatagaaccccaaaaatttgatcatcggaaacattttctcgggggaagtaagagatttcccgagaaagaagatctcactatgcggcgcgtgagagcgt

SEQ ID NO: 48873 - DNA, 678 bp, Arabidopsis thaliana landsberg
aacagagaatttgcttactatgaacaaattaatatagacttttatcttccacactctctcaacctgaacgcagagatgtcaggttgagattgcgcgctgaaattggtgaatggaagagccgagagagtgacttgttcagtgcattggcaggttgaaattgttgattggagcgcctgaaatcgtttggcccatagaagagttaatttcttgctgtaagtttcgacgaccaccgaaacttaaagccctgattatattggtatatacttagttcttttcaatgctctttccaacagttccttttttaaaaaaaatatcaaatgaaaagtttttctgctcgcttgtctataaaattagggccttaggtgctaattttctgttgtcttctactaccgctggaaattaagatttaattttagggtgtcctctggaaccaccaaaaaataggtatggccgtcaaaaaatgttttgaatccctgcggagatactggactgcgttcacttgactagacgtatcactaaatttaatgcctaatttggaagtcttgttgtgcaccttaataccgacaagcattgggttagcaagcaacaacagtcagtaagggcatgtacagtgggtgcttaagttgtgcttagagtgtgctaggggggaaatgtaaaaatccaagcatgtacttgcga

SEQ ID NO: 48874 - DNA, 761 bp, Arabidopsis thaliana landsberg
attcacgccggtagcttctacttgaaattccgggaatataccactgagaaagtaagatgaaacggagccaccggttagccaccactgcagccactagattcaccattgaatttagtaatgggacaatcacctaaacgacacataaaaattaaaacaaatcaaaaacaaacaattgatcaaattcttaagaaataaaaaaggtgaataacatacatgtagacttttatcacaccaaaaaaaacacacacacatgtagagaatttttgtggtattttgtcttgtcctcctaaaatcatatgctatgtgaaagtataacatcgacttgaatattagaaaattgggaaactcaaacaactagtatataaaatattttgtatgtgaaccattgttctacttacatgttgtgattgtaaaatttatggaggcaaagagagaaaaatgtaccatgaacgaggaatgatggattaatggttccttgacttgagaagaaggtttatgactctatcgtgtccaaaatcaaaacttctcttgacgatctcttgggagcttcttttgagactcaaagatatattaaaggaaaatacaagctgaaaaaaagtaaaaatcaaaatccctgtaatcgacgaccaaaaaaaaagatttattgatacttacttggaggaaaaaaccaacatttatggaataaattgttctccaagtattcaattaatacttcagttgtgaaaatttgagactcaaatcacaaattttcttaatatata

SEQ ID NO: 48875 - DNA, 883 bp, Arabidopsis thaliana landsberg
tcacctaaccttgttgtttaagctcggtctatttcgtctacagcagcagaccacactagtactagtagtaccttcatcatcaccgttaaataataatttccaatataaacttcaatcgcaaccgtcaatgtaaaaagtgggccccatatgcgtagactttccgtattgacttgttgaataaaaacgcacaaattggaaaattttcattaatcatcactgttttaatttaggtctttaatttattaagatttaggattaatagagagaaagaggaattggttttaagtgttaagagagaaaagcctttgcgcaatctcactgtgtgttggtatatattacggcgccaaggtttctttgatcgatttcttcttcttcttctggaaaattatctcgttttccgtttttagttctttgagtttgggatcgttcaatggagcccaacgtagtggagatcgctactcctcctgccgcttcttgctcgagaattcgaacgccaacaaaggttattactttacctaattgaattgaatttgatcggattttaatctctagagggtaattctgtttaactgtgtcttaaattcactgatttacctaatttgaagttaaaattgattttggggattgtgtgattgtgtgatcatcaatctgggttttgaggtctttgttgatttattggttttagtgagtcatcatcgttgattttgctgatgtgtgattggggtcttttgttttgttggctcacttgcattatgttttttatttgtgtatgttctctttgaaggatcgtcattcgtttcggcgatcactttctaacgtttcatgtttctgatcactagaaattgactgttaaagttgttatagacttgtttttgttaggtaa

SEQ ID NO: 48876 - DNA, 655 bp, Arabidopsis thaliana landsberg
gcaatttaattttatgaaatatgcaccagagctttttctttacccaggtttagtggtggctttggtttcccattcatattataaaatcagaaagtcaatgagctataaccgaaaaaaaaaaaaaaatgaattcatattcatgaatgataatttgatcccttccttaaaaatcagtttaatctcagtttgattcaaatcagtctttcagtttctgtaacggaattagacatcttcagtaatactcaaaagtatattttgttttgcaagtttgtacatacacaattctcttatcatatgagaattttttttgaatatatggactgcatttttataaattctatagggattaaatgggtgagaaatgatgacatcagcaatgttgactaaggaggaagaaggcagaatcgggtaaggcatttccttacacaaagccagatctggcccaaacagaatcacttctgtcttttcaccgttctttttttttcacaacacaaaattcaacttgtttttttttttttttgcatgatcccccacattcacattcatcacgcagcggtcaaatcacccgtcccacattttcatttattgatctgtttttcattatcgtcttctagttaattattcattcattacgttaagtcgttagtactagtgt

SEQ ID NO: 48877 - DNA, 806 bp, Arabidopsis thaliana landsberg
tttcttttctcttcttccgattccatgcatgttttctcaaaaaagcaattaaacagaatatgtatatatgcatgcactccttctttattttttcttttttgtcatcaggagcttttacatagcgttcatattattttacattcttctattagagcttttctactaatctttattgatatccatttcttaacttgttcagattcacacgtacacattttttgcaataatcaaatcaaaaagcttttttcacgcgtctctacagttttagcagggtacactgatatagtacatgattttctatatcgaaaattacaatagctagaaaaatatataattttttaaaaaatatgcaaaacttctgcttgacgttaaattttgttttgtcatttgtcttatgttcacacagacgaaaaagcttctataaaaccgtcaaaatagctcacccctaaaaccctaattatatattccctctttcattctccttcgtcttttctttgtttctcatattcaagacatcctcaattccaaatcttaaaccctaaatttacagacacaatcgagatcacctgaaaaaaggggtttaaagattttagcaaagctggcgaattcaggaaattatggaaagaggccctttcgaggcgatgaatcggatgaaaagaaagaagccgatgatgatgagaacatattccctttcttctctgcccgatcccaatatgacatgcgtgccatggtctcagccttgactcaagtcattggaaaccaaagcagctctcatgataataaccaacatcaacctgtttgtgtat

SEQ ID NO: 48878 - DNA, 609 bp, Arabidopsis thaliana landsberg
caagatcataagctgcagtcacaaagataaacttaatcaccgaattaaaggctaatcacaacaccttgttctaccattttgaagaaatcaagttacttcaggacaacacaaagcctcaaaatttctacgaatcttcctacacccagaaaaatgcttaagcagatacagtcaaacaagctctactagatcaatcaatcacccacgtggcataaacaggttattaatttaagtaacgagagcttaattaaaagacaaaatccagtagaactcgcagagagaagacccagaaatgttcgagaagataaagcaaaccctaacctgaagattgttaagcttgatatattcccagattttcttgacggcagttgtgcgagagacttcgttttcccaataaaattagcgagcggcttcgaaacgggaaccaccttaagaatgccagtaccttgtctaccagttttagcgccggtggaagaagcggccttcgccatcagtaccctgcaagctccgaaaaccctcgacattttttcttcttcacacagttttgaaattggaaggagagagagcctgtctaaaacctagataaactcacagactttgaaaactgaaacg

SEQ ID NO: 48879 - DNA, 1048 bp, Arabidopsis thaliana landsberg
tatcgactcaggtgttgcatattccaagcatattgaataagaagaataaaaaaaagatacaaaagacgcagaacaaatgtttttacatcacaatggaaaggaaaacaattcattgcaaatgtctgagctatgttacaaaataatcaaataaagttgtatcagaatttttatgcctttctcaccctttcttcaatgtcttttcacaaatctcatgaagaaaacctgtgtaggttagtattatgttctcaagagttgaagtggttagctaacttgttctgtttttttaccacccttttttggtttccttttctttgattcaagactgacccaagtataacctgtgggtatagcaaatgggtcttgtaatgtttttgacttactactcccaccatctttgtttgatctagaccgacgaaaccacgaggaggacgatgatgagttggtgaagtcagttgttgcagcagctggactctcatagccagaagaagtcgggctcgagagaggcgtcttaaactcatctacaggctcaatttcttcaaactttgtgaatgtaacaagcacttttattgtaggtaccactggaatagcaacctacattcacaaacaatctctataagaaaaagaaaaaaaactcatcttcaagaacattaagattagctcttaacatgaaacgacaacataccttgaccggaaatgttccagtgggaagttttgtggtaagaagttctctaagacgacgaatcgccttaactttgtttgcaagtatgtcaagtaaaggaagcaactcctctgtttgtaatgggaagtttggagatagccaaagaacaggacgtagccctttcttatattcgctttcgtggcgagtcttgtcagagaccaatgcttttggtttcctataatgctcattatctactgagtgtcttcctggttttatctgattagactctcccaatagattacttactttctcattcacacaaagagagcttctcggtggcgcgtattgaatctgcttctcttgtttagtctctttctttctccgaccgcc

SEQ ID NO: 48880 - DNA, 1207 bp, Arabidopsis thaliana landsberg
tatactagagcttaaaggctttaaacgtggaaactttctctttcataatatgtcatgtgtatattatatgcttaaaaagggcattgaaacttccacttgttaatggaggatttgatttatcacctactttagtctttcgcgtaatcagagcactaatcagtattctttccaaaattaatctgtatgacaaattgctgacgtgagcattactccactattgaacatggattttacggttccttcatgcccttgagcttgaggtaaacgtacatcagtacatgcatttgttaataacatatcaattcaatatatatcaaagtttacattcgaagatactgttcggttttctctagattccatgctagtgtactatagacgatcaagaaaaaaaaaaaataggtcaggaatgaggaatgttctctgtgttcttttttttttgttttatggtaaaatgttattgagagtctcgacaaaagaaaatgtggaagtaccgtatcagtgaataagcccacaaagatgtattatataaccaacaatctatgattttatatcgcttagaagttatagtggacttgggcttatgtttatgggctggtgaccttattgtggaatcacatgttgtatatctgcaactaataaaagattaattaaatgataaggctttgaactttaaacccccaattttggctgttactcagatctccgtttcttccattacaactgcactctctaaagactttcagattaatatcattttaattcatgagagtgtgtcataatacaacttgaactaaaaagataacttgatgattgatgactatataacagatgtggactgttcatctaactggggggattttaaaatttaaaataaacataggagatgtcatttaccaatcaagacggtttacagtttatgatatcaatcctttattattataacttgtatccgaaagattttctcaacaagatattgtcatgttgtaagaaaacaacagacaattaattatatcttatgttgtatgtgtgatcattgtcatatactgtttcttatattcaaacacagaatatcaaatccaaacgtaagaaaatgatttcattcatcaatatttgcactcaaatttcatggatagcaaacagaaaaatctacttgcgacttttctacacaagcacacacactctttactaaagatactgaaaccttatg

SEQ ID NO: 48881 - DNA, 403 bp, Arabidopsis thaliana landsberg
  unsure (1)..(403): unsure at all n locations
nnnnnnnnnnnnnnnnnnnnnnnnnnnnnnnnnnnnnnnnnnnnnnnnnnnnnnnnnnnnnnnnnnnnnnnnnnnnnnnnnnnnnnnnnnnnnnnnnnnnnnnnnnnnnnnnnnnnnnnnnnnnnnnnnnnnnnnnnnnnnnnnnnnnnnnnnnnnnnnnnnnnnnnnnnnnnnnnnnnggtgcaataagcccattacatgtgtgtgtaggtaaaacgaagatattcatattaaaaagtcttcctagcgcctcccaattcaatctaaatggctcaggttcggtgatactataatacatgtcgctcatgttgtgtaccatgctaataggtctgaaaagccaatacagtatagtgtcgattcttcagccccaactagatacaaggttctgtccctccaatagatc

SEQ ID NO: 48882 - DNA, 882 bp, Arabidopsis thaliana landsberg
ctttatcaatattcaaaaatcctcacccaaatactttctttttttaagattgagatccattcaaaccaagactgatatatttaattatatatttttttgttttgttatactttaatctaatataagctcataccagctggaagttcacaaaatttaaacagatagaaagtgataaagaaaaaaaatagttaggtgctttgataagcaaccaattttacggttagtacaaacacaaaaagaagagaactccaaaaacaactttttataccaatatcacacacgtcacgtgtggaccaaaccaaacaaatcgctatctttctcaaatcgcagccaaagggaaatttgacaattattttttactaaaagataacctacgtattgtgtgattttagggattttaggggttgattggttctttttaccactcgcaaatgcagcgtgtttaggtgctatcggttgttaattattgataactatcatacaaactggtggaaactgctctggatcattcaaaatcgccatatttcaagaactctttttttctgtaaacgtttgcggttacaaacagtagttaaattaaaatatttttaaaattaacattatttataattaaaacaatatttatctaatcatatatatacatataatatctttcatcatcattgtatgcatgtttttaaaaatcctaatcaatattagtaattatattcttttaattatgtcttacacccaaactaataaaaatcaagaaccaaacgtcaatatcgtcatctttaattcattcattagcacgtgtaactctttaaatatttattttaatcgttggtttatttaaccgctttcatatccactggtttatcagtcataaaacttcccacaaca

SEQ ID NO: 48883 - DNA, 647 bp, Arabidopsis thaliana landsberg
  unsure (1)..(647): unsure at all n locations
cttctacggacgcggaggaaatccaccggagcnnnnnnnnnnnnnnnnnnnnaatgtgtcctccaccgccataccgcccttcaccatggccgtcccatcctgtcattcgctgtcattggtatgtgcacttaacgtgttcgcccttgttcattcactgtgtagcgctcgcttgattagagattagagctcggggtcgcaatggaatcgacctgcggcgtggccgcgatcgtgtccggtgtgcgcgccgttgcggctcggagcaaggaggggaagaagtccaggaaccgttggatccctgatgtgggattgtggtgtgaagaggtgatcagccgttagatagactatggacgctcctgatctgacggtgatcgggggaggaaatcttgacgcggcgcgtgaaccgttagatcacgcttgggcggtggatggatttcgttgagtctgagccgtagatctaggatcccgcggctatcgtggtgcgctgattcattgaagtcaggatctaatccctaagcgttgatttagatccaacggctcattaatggcgataccgcttcgacttgtgcgtcttacaaatgagcccctgcgttttcgaaatagacccgcggtcacagaacagtcactgagtcttaaattatttgtccata

SEQ ID NO: 48884 - DNA, 1077 bp, Arabidopsis thaliana landsberg
ctatttgtcatcgacgtcactacttatttttctctgtcatttttttttacttgttaaaaagcttacaaatgcgcggttaaatatagaaaaaaaaaatatataatatgttatcaggagttgggaccattagtgtacgattagccaaagaaaagccactaacaaaaaaatagaaatgtaaacaaatagcaagtaaattttgaatttactttcatatactcaattgcacaatagacccaccaatttatgtaaattttgtaaatttaatacatttttctcaaacaaacttttcagcaatatttgattatttgcaattatacattaatttctcccctaaccaagatattttttaacaaggaaaatgtgtctcgagattcatatgatccatgtggaagaaatgtttagtttttcttcctcggtcaatgaaagtatataaatacacaataaaccttgggaccaaaggcaaggaattgaccaacaaacacttatggaccattctcacatgtgaccatgtgagttcccacaaaccatagccacaagagacttctcacttctgagttctcactatttcacattcatcttagaaacttatcatagtctattcattttaaatacagctgttacaatcttgtttggggttttaaagcatatgtgggatccttccacatgtgaatgtttttgccaataacataagcaaagtagaaacaccataaacttacagatatttcacagcatgtgcatgatcaagatattgccaagagacagaaaacaagaaaagagactttaccttgtgtttttgtgtaagatctccaagacatcattactctcttcactagagaatgagaaaaaagaagtgacaagagtagccatgtatttgctgatgcagcatcatcaagattcccactcgataaggaacccttatctgcggatcgagaggcgaaagcaaagggaaccacatctcttgtgaatcttaatggtgctgcatctgcgactactggctgataacatccaccaaaggctagacctttttcctattcatcgagaacctagctattttaaccgcagagaaagatccttatc

SEQ ID NO: 48885 - DNA, 714 bp, Arabidopsis thaliana landsberg
acctattttgcctgtaaaaacgatatatatggctgtattttcatagaagtatcgaaactatattatatattaatataaaaaaaggagaagaaagagcttagaagaataattagtacaactaactaaattattgtcatagatattaagggacgagtcatctataatcatgtatttctaaacaaggctttaaagagaatgtagccacgctttacaaagtcacataattagttataaattgtattctaaagctaagactaaactgaatatatatttcgtatttgtcctaaatgcatcaattaatatgtcatgtcgtaaagaaaaacgttgaaacaagtggggatacgtccataattctcatactaaacaaagacaataagactttataattatgccaaaattctttctttcattttcttttgtcaggttcggccaaaattcgttaatgttcggtcttcttttctcttaattataaagaagaaaaaaggtttataaagactccattgttttggatatatcctagtaccatttcatagaaatcgttatttcaaaagagaaaagtcttacacagttatactcaagaatttaagaattaaaaaaacaaaaaacaaataagaagacatttattttaccaaaattaggcaaccatttggatttcactaatttccttaacattatattactgcatgaatatttttttaccttttattgatatat

SEQ ID NO: 48886 - DNA, 1003 bp, Arabidopsis thaliana landsberg
  unsure (1)..(1003): unsure at all n locations
tgtgtcgcagatggcttagctgatgtatatgtgttgatgttttgtgttattaattgattagttgatgttattgtcctgcattttgcttagttagttttgaaatccgcgtacaaataagccgatgctctggattaaagtaatgaatgtagcatggtactgtacacggaaactgaactatggatcgacatgtctgccatctctgattttttccctgattagacggcctggtttagatccacattctctgtttgagttgtgattatgtttgtgaaaacggtaacatgttcttctatgatcattcatgatgttatctactagtgtcagctctttgtttagctgattttgaaagccgtctacaattaagccgatgctctggattaaaatagaatgaaggaagcatggtgctgcgcacggaaactaaactatagatcgacatgtctgccatctctgatttttcgtgatgagacggcctggtttagatctacattctctgctttttgttacttattatgtttgttttcattgatgttatgatagttgtttgcgtagttgatgttatatccgtgtacaattaagccgatgctctggattaaacagaatgaatgtagcatggtactgtgcacggaaactgaatcatgggtttcaaatgtctgtgcctgctctgagttccttattggttctttgatttgcgggcctgatttgaacccacatttttacatttctaattgttttttccttcgttctatttacaccgtcnatcattattttatctccctgaatgttgtatctgatgtgatacgtttgtgtttgtgcagattatgtgtaaccgctggaaacatttcacctattgatgttattactcatcttccaatcttgtgtgaggaggctggtgttccttatgtatacgttccttcaaaagaagtaagccaattttctttcttgatttctatcatcttaccaattaatcggttttgtggtgctaagatattcaatatttttttta

SEQ ID NO: 48887 - DNA, 854 bp, Arabidopsis thaliana landsberg
catataatcatcaatagttagccagttcgtgtaatcaatcatactcacgtagatgcaatatcaatcaataactagtaaagaaaagaagaattgtaacttggaatgagaccaggttacaggtacttcaaataacttttatctactactaggcatttacaggaacagaggaggaagaaaatggtgagctaatggatgtgacacagcctttaaggtgatcaagaatagctttctttgtcttcgttaggcttgcgtgtgacgtcaaaggcagtccttctttgacacactcgtcgtacttctctagcaccgccactatgtttgagaagtctggccgcttcgacggattctctgaccaacacctcttgattagatgagctagcgctggttgacagctcgccggcaatggtggtctttcgttctgctcatcaaagaaaccaaaaaaatcaataacttgtattccaagaaaaacaacaatctggtaaataagatgaatggagactgaccttttcagcgactgcgaatgcggcttgcacaggagtcatgccttggaacggaagcaacgcggtggtgagttcccatagaacgatgccaaagctataaacatcgacttttctggtataaggcttctccttgatcatctctggagccatccatctataagttcccatgttacccttggcctctctgcattgcgtgtcaagacaagatgtcccaaagtctgcaactttaactctcatcttgtcgttcaaaagcaaattgttggactttaagtctctgtggataacaccttgcgagtgaagatacttgcttcctcttgagatgtctagagccagccttagtacggtctcgatcgaaag

SEQ ID NO: 48888 - DNA, 498 bp, Arabidopsis thaliana landsberg
  unsure (1)..(498): unsure at all n locations
tgcgcaccgtggaccgtccggcctatcaggagggaacctgagccctgcgccaggttgcggaccgtccggcccctggcgtggannnnnnnnnnnnnnnnnnnnnnnnnnnnnnnnnnnnnnnnnnnnnnnnnnnnagcgcctggatcggcccaacacactttttggcgactctggtagggacgagaaatctcatctatcacattcgatccattagattagatctagtagatgagacctatcagctcggatgcaatggccagtccccgagatcacaacaacgatgtcctaggtattaacacaaggctgactaactcggcgaccgatgaggatgagaaattagaagaccacatgacaaggttggacgaggaattccagcgactactcgctcgaatatgccaggtggcatcgagtggtatctctcgcacttgaaggtagatcagcgccagaagatcatcagggatagggaagtccagtatgattcactgtcagacttgctgc

SEQ ID NO: 48889 - DNA, 683 bp, Arabidopsis thaliana landsberg
cttaccggattgatcatctccgtctatatgagagtattagcttgacactatgttttctattgtatcgggttggacgtgtgatctcggactttccgagttccttagtaaacagagaagtctttgagctttaatccgagatttcgatgtcccctgaaccgtgagctcaagcagtcccggtattacaccttctctaagaattggctctctgtatttactcctatcgctttggcagagcgttaaaagcacgccaacagcatgttcccgagcttgtaatgacccgttttcaagaacttccacgaccgctaaaactcctccttcatcagaaactaaccctgttctcgcctcctcaccagaaaccatcaaggcctctattagtgaacaacatttctcagatgttttcgacgactttttacttgatttgagaagattcagtattggtgagagtggtttagttgctaggatcatgcttaggttatcggggagtgtagagaggttggaaagagccattactgcatcagctttagcttgtgggcttccatgtttaatgaccttgactaataaaggaaccacaccattagctccaatgatgggtttgttgtttgctgacgcggagagagtgagcaaagatgcagaagcatactcttgaagtgttgggctatttgattgtaagaagttgatgattg

SEQ ID NO: 48890 - DNA, 632 bp, Arabidopsis thaliana landsberg
acccatcattctttgattgtaatttgttatctctttagttagaactattctaacttcacaataattttctacaattttgggaattattagccttaaataaaataacatgtgttggttaagaacttaagatgaattgtgattgtttttaaaaccaaatatcatatccttgtagagagatatagatagatacatcatttaaatcacgtggtgttcttagccgttggatctggtagttcacgcaatcgatggcgaaaatggtctagtgagcttaagtaatgggccgcggtttacttggcccagtaaaaaataaactttaccaaattttcaaaaagtttcctctttcagctttctttttcccgcaataagtttcttgcaagtataagatacaatgactcttatatacaccaagctgccaaaatgagtttgcaattttttactctttttatggccaaacatttaattcagtaacattatggtttacactcaactcgttttgttattctgtcatttttatgacataactaaatatattttgttgtttaatgattctacaattctgttataattggtagtgttactgaaagaaaaaaaaagattctaactggtaccggtttttttgttacagggctgat

SEQ ID NO: 48891 - DNA, 287 bp, Arabidopsis thaliana landsberg
tgctatcaatcataagtcaccaattgaagtaatatagacactcaccttcttcttgggacaggcttgagaatcttgataatacacttctcattgttattcatgtgaatcccctcaaaaacctcactgtatttccctctccccaccttccttactacctcggaatcatcttgctccctgacaacgaaacccacataaaaaggctcaaaattttaaggggggggtgatcacccatcatgatcataaaataataaccaccaactcttctaaaaccagattaaaaccaagaa

SEQ ID NO: 48892 - DNA, 737 bp, Arabidopsis thaliana landsberg
accaaccatcacacacacagattgtttggtgtagacaaattcaaaccctaaccctagattgattgcgtacggagtttctctttggttaaaacccccacaaaaactgggagagcgatgaggaaagaggagattccagataaaagtcggactatcccgatcgatccgaatctgccgaaatgggtctgccaaaactgtcaccactcccttaccatcgtcggcgtcgattcctacgccggcaagttcttcaacgatccccctccgtccggttagccccttcttcctccctctcgttcccttttttggaattcatgtttggtaattgcgttcttgttcatcatagatagatagagttcaattgttgatttagatccaatctgtaagttaggccttggagaattaggattggttcttcttcgagcatattttaagttattactatgatgaatgatttgttatgtgtctaaaagttcataatgaaaatgtgatttgttgcatccagctacgcagggctcatctatccatggagctaacagtgttcttggttcaacacgcatggacaactcttttgttgttttacctcgacataagcctcctcaatctcagggcattcctccacgtcctcgcggggcgtcctcacctcagcctgatgctactcaatctggaaaggcgatggaggaatcgtttgtagttgtctataagtctgagccctgtttctgattctggtggttctcacaatc

SEQ ID NO: 48893 - DNA, 474 bp, Arabidopsis thaliana landsberg
  unsure (1)..(474): unsure at all n locations
gatccaagcaacttcaatcataactgaggcagtattccagtggaaatagagtttaaataaaataatccatgcgcctaagaaagtcagaaattggaacaacataccttccgctttccaacggccaatgctcaaccaatagtaagcgaataaaattaaaactacaccaataatgcctaccccgtcagaaattctggataaaacctcgtacataactcacctattaattggaccgattttgaagtcggtattttttcatgtaattgaataattagctagcaaattgtcatcctacactaacctgtcatccgacatttgctatcggtctcctcgcacttgtatctgtaattccgtatttgttacctgtcactcatacttgtgtctgtaacccgtgtttgttatctgtcaccccgcacttgttgcggtgtcnggtatacacataatatatattagaatgcaaacgccatttattcttga

SEQ ID NO: 48894 - DNA, 666 bp, Arabidopsis thaliana landsberg
aaaacatgttgtttctaaaatatatatatatatatatatatttatatatatatatataaattcttttcttgggggtacaaaatttttgtttgctaacaattttactttcactgtttactatacaaaaaatctccgttttagtgaataatatatgcaactaagtttttcgcaataaaaatacaataaaaaatctagctatagtctggtcacaaaccataggaaatgtagcctctaaaaataaaatcaataacaaatttgtactgatctttttatatcgacataaatttggtgaaagtccaaataacatgtttttcgtaccataatcaaccaagtggttccttcaacagatacataaaacgaggcaaaataaaagtgaacgaggcagacaaagatttttccaaacctcatttaagggactaggttgactttagtcctttactttagaagagagttgcagttttcatctattgtaggggttacacaaaatttgttcttatgtgagtccaattgccaaattgtacatcactagaagacaaattgggcccaaactgtgtagaatgggtttgggctgccaacccatcataaaccttagttgaagatgaattagtttgaaacatgcattttttttgtcatgttcatgcttaaaaaaaattcagattgacctac

SEQ ID NO: 48895 - DNA, 1017 bp, Arabidopsis thaliana landsberg
gaaattacattatctaaaaaaccaaccaaagcccattgcaagttttagtattttgggtaccaaattgcaagtatttcacgtgaatccccaataatttgatctcatgcacacatagtggggtccaatcttttatgttcatttgccacttctcgccagcctctcctcttttgttctcttcactacctccaaacttcccaagaatctctctttctctcctctcttctctctcgcctcttctttaatttcctctgaagagaatcctccttacgaaaatgttcaagaaagcaacattgaatctttcacttgctcctttgctacttgtttttcttttccttctctcgtgtgttgttcatggcgtcgatgagaagaagattctcagtgtacataacaacatctggtctcccaagaaatcatacgaagcttcaacttcatgtttttctcgcagtcttggtcagttctattttcatcaaaggctcaccaaccgtagagatactgtttcttttgctttagtttaatatttaatggcgtaatttaaggttaaactcttagttaaagtcattagcttttacactactttatattatcctttttccttgtattgatttgggattagtatagctactttttacaaagagacaagatttgttgatctttatgagaactgatgattctgctttgaaaaacttacgaaaaggaagagaatccactacattggagatgaaacatagagaactttgctcaggaaagactatagatttgggtaagaagatgagaagagccttagttttggataacattcgagttcagtcacttcaactcaaaatcaaagtaatgacctcaagcaccactgaacaatctgtttccgaaactcagattccgttaacctcagggataaaaattgagtctttgaactacatcgttacagctgaattaggagggaaaaacatgagtttgatcgttgacactggaagtgacctgacttgggttcaatgacagccttgcagatcctgttacaac

SEQ ID NO: 48896 - DNA, 495 bp, Arabidopsis thaliana landsberg
ttaccatccaagcatgaaacattgattagtagtatatgtggtcgagcatcaaaccatttttttgtttatcaaacaaagaaagaaaaggttgccatactattttgtagcataacatgcctactcacaaagtcacatgttatattcaaaaagttgtaaaaaaagaactcttatatataaaatgcactgcgttaatttgattgtaaatacaaacaaaaaaccccacaatcacttgattttatgactttgttttgcatttttttagatttataaattccaaaaacatgggaaaattatccatagacttgagattaaagaacacaccctagggtctcagagaaatctcataggctgcaaatcggtaaatgtttggatcaaatcagcaagcattttgtcaatgctagcggtacaaacggttttacctttaccatctcgtattctcgacaaatggacctataaaaataagcagatttggttgattaacatcatagaacagtc

SEQ ID NO: 48897 - DNA, 538 bp, Arabidopsis thaliana landsberg
ttataaactagaaacgtggtttgcggtttgcttcgttgcttccggtcttctttcttgcacttctttagtcctcccacacaggttagttaggtgtccgaatatcatgaagatcttcgaatgcttagactcccttatcattttgtgcaatgagttctggcgtgttgctttatcaaaattgtatgtgttcctactgagcacctctggtttctctcgtctactgcagtgctgtcattaccgatctaaagcagtttctgagagcaagcgtcacaatcgccatggaagctgggagaatggatcagccttgcatggcttgtatcaatagccagcctttcgtggctgatactgagccagtgaagaaagccagtggggacatgcctgcggcgccgacaggaagcgggtacttcgagtgcaacatctgccttgattttgcagcagaatcagtggttactctcatgtggtcatctctactgctggccttgcatctactattggctgcgccatagggtggagtcaccgccagcgacaacggcagttcggc

SEQ ID NO: 48898 - DNA, 1554 bp, Arabidopsis thaliana landsberg
agccacgcgaaacactaccacagaaggcacaaagtgtgcgaattccactcaaaagcatcgacggttgtagccgccggactaagccaaaggttttgccagcaatgcagcaggtttgtgccccctaaagttgccacctttgacctttttttaaataaataaaaaaatactatagctgtggggtttcggctatcttctcttctcttcgtccgtacatccttaatcttgttctatcttagtttttagatcttctttggatctccttttttttcattagttagttagcttccctttttgtttattaattaatttacaatcactgctaaaggatcgacacaatcattgagagggttcgtactgtgtggtgtgggggatcccgatatggctttctctcgtcctttccaaccaaatcattttagccctaactaaccaaccaaactcttatcactaattctccatctcatcatcatcatctgatttatacatatatatatcgaaataatcaatacaggttccatttgctgtcggaattcgacaacgggaaacggagctgccgtaagcgacttgctgaccataaccgccgccgccgtaaatgtcaccaatcagcctccgccacccaagacaccggcaccggcaagactactccaagtacgtacttaattctcttatcatatatatatatatatatatatcctctttcaaattaagataatctctagatatatgtgtgcatttaattaataaatgggaatatgtgatgatgatgatgaccagagtcaccgaacgattcgggtgttaaagcgtcatggtcgccgtcgtccaacgcgccgcctacgatatcactggagtgcttccggcaaaggcagttccaaacgacagcgtcttcatccacgtcagcgtcttcgtcttcaaattcaatgtttttctccagcggatagttataagctttactcatatgatatattatgcttaaaatgagaaatcaaaggactcttcaatatcactagttaatgctagctgtctatcatctgaattagtcggtaatgcgtaacgctttatttcatgtctctcgtttcgtttgtcgttttcatattgtttttgacttagtagaggtttatttaattaaccaacaacatatcagatttctgattctattatcaatatctccttacaaaaataacaattttcaaaagatgtcttcaaaagaaaaaaagaaagaaattgaaagtgtgattgatatattattgctggtaaaagcaaagaccggggagagtactcgtgcatggtggttcgttcatcgtttattcatttcggggaactgaattattgactctctctctctctctctgtctgctgtctgatgctgagctgctggaattttcctataaaactacaagaaaccaatattttagaaagtgaccgatcaatgtacgtccacgtggttttaccgtcttttaaaaacaaaataatataaagaaatacagtagtattaggttgttgttgtcccccattttgaagctaaaaatcatacaatttttttgtcaaactaaatcagta

SEQ ID NO: 48899 - DNA, 398 bp, Arabidopsis thaliana landsberg
cttgccaagattttatggggtatccatacatggcgggcggggggggcgtcaaacggcacatcacgactaaaacaaagaatatatacgaaaggattgcatattctaacagacgcaatcataccatgactacagccccggatcccgtcagaactcctcacataaacgggcttgaacaagagtaaaactaagatagctgaccttccgacaaaacacggagatgcatacgctagtcttgaagggttttgttaggataaaactttaagactatctaactgtgataccgcgaggtcaaactcggaatgtgaatccttttcataaagaccacctagagtccgtcggctaatgaagcaccatcaacgaactcattgctggagctattgccgactccaaaggtggag

SEQ ID NO: 48900 - DNA, 1058 bp, Arabidopsis thaliana landsberg
taaaagactacggggataatcgatggcgataagaatcatggagccagcctttacagtacaaacctacaagacataccgaaaatcattatgctacacttttttttacttgtaaaccaacacctaagaatgcatttctaggaccatacctttaaatctgaaccaacttctctacctgaatcatttagagaagaactagatgtttctcgttcaaacaaatttttgatcaagcatggtgccaaggagttttccccatcaaaaccaagttggccatctatttaccagtcaaggattgaagcaaccaatggagagttcaggacactagaaaatgtagttatgaaacaatcatatcaagctagaaacactcagataaaggatacaaatgttgtaaccccaacaccaaaccgagccatcatctgccaaaagcttacaaggcaaaagaaacaaaaggcaagagaatggtcaatacagatccatatcataaacatacaaagtaaaacctatagtcacaattcaagcatatttattatttctcaaaaggaagttcatagatgcaaacaaaggaactaatttgatcaaacaaaatctttgatcatcacagtcaccaatttctcaaaataaatcatatggtcaaatcagcaacacaagctaatagaaaagcgaaattagacatatgaatagaagaaaccacctgagacagcgagactgtgataagcaccagcagcaacaccaacgattcgaatccgatctccttccgcttgatttgggaactcgactagaactggaacaagctcgtccgattccttacccgtaccgagacggccaaacattcctcttccccatgagtaaacacatccatcgcctgcaaataaattccaaagaacaaaattaaactcaatatcgcatttctctatctactaaattgaagcagtggaactttttattttaccggtcagagcgattgtatgagcttcaccggcggcaagagagattattttccgggataaatcttcagaaatcagtaacgtcggtgatttgtctccattgcactgtgacggata

SEQ ID NO: 48901 - DNA, 643 bp, Arabidopsis thaliana landsberg
agaacccagattcatcccacgaacaacacctccgtatcccaccttgattctgtggcatatcaacaacatagagtcccatagcgctgttcttccctgttccatttccagtacacaagttcatcactaaccacaatcccttttcacatcctctgtatatgtaagctgttccatgcatattaaaaatgaacttaaatttgtcattacctgaagagtaaactgcactttcttatcccagtacaaggcaaatgtgggtgggctttgcttgtctactgcaagcacacatgcaccaggatgaagtgtcgaaggtacacccgataccacagcaatgtacttctctgggaatctctcttttggaggcagaacccctaagaataaagggttcttgctcgcctgagtccctgtataagagctagggtccaaatgtaacatccactttgggtgttccaagaaggcacaaaacaagtacagaagcagatgagaatcggttggaggctccaggctccatttcttgtttttctcacgagtatctgcccctccattgtactcatagttcttcacacaagttcctttcgcgagtgcttgccaaagccaagagttataagagtcatgactaatcgactaaaattggaattggattttttaa

SEQ ID NO: 48902 - DNA, 513 bp, Arabidopsis thaliana landsberg
aatcttttctccattgagcacgtaatgatcgccatccagcctggcggtggtgcggatcgcggcagagtcataacctcaacctggctcggtaatcgccatcgctgcccagcgtccggcaaagcgcttgagctgttcatcattagccaccgatgcaatggccgaattacccaacccttgtcgaggcagcgttagcagcaagcccacatcgccccagcataattccatcgtgcccagcgcggtggacatgttgctaccgttgcgattgccgccaccgtcctgagtcgcactgcgacgcacaccggtcgcaccggcgccgctgtcgctgccggcattcatgccgtcgagcagcgcggcgagcatatccagttccttgggatagctgtgctcggcgcgatcgtacttgcgtgaattcggacgaaacacctccttcgcgacttgatgcgcctgatcgaccagcgcggcaaattttttggggattttgagattaaacatgctgactccagagttttgaca

SEQ ID NO: 48903 - DNA, 618 bp, Arabidopsis thaliana landsberg
agccgaatagaatggaatccccagaggtgccattacaggaggtgtggaaagaatccttacttgagcttgatcaactctgctaattggagctgcaacctgatgtataccggaatccgccttttgttcagcagggcaaagaaatgcactgtctctttcatcaggatatcgacgaggtcttgaataagcaaaaggacccaaaacctttccgtttgaccctagcggacaaggcttatctctgattgtcctgtcgtcacatgttccaggcctaaccttggctaacaccccattggacaaagcaagatcattcctaatatggtcagggtttagagatctgctttcttcaggtccatcttctttcccaagcaccaaagatttgccagggtgaccggattggtgaactgatggtggggacttagccagagatgcatttctcaagatggaacgaatcaacttattgtgaagagaaagattctctctccccaaaagacggaaacatgacttatcaaactcactcttagtaagcttctgactcagaaacctgcccaagtagtaaaaataccttgtagatctttcaaccccaaccttcttcactatatgcacttttagctcagctagatc

SEQ ID NO: 48904 - DNA, 546 bp, Arabidopsis thaliana landsberg
ggacgaggacgggaatactggcgcggcgtggacgagtagatggcgcgacgcctcagcgaacggcgctcgaaggcccgggccagactcatggctgtctgaaggttcgccgggtgttgcatctcgacgtcggatgacaagggctgaccgaacccggcagtgaacaagtcgatttggtgctgccgggtcaggttgtcgcagcggcacaggagagccaagaactggcgctggtattcgtccagcgtgccggtacggtggagctccttcaactccccaagcgcgttggagcggatgcgcgagccgaagcgcatgttgatgaattcgacaaagcgcggccacgtgatgatgccgagatcatggtccaactggtagtaccattgtgccgccgtgccgtcgagatggagagaagccagtcacaccttatcctcgtgcagcgtgcggtagcgcgagaaagaagcttcacacttgtacaaccatgggagcggatctgactcagcatcgtagtgcgggaagttgaggttgggctcgcgtggaccactgttgtgagga

SEQ ID NO: 48905 - DNA, 827 bp, Arabidopsis thaliana landsberg
cctcattttatttttactcttttggctctatgcaaataggtgggggggctaaagttttgtttttgacttttctaaagcaattatcctgttaatgatctccacttagaaagctcttttgcctatgcgaaatgtctttaaaaaacttacagtaagattcgcttttgaaggttctatgagtggaagaaggaaggttcaaaaaagcaaccctactacatccattttgaggatgggagacctctcgtatttgctgctctttttgatacttggcataactcaagaggtgaaccgtttatcttcgttatattaagctctgactgtctatattcttattgaagccgatcctgaaacatttcctagccttccattaaccttttaagagatgtttgaattgcttactatctttctttctcatcacttttaacctccatatacttaggtaggaagttttaacgtctattagaaaattgaagcaaaacttgaaagacttgctgaatgaatttaagtctttggttttaggtcctttttggtagctacaatatctcgcctgttttattttcttgcaggtgagacactttacacctttacgattttgacaaccgcttcctcttcagccctccaatggctccatggttagttatatatacactggctacatcgtgtgacattttttcttattcagtaatgattctcagtagcacaatgaaacacatagcatatgaagttgggaattgtatatttgtcagtgtacgcttgaagttgtgttcctcgttgtttaaaacccagtttaatcaagcccgcactttaacagagatataaacttatcatag

SEQ ID NO: 48906 - DNA, 430 bp, Arabidopsis thaliana landsberg
gctcggagacggtggcgcttgggctcgggctcggcgacggcgtggcgggcctcacggctcggagacggggacgggaacggcggcgcagtatcagcctggcggcgtagtatcagctccgggcgaaacctaaaccctaaaccaccgtaccgaggcttttatattgtaaacacatcacaggcggatgtttagaaaaaccgcttgtgatgtataacatcacaagcgcttttctatttcgaccgcctgtgatatgtaaacttcacaagcggtttttctaaaaatccgcctgtgatgtgtatgtagtataaaaggctcggtggttccagcgcaggaaccctaacttccggagcctgacacgccgctagtggcgcactgtagcggcggcggatttttttgatctaccgggagaaaggtttggttttgaatttcgggc

SEQ ID NO: 48907 - DNA, 571 bp, Arabidopsis thaliana landsberg
  unsure (1)..(571): unsure at all n locations
agcaggatcaagcgctagnnnnnnnnnnnnnnnnnnnnnnnnntttaaaatattccaatcggctgtatactgtgtgccgtcggctgggaaacgatgccagctaagggacgcagcataagcatgtgcatattctgcttttagattttcattgcctttaatggagtgattggcgtcaaaaaaccagaaatataattctctgagtgcaggggccctaaatcctcttgcataggataagcgaacggatagatcatggcttaaattaaatttagcattgagcgcagggatcaccggtggcgcatcgtaaatagaattcttactaaagcgaaggccaggtctaatagccatccaactagttggcttataatcaccagataagaaaagtgaatagttatcgatgcttggttctccttctattctgggacctgagcctttctcatgagcaagttctatcccggttaaaatttccagtcgttcactcatcctgcgatgcccggtatccgcacaaatccgctattaaaatctgatttttcctgcaacgcccggtccggaataaaatacgcactctagtctc

SEQ ID NO: 48908 - DNA, 458 bp, Arabidopsis thaliana landsberg
  unsure (1)..(458): unsure at all n locations
nnnnnnnnnnnnnnnnnnnnnnnnnnnnnnnnnnnnnnnnnnnnnnnnnnnnnnnnnnnnnnnnnnnnnnnnnnnnnnnnnnnnnnnnnnnnnnnnnnnnnnnnnnnnnnnnnnnnnnnnnnnnnnnnnnnnnnnnnnnnnnnnnnnnnnnnnnnnnnnnnnnnnnnnnnnnnnnnnnnnnnnnnnnnnnnnnnnnnnnnnnnnnnnnnnnnnnnnnnnnnnnnnnnnnnnnnnnnnnnnnnnnnnnnnnnnnnnnnnnnnnnnnnnnnnnnnnnnnnnnnnnnnnnnnnnnnnnnnnnnnnnnnnnnnnnnnnnnnnnnnnnnnnnnnnnnnnnnnnnnnnnnnnnnnnnnnnnnnnnnnnacttcaacaaagtcaatggaacaatccgattgtactcattctttactaggagggacctatttccgntttcccaaccgtatnagatgagacgtccgg

SEQ ID NO: 48909 - DNA, 551 bp, Arabidopsis thaliana landsberg
aattggcaatgtatttttagtaaaagctggtgtgatttttctttacaaaaaagttctaacttttattgttgtgacatatgtttgggtaagattgaaaaaacctatgactttatcgaaaaatataaatattgttttgtttgtcaattaaattttcatcgtaatcattgagattaaaaaaaaaaaaaaaccaaagacccacacaagtccaaatcaaacaaattagcaacaacaaaaaaatataagttgggaatagcaaaatagtatcgtttggggattttacaatttattttactgaaaaagagaaaaaaaaaaaatcggtatctctgaaaaaactgaccgcctcgcgttgtctcttccctacttcctccgattccttctcctctctctatatctgatatcgtaatcttctccgcctctctagggttttctccgttactcgtgctccagttttacgttcgttggcattcgctcaatcgcttctgattcatgaggttagggtttcgttattttcaggaggtgacaagattttattttattttatttagtctctg

SEQ ID NO: 48910 - DNA, 2529 bp, Arabidopsis thaliana landsberg
aaagactttctttttaccacgtttaatccacctaacctagagtagatgaatacatttttgataaacagaaaaaaattagaaaaaaaaaatgaatgttttttcaagagatacagacaaaattaaaaccggtgattttcgtttgaatcatcaccattttattcttcttaattatcactttggtgtctgtactttagattatgctctaaacaatttatatcatgccttattgcttacatattatattatggccaaaatattagcaaagtttacaaaaactgccacctatgaatttgaacttttaaaaacgttactctgcctatgttatcatcttgtaatatatgaaacgttgcaccattctttgcacaaattggtgtatgtaaatagtgtttcaacatctctatcttatgcacaaataaaagatcttttggcttaagagttaaaacaccaactgtgtttgcggttggaggatacaaagaaatgatggttctctgtatcaaaccctcatctatggaagtctttttttccatagacaacattctcaaacagtaagttacaaatacagaatcgatggcactttcatcgcgaggtattgtgtttccaccaccaagacttgttttacgtatacatgtagtcatcctatagcttctggataaaggaaagaacgagatctgtatgtacagagaagagttgtgtatccacaaatagctgttcgcatcataacagaaaagcggtatgtcagtaaagtctagtctttacggaaactatttgactacgaagcatccaatgagaatgcaaagggctctcaccttcatgaacgggcgctgacgactgggaaaggagtcgatgaaactttcctttaggagaagtgatacctgaaagagagaacaatatcaagcttaacatatctaaaagaggatagcaaaacacatttctctattctaaaactaaggactgggagataaaaaaccttatcgttgttggattgcacatttgttatggtgtgtgattgcagattagagcaaagagaatcaaggtacgagcttaggacatccatgaagccttttgcagcatccacctttggataatcaaacacaattgacgacatgggtggttaggaatagcacgttacatagcaaatctctagagcaaagattttaaaaaaatagacatagagagagcgtcagagacctgcacatcagtacattcatacactggtcttttctttgctaggtagctttctccgacgagctttgagtgataaggacttagcgcattatataagtctcgatactgaggcagctggggcatacttggtgacttaacctgaaatgtcattagaatatagaccgtgaaaatgtgcaggccctagtaattgtccaaggtagtgctatcaataaatcatgaagatatatggagctttgttaccaaatatgtgactgctaagaaagatactttgcttttcagaagagaccataaaagatcattaccaaaagatattgagagcaaaggcagaaattgacctggttctttagaatatccacgacgataacatttgttagtttcgactgaactttgctagttttgttcttcaccccaacctagaatgagcatcgcatgctaagcaacataaataattatgatacgtatcgtataacgtaggattcatgttcacaaactcactatgtaagggactggggcatccaaaaattttatgcatatcatctggcaaaacctgaaaatcaaggccagccattatcctacatgggttacttaaggatcttcagtgaacaccagacagagaaaggatcataccggcattaaaaggctctgccaccgaaagggacggattactgggataattgataaaactgatgctgctaagattccctatgtagttcacataattatgttctgttaaataggaacatgcaatatttgaagattaaaaaatagtagactcaatagatgatgtcacagagtgtgtgctttaccaaattagagcaaacaaatacaatctgtttctcaagcagtgctcctgctagtatcatcaagacctgcaaagaaaagaggaatatcagaatttaaggtaaatctatccaaatgtaggaagtagtattagtagaaaatcaatcacagtaaccagagaaagaatgcattaacattatcataaaaacactgaaactcgcgtccacatagttccagcatataacacttatggagacgataagagaccaccgaaaaaacggaatattagattacttggagatcattaaatatgattgtgtttttatatttctattttgtgcatatgaatcagaatcacagaacccgcaaagaaaagaaaatatgaaaagcaagaaattacattgtcaagccgcagtgatccacataaggaggcaacagcccatgttgataatgcagctgcttcttcctcagccatgagtgttgtgtgtgcctgaagaccacagaagataagagttatgggaaagtcatatataggtttccagatgttataaatcagcaaaaata

SEQ ID NO: 48911 - DNA, 2259 bp, Arabidopsis thaliana landsberg
gcccgtataggcaggctacatcgactataccggtatcttaattcgtaatcaacgatctggtagctgatgtacaatatgttaccggtttggcggtttctaacgtttgtatcggtctttttatgaggcaacatatgttcttagattttttaagttattatttctcatgtgttttttgtgtttttttgttcaaaattggaactatgaaatttggtattagtccttttatgagtcaaaaaagtctttacttttttaaaatttatcaagtgtttatagcttttaggttgttttgtaggataacgattaacaaaccattttatgatgcataatgtggaattggagacaagttcatgtatcatgagtttagaattcgtttaaagatttctcattgttctgtgttaacctaaagtttggacacatgatatcacttgaatcatttgtcatttggtgatggagtgaaaccagcggaccaatggtttggcaaattttttattcttgtttttaatgtctaaaaaaagttatggctttatatccgtatatcctttggaacaatataccatctccagaacattttatatagtctcttctcaaatgtcattcgaactaataacctctagaattataacagtttgacaattatatatgccaatattagtgaagacatgttagtttggcgaatagcttaaacatgtgcaaaaaaataattaatgttaaatatatatttgcctaaagttattacatgtaacgataaacgatattaaaaagataaaaaatagaaaataaaattagcaataaaagatttactaaataaataaatgatatttttgacgttatcctaatgaaaatatgaaaaaacttatttttgtgagcagcatttgaaaagaagtaagtgattggctaaacttctgtgtgtaaataaagcctttttattttatgttaaatgtttttctatttaaatcaggagtttccaaagtaaaagaaaacacaaactaaccatgatcccatagttatggcttttttaattaccgcaaaggttttatctattttattttaccacggaagaaattgatgtgtaaatgatctatcacatagagggatatactttgcctcgaagcatcactagaagctaattaatcaaacatgtatatttgaaattgtcgactatggttataatacatatgtgaatttaattccttgtacacaccttatttgcacttatttaaatatagttatataattatttatgcatattaagaaaaaaaatcccccattatttttacatttcgtccgcatgtgctactttagtttgttatattgattgaattaacaaagacacccacaatcccatggttattgattttcttcagtaaggtcaatggttagtttatttattttctcaagatttattctgcgtccaaaaaaatcgttacactaaacaaaacatacaatgtaactgaattctgtcgaataaagaaaggtttaagcgatttgagcaaaatttgaccttatgaatttaaaaaccttgaatacaacgacgaatctctagattgtgttatcattacactacaaaatttacattaatcctccaacgaatctcttctcaataaaagaaaaaagttatcaactaattcaaaacaaagtcaatttgtttttgttaaagacctcctcatgactcattcctccctacttatcaaccatcccagcctccatatcctccttggcgtcgtcgtcactactgccacaatccaccgccgttgtgagcaccttagccctttccgcctcaagttcccaatcggtcctacacgtcgccgccatcataccaatcacacacgtgatctgcgccgcaagcatcccaagccaaagtcccttaaatccaaacccaaaccaaaacgccaaaactgctccaaccggaatgccaaccgcgtaaaacgccactccattaatattagctccgatcttcggcctcgcggagcctctgagaacaccgcatcccgtagtttgcgggcagttcccgagctcacatagaccaacgattggcagagccatggcagtcaacttcatgatttctttgtcatcagtgaaaaacatcgcccatgtgtttctaaccgagacagtaaacgcgaaagccgtaaaccctagggcgatgctgagaccaagtccaacaatggctgctcttctcgctctttttggctggttagaaccaagctcgtttccgacccgggtggagactcctaaactcaaggaatgagggaaaatgtacac

SEQ ID NO: 48912 - DNA, 269 bp, Arabidopsis thaliana landsberg
gtcatgtgactgattgcgttgcacttgtctggacccactgagtctaggaaagttgcacgtaccccagttgttggcggaatcacttggtgagatgcgttaatcattactagtttcatgactttccgtacacacataagcgttgtacactctgagcacgtactgcactgtgtcagtgcactgaactattcgcacttcaagcttcagtcaggacataagtagcttcaggagtcttgatccaaagagtttttgcattacttggttattgacgt

SEQ ID NO: 48913 - DNA, 617 bp, Arabidopsis thaliana landsberg
accttggttactgctctttcttccactgtccttttctttctgtagttattggttgatgattgtcacctatatatcttattactttatttatttttttagtatgttgcgaaatatgctttgctttgtttatttcatcttttctttctaacgttggccagtgctttgtgctgatgcgcctgtgctctgtccttatgctttcttaggttcaaactgtaaatgttggagcagaaatatataataaagatcagcgggcaatatacaagtaaatttcttatctttttttgtaaatatttcttgtgactgaagtttgataaaaatgtaacatgcggattcattgttttttaggttattatctggaagaatcaaatctgaaaatgtccctgaaaataaggatgggtcagacgacgacgacgatgacgacgacgatgaagacaatgacgatgagggtggtgacgacgatgatgatgctgaggaggaattctctggagaagaagatgggggtgatgacgatgatgaagatgatgatcctgaagctaatggtgaaggaggaagtgacacgacaatgatgacgacgaagatggtgatgatgatggcgatgaggacgacgagggtgatga

SEQ ID NO: 48914 - DNA, 337 bp, Arabidopsis thaliana landsberg
gagagtatccgttgaataccacccgaatccagagcaagatggcctctccccgataagcgttgacactcacagcttcacaggacagccctcggtcaagtatcgtctccgagagggacgcgagagatatgcagatcggggcacacgctaaatactcgagacgcactgagaatagctggcggcaaggtctggcactgagacggtaggtgataaccttcatcatcgagattagaacaggtcagatgcgcagcgaaaagcccgaaatgaaagcgcaaagaagcagtacctagttgtccatatagtatcgagcctattagcaagatagcagctaccttgaaag

SEQ ID NO: 48915 - DNA, 898 bp, Arabidopsis thaliana landsberg
  unsure (1)..(898): unsure at all n locations
tgagatagctctgtcgtaaagagccaatgcctcggcgtaattccctttcctatacattacgttacctgccttcttcacctcctctgagtcactcatttccgccgccgctttcgtcgcgtgactcacctttccgccggtgcggatgatgtttccgtggccgtagttggccgtgcctgtgcatagagtctcgggtctaacggaggctcgtgtagccattccggtttttaagatccttcccgatggacaaatgtttccggtaggtaaaacgccggggttcggcgaagtagccccgcttcctccgccgcgagaactgttattgttattgttcaccggagagaaccccaaaccggaataaatcaacggcgttccagcggaacggatcttctgtgacccggtttcaaattccggttcacggatccgggtttaaccggactggtctggcttaaaccggaaagctcgccggagtgactccgtctagcaaactgagaagtgacagcgggttttccggaagcagaaccagaggagcttgaactgctgccactagcggcgggagtggcagcggcggaggaggagccacgaggcctcaacggagaaccaaaatcgagttctcggaaatctggtttgttgatgacgtcatcgtctcgttggaaactcaaagaatcacggaatttactggtaatggaaggttctagcgaatgtcttctataatgtgacatcttctcgaaaccaaagcctcagaatcaataaacacagagaatcaagaagaagaattggtgaagagagagaagagagattgttgtgatatatataaaaaggaagcagaagaatgagaatgaagatgttgaaacaaaaataattttagattaccgttaanaaaatattattagtttaagtaaac

SEQ ID NO: 48916 - DNA, 204 bp, Arabidopsis thaliana landsberg
tgaaggatcaacgaaaagaagagttttaccgcattggccttggtttttgacaggagggacggcgccattctttctccaatcaacggaggtggggagagtatttacatttgcatacatgaagctctttgtggcctttttttccccttgaaacatcctatgatgtttgatgtttgaaccaccggatgttctcctaaattcttcact

SEQ ID NO: 48917 - DNA, 445 bp, Arabidopsis thaliana landsberg
ctctattagtacgcgcagtaatgtaataatttgaggtgatggcgcattgtttaccaccgctttttgatttagcttcccgtctggcacagatggagatgtcttgggcaacagcaggcttgaacggcatacttttcactttaccacgacatgggccttagggctctttcctttctatctgacctatgcaaatatcctctaccccttccctcttcaaatttgaccatcaacagatcatctaaccagagcgtgcgcattaccaattctgattagatctagtcgcactggagtttagctctattttgcatgagtaggacacaaacttttcttcttataattcgtatgtaataacacccacttgattgtgttcccccacccgtcccctacttttttactaccaaagggcatggacaatgaaggcattccgctgattaacgaatactttcgc

SEQ ID NO: 48918 - DNA, 1191 bp, Arabidopsis thaliana landsberg
tctccatgccttgccaagtttcttcaattcccaaatctttctcaaactcatcttcctttggtataggctcactaactcccggctttagctttattggccaatgcaccaagtagttgtcaagatagtctagacccattgtcctataagtcataaacaatgtgatcatgagattgatatcccttgatctttgtatcgtaagtgagtgtttgtgtgtcttacttgagagtttgtatgagggcagagatagggtcatggtgatcactagaccataactttgaagtgacaaaaagatcatctctttggacagtcccataggagatagcttgtcccaatgcagttccaagagcttcttctgatccatatatctttgctgtgtcaaaatgtctgtaccctatctgcttccattccaatgaaagatcttataagactatgggaatggtttgattaagttgtttgttataatcaaagtaagtacatgaaaattatgaaccttaatagcttgatggacggctgatatggtgctctctcgatctttttgaggacaataagttcccattccaagcaatggaatcgtctccccacacctgagacgtgccacgtcactcctcatctttctatctctttcttttctctttatgatttttctgtccactctctgttgcgtctatgacatgtttatataggccactaaaaggtcaacgagcttgacttttttttcgttgtgacaacaattattatatgtagaattatatatgacctatttatggaatattatgatagttaatgtttttagaagtttttgaaatataataaggctaggactgtggaggtatcgaagcacgagacttttccatgtcttgtgggattttcttagcctacccaaatcctaatctctcaaacctcaagatgatatcttctgatctcaataaattttcctcattagtgttttgagtgtttccaaaatatggttgctcttacatttttattttgcaacttgatcatatattccactggaattgtacgtacaagctaattacttgtttgtcaactgtttaatctttactcatttaactttttattgaagtaatgatctagcattattttccgtaataaatgacaactaatagctcaagagtttaaacttgacctttatcgtgtcacaagattcattatggacaaaatatcatgcat

SEQ ID NO: 48919 - DNA, 407 bp, Arabidopsis thaliana landsberg
tttagtcaatacatgaggactagtgaagctaggtttcttcttgaggcttttgttttctatgaagcgattttgaaaaggagctactttgatgaagctcaggggaaagatcttggtgctcgatttaaggagttacgcttctatgccaggtttctgcttgtttcgttgattgttgatcggaaacaaatgcttttgcacttagctgacaagcttaggcttttggttgatcacagcatatccaattttagggtacttttgatctgacccttgttgtgatttatattggttcaagtctctttttttatacatatttcttctcttgtgtaggagacaaactttaaggagtggaggctagttgtgcaagaaatcactcgctttatagaatctgatacaaatttaacttatctcag

SEQ ID NO: 48920 - DNA, 525 bp, Arabidopsis thaliana landsberg
cacaagtatctagttctgtgtttttcttttttggaccgagggattacaagtaaccatgcgttaaattcaaattgctttgctgatgttataatttaatgaatgtttttattatttttttaaagtcgttgcttacatactaatcattcgaattaaattctgattacatcattatatttcgtataaaaaaatctttaaaacaagacctcgtatgaatatactgtgacaaaatcttgttgataaacacttaggagtattttgtaaagcagagaacatttttattgagtagaagtacgattctatacagttgcattgtatggtttgacttgaactctctggcctgtctataatcgacacactcaactcattgatatgatgcattgttgttaacacggtctgatgattagtttcacttaggctgactacatggaggtgttagactagtcctttatggtccaacgatcgtgaaactcatggtctggcgcctttgaaaatcttctaacttgcccaaaatagaacaatgtaaat

SEQ ID NO: 48921 - DNA, 773 bp, Arabidopsis thaliana landsberg
tcctcattttagaaatgtgtgtgtttcatgaaaaggcaacataattctttggatttgtgatatattcttaagtaaaggagctttagtttataacttcctacatgatctctgtagtacagacagtaaccgtatccaatttggtcaacacacttatatatttgtacaggttgaatctttacatagacagagaatgtgcggatttgtatgaaagacttcctcttgtgatgtgtggtttgtgtcgtttacatatcggtcctgagcttgcgagacgatatcagaagctcgagaaatatttgatcactttagctcaagataaaacctttgcattgtttccctatgtttctatgaggctcttaacgtctgcttcatgtatcttagagctgaccgtaacatggatctagcttttctatctggtttgcatcctgacatgatcatctcctcgtaaacaaccggtacctgtaaaaccatcacatctcaaaaggtcaatcctacttacaggtattcccctatcaaccataatcaatgatgaataccttctgaaacttatcaacacgaatgagagctttcatgagtgttgtgtaagtgaccacgtctggttttacgccctgcaaatgttttgtgagagatgatggttggtcaacaaagtagcacaataatatttgtttagtgccatggcccactagggtggatgtcttttggcctgactttactgtccagtgggaaggattaacggaggtcctccgctaattgagccatgaatttaagaatgattg

SEQ ID NO: 48922 - DNA, 914 bp, Arabidopsis thaliana landsberg
aaccattgttaagctaaacttgcatatccatagtacttcatcgtactatgtatcaatagtatagtaagtttgtcacaattacattcagtttgatttttatcatataaacctcccaacaacatttaaaaccgtatctatatataaatttatttgattaaatcagcctagaagtttatagttcagtgcagataaattcaaattttgatatatatcttaattgaattaaccgtcttttggttaaattattgttacaagcttacaaaatccactatacgtacaccaagttggacttagatatcatatatgagattaacagccgattacacttgtacattgacctgacctatacaaacgactacaactttatgtatatatatttctctatttttggaaactcgtttgatttgttttcacatgtcgtgaaatttacagctttgtttcctactctcaaaaatagagcatagagctggctgatcacacttcaaattaaaaccaacaactatatataaactataacccatgtgaacacaaaaatttagaccttttttcaaaaccattccaatttctaacaaaaacaaaattagaaatcctaaaatctgcaaggtgtatggaaggcaaaaaaggctaccaggattaaaaacagtttacattagttattctctttaaaatagaaagaagattttcgataaaaacgtcgtcgtatcttcgtcgacgtctccgtctttaatgggggagcaaagggcaagcggtgcttcctcctccaccgactcatattcaactccttcgccgtctccgtcaccgtctccatctccggctccacgtcaacatgtcacgttactcgaaccatctcatcaacacaagaagaaaagcaaaaaagtcttccgagtttttcgttcggtttccgatctttccga

SEQ ID NO: 48923 - DNA, 866 bp, Arabidopsis thaliana landsberg
  unsure (1)..(866): unsure at all n locations
gtgtgttatttaatattagtcaatattgatgagaatctaaattttacatatacctaacgagattcaaatgttatgtagggaattttataatggattttatatgtaaatcaatactacaagaattcacctaaacaagaaaatgcaaattgatattaaaattcaaaaaatatggaatttcattccaaaatagtacaaatatttggtaattcaacgtttttagaatcatattttttttggtcaaaatttctctcttatatatatgaaaatgaaaccaatatatatatatatatatatatatagcatcaaaataaaaaatatctatcagttattatcatcatcatcatcaacaaccagttcttaaaataataattgtaatcacttttcactttttcagatatcctctaatttggttaaagttttaatatttagtcatatcaataaatcgtttcataattatccttaaagacaaaagagaaaagaaagcaaccgtttcgctcccgccttcacagctgtctttcatcattagccagcgaatcctaatcccgctcctctcacatcactgtcacactcttctcataacagtccaataacataccccatcactactataacccaacggtcgataaagccacgtgtcataatctcattcacctatatatatacatgtatcgattgagtctcttcctttaatcaaaaactctctgatttgttttctattatcatggccactgatagagagaatctgctctccgatgactatgaagaaacggcagcgttttgtggatgtgggtactttcgtagtttcagtttcaccccgtggcngagaggagaagacgagtctcgcagtcgcggtggctggagtggtg

SEQ ID NO: 48924 - DNA, 714 bp, Arabidopsis thaliana landsberg
ccaagaaactttgattctcatctccaacatattttaccttcaaataaaataaaataaacatatgaggattagtcagttaattaaggtacataacaagacagtaattaatacttagcacaagaatccattcttactacaaaagtagtcttccctgtttgacaatcgcctaataaactgatcttgagactaaccaaatccgaatccgaacttgaaccaaaccttctaccggaaacagtaggttctgtcgtagtatcgtcgtctccgtcaaagatatcgcccgcggtggaagaaatcttgtgaacgattcgccggtaaagaataggtttttcgatgatacttgaacaagaaacaatttttctccatagaaacctaaagaaatctccaaagatcgataccctctcgatgattctccattttctgttcacgtgaactattttccggcagaaaggagttatctttccggcgatctcatggactttctcggccattgatgaaacagagagaaagttatgtgatcttttggcattcacaagctcacatcttctttttgcctttccttttatgtttttcttttgttactggctaattggtagtaatcggtttatatggattggtagttgacccgtcgtcttagaaaatatctatattacccctagttgatgcgtgtgttccttttggtttttagttttaagctcttcgcgtgttgatagttag

SEQ ID NO: 48925 - DNA, 728 bp, Arabidopsis thaliana landsberg
caatttttcgactatagacatttttataaagtttagtattctataaatagaattgcattttttttttctaacctgcttgcttggatctgaattcccaaaatgtcatctttttgatcaagtttttattttgaaaaaagaaagaggattgtgggaaccatgcacgtataataattgatactagtaataagtatgggtatggaatttggtaatggtaggtccgagctccaaagggaccgtcgggcctaaattgttattgtatgcatgtggtgtactgctttaatgtctatgtttcaatagctgacccgaagatagctggcaaattttgtctttgcgttatccaattttttgtcaaaatttggttattatattctctactagtgtatgtgatatattaaagaaaatatctaagagattaaagtagattaaatcttggttagagtgttgtctatagtttggactgtggatagttatgggttttatgggactctggacagttatgggtttcataatcctttagtgagtatctcagatcaatgaagtaggatgctgccatatatgttaaatactcagatttaattttctgcttggtttgtcttcatgtgagtgaagaaaaaacacaaaacttgtcattgtagtgcatatcaatgtgtgtgtgtgtgtgcaccttatgaccgattttgagcttgtaaacattaataagtcaggaccatttcatttgtcctgagaca

SEQ ID NO: 48926 - DNA, 806 bp, Arabidopsis thaliana landsberg
agccagtaaacattctgtactatatttggtaaatgaattgtttccttttctatattaacttccatctcaactgtgaacggcgtatccctgacaccttaatttaattcaactatctacttgtaagttcgttggttttttattaccacaacttcttagttgttgcagttgccaaaagtgcgatgcgaccacaatttaacaatatttgatttttatgggcttaatgtgatcttacggtctagttataaagaagaatgttgaaagaacaccttaggtaaaagagaaagaagctagggatatatatgagattgagagagctaagaaaaatagtgctgtacggactgagagggcttaattagccggttcctcatcataatctgctttgatcccgcatagtgaaagtgaccgttgcgttccttccaatttccatagaactataaaataaaaaaatagaacatgtcttgtgcatccgaaagaaaaattaacagcaagaaagaaccctcagcatttgcatttgaaggtgacactttcaagggggaagcgataaacatgttccagagtcaataaccaaaagaacatgataatccaaagcaataccggacgcttggaccaaaaggatccaacacatcaattagaggacccattacacaccaagtatcatactcaaacgagttcaaagtatcaaccttgtatatgtaaaagagacgagtaatttggtagagtttgcaaaactttctccaagtccctaaagattctaccaccaaattataagatacagctcctaatattttctccaaacatagtttatt

SEQ ID NO: 48927 - DNA, 565 bp, Arabidopsis thaliana landsberg
  unsure (1)..(565): unsure at all n locations
acatgttagatctgtcatctgtatacctaaagccattaatcaaaaactggttttagaattatccagacccatagaagatggaaacttttaataagaaaatcaatatcataacagatgttttaatatgctttttccatcaatcttaggttaagatcacaagaatgttgcagttacatatcataatctcttaagttggtatcaatccattgaagactatcgacacgacgacaattctgtagttctacattggaactctcatcttcgatgttgaacttgtcaggaacaagaggccttaattaacaaaaaaatcatttagtacttataatttgcttgttctacaaagtatatatatatatataggagaaaaaatatccacttttggagtatcttttaatttgtgaacggaatgtttcaattntgatataaacgagctagtttatggtgtcttactcacatcttcaccagatacactttagcttgtcgaattctaatttaaagttgtttggttactcgaatattaataattgaatgtgaccaattctactttacatatatagacaaaacc

SEQ ID NO: 48928 - DNA, 1047 bp, Arabidopsis thaliana landsberg
atgcttactaacctttccttcacattccttgcaatggattgataccctcaaaacaacaacctgtcaaaaataataattaattaaataaatataggtagaatgaaataacagataattttattttattcggcaaaaataacttataattgaataacaacgaaaaaagaaaccatttgttatatttatgtatgtttgtattattttcagatatatacaattaaataggtaccacatatccactatacgaaagatgtatatcatgtgagaaaaaaaaaattacttgatcaaatcaaatcgtaaaatgcaatttaaaccataattaccttggaaccaataagatataatggtttctactagtgaattgtctttctatcatctttagtctcaaactctatggaataatgcatgttgttaagaaaacacaataaatactttggttaaagaagaataatcaaacctggtcatcagtggatggagccggcgatgaaacattggtcacagaagaagagaaagatgatgaagaagacgaagaagatgatgaggctgaagaagttacgttgcggtcacggtaaagaatcaaatctttagaacgatccgatgataaccagaggtccttatcatcacctttcaaagacttatgatcttttaaaagatacctggacgatgagcttagcagagaactccttaatctcctcaagtcacttacgtcagcagagcttttccggcggatttgaacatcgctaccgcgagccgaagcgattttcggacgaaacccgcttggagattcaaaggagtttctacagctcaagtgacgaggaatagggattaaaggcatctcggaagagaagcaagggacagttttatccttcttcttactagggttttggctccggaggtggctttggaaagatctgcgacctccggtaacatttccgtcgtggtgaagtgtactatgtcgtacggcggttgatgccggggaagagcagaaaaatttactaaatctcattctctctttttctctgttttctttctatctgtatctctttc

SEQ ID NO: 48929 - DNA, 552 bp, Arabidopsis thaliana landsberg
cacgccggcaggaatggacattacgccataagtgacgaagaagtattactgtaccttcgccgattgcgtgtagttcacttgaaaactgcttttaaaaaacggcacaagggtatcgttgaggcaggtaataagccccatcataaaatacaataccgcgagcgtgaccagcgcgggcccgtaactctgcccgttggcaacgcccgcaggctgggtggtagcaactggtacctgggccatagtcagacgtttaaggatacttttgattgaatggcttccagcgttttccagcattgatacaatccgcgcggcacatggaagcagcccttccatttaccgcccttcaatgtcagcaacggttccccttggcggttgaggtagccgaaccattcgccgtattcggggtcggggaaatggctccacgtatacgtgtgcacgcgctcgaaccaatgcgcgcaacgctcatcgaccgcgtgcaggtagcctttcaggagcgtgataagcgttttcatatgtacccaccagagcttctggtcccattcgagctgctggggc

SEQ ID NO: 48930 - DNA, 928 bp, Arabidopsis thaliana landsberg
ctgggacatgttattgacttctgattcgctcgacacaccgagactttggtcaaccattttatgaatggcaccctaaaacagaaccaaacaacgatcagaattgaagaaaaatctccgaaaaggtctcttcttcttactcttcatattcaatcactcacctttctgcagatatctcggagaagcacgacttcaccgtgcttgaaattactcagtgcctggagcataacgccggcaataacctcaagaaaatgagtcttgagctggtcatgacgcatcatgctcgatgcaatcgagtgaagccgactctgctgatcaccatgcactgtgatcactccatctttcccaaccaaatccctgaaagactttggataacttgactgaaatagctttccttcgttctgcattataaaccggttaaaatccgggtctgctgataccactgcccatttcccaaacaagctacacgagaatatcctcccatacctaatttcattaaaaccactattatcaggcctcttgagtattaataacaaaacagagcatagcaaagagacgaacttttttatttgtttctcgacgaagcttgaaggatgagaaccagcgacggcgttgagccaagcgaaggtatctccgatcaaaggccatcctctgcttcccggaggcagcctgtgaggcgctcttctctttcttcttgctatacccgcaagtaagaagatgattatgaaggcaagaaatgtggttgatgaagaaacagagagaagcctataggattctcctgcagattccgccataaaatcaattaccctgtctcggtgtgtgtggagagttcgtggagagttttatatacagatttttacagctaagactgcataacaagtaagcagcaactgaggaaattttgaattttaatatatatatatatatatat

SEQ ID NO: 48931 - DNA, 898 bp, Arabidopsis thaliana landsberg
caagtaaccactaagttctgattaagtatttttttgttccctttgtcattgtagcaaagtcctagaattgacactgagagggatgagttctttatgtgtctgaaccggctctttctatttctcaagatgtcttgccctagaatctctaagtaacatcaaaagcttttgaaatatctttagagatcatcaaaactcgctaatagtattgagggaccacaactaataactaggagctcaagttccaagcagaagagttttccagaaatagtaaaacatcttatttcaatgcaacattggttctcgtgtgtacattggagaaggaaaaaacttctctttaaaccatagtttctctaagcttcctcttatatgtgttacaatctagacaaactaactctgctagcaatatacaaacaatctgatcaccctagctacaagaataccgttaggagaatctagctgagaaacaacaaaaacacagctagaaagttataaaacaggacttacatcaatattatctttgaacaagttctttgtgcagcattctcttcttacatctgcaaaagagataacacagtctcagtacaatgcctagaaagaattctgatggtattaataaagctatgtgaatatgaatccgagttgtacctgtaattctgtctctgggaattacacaggaagaaaatcaagagatggtctctcatatgccaacgaggatttctcggtcaagccttggactctggtttccaaacagaaagagccatgacagttcttcccttccagccttgcaagagccaccggttatcttgatcgatcacaaaatacttgtggtagaatgtgtggaccttatgcagcgatgtcttcataatgcttgggtcaaatggaacctgcaccaaccctg

SEQ ID NO: 48932 - DNA, 1101 bp, Arabidopsis thaliana landsberg
tgtagcttcgatatcggttgcctgacggagaggattacactggggcacgctgaacgtgtcttgcaaaacaatgcaaagaagttggtgaaggatgccatatactatgcgagaattcaggctacaaacctgtattttcaaaagcatccggaagaagcaggccccttgaataaaaaggaagggtcctcaaagatatatttgactgaggatcaatatcgtgaggttagtattcaatttgttttaccctttatatttattgtcgtgattgatataatatgtaacattgtgtgtgtgcaggtgatggttccatggatggcgcccgtgcctgatgcgtactatgcttggtgtcgacattgggcttccgaagcttccagaaagcgtcggcgcatcacaggcaatgtcaaggaaccaatcctaaccacaagtttggcggcgacgacatgatacgaaaagctaaaagaattgtaagtttgatctagctatgtcgatcaacaaataatacgattgcttatgaatgttttttgtttatacaggaagctacgagtggccaaaagcctagtgacattgaggtgtaccaggagggccacaaaggaccagacccgaacaaccctgaccagctctgcagccagacagccacggatcgcttggtgagttttggctcaaaagttcaaacgttcaaagtatataaattcctgcatttgtaaggttgtgaatgatgtataggcggcatatggggaggagatggttcgtcgccatggccctgactacgactggcgccatgaaccggtggatccctcggtggtgtacgcaagtggtggtggcaaagcgcatggacggtaagctctaacttatgaaattatatggttgacactaaattgattatgcagtaataacattttttgaatcacttatagatacgcactcttcgacggattcattgactcgtcgtcggtgagatctcagaggacgggttcgtcttcccgtagctcatgctctcgtcgaccgaacgagcaggagttggagattatgaggatgcgtgaagagatgagacacaacgcgaatttatgtagggttcaatgccataacgactcatgtacaagtgag

SEQ ID NO: 48933 - DNA, 406 bp, Arabidopsis thaliana landsberg
  unsure (1)..(406): unsure at all n locations
acggagtagcctatacatcagagtaaatgttcatcgtggctgcggggataaacgaaccgttggggattcagtgangtttacgattggntgcattgtatttatcataagttgttcaatcgttgggataccgaatgatctaaataatgggncggtttagaccagctntaacagcgcaactgtgcattanttntcttgaagctctctgttgaatattttttcactcctccatattgaagacgaatatcaaagtaaagatctactntaacaagatataaaattcccaactgtagatctggacgaaatagntggtcttccttattgaanaggtacaagagtaacactcnnatgagcttcgcgctntgttgntgagcctaaaaacgactgacgttccatgtctcaggatata

SEQ ID NO: 48934 - DNA, 865 bp, Arabidopsis thaliana landsberg
gattgtctcaacaagcaaacaattagatgaagaagtcctcaacatagatgcacaatataaagtgaaattcaactatgtaagagacattctcgagatctccggtttcaatgcaccagaatctctctcaatgtggcaattagattaccagccgctagatccattagtctacgaagaaatgacaacgacaacaacaggatgtatgttccaagatccagaatgttcaagaaacgaacaagaaggcggtaactgcaaccatttgcttcttttcgatctaatcaacgaggtactaatcgaaatctatgaaaggtcttaccattattatcctaaaccgttatcaagcctatgtaagatccatccaatgccggtggggtatagtgttttgaaagaggtttgggttagaataagctgttacttgcgttacaagccatacgacgaacaacaatcgtttgataaggttatgagtagggatttgtcgagagacgatggatggatggatttacagtttgagagtgaatgtgttgggattgaagttgaggatttgatcttcgaggagcttctggaagaattgcttatatcatgttaatagggcattcaagaactcgaataatttcttcatttttcttctactttgttgctttgcttggagtttaaggtacataaaagagaaaatatggtgtttgtatgagtttttgttgttgtttatgataaaactgtgtttaaaagaaagtgtagaggaaatcatgattgaggataaatttttggaatataagtatttttgattacagaattattttaaggtaattgatacatagtttatataatatggtataataatattgtgctacaagatgtaaacaaaaagccc

SEQ ID NO: 48935 - DNA, 1062 bp, Arabidopsis thaliana landsberg
cgctgatcttcttcgtctcctacttctcttctattcttctctgaaacttttttctctctctttttttctttcttttctgaattcaatcttcgacatcgaaagatccaatctttcccttttctctcattttccatgcattgatcataatatttatgatcctacagtttcgtctctaccttgtattcgccattaacgctcatcatcaggtatcttattctttttgtaatcttgctaagatacaacaatgtcgaagctcaagaaacctatactagaatctaagtgtgtcgccgataagctctgtgactcgttgaatatggaagataataacaatgataaaccagatactattaatgtcgatcttggatcaccaattacaccgcttcagactcagccgagtggactctcttcttccaccagtagtttcagttctagctcttctggatcggttacaggtcatgccggacatgctcctccggttacaagaaaaccagattccgttcagcccgttccctccgcctctaagtctaaatctagcaatctctcttccgccgcgaaatcttcaaagtctccctcctccgccgctcaatttggtgggtctcatagtcctgcccgttctcaatcacgtgcaagcagtcacgttggtgctaaaaacgggaatataataagaccattatcaaactctgcttcggttacgacaaaaccatcttgtaataaaagctctgtttcgtcgaaacagagcctcaaaatacttcccgccgggaaccttgtcccatcggggaaggtacaaattacagggatgactcaagaaaaaccaagaagcctggttcttggaccaggtgctaaatcatacggttacggtagcattatacgaggaaacaacttagctccggtgaaaccaacgatgatgtctgattcttcctctgttttgcctttaactctcagtaataactctaccggtggtcctgatgcatatacatcgtggaagatagctatatatggttctaatcctgaagaagtaaagagatttggtaacgaaatgttcagaaaaggttgtttcgctga

SEQ ID NO: 48936 - DNA, 700 bp, Arabidopsis thaliana landsberg
aatgaggttttgtaaccataagattcttgcaactccattaagaacatgagtttattctttacagaaaaaacataaatgttagtgtttataaaaaacgacacataaatcgtaggaaaattgttctatgtaactatattttgttagatgtctacttttcaggtataattctgctttcctaaatgtgtgaattgtggggttttttttgttttttttttttctttttgagcaaaggtgtgaattgtggtttattggatcattttaaacaaagtttcttccttggattaggatggatacacgctagtgacgaaagtggaaaagtcgttttgcttcctctataacttgtgttagtactaacatgttaatatacataatatatcgtattaaactgtatttctaataacttcttgctacatattcatatgaataatatgatatatcatacactaatttatttaagacgatacaggaaaaaactttaacatgttttatctatgtttattgatatcgatgaaacgaaatagttaattatccacaaatatgcacatgctttcatttcgccgagatcaatatcattattgtcacatttttaccaacgtcataaccaccgtcgccgcatttttctcgagtataaaattttgatgaaaatataattttttaaaatattgtaaatatcttttaacttcattaatatatattcctc

SEQ ID NO: 48937 - DNA, 462 bp, Arabidopsis thaliana landsberg
acacaagaaaaagtatagctatccatttcaacaccagaactcatcatcttcttaaacaatccaatactcccactaaagtcaccagattttgcaagctcattcatcaaaatattccagaacaatgctttctcgatcttaacctcatcgaacactctacttgcttctttcaaatctccacaatttgtatacataagagagagtttcgatcccaaattcgaatctatcacaaacccattaccacgaataaagttatcaacttctttaccatctttgagagatttcgaatcagcacagagctgaagaacagagcataaagttctcggatcaatatcccattttccagatacgcgaagaagttcacggcgttctctagattccctgattcgcagaatctccgtaattgagtgttcgcatctgttacgcttcgatcaaaagttgtaatcgaatcaacacaatctgata

SEQ ID NO: 48938 - DNA, 635 bp, Arabidopsis thaliana landsberg
taaaccggaaacttgtccaatcgacgcactgaaactaggcgcatgtgtggacgtgctattttgtttgattcacatcggactagggaaaagctacgctaaggcaaagtgttgcccacttcttgacggcttagtgggtcttgacgcggcggtttgtctctgcaccaccattagagcgaagcttctcaacattgacctcattatcccaattgctctagaggttcttgtcgactgtggtaagactcctccacctcgtggcttcaagtgtcctactccgctaaaaaggactcctctcttgggttgatctcttttgtatttcatttgatacaacaaaaaagggtttgagacgttaagatctactagattcttatttatgttttgcgaaacaataattaaaagggtctaaatttagtaattgttctaaaaatatcaagcaaattttatgtattgtatgatgattatgtacgttgaaataatgttatttgaaatttgatttttaaaggacaaacactacgcagtggtcattgctcaacgtgtactgtgtacatgtggcgtgtcatccttgacccatactaagtcagtcgaatagatatgtgtgtggtccaggatatgtacgttttaaattttaattatagata

SEQ ID NO: 48939 - DNA, 312 bp, Arabidopsis thaliana landsberg
tacttcgtggccaggctggtcagggatggcggtccttgtatctagagcttaatgtccacgcgttgcagccccttaaacacttggacaagatagtgaagggaacaactatgctttaaacgcttatcgagtgacttggatggggactacaccctacgaaatctgttctaggggactaggtgtccaacgaatctaaccccgaggattagatcgctcgcatgtgtctttttcaatggcaactctgctagcgtggctatgaattaaggaaccattaatgtgcagcttgaactgttagtgaaagaccgcaaaaaaccc

SEQ ID NO: 48940 - DNA, 361 bp, Arabidopsis thaliana landsberg
  unsure (1)..(361): unsure at all n locations
aaacgttagaaatgtcgtcttagacgcttacaatgaggaaggcaccaggatcagtgcatgtcatcagaccagttgatttctcgattcgctagtaattnnnnnnnnnnnnnnnnnnnnnnnnnnnnnnnnnnnnnnnnnnnnnnnnnnnnnnnnnnnnnnnnnnnnnnnnnnggnggntatgtgaaggtnttgnagttgcacatacttgttaggatgtgaatcgtcgaaatgaccaacagctcgttggagtagattggatctatctggaaagagattgaaaggagctccgaacgttnttaggtacttgctctactaattctatcttttgcgcttgtgtctgttctgaagcgagatgtcgcgt

SEQ ID NO: 48941 - DNA, 515 bp, Arabidopsis thaliana landsberg
  unsure (1)..(515): unsure at all n locations
aaatccactcataattcgttaatatattgcaagaccaataaaaatgtcgtggtaagatacaataagtttggaatttgaggagtcctctagcaactcgtgggatgtagactgtactatctctgcaaacacaagggccgtattagttgaggtaatcgagtctcataatgtacgaactaatcaagctgatgatactgatgatgtaatattcataatacgaactacatatatcatgtcaggttatacattcgtatcagtgaccgatccatataagcagaaggtagntgtgtaccggaatggcacatacaggaacagagatcatggtcggaaagcttataactctgaaagttatgcgaaacgtggcganagagctcacataaggcatgatttcggcttgaagtcgacatgcactcaangttaaaattagactaaaaataacgaattagctaantcacaggccttgcgaaaattgatagtaaagagctagcgcnatagtagttggtgagagcaataagtag

SEQ ID NO: 48942 - DNA, 570 bp, Arabidopsis thaliana landsberg
tacagtgtattgtgtacacagagactgtagaatcacccaggccccatttggaatgtggggatccatacagtttccactggatagtactgtttctgtgaaatacctgaaaagttcatgggaagttcgtgttaataattttttatatatatatcttggtggggcagaacagaagcagtaaaatatttttttgtgcatatgtgaaattccagagttgtgggtggtgagagataggatacaatgctgtatgtatttcaggaacttctgtaacacgagaacattcatcatgtgaaaaatgtaactgaatgtgttggccagctcgctcttgttgtacgttcaactgacagtccacaaattccccattctcaaaatgtctgacagatcgagtgaaaaataacagtctcgtatacagtatctgagcagttttttggatacatttgtcatcagaagttgacttccaaaaacatcgaagctttgcaacacagtaggtgtttctgcaaattctgcagccttctacttgagatgccactgaaactcagggctctgctcaggctgacattattattccactcg

SEQ ID NO: 48943 - DNA, 1861 bp, Arabidopsis thaliana landsberg
ggctctgtaagattgtaacgggttgcagctaggaggcatgttcggagtttggtaccttctcaatatttactacaacattttcaacaaacaggttccttctttgcttcatttaattaaacagaccatttcaatgcaagaagcagtactcgaacctattatcagtcttcatacaagtatgaaacttgttcattcatcgatccaggtacttagggtttatccatatccagcgactgtaacagcatttcaattagggtgtggaacgttgatgattgctataatgtggctccttaaactccatccacgccccaaattttctccttctcaggtaaatcaaatattgattccgtcaaaccctaaaaacagagagattcattcaattgtaatcctctccagtttacggtgatcgtacaactagcagtagctcacacgttagggaacttgttaacaaatgtgagcttaggaagagtaaatgtctctttcacccacactatcaaagcaatggagcctttcttcaccgtcttgctttctgttctcttgctcggtgaggtaagcaaaacaaagatacgctctgtttcagacttaatctataaccttagattatacaagagagttatattttcagacataatctttgaaattttgattaatgtccagtggccgagtctgtggattgtttgttcgttgttacctattgtcgctggagtctctttagcatctttcacagaagcttctttcaattggtatgaacaacaagaacaagaacaagaacaaaaaaaatagtattcttgataaacttttgatgaagttttaattgatttgattaattcatggtattgggataaaccaggattggtttctgcagtgcaatggcttctaatgtgacgaatcaatcacgcaatgtcctcagtaaaaaattcatggttggaaaggtaaaagagtttgaatataagttatccttatgatctcaagaaagaaactagtaatcgaaatctattaatgtttgtatattgaaacaggacgctttggacaacatcaaccttttctctataataaccattatctcctttatcttactggttcctttagcaatcctcatcgatgggttcaaggttactccttcgcatttacaagtagcagtaagtggaaaagcataaaccgatatagctagatgatctaaaagagaaagaactaatgtgtgtttgtatgtggttgcttgacagacaagccagggtttgtcggtaaaagagttttgcatcatgtctctacttgctggtgtttgcttgcatagctaccaacaggttggtccgtctagttcctccgtttcagaaaaactgtactgaattttgtaaagtcggttagtgttaggcttctaatcaacacataaaaattggggttgttgttgtaggtatcgtatatgatattggagatggtgtctccagtaacacactctgtagggaactgcgtgaagcgtgtggtggttattacatcatccattcttttcttcaaaactccagtctcacctcttaactctataggtaaacaactactagtagtatatattagtaaaggatttgttacacttgttcattttattgaagcaatatataatcacttgttaaataaacaggtaccgcgactgcactagctggagtatatttgtacagcagagccaaacgagtccaagtcaaaccaaatccaaaaatgtcttgaattttgtatatagaagctcttagtttattatttatgcgaaaaatgttgatatttttgttcatccatgtcgttttaacatgacactattaacttttgttaaattcaactaatctcattaaataattctattctttacatggaaattatataa

SEQ ID NO: 48944 - DNA, 651 bp, Arabidopsis thaliana landsberg
aggtttctcatctcaaagattgcgaaattttctaatttggcatcggattgtttggatttgattgcttatgtaagtaacttgatttggttggtaacttggtattgcaatcagaaaatgtgctattcagtgttcctttgtgattaggtaattaagtatattagaaccgcatggtctttgttctcaatgctagtttagttgttttggtttcatgaagtagaagaagttttgacaatatttactctctgttgtgttaaaaattagcatagctttatgtaacatgtaccttgttttctctgtactttcatcttttgaatggattctatgttaaagaatccattgatgaagtttacaagtggtagtttgttacttgcttatatgttagttattacactagtttgacaaggttttggtacttacttgctcaattgctacactcacactgtgaaattcatgatttatacttatttcagttatgcaagaaacttttgattacataggaatgatgtttttgatatatgatagataatttgacatttattagtgaaagtttctgatcttgcctttttgtggtatcaattggaaacataatgcagaagctatagttggagcatgagtgtagcatgaagctagattgctggctggtatgtggtg

SEQ ID NO: 48945 - DNA, 291 bp, Arabidopsis thaliana landsberg
  unsure (1)..(291): unsure at all n locations
gattccaggacggagcccccacatcccaccaggagaaaagagagcaaggccttagcagaagccacaggacaaccgcgcccaccgccccagaagcagagaagccactcccccgcagggggagcaaagacgagagaccaagcccacancacggaaacacaacagcgagaggcaaggcgggaaaagcaaccgagcccaagacaggaaacaggagccacaacaaacgcgaacacagaaaaagccaagaacagaaacaaggcccgacggacgcgagcacaaggacaagagcagaaa

SEQ ID NO: 48946 - DNA, 544 bp, Arabidopsis thaliana landsberg
  unsure (1)..(544): unsure at all n locations
ttatcaaatatagttggcgcattccaaaatacaaaatggcgttcacggatattcacagggtttgctcgtttctaccaagacgatgattacgactagcagattagatctgacggaaaaagccgttcgcgaaatcgctttcttggagcangctaacgaacactttcanttcaagttctagatgactagcgtggaacagcaagctgacggagacagtgaacgggcaactgacacgacaagaccccgggacgtacgtgctggcacagtgaagtgtggggattataaagtgatagacacgactactgaaaccggataacgagtgggctgtggacagntttgatcgcatcgaatacgcatctgctactgagcctcgtcgctgatttcataccgagaatgattcgatggaatagaccgaactgcaggatcaggntttggagaatacggtcatcgagtnttttgctcactacttaaccacattgggattacctgtttcttttgataatatctatctcatcgtatccatctttaggggtctttacacgatccc

SEQ ID NO: 48947 - DNA, 506 bp, Arabidopsis thaliana landsberg
acgcccgaaagcagcgtgaacacgaacttgaacaccacccacgtgatccacaccttgatgaaggcgagcaggcccgtgatcaggtggcgcttgatgtggagcgaaggtgccgtcacgacgaaaacccctttgaccgggcattgtattcgaaggccggtggccgtccggtgtgattttttccgcgcgctggctaatcatggggaaacggagaggggtgcggaagtggcggaacgggatcgacaacggcggttcgaggccttgctgcgcgaacaccaacgcatcgtgttcaaggttgcgcatgtgtatgcgaacaacaggcacgatcgcgaggatcttgcgcatgaaatcgtcgtgcagctgaggcgctcgttcggagctttcgacgcgcggcgggcgaagctcacgacctggatgtaccgtgtggccttgcatgtcgcgatttcgcacctgcgcagccggaaacgttcgggcgcggggcaagtggagctcgtggacagcgcgcgcct

SEQ ID NO: 48948 - DNA, 473 bp, Arabidopsis thaliana landsberg
  unsure (1)..(473): unsure at all n locations
gttgatcactntaatcatctgaaagaancccaagggntcaaaacttcgactgagcaatcgccttgctatgatgttcaggttggtcagaatgatgattggggacattactcttactatggacggtctnnnnnnnnnnnnnnnnnnnnnnnngaagttcaccaaagcagatgactgccgttgtagaccaacacttgtgncggaccctttgttattacgtgaactgtgaaaatatcctctctgtccatctttacttacactcagtatgtcttttccttctacacggaaggctcgagantgcttcgtcctttttggccgtttttaggttttgacctcaggtttacgttgacggctttctaaatgttactctcggttgaaaggtttgtctctacttcgtcagtgtggaagagagcagttgatagtgtnttttatcgtagcagcaagcttcacgataagcagattaaagatgtttggat

SEQ ID NO: 48949 - DNA, 1169 bp, Arabidopsis thaliana landsberg
  unsure (1)..(1169): unsure at all n locations
aaacgccgcatcacgagggctatagcaaaaacaagacttacgagatatgcccgtcgcggagtttcaaatcggataaacaaaaaaatgagtgaaatgatcggccaaaccttagatctaaatggctcagagggttttacggcggcgctagactcctcgaggccttccatggtggtagcaccggcgccgcttccaccgctgccgcctccgccgctaagagacgtggcaccgctccaggaaagcggtgtggtggggcttgctcgcgtctggtctcctttcttcgatctccgttgacgcacgctccatttcagcttgagaggggacgcgtcgacgctattcttcggttcggagtggcggagccgaagaagcgcctccgccaccatggaatcgtcagacatggccactcgaatccagttttcgccggacatagtcgcaactcaaagagagagaggagagatgggagagatggtggcgaaaaagtagagaggaagatatctctgtggcatagttaatgggtggatttgtatatatatatattgagttttattgcacagttagatatattggaattaacttatttttcttttcttgataagtgtaggaccctctttaagacatacgtggcatagatcattttgtggcttgtgttggaatagtagcagtaggagaatgaaggtgatacacgcgcgacaatcgaccgatgatgagagctagtaccacctccatattcaaactttgggaattccactatttagatgctatggtatcatgagctggaaaaataaaaaatgtcatgctagactaatcaactacattacattacatttatacatggcctatgttatattctagagactacatattagtattttcatgttaatttgtgattggatacaaatacgatcaagtatctttttgatgtttgttgcctcgcattcgtgaccattcaatttcttggtcacttcaactccttacttgtgatcttcgagtatggtaattaataattataagaatcatactagaataatacagttcanaattaaataacgaaactaacaaagaattcctttcagacaagaaaaaacaaacaaccaaacttagatcatattcatatcanatagaatatcaaagctttttataatagaataatgatgggatttaaattgcataga

SEQ ID NO: 48950 - DNA, 1030 bp, Arabidopsis thaliana landsberg
tggtagctcgcgatttccatatgatgccaaatttcaaatattgacatttaaacgagacatattgctggtaacttggaagtacccaataagggtgtgcaaaagctaattctggaaaagatatgtccgggatagtttgtgtagttgtttctctatttttaccactgtgtggtatttggagaccatatcattggctaatccagatgatagtttctttattaagtaaatttatggaattttttgtgctctctgaggaggttttttatttttaatgtttcttagtcatatatttttgattctttgatttcggtatacaattgtcagctctgttaaatgtaatggtatgtgatatgttcactcaatgaaccaatctcttgctttcttttacacaaattctatctaatacctgtttgtaattcatattgatgatatttgcttgcttgttttgttcttccatctggacttagcatgaaaatattgaactagtggcttattaccaagcttaagttttagtgggaagcaaccataatcatgacatctaagatatttacgagtttgatatgctgaaagtcacaggatttgttggttaggcatccgatttcacttctatttttgctgtagaggaagtgtttgatgttcgtaattttatgttctatctgtgtgttcctgatgattcattgtcctgcacattgtgcaaccgttgtgtatttcccaaccttaccacatattattctcatcatataatatgtagaataagtttatttttagctccatgtttccagttgtacgagtatatggtgtatgacattgattttttgcttgttattagatattttttcaacaagaggacaaagaagtccacttgggagaagcctgttgagttgatgactctttttgaggtgagttattttggatctcatctgtttgtggtcttgaaaaatcacctgaagtactgtaagcttccaaagctaaaaaaatgaagtttcaggaatgatctactcattcggattttcaaagctgtcttgtccacgtc

SEQ ID NO: 48951 - DNA, 1002 bp, Arabidopsis thaliana landsberg
cccgggacacaagatgagtaaacatatatcaaaataaaataaaaattgaggcgattttttttgtttctaataagaaaccctaaaaatacacttaataatataaactcaaaaacctgatatattcaatagacgaataccctttttgtctccggcccgcaacatttttatattcattcaaataggacctcaaaatactgtatacgtcaatgagtaactttgaacaacctgtgaaatttgacaaatataaaacaatctataatataattaattagttttgacacccaaatgctgtgagaaaaaaggaatatttttagtgtgaaagttgagtagtattgcctttcacacgtgcaaattacttcatatgtgtgtccatctctatatatacatgtacatatatgcatgtgcattccactgttttcacacacaaatctctcttctctctctctcttctcctagaagctggtgagttttatttctttgtgattcaaaaaacataaatctcaacccttactaaatgtttcttgatcttgggtttttactatacgtcaactcttgtatttgaaacccaagatgatctgctaatttatcttttttcttggttaaatacagtttcttgtttataaatcatacactaatattctttttaccattttcagattttcagaggcaacagcaatgagtatcttatccacaagatggttttctgagcaggtatatatgcgcataaacacatacactcatgtatatatgttgtcatctgggactgtttttcattgttttttgttcttttttcttttgggtgtgatgttatattttaggaaatagaagaaaatagcataattcaacagtttcacatgaactcaatagtgggagaggtccaagaagctcaatacatttttccacactctttcacgaccaacaataatccctcttatgatgatttgatcgaaatgaaaccaccaaagatccttagacaacttacatatcaccttctgctcatct

SEQ ID NO: 48952 - DNA, 489 bp, Arabidopsis thaliana landsberg
aaagacacagaattagcaatcatgcctaatacatcgttcaacgtgtgaaattcttatgagaatcacaattggaaacaacatacgagatggacagtataacagtgcaaaccaatgggctctataacgagtgagacaagtaagattaactgtgttgggctgcatggaagttttagagcaggcaaacctgtagatgaaggtggatcaatgcatcggaaaaactgaggggagaggacgcttgtgcattggagtgccagccgtggttcttgtctctgcacagtgacgacgggcaatagctcgatccgacattacggcatgctcatgacagagttcgacacagccgtcgcggtcgctttgttatcgacggtcaaaacactgtctgatggtgcttgcgaaataggccacatgacttatacatcaacagaataggctgacgctaggcttcgagtgttgtcatagtttgcacgcagagtcgagtattcaagaacgtgg

SEQ ID NO: 48953 - DNA, 533 bp, Arabidopsis thaliana landsberg
  unsure (1)..(533): unsure at all n locations
gacgactgtttcagctcatcggacattgtctaatgcgaacactgagagtgccgattgaaccggacatggcatgcaacgcgcaactcgcaagtgtgtcacaatgaaatgcaggacagtgcatccgcactgacggataacgtcatgatgtgcaggctacgcgatatgcgatcatcacatgcgggtacaattggatgagccgtggagcttacgacatcagcgtgacatcgtttactaaancgctattcttgaagatggaacgctagatctgaccagttccttagtgagcgtgtaaacggtgagatgaccgagcccgtttncagntggtacggatgatgcgcgccaccaatgtaccgtgttgcaaactgacgantnacgcaannggtctcagtttcggtctgtagtactgcgngtcactacgcttgctgatactccacccagagatggttcacatccatttcaactaccccatgaccaactgttagcacagcattacaacttcgaagggttctatccttcgttgaagtgaagtctgt

SEQ ID NO: 48954 - DNA, 593 bp, Arabidopsis thaliana landsberg
catccgacttatccgtaaaaaaaaaagaaacttgatagctttaataaacaaaagcctaaccatcctaatggaaaatataatcattccagtaaaaagaacgcaccaaccaccgcctatctaactaatcaatacgaaggaggagcacgaggcggaggaccaccccaatacacgtcgtgttgagccatttgatgaccatttgggataaaattaggaggcatattatacatcggcggctgcatcgatccttcgtttccgttattcccactctcgttatcatcattctcttctttctgcttcttcccatcttctagttgaagcggctgctcttgctgttgttcttcctcaatcggtaacctctcataagtggcattgcaaaacgtagcagctatcacaataacgggtccagaggcaataagcgggccagcaactccacctcccacaacttgaccttgagctccagctaagtaaatggttaaaccagcggctgcagcaggagagccagacgtaggaagaaaagccccacacatagacaagatctcaaactgaccacgtaaactaacaactccaccggatgcagcaggctgacgcagagt

SEQ ID NO: 48955 - DNA, 499 bp, Arabidopsis thaliana landsberg
tgaaggtgttcccgttattcctttgcatgcaggttctcgctttttgcttgatgagatcagttggctaccacgcacagccgctgaagttgtggtgcttggcagtaaagacaatgtcagcatggtcactgacaacggttccgcgaaattggcttttagcaaaatgctaacagtcgagagccatccgattttgcgggatcacgtaatgaatggccaggcggttgtgcctgcagcgttactcatagaatggcttggccattcggcgttgcatgcaaatccaggcttggcgttccacggtttgcaagattttcgtgttctcaaaggattagtccttaaggggcaacagccgctccatctaaaagctttcaccaatgttcttgagcgtcaaggttcgttattttcggtgacaattgaattgcatagtgaagatcaagctggacgtcgctacctcaatgcacgcgctaaagtccttcttacggagatgctgccgcgaactcaaggc

SEQ ID NO: 48956 - DNA, 557 bp, Arabidopsis thaliana landsberg
  unsure (1)..(557): unsure at all n locations
tgacacatagctccacgcctccatacaagaaaggatctcacttttcagaacgaaatgctaagttttcgaaatattgaatgagttgctgattaggataaaccttgaatagtctataatttgaccctatactagcttagacactntgctgaatcttgaaattcacggtttcgaatacatctgttctccgtctagtttaatgttagagacctaatgcatcacgcattgacgcattgatttcagatgctagcaaccagcaaagagctattcatttatattatttgaaaactccaatgaagcttcatctgaagagttaaactgatttacacgaaatgcttggaccagacacgcagttngagtgaaaggtaagatgtcactcacaacgtggtgcactaactgggaccagaatacgaagcaacccctttagctgctcacttccagaaacgaaaagggtaattgtatcctgaattacgggtttttgccagatagtctaatatatatcatatgaatcccaatgtatatgtcatatataaatgatgtagctctgnttgcctcatatg

SEQ ID NO: 48957 - DNA, 1087 bp, Arabidopsis thaliana landsberg
  unsure (1)..(1087): unsure at all n locations
gaggatcagaaggtcgtgaaaaatgaacgagaaaaaacccaccaaaacactatataagaaagaccgaaaaagttttaagggtgagccataaaccaaaaaccttaccagatgttgtcaaagaacaaaaatcatcatccatgattaacctacgcttcactactaagacaaggcgattgtgtcccggttgaaaaggttgtaaaacagtttgaggatgctacaaaagtggatgttaagtatgaagcggctaaggttttggatttggtctaggagcacattggttaagcaatatcttcggtggagattgagtttttagagatagtagatactaattcatctatggagacatgcaaattcatcaaaatgcttggatgaattagaaaaactaggtggagaatacagtaaaaaaattcaaaaagtgcatattgtttggacaacattaatatgtacaaatagtttacatttaaatgtattattttactaagtacatataaagttgctaaactaaactaatataatttttgcataagtaaatttatcgttaaaagttttctttctagccactaaacaacaatacaaaatcgcccaagtcacccattaattaatttagaagtgaaaaacaaaatcttatatggacgatcttgtctaccatatttcaagggctacaggcctacagccgccgagtaaatcttaccagccttaaactagaacaacggcaaataagttcatgtggcggctggtgatgattcacaatttccccgacagttctatgataatgaaactatctaattattgtacgtacatacatgcatgcgacgaacaacacttcaatttaattgttagtattaaattacatttatagtgaagtatgttgggacgattagacggatacaatgcacttatgttctccggaaaatgaatcatttgttgacatacttcagagcatgactccaagagtccaaaaacttattaaatttatttggattaaaacttaaaaatagagtaatttttaaccacccgctgccgcanacgttggcggaagaatacgcggtgtaaaacaatttttgtgatcgttgtcaacactagtacc

SEQ ID NO: 48958 - DNA, 1087 bp, Arabidopsis thaliana landsberg
  unsure (1)..(1087): unsure at all n locations
gattcccaagcccgtctcgctatgtacatagcaatggctcacgctggtctcgctttcgccatttgtgttctgtatttcgtcggaaagctattacaagagtatctaagaccgattcaatgggcgattctctgttcgattcctttacgaggtattcaagaaacccttgttgatttctggagcgagcctttgaaattagggcttacggaagttgttctcgctgttcctgtttctgtcttcaatgttttcatcgggtcgattgtggatattaaaaacgtctgctttagggtttttcttaggagatcgaaacctaagagaacgaggaagaagaacgatactgggttttctaaactggttaaatggttagtctcttttggtgtctttgtcattgcttatgagaggattggtggaattgggtctcttgtcattctctctttagggtttttgtttagttccaagaatgttgattcgtctctctctgcggtctcttctctgaggagtaatagttttaggagaagccatttcactgcttatttcactagagggataatgacgagattgaatactatagttgctattggtttgattgtgctcatgattgttggatctttgactggtgtcatcttcttctcgtataagattggtgttgaagggaaagatgctgtttattctctgaaatctcatgttgaagagagtaattacgctgagaagattgggatcaagcaatggatggatgagaatgatgttccgggaatggttgatatgtatacaacgaagttttatgaaacggtttctgagcagattgatagtttggcaatgcagtataatatgacggagttagtcactgggattaagcattttgtgatcgggcatcctcagaacacgtcgacgccttccacggcgcttataactccgtctccttatacagagaagctcatgagtttgaggactcgggttaagaatcgagagtggagtcagatatactcggaggttgatgtgatcttcagggagcttattatcactagagaagatttagtagagaaagctaaaggctttgctgntaaaaggatggatgtatcgcaacgggttt

SEQ ID NO: 48959 - DNA, 1255 bp, Arabidopsis thaliana landsberg
attccaaatagtgctttgcaaaatcgagaaattcaacagcaaaatcatattttaactcatttctgctgttagctctaccaaagtggtgaaaaatttaggttctaagcaacaccaagctttaaaggaacaatagataattcctgatgtgaagaagtcagccaaagtatatgatcacgagtatttaacttttaggtcctcaaagcttgacaagatacattagttatcgtaaatgactatcccactccatactttaatattgtgataaggattcagaaaattcctgaaatacttaccagctgaaggaccatgcatatagacatatgtagatgctcccagtttgaaaggttatctcctgtccaagtcgcagcatatctctggctacctatgaatccagcccttgtcaatacaaaaggtcgcttattcttatcagctagctccatcccttcgtaagttgatcttgccatcagcatcccatagacctacacaacaggaaatcttgactaagttatcttgaagtgcctgacatcgtacctccaaggtactacttttcactcccgatgaactgcaaatgtcctcagtatagaaattcatacgaaacttttaggaagctgctagagaaatttgtaagagcaataacagagaaacatacgaagacaagtaatagcgatatctgtctatcactcgacatctatatatacatatacaagacaactcttgaacgatgataatcggaaaaaacaaggataacataacatcagatattgtggtagataaaatttgagattagagtagaacaagaaagttacattgtggtagtgtgagtggttttgaacacctccaagctcatcatctccatggtgaatattgttctcaggcatcgtctttgtcacgacctggacattgacaaatatgaccatatgaaatttggataaagattctgccaagaaaataaaaaagagtgaatgcagaatatataaaaaattactttgaaaacagctggctcattcatatcattccatataccatcaacaccatttgaaacaaattccttaaccaaattagcccaccaagagcgtgctttggaatttgtatagtcagggaaaacgcaaggcccaggccatacttcacctattgaaaccaaacataaaattcagcaatttatttagaaatatcaaattaacatgataagataacacaaaaatcgtgatatggaagtcaaataccagtaaatggcttcccatctgctcggctgatc

SEQ ID NO: 48960 - DNA, 663 bp, Arabidopsis thaliana landsberg
  unsure (1)..(663): unsure at all n locations
tgncagaagttcttcgagagatcgcacgagaatttgacaatgcgaccagtaatgactatgccagatgctcagaagngacttatcagtctattgtcatgnttcgtagantagaataggatctgtgttgatgcaggaggggagcgtaatggnatcactcgtcagaacagttgaagattgctgacaacaatcatggtactgatgacgtggaactagtcgcagcggctaatggattgaagacatagagaaatcacacttatgggcagaagtgcgatatctagancgatcagaagagtctgaaatatatattcagtgaatgagagttacccgactgagataggcacatggntagagntgatgaaagattacgagttggaaattgattactncacacgtaaacgaaactgcgttgtagactcgctattagtagaacagagtcaagcgaatatgttggtcgctcanacgatgtngcatgagctagcgactgagttagctagattgagtattggatttntgacgaagantgcaggagtgcnaattgcgttggaagcantatcgacgaaganattaggacaggtcacaggcngatgagcagaccctgagataganagctgatatcgacggccaaggcccgatctcatacagatgcgaagcactggtatggtt

SEQ ID NO: 48961 - DNA, 2072 bp, Arabidopsis thaliana landsberg
aggtatcatctattctctctaaactcaagctcttactgtaatgatttacatgtttgtgttcttggtgatgaagttgtggaacctagaagagattctagaaggttctaatgtcaactctgggaatgcatctggagctgcagaagacagtgacagcgacaatgatgggatggaccttgacaatgatccttccaagtcttccaaaggtaaagagaaacctgcaaaactttttggaacatcttaaacagttccttgagatgataactacaaccatgatctgatctcgagtgttttttggctttacaggcagcaagaggaaaacaaaaagtaaagcgaatacgctgaacgctacaaataatttctttgcagacttatagattttgtttcagattcagtctggatagtatatcagtttcatacctgaattgtctacttgattctgacagtttgttaaaaattttggtttttagtaagattgtgttttgcaaaatatctaacaaaacaaaaatcaagtcacagtatgcaacaaaacagagtgaattcatagtggctacaaggatctgttcttatgtatccagtggtttcaccaaaaaaaacaaaaaagagagagagaaaggtgccaaaatgtgttgtcagtacatgagttgtcctcttccttgtagatcacgtaacgaacaaaaaagaagcaacactctttctcctactctgaaacttatgattcaaacccgaaaacgaacaacttacagagcgtatagacgatttgttgacttgaaaccacagcttccaagtgtcttgctgcttcaacatacttccagaaagactcaccccaacacttgttcagctctgcattcactttcgcccagaagatagtctcagttctctccttcattagcaaactctgttttcctttatgcttcaacttaagagatcgtcccttcatcagaacaacaatggtactttccacaaatttcacatccctaacgcatcgaagaagctgatcatttgtagcaatcaaatctctctccgtaagaacatttctcgaaagattcatggctagcaattgtaagatgaagattgcttcagaaattcttgtaagaatatcatctccgatcctatcttcttcgagaatatgttgacgatgatgatcattgccactctcctccacaacaacagaggctgcgaactcttcggccttgtagagaagatagtccaacaagtacattaaagcagattgtttctcgtaagactcatcaaagatccaatctcttagcaacaactgttttctctctgtcgttcttattaacacgcaataacgtgagtttgatgagcgcatgagttaacctgatcccaagagaaagtacttcatctttagcctctgtaaaaccccatttcattgaagaagatgatgattccttttgcaaagccttgtggaaccgagtcttagtgctactggctgcagttgtgaatatctctctaacatctattcttggttgcgtttgacgattctttctctgtgttcttcagcgttacgcacaagacccattaaacgagagactctgtttccaagaggctcaagaagattcatcagtttcatcagcttaataacctctttctccaaagatcgtgtttcatcttctgggacgatgatttccgttgaaatcgctatggatagcagtgattcataggcagtctttagaaatatcgtcatgatttcacgctctatctgactcttaaaatcatcaaagatgttcattaacggtggcgcagtttcttctttttctgtacagtagaagtttctctccggaggatctcgaccattcttcaccattttcgttacgggaaagaaacaagatgagtgcgagtgcgagagagaaaatgaaagagcaagaaacaaagaatcttaaatgcagagttactctgtttcttttgggccttttaactgcttttattttggcgatattaaactaacaaaagaattaagaaacaatcaattggaaccgtcagctctactccacgcacgcaagatgatatatgtttttgctaagatgagagccaagcgaacaccatagaataaa

SEQ ID NO: 48962 - DNA, 880 bp, Arabidopsis thaliana landsberg
tcttccttttgtgtttaacacagcaatcgcgtgctggcaaggaaggcctgtgggttccatccgaaacagctgcaggtttggttactgatgtccacaagctgaacagacccatcatgaacctcaaaaagcgtgtctgaacaaaagaaaacttttagcgagcctgctttcttgcattcttccactagactttcctccttagatggcacaagttggctgaaccacggttttgacttctcttggctactgtttaccaactccacaattttattcacaaatgccacaagtttctggacgatggaagtttcctgaatttcttcaatccacttagagtagatctctgccacatctgacgtaatatggctgtacggttcaccttcaaacaaggcacaggcccaatgctttgattcaatctgcattacccaatcataagctctaggagacactcgtcttatttgctcagtgtaaaccttaaacccatcaagtcgatcagcacgtgctgcagccagtaaatagtatgttaacgatggtttcccatctccaagaaacggacctctcaggcttctcataaaatcctccatcaagtaatgaatagaataaccatgatgggcattatcgaaaatctccaacacagaagtcactagtcctttctctcggtcggagacaaaggtaagaggccgtaaactggacaaagctacctttaattgttccagaaaccaacgcccacgtttcatcagtttccacatcgacaagggctaatgccactggaagcacgcaatcatctccatccaaggcagaagctgttaacaaaatctcatgatacctagacttaaatggaatggcatcaaggaaaagaagcggccggcaaccagtttgaaagcca

SEQ ID NO: 48963 - DNA, 627 bp, Arabidopsis thaliana landsberg
tattaacttattattaaattgtagtttaatttcttagtctcatattaagtaatgaagtaaatacgctgccaaattgtgtataataaacaactttaaacaattgacgacaaaaaaaacaaaaaactataaacaatttacttgactatagtatattattttaaattaaattttagttctctatattcgtctaaattatgtttctctatttttatgaactcaagaaacgtatctatataatttaaggcagcaagagatgattaaaccatatgcgatgcatatataaattcacctcttgttctagctccacctctaaaaacactaataaaaaagtaacaatggcgtttgctcttaaatgttttgttgttgttcttcttctctctatggtctctcatggtaatataatcgaatctcgaacaaccttttagtatgttgtttcatgccttttggtgaataattagtcttaaatttcagtcatcatcttggagagcctaatttttcttttttttttttttttgtgtgcacaggagtgcctaattttcaattaggaaatagtttgatcttttaaatatgttgtttcatcgctcatattcaattttttttttttttttatttatagaaagttttctt

SEQ ID NO: 48964 - DNA, 530 bp, Arabidopsis thaliana landsberg
  unsure (1)..(530): unsure at all n locations
tgcttgttggatatccgatatcctatgactttgaggcacattcactcactctctagtctacatctcacctttcctctccctcacgatattgcaccagctagataacctctacgtcaggtcacgataacgcggctacatgcgcttacgccaactctcctggatgtcctgacggtatagagcgcttgccantaatgttgatcggatttctgcttcacttactcatggacgtgtggttatgtattacaatcgcaaacggtatttcggagttggactcnnnnnnnnnnnnnnnnnnnnnnnnnnnnnnnnnnnnnnnnnnnnnnnnnnnnnnnnnnnnnnnnnnnnnnnnnnnnnnnntacgatcagatgatttttctgatacaaagttgcagcagataatggagatggtgtttgatgggcgtctacgtcattatgatgactgcaattttattactatagataggattagtatcaactcaagatcttgatgttgattggcgttgtatgcatgatagtcgtgatcgtcactagtt

SEQ ID NO: 48965 - DNA, 956 bp, Arabidopsis thaliana landsberg
ttaacactttcaccaaccaacactcttctcagtttgagttacaatcacatggtgtggccatggcaatatggttttccttcatattattttttcacacttggtccaagatttgtatataataaataaaaaaaagactccgtgatacttcatctgagactcttttttcacaattttattttggatatacctttttattataacaaacccatacatcagaatccaaaattcgaaactcaaaaacaaaatcccaaaagtaaaacttgcatggcctacatgttgttatatctttcacgtgactctttgaggagaggagacaagtcatttccagccacctctaactaatgttactttcaaagacgtgatatcatagaaaggtatccatcatttaaaatctaataattgaactattaaagtcattatgcataatgtagattatgttttatattatcttcacttgtatttatgattagttatatcacaatccaaattccaagcctaacggaaataaatttaggaaaaatgttagcaacttattactatcaatatacaaaacataccttcgaattatcaactaatataatcctttcaatgttcaatacacttgataattgtattgatcaattaaactttagttgttgtcattttcattcacgtttttatttgagtttttttctactgtttgaataaacatgataaaaaaatattttccaacatcactttcttcttttgtcatcaatgaaaagaaagtgatgtgggaaaatatttcttcgtcaaatgcttgtcaagatgttttatctagtagtttactcaatatgtggtcctttacacaacaaaaactctttttatttttcttacacaacaataacttaattgtaaaccaaaactatttccaccctccagttgatccaactatcacttgttctctgatacatatgattaacaagaattttatttat

SEQ ID NO: 48966 - DNA, 892 bp, Arabidopsis thaliana landsberg
ttctcagtgactattcacctctctcaatctaagttaaatactatcatggttgcgtctggtgtttccttagatttccacaactccaaaatcttggttcagaatcagtatacagcccaagagattatttgtgcttggaagaacctcagagctgtgcaactgaagtgattgaacatgaatactacaaatgatttcctaacaaaggaacctttgcttttctttgctttccgaagaagacaattgttaactgttttacagatgagttgagcagtgtaaacctttaatggttgacaatagtgtttgccttttgatggtcagggggctttatacactaaatagtctagctctcttcaccaaatacaacaatatatatacacgattcttttacgcatcttagattgcgaaaataggatcaacttccgagttagagaaatctgaatgatgccacgagttggaaccactcctgcgagcactcttcaccttcttcctcatcgaccttgtcctcttcgattttaccacgtaataagtcatggttccaagaacaccagccattatcacacccccaaccacggtcaccagttcagccgcccactcgttcttacgcccaaccactatgtatgaagatgccaaaaatgccacagatgtacacatcgatgccaaccacatgagtttgttgatcacttccactaccctcttctcagcttttgtctctcctctcaccaatgtgatctggacaaccacaaccgccagagacgtaaacaacgcgagtgcgttgaagatgaagaagatcttgaatgatgctcggcccaccaccactgcagacccgtcattgttgtctcctcccggcactgtgaatatagcagggatactgggatcctcacctgcagacctgcag

SEQ ID NO: 48967 - DNA, 564 bp, Arabidopsis thaliana landsberg
  unsure (1)..(564): unsure at all n locations
ggcagtcgcctcatgaggtttcgcagacactcttagaaataccngatcgatggctagcgcgtaacggttctgttacgctctgacgtttctaagaagcaggcgcacgcaactgtcgtctctccatacaatcgactgtagatggctgatgaagaccggacagactctgagtagatcggacacagctgtctccatcatggaatttctcgttagcgggcgcatcagcaggcattggatgcgagtctaacgcatattgtactcatcactgtatgcgtcgacggaagcaacgtcgcgagcttgcacatcgctgatcatgggtatctattcaaacgcaagcatgtggctactcgacatgtgcgccaactatgcagttctggtgagacgatgcaagacgcgcgtgagacagacgcgattgacgccgaggctagcggttttcagatncaaggcacntggctggggctctgaggcgaaccgatgtaattgaagntgctcatattacatgcgcatatgnaggtgtagttgcangagantcaagntgagattatgtaatgactcgggatgttatgg

SEQ ID NO: 48968 - DNA, 902 bp, Arabidopsis thaliana landsberg
tctataatacaatgcattcggacaaatcgaaaacgtttgaaagcaaatgttggtgtcagttttccccaacagtcaactagaaataggaagatcttactcgtttcttttgaccaaactgtttcttacacgtctacgtcagacctttaaccagaattaaaaaaaaaatctataaagagaggataaaaggtataacctagcttgtcttgtgcgtttaaaagctagtgcagtaagcaggttttgagggtttaagaactgtcatttaagaggacctgtgaaaatgggtcgaatcgcagttttgaagtcctcacaaaaccgttgttcagagaaccttgccgctcgttttctagcagattcagccattttaagcctctctgtttcattcatcttcacaatctcaaggatcgcttcagcgtattcctccacagtctcagcaagaaacccggttttttgtccgtcttcttccaacacaatgtccattttaggtccagctgagttgtgagctgcatcacaattaaaaacagaggatccattagagaaatcgcaagagtaactgaaagataaaatcacatatacaagtccttaagtctgacctattgggattgcaccagcagccatgtactcaacaacacttataccaaagtgttcatctatcatcccatgcagtcctgcaactgcatttcctaacagttccactagttctctgcagtccgatactaacaactaagaatcatggaagctctgatagtattgcaagacaaaatagagaatgccgtaaagagctttgagcaaatacctgtacatggcatttttatagaattgcacgtctccatctacttttagttccactgctctgtctttcaatttctgcagacgttcttcatctgaattgttcctacaacttc

SEQ ID NO: 48969 - DNA, 1222 bp, Arabidopsis thaliana landsberg
ttgcttagttacatatgttaaaatccaccaagattcacacaaatcatatttttttgagaaaatattgaactagacaaatgatccattagtatatatccaatatgctttttaggttttagatgtcgtaacattaacctaaaaacaataatatatgattcatacccaaaaaaaaaaaactgtaatatatgattatcagattagtggtagtgtaacaaatattttgtcgaatataagaattacggataagtattttttgtggttgaaaattgtgtttctccttctctttcacctgaaataagaatatgatcacctgaaaatatacagaaataggcagtctattatatctttgttttttttttgtcacatgaagcataaacttagtaatacaaagagattaaaagacaaggtcagtacgagtaaatattgagtaaaaaaaagatgttttcatttttgattctatgtagtagatgaagaggagaaaagcaaaggaaattccaaaagtagagagcacgatgaagtaaaggatctaaaagtggaccatacaaatgaagtaaagaacatataattttttttttattttttttttggtttctaattcaatgcaatcgccaatctgcaaaacaatataatgatcattgtatttgaagctcaaatgtttacatgtcatcgttatgtaagatctttacttctttgagaaaacttatgtacatttctccgaagctcttattccaaaccaaacttaaattcaattaaacatcttccttatactcaaactatttctttatcatccttccaattgattactagagaatttatgtgggctttaaactacgagcaatgagcattttaatatatatataatgagggtgtgaaaaaaacaaaatggcaaaattggagaccactagtaccatgagtggtcgtcgaaaggaggaggttgtgtgcgagtttgcacgcacccggccgcaacacacttgaaatgagcaagaaattatctactggattaatttatttggatagtgaaacgtgtaattcttttattggaggtttggatttataagattttttatttcttcataattatttgccatcaattgtttaagatagactaatatatttttatttttcagtgaaagaaaataatgagatagagtattgaattttattttaaaaaactattgaacacgttaaaattaaaattttatgttgaattattaggacgagg

SEQ ID NO: 48970 - DNA, 550 bp, Arabidopsis thaliana landsberg
gaaaaacatccaaatactgattaaataaatggtaaaacatatatctattttataatatatttttaacatcacaagttcaaaaagcaaatcactcaaaaatgtacaaaattaaaatataaaattttgttaattttttttgggtcaaaaggtagtaattattgttattttgttctaaatcataatctactgcataattatgcattgcagactttgcagttgaccataaactacattataaaatagttcgcaaggttttgggttcttctttaattgaccgttttcaaaaatattgttgtctaaacgatttaagaagatggccactcttcataatttattaacatataggagtatcttgaatgaacttggtacctcatgtatcggtttcaaatttttaatattctagttggtatgtccttaatgttgttattctttgtctacatagaaaaagaaatgccactaagattggcgtcgaatatttttcttatcttctgaaaaaacgacacttaatgaaaggtacgtgaatcaatggggcttctttggctccaatttt

SEQ ID NO: 48971 - DNA, 658 bp, Arabidopsis thaliana landsberg
ttggtagttgaaacataagagaaggggtttgttggagaagaaaagcggttcatacacacgtgatatgacgaggcctgccgatagagacgagtggatatagatagtgcaagcccatgattattacttcttttttcgtaaatacatgataatgatcatgacatgtcaatgactcattccggcaaaaacaagaaagaagaaaacttttttttttatttcttaaagcaaaatataaagaacaaagaaaaagggaaatgtgaatgcattggagggactcatttcagaatttataacctttacatactgcaaaatgtgaatcatgaactagtgaacttatggtctaatactctaatattactaacatgatttggtttagtttttaacttactatttattttacgagttggaaaaagctttacatgatatgtttttacgacaatgcatcaattctaattcacctaacaacttgtaagccaaacgatatatattttacaatagtcactctcaaaatgaactaaagatttccaaggctatggtttgttcgcaagattaatggaagagtgattgattgataccccaattggtggggatattgatgttatggtatagataaatgtggtcctaaaaattgatcactttgcaagtttgttttttcggcttt

SEQ ID NO: 48972 - DNA, 579 bp, Arabidopsis thaliana landsberg
tttcatagtactaatgtccaatgtacttaaccaggtaagaattgaaggaccagtggaaagaatacctgagtctgaatccgagaattactttcatagtcgtcctagaggaagtcagattggagctattgttagcaagcaggtgccttgtgatctgttacagtattcaaaatatttcatatgatgttaagaatttgctttggacccttacccttcaacttttggttgctatcagagttctgttgtacctggcaggcatgttctatacgacgaatatgaagaactgacaaaacaatattcggatgggtgaattctaaaaccttgtaactcttcaaaagaactcatttttgatttgatgttcttgattgatgattaagaatatgtttttggcttgcagaagtgtgataccaaagccgaaaaactggggaggattcagacttaaaccaaaccttttcgagttttggcagggacagccatctcgtttacatgacagggacgctctacttcttcacaatttattgtaatttcgatggacagatcaggtgtctagatttcgagaaatagctagaaaaaatgtaaagg

SEQ ID NO: 48973 - DNA, 812 bp, Arabidopsis thaliana landsberg
cttcgattgtgttactttgtagttcagtgacaatttcctcatcataacgtgtcatgtgcttcttcgagtaggacttgatacatttcgcattgaaggttgttactaagcttggttcctgaataacccctgctttggttggttgagagaacacaatcagaaccttgctaaagcgaaaacaaactaaaactacatttgatggatttggaaatctgacctattcgttaaacggtcatacaaaacggagttctcggttcgaagcacgacaacgcgatcaaaccatcgctgaggaaagaagtcacagccatggtagtccacaatgttccctccttctatcatagcatcgtcaagctcatcaatcacctgatccacaagttcaatacaatatagctaagaaggctaattcttcgaattgaatccacatctttatcaaactaaagagtgaagcttaagattctacgacggttcacagtgtattttttgacaaggaaataaggaggataaagggatagggatggagtaagaaactaaccgagtcttcgttgatgaagtgacactcgagctcactgtcccagccatggtagaattctttctctttgaccagatctccgatgcaaatataccggaggttcgtggcttcggctagagcagcagccgtcgtcgatttgccggtaccaggagtccccgtgatcagtaggttcgccttgcgcgccttgtccccccacggttacgtctcgccatgctcgtcttcttctatgaatcctcaacaaatttagcttcggcggccggaaattggaattcaagacccacagaga

SEQ ID NO: 48974 - DNA, 807 bp, Arabidopsis thaliana landsberg
tcgtcctgttattctaatacctctatcctttttctgcttaatctcataagcattttggttttgggcgttatgtgctaccagtttgtcccctgaacatgatatatcttttctttttgtcagattgccctggaagaactcgctgagagagtgaatggtgacatacgattggccgtaaatcagctccaatatatgagcctgtccatgtcagtcatcaaatacgatgatatcaggcagcgcctgctaagcagtgcgaaggatgaagatatttcccctttcacagctgttgacaagtaatgtctgaagtcctttagtttagtttatcaatgcacatagtattgtttgccaaactttttgagttaagtcttatagctgctgttatagaagaaatttcttaccctggttttgtcgtaaaaagtttggttttaagcggtctggacatttcataatttaattataaatgattccaggttgtttggttacaatggtgggaagctgagaatggatgaacggattgacctaagcatgagtgatccggatttggttcccctacttatacaggtatattttttggattcttgtggggttattgtgatatatcttttggaacggaaaattgtttcctgctacctctgacattagtgatttctaaaacttgtattcccaacatgaaatttgtacctcatttaccgttaaatttaaagattatttattttctttccatctgggcaggaaaactatctcaattataggccaagcggtaaagatgaggcaaaacgaatggatttactcgctcgtgctgctgatcta

SEQ ID NO: 48975 - DNA, 303 bp, Arabidopsis thaliana landsberg
ggccaaaaacccatgaacatacacccaatgtgacgttacttgctccatgatatgctttgctcaaccaatactaatcatctgggggaggagctgtaatctgacctggcctgattgttgctcactctcaggggtaaaaagtcctcacctagttcgctgggacgagaagtgtccttgactatccatgatggatgagcctgatctacttgcgggttcagaacctttggagccaaccgtttggtcggacgctcaaggtcctttaatcaacgtccatctacggaaactcaaaataatgaactccccttg

SEQ ID NO: 48976 - DNA, 639 bp, Arabidopsis thaliana landsberg
ttaaataacccaaaacggtcgaagtttcacctacttcttttttttgtccgtctctttcgctcaggtcttttttttcccctttactcgctgtttatctaattatcaatctgtgatacatatatctccactttttgtaactgcattccctcatgggttaagcttttatcgcaaatattgtaatatttttctgctttgtacaacatttttaacaaatagataagtatgttcccaaatagttggtttatttccaactgttttccctaagtgtttgtaaattgtaaatctgattaacgtgaggaacactaaccattccaattcaaccggccagcaaatcccaaaaatttgttccgaccatatataataatttgatagttttcagcacaatggatggcatgcaaaatatttgttggtcatttttattataaattcgaacgtcacattttttagtggtaacgttacatctgtatacaaaaaagacaaacaagatttaatccaaactctacagcacatatatttaaagtaaaatctgatttttgattttatatatgtttaatccttgaaaaagcatacatatatatctgggttctttgtaatgttgtgacggagttgtgtatataagcgaagggggatgcttttagt

SEQ ID NO: 48977 - DNA, 1138 bp, Arabidopsis thaliana landsberg
ggtcgactctcgactctagactagaaaaaaaacaatctacttatcaaaacttccagattatgcgttgtcaaaagtaaaattcctgatgaagacaagaaaagagtaaaggcaaagacagacaatatattggtaaaaggccaaagggatgcaagcttgtaaagcatcgaaaaattgtgatgtgaactaaaactatagcgtaatttgtgttgcccacaaaagaaaatatagcttaggtcacatattttaaggaaaaaaaaagttaaaacaaataaatgaactatcactttagaaggaaaaaagtctatgtcaaattgaatatgtatataactgtatgagcaattgagcacaacttggataaattaaataaataaagaaagttggtagattaagctgattaatcaaatatttttaaaattaagtccccatgtggatggcacctaattgcctcgaatcttatcgtgcttatgctttcctcacgaattcaatttattatttatggtcccctcccagccaatgtaaataaatgtatttgtagtagtgattaacatatagtataaattatacgcaaagaggaggactatataaactataataatataatgatgattttaaactacggtatgtcatcaatcaattaattaccatcttttccaaaacaatggcgtttaaataagtttttgaagtttttatttagacattcttattttatttcttatatattaaagagttttttatttgtggctgctttgagtcttgttcagttatgaatgaaacaagtctttagaccaaaaaaaaagatattaaaaaaatataaacaaataagaaattgtgccaacggagtccaaccaaaaacaaaatttgacgtcccaaaatttaaatcttttggaaatcattttattagtttttttttttggaaagtcttcagatactaaacatacatgttattatgcaaaaccatattgaaacagtatcgaccaaaagtattttaattagagtaaagtctcgatggttatggatgagttcttgagcaaaataggatctttcacgtcgatcgagttaaaagtgtcatgaaatgttaatccatactttatgcggaaagtgactatttgctttggggaatacatgatttagttgagtg

SEQ ID NO: 48978 - DNA, 392 bp, Arabidopsis thaliana landsberg
tagcgttgttcggcgttgcctgagtgtgcgagcaagcgacatggggacgtcgcgtctctgccgacagcaggggatgggattgagcgaagggactaaggggaggttgagtcgagtgcgagaacaagagatcgctttggtgatcagtttctcgcgcacgctgcgacagatggatgcagcagtggcgtccccgtcgcttcaccgtgtgttatctataatatctcttcattagaaaaataggtcggaactattgtaatactacgtcaagttgatgcaatctttctcaaatcatctacgctctgttggtcgagtcaaatcatgattcacatcgccctacgctcctaccgattagtcaaacacgatgaatagactggatctctacgacatgagtagag

SEQ ID NO: 48979 - DNA, 567 bp, Arabidopsis thaliana landsberg
gagtttttttaaatgaacttttatgttttattacttaattagtttgacctaatattcaacctagagaaaatagcatggtcttggggacaggaagacatgatttatattacaatgtaaaaataatttcataggagagaatatgccattttggtagagtggttgttacacggagagaatagtttcggcaaacaaaaaacatgtgagtttatttagtacgacagcttgctgtccaaatctctttagttatagcttatagaactttgaagcatacatgcaactaacaaaactgatttagccttttcgcatcaggctaaagtctctatatgtattgtgcagatacttcactgaacataatttatgaatgtatgttcagacaaactaattttcataagagcctaggcctcccaaaacagttattctcacttgggatgcttgcacacaacttcagaaatctgtggctgatgttgtaacgatattgctgaaggacatagggtctactggcctaacatttaactatgtctttgtaataacagggcatcatcagagtgtaaaatgacatatgatgag

SEQ ID NO: 48980 - DNA, 741 bp, Arabidopsis thaliana landsberg
ctaatcttcaaagaaaccaaatcagaatccgatctccgatgactgttatcattatcgtaaacaaccgacgaacgacgaacaaactcaccaccaccaccaccaccaccgacgacgacatcgacggcggggatcggagaaggagaaggacgagaaacagtcggagacggaagagcgcgagaaagcaagagatatctccgagatttgccaggagtacaagcaacgattctactccataacaaccgtgtgaatcgtcggagaatcaaaatccgacgattcactctgttccttagattgttgattcgaacaattttaagacacgattgagccattgagaaaattcaaaattcgaaatcgaaataaggaagaaggaagaagaaaggagaagaatctggaaaaaaaaagaatttgaggaagaaagcagcttcaagaagagatggccaaagagaagctgcttggatccattttggccacggaagaaaaagagagagagatttgatttcaatacataatgcccgaagctttagcttttctgtgtttcttcctcttttttcggaagagacgacactcttattaaatgaattttgaaatttactatttttgatgggatttgaaaaatttgcaacgaacttttctggtgagatgtgatgaccacatacatctttggggcctaaagttgacctatgaattttttgtacgaaaaagacgtatcgattatagtcatgtattacgtgcttgcattgt

SEQ ID NO: 48981 - DNA, 864 bp, Arabidopsis thaliana landsberg
  unsure (1)..(864): unsure at all n locations
tctatcgatgttagagcataatattatttggtttataatggaaaaaggtcttcataaatatgtgggtaagtgggttcaaagacttccatctcaatttggagaaatcaatggatccccgatgattagacacggtcgacacaaagacgggaacacatatatccccccgagtcttttagcatatcatatgatttttgatcaattggcaaaagaatagaatattaacatgttataaaacaatttctcactcagcagaaatcttgctgattcgtggaattctgattattaaagtttataaagtagataaaattagttacacgtttaagaaaataactaaattctatagtcaaatcaggttactgtgtagcacacaacatacactaattttatgataactgacatcaggttgcgttagcggtaaatttaagactataatcttgaagaatagattgtgatacacaatttatgatatgtggaatgggggaacaaatcattaaccatgccttatgtgcatgcttaccatcactacaaaacgtaccccgtggcaaatccgagcttggtaactttctccgcggactattgtcgagaactgaatatatttgaacgttattttcatgttactttttaacgattagtctcgctctattttggggctactatatatgaaaccaatcatatcaaagtatatcgttggtaacttagtgacgatttaacataacttaaatatatatactttgatatgatttactttgatatatgaaacatcaaaatatactttctgagataagatagcccagaaaggtgttagaacactctgngaggtaactcggatcatgagagggatcataatgagtaagatagagaacg

SEQ ID NO: 48982 - DNA, 628 bp, Arabidopsis thaliana landsberg
ttcgaaataaataaagaaatgaagaaaatggatggatgacttggaaaagagtggccaaaagatgatgtgagcctagaattgaaagctgatccctctactcattcatgcttaattatgcttattcatctcttctccttttctacgcaacacaccaaaaacgctctctctttggcggctttgtccaaatccaaatcattctcacttaaataaagattcattgaaatatattaaggagatacacataaaatagaaaattatatgttaatagttgtggttctcagctgatagaaacatcatttactttttcaatcgcataagtttccatatgtttttttcctaatttctatattatttatacattttggagattttgataaatattttttgtttaatttaaacctatagacctcacatattcatctcatgttgaagaactgggtcaaagcactggggtcgaaaccggtagtaaactagaaatgagagttacctacttaaattgctctcctcatatttccaaagatgcaatcatccaaaaatgttagtcaacggtgaaaacaaaaagaaatggatgatgcttatgcgaaatttaaaggaaataataggtatattatatggataatataattag

SEQ ID NO: 48983 - DNA, 276 bp, Arabidopsis thaliana landsberg
aattaaaggccaaaaccccacggaaacacatacacagtgtggttgggcgtatcaagatatgctttaccaaaacaacccggattttcttgaggagggggtctgaaaggacacggcatgatgtaacgccacaagccgggcagaatacaatgcacccaacccactagcaccaataatggccacgtccatccagagccgaagtccctgcagggcttactcacccatccccaatgcgaactatggattggtctgcagttggacgggctccagtgggctttc

SEQ ID NO: 48984 - DNA, 588 bp, Arabidopsis thaliana landsberg
  unsure (1)..(588): unsure at all n locations
ggggggagcggtggatttaccgtggatttttgtggcgtcgatanactgcattacaccatgcancaatatgcggaacgcaacacatttccttcaaacactggtcacttccaattggttcaacctaaacactctacttgcctttggccctcgagttttggccgcaatgcgatgggtgcgcatttggacttttattcgcccggcacagcttgattcactcaggcagctcctcccacagtgcccaaatattgaaggcatggaagttaccctttcagaggtgtcactggcgcaactggccgaggcggtggccccttttaattcactgttttacctgaagatcgatcttaactttgatgaagctaatccgctgtttgtaccggagaatggcctgcccgtagatcaactgccagtgctgccaaatgtgaagatgcttaagttaacaacaactgtttcttaacaacagctaaataactaattagctaacgacttttatataatatcatttttgtatatttccactactattacagtctaaaaatcaccaccgcctttacccatactttaaaagatatcttggacgttatttttcct

SEQ ID NO: 48985 - DNA, 513 bp, Arabidopsis thaliana landsberg
gattgttctctgatggtaggcgtcatagccacgctgcggataatcaatgctggtgttccctctttgaagcggtttgtgtcgatgaggaggaagtttatgaataggcagaagagtgtgaaccggaggttggtgttattgaagaggactttgagtagaaagagagggcctttaggtggtcgggttgtgactgatcaagaatcaaaggaggtggatgataatgtagatggagattctgatgaagaggtgtttgaagaagaggtttccagctctgtggatggtggaaatgataatgaatcgattggaagatctagtgagacagtaatggttgatgttgatgataatgtggatagaggaatggatgcaatggagactgttgcatcaaaggttcaggaatctaaaacggagactgtaggtgccacactatggcgcgctatatgtgagcaaactgtgacgggtcacgatcatgatgatggtaagggtcgatggaacgacgagtgatggaactgtgggaga

SEQ ID NO: 48986 - DNA, 734 bp, Arabidopsis thaliana landsberg
gtctacgttgataactttaacccctttttaaaaaaaaaaattccccaaacgcctttaaactcatacttgtgttagttgtgtacgtgtggacttttagatagaagacagagtcgcgagtacgccgtcatcattcctagtgttgtaacgtttgtagaatttttttgatgaaatgcctttttaattgttgttccaagatgactaagatgttgtggacacacatacaatcataatgagccttgtaatttagctgcgacaacaacaccaaaaagccaaacctagttatatactccctatggcaaatcacaaatgatattcaaaaattaatgatgtagtctaagcgtttttgttacgtggatatctaaaagttagggatcagtttccattcgaatgattcgacaaatatttcgttttgtcacttgcatatataacggctatagtctatagattccagatactggtataaataaaatgagtaattgatgtaatatttttctattacagtatgtgatgtcccccattgtggacacatatcatcagcatatcagaaactattgttgttttactcctcaagattttgatacaagtacaaaaagagttatttccatttcatttgaaaccataacacaaaaaattatggacttaataaaatgttgatggatccaataacttagaattctaaagattttagataatttgttacaaatatatacagtagtaccaaatttagtagagtt

SEQ ID NO: 48987 - DNA, 443 bp, Arabidopsis thaliana landsberg
aaaaacctcatccctattaccaaacacttttatttccaagtatttaaattttatttctgtttattttcttaactcaattgggaaggacacaaaagttttttaatatgtaaagttaccatatttaaatatttcgaatttttataaccaaatatagatattttgaatatatattatattaaaatgcatcgatttgttataattgaaataatcactaaattatatgactaacaattggatcactttttacttggcattccatttatacataaattaattgaaagatgattaaataaatgatttttagcatttacaactaattataaaagagatcatgaaatctctatgttgtctaataaaaatatttatctaaataaacaaaccattatgtgactttatacatttaaaacagcaaaatacttttttttggtgataataacagttat

SEQ ID NO: 48988 - DNA, 911 bp, Arabidopsis thaliana landsberg
  unsure (1)..(911): unsure at all n locations
taccctatgctctgctctcaccgtttaggagagttacttttttatttttgccactggaactgtaacatacagcatatatgattaggaaaggaacattgtgttattagccgagaatgtaaccacgtatgctatgtaattgtaaacattagatacaatttagtgaaaacgttaaaaataaaatattgcttgcaagaaagaatattaattcgtttagggactactggagaagataaaaaatgttgttaaaaatgtcaacacagaagctaagaataaaagttttacttgtgggaagatcacacagcatcatccccaacaacgtacctacgtgtaatgcttatagttttactcactggacacagactatgacaccgcatattcttcttcataaaataacaaatttttattgacgcatcagtaaaaattcagatgattgtaacaatttctcaattttgcggccactcaacgaagaagaagaaaaggaaacactcaatgatcaaaactgaataaatgaaacgagagagacaacagttccatctccatgattatgaacagagaaaaaaggtttcttcttaataaaagcaacaaagaaaaagtcgaacttttggtttagttagccgctctctaaagaaatgaaaagtaaagaagaagaagaagaagaagaagaggaagatgatggaggagaagggcaaaaagggaagagatttttagaaaagttaaggagaagagctgtttttgtagggcatagaagtgtctttcgccgaccttccactcctgtgcacattagcttcaaccctaataagaacccttcttctgcctcctctagaaagcttgctgcttctctctgggaatnttatcagtattacgacaacgaccacctgattccttctgctgctactaaaatgcacagagct

SEQ ID NO: 48989 - DNA, 691 bp, Arabidopsis thaliana landsberg
ccttatggattaaaatttttatttggttctgtggccaaatcctaaagcagtggaccacttgagaaagaaaatcgaagtctcaactgaaaggatccatgctgctaagttgaaagaagaagaagcgcgaaaggtttctttgtctctctttgattaatatatctcaacgttttctattgttatgttctgtctgaccttacatggcttgtagacttagactagtattaggtggatgtgatgctgatatctatacctgttaatgccgcatagcagaataagtcagatgactcctatcaatggatatttcaaatatcatggtctcacggtcttgtaattactttcaaacatgactgagtaaacgaatgttttgcttaactttccttttcaagttcaacgatgctgttagttttactttccaatgacggagtaccaagtttcatgttgtgctgtgacctataggcatttagctattcttcagattgtttaacccctacctctgaagtctagagattgtaaattaacttctttctttttaggcatttgaagcagcatcaaaagttgtgaaggatgaagaagcaacaaaacagagtctttgcgaagatttaaacagtctggtaaatatcttttctgaaactgataatgggaattgattttttcccattgagcgacattcaaatcactattttttgtaaaa

SEQ ID NO: 48990 - DNA, 697 bp, Arabidopsis thaliana landsberg
atattgtagtactacgcatgatgtaatatgtgttttagacatgatcacatggactatatatgttcacatatccaaatccaagtgatttcatgaaaaatcttcaatgttatatgctcttttgttgaaaactacgctgattcttattttacggctaaataagtcatacaaactttcaaatgcatatataaaggagtttgactcatttccctccacagcagcaaaccaacgtatgagggtgtggggtctgctgccaccgtccaaaccagtaaataatataatttatactattttattgtttgaggtttatatcaaatgtaattaatatctttgaagcaaaaaataaagaattagaatgtatggtaaatgatttaccatagaatatttttttatcatttttatgtaatatcaaagtttgatatatagcatgccttcaaacaaaatttgttttagattcgaaattgtgccctcatgtatatatactacaatttaagctatagtattctactatgtacacaaaaataagttatgatgattgttttttagttccttaagctattgtattttacgatgtacacaaaaataaattacgatatttatagtccatgaatcatcttactacacaaactctcttttcttgaggtccaaaaagatttttatttttatttttttttcctttttcctgatggcttcaaaattt

SEQ ID NO: 48991 - DNA, 379 bp, Arabidopsis thaliana landsberg
  unsure (1)..(379): unsure at all n locations
tgtttaaatgagatctaagttactatacaccactcgtgacttcagctacgtgagtcatcagcgaacctatatgcgtggtcagttaatataactgagagcttctcgaagatacgtagctcgtcacataagctatccgngcaaaaaaatagacgataagcgagnactaagagagaaaaacaaaagattaagtgaggcgtaacatcactacttgataaaaaagagaacactaacagagctgccactgtagacgatcaggattggttctgatatcttgagtaatgaaagattccatagctgcaagcgtatggttgggangacatctaagcaagagaatgtgatctgggctcanagcgttttacaaagctgcggatggcgatga

SEQ ID NO: 48992 - DNA, 460 bp, Arabidopsis thaliana landsberg
catgtaaatcaatttttaacatattgtattgccattattgttgacaaattatcatattcccagttgaatgggtgcgattaatagagagttgtacaatttgcaggctggtaattgtggtttgcttttggtgaattttatccaatatggagtgtacaaaatgacttcaagaacattaatttttttcagattcctaacagcgggaagtcaaagtttaatcctagcatcctatgggttctaacaatgggtaacaaattttaagtcgaagatacagaaaggcccaatcgttgctttgggaagcccgtctttctctctcgcttggtgaagtcttttagatctaggattttactttattgagcttcatcttcagcggcggcagatctacaaaggaggtgcagaagtgagcaagttctttctcggacagcagaggtgtggattcttcccctttcgagggtgttgtggc

SEQ ID NO: 48993 - DNA, 2089 bp, Arabidopsis thaliana landsberg
agactaacattgtgaaggaacttgaaggtaaagtcaaagacatggaagctttcgttgatgtgttgcaagaggtaaaggaagaattattcatgaagtcgtcaaattcaacatcagaggttagtattgaataatgagattctagatttaatgattcagtttcttttatgttgattgccatttttttgttttgagaagatggtgagtgtagaagattatagaaggatagtagaagagtacgaggaattaaagaaggattatgcgaatggagtgaaggaagtgattaacctgagatggagcaatgcttgtttgagacacgaggtgatgagaaatggaaccaactttggggaaatcgtgttttctccaaatggaaacttgcatgagctgggtttggaggatgatcaagtggataatgctctggcattgatgagagtagctaatgagcaacatgaagagaatcatcatcagcatgaatcttcgaggaggaagagattgatgaagaagttgaagaaatgggttgaaggaaatgagaaaggaaaatcaaaagcagaggaaacttgtttcggaaggcactatttgacagtggaacctgaagaagaacgaacatttcattcaagaaggtcttgttctagtgtgtaatagcattgctttacaaaagaagcatgttcatgaattattcatcatttctccacaactaacatagtcattgaaatcatttctgaaactgtatttcacacgaaaataaaaccaaactagaatagcaatccaagaactgaaaccaaaaaaagaaaaagagaatcccacaagagtttatgttgcaagtagcaaccgaggtaactagtttgttttccactttgttcttcacttaatcgaaacgccagcaatgccagacgccaagtaatcagaacgatgagtgtttggagcggtcagatttgtcttggatgatttcagaacttcaaacgcttcatcaactctaacagacaagtcttctggtgatttcagcaaaagaagcaattccgacttgtccatttccagaagcatccctgtgattttgtttgcaagctggggctgcaaaagaatgataagtacagtcactgaatatgaatatagtgttaatcaacattaccaatcgtatgtgactatttacataatgatcagattcaagaacaccaacctccagtttctcgacaagagggtgtagcaactctccgagcaattgcatctccatcccaactgtttcagactgtctctgttggattgatttcttcatttctttcccacgaccataggttctgctatgctgcatatgctttacaaaagttataatttgaacctcttacgcaaggtatatggtaataagtaaaccaaattacctgctgcttcgaaaaatctcttgacaaggaagcatttgagtagactgatacacatttggcacatacgaaacagcattcctatccaactttcctattctgttctgcctattcttacttggcgcattagcaacctaccagatatctttgtgtcaaacattatcattatgaatattctttcgatatatagtaattctaagaatatataccattgggggatatgtgactgcttcagagtttgggtatgatgaaccaatcatgttagcagacttccacatcagcgggtatgattgatataccatcccgggatgagtgtttgtgtagtaaagtggagcgtatgtccctggattgacagaagctgaagagctgctttttctagcttccacacgggtcccaaattgaacctgtaactgcatctttctgtcctctttcttttgagcaatagccacatatagtggtttcccgtgaaacatttgccctacgaagcatgaaagaaaataatcatatgataagatgaaccaagagctatgtcataattccatttatataccaacaaattatgatcatgcggcttaccatgaaaggttttcacagcatcaatagcttcttcaggtgttgagaagcacacaaatccaaaccccttgctttttcctttctcatcacacatcagctttgtcgaagtgaaaatggccaacggtcaaggactgagtctccagacagta

SEQ ID NO: 48994 - DNA, 775 bp, Arabidopsis thaliana landsberg
  unsure (1)..(775): unsure at all n locations
aaataaaacctttgcctcatttttaaaagtacatatcatctccgttactgtttcgtctattaaaaaagtaacacggaagcaatgtgatatactactaggcaatagctaatcaaataagtaaattaagtaggactacaaagaaaacataaccaaaacaaaaaaagtctctcaatggtttttaatccggacatgcaccaagactgctgtttctaactcagaagtcagaaacgatggacaatctgacagcatttgtttttaatccatcggaatccattcttcaaagtcgatttaactttaccttcaactgtataagctttatacctcgcgattctcttcttcctcttcatctccgcatcgcttaaacctccgattcgcaaagacgacgacgcgttgctccttcccgccgctacttttcccggcggaggcggcagtgacggaggataatcccgagtcccgtagatctgatttctcttaccactcacgatttccttcctccgatcaacgccgtaagttctctgacccgacccgtacccacatccatcgtgactatccatttccctttaaaccggagctccgatcagattatttattccggcttgaggaaaccaaacaaaaaacaaagagcaaaagtgaacagatgatgatgatgattaacacagctcttatttggccttttttcgttttttaaagtttttactcctacttanacanacatcaaattaagctctttttttctttcaattagtagctgtaattacacacattttataatagt

SEQ ID NO: 48995 - DNA, 427 bp, Arabidopsis thaliana landsberg
tgatgataatgattacaactttatatactgttttggcaataataagccaataatgatatctttcttctacattttcctgctttaccatttttgttctgataccaaaaggtttaaatggtttcgagattcaaccaactttgaagagttgttaatgcagttgcagaagcatgttaaccgaaaatcattccaaaccggagaatatcaactcgaaccagaataccaaaccggaaattccaaaagtgatcgtgctatgtttaagttaaaatttaaattaagcaaacaccggagagtgattggatcggggaatttgggaaaagtatggagaagaagacgaaagtgctaattgtgggaggtactggatacttgggtcagcatcttcttcaagctttcgccggcaactatggcggtgaatgtgagctatacgacg

SEQ ID NO: 48996 - DNA, 1485 bp, Arabidopsis thaliana landsberg
ttggctaaaatattaaaatattgatatttgaaggattaatataaacgttaatgaaaaaagcaagttgagacttgagagaataagtgaaggttgcatgtgaacaaatcatttgtatgggcttcctttgtcttcggcaaagtgaccttttttgtgtatacgaaacttggatatagatgaatatatgtaaggattaatcatgtaacatcttcaggatacattaaataaatttattatgattactttggtagaccaaccaagaaagtactggacaaaaatcatatagatttaaaacaaaaatttgtaaagattcaagagaagggaaaacttttactattttaatttgtagaaaatttagaagtagcttatgttatcgcatggataatgctgaatttaattttaagagaccgaccttcgttgacagtgacgaaacatgatgccgagaattaataaacggttaatcattggctgattatatatgtaattaaggcaaaactaaaagccgaagtactagtaagtataattattatatatggtgttgaaactaagttgtggtcctgcagcttcagatacattgtgcacttgggtttgacctagctagttaattagtgacgaagattaaggaccattccgtagcaaaaaaaaaacttataaaaaaacttataaaaaaaatgaatattgccaagagaacaaaacaagagtttgatttaaaatttgagtatgtttctacaaacaagagcagatgcttttgatgaaatgagtagaggatgaggggtttctaattataagttatacttgttggtacaataacttaagacagttatgattatgtcttctactttaagattaaacaacacctgataatcataactaagttcaattactttatcatttctctgagtttattaagactaattctgtttaattatgtcgaatattaaaataagaccagttcaattggtttcaagtttttggtgtatagaatagtacattcatgattcatatattaataactggttttgtgatttgtgatgaaattagctagagaccctctgagtctgttgatctgctcatatataaatgacaacccaaaatatatttaatggtctataaatttataacaaattttgaaggttgctgtctatttaagtccggatggtgacactaaactacatatcctatcattttatttcatcaagcatgaggcctatagataaggggaacatgaattatttagttgaatactggacttgattgttggatagtattatgttgcagtaatttacgtgagaaacgattatattgtacgatttcaaaatgatgattcatgtagtttatagtctgtgagaatataactggggacgtatatgcaaatatttgttgaggatggatacgacaattattatggacacacaccataaatatttattttctttgaaatattttaaactgaatcatttatataatatgcacatcttatctgaaaat

SEQ ID NO: 48997 - DNA, 569 bp, Arabidopsis thaliana landsberg
ctcttttttaatttccgacacagatgcatcgtaataattattggcccagtagacataggccccggtaataagccaggagaacacgatgatcccgagacctactgtgattgcaaggtttacggagtcaccgaccggcatttttaacaaaccattatcataggctatgaccagcaggaaaccgatatagacgaccagcataataaaggtgaatgtcagagagactaaccatctgttttttaccagctttttaaaagccgcgctttggagaatttcatttgttttactactcattgtttataggtgtatttagttgatttgattattcattcgtaaaatgatgatcttaccggggcgctttgaacaggaagccaggcatccggcaaaatcagttgttaagtctatgcaaaaaaaattgaaatcaaaacagaatctgaattaaagttttacagatatataaaatcgttacgtcacacaagctcaggtatttcattctgcccgggtaatattctgttatatcctcagtctcacacccacccggttcatacctttgggtatcagtacacataaca

SEQ ID NO: 48998 - DNA, 390 bp, Arabidopsis thaliana landsberg
acaaccaccttacgagttttattatcacatgttccatgccagatagatttgcaactaaaacaacattcatctttctttatctctcaagaaacaacaataatgtacagatacacttccgctggaaaaatcaaactgctcatacgctacgtttaatgctttcaaactcaaacaaaataaatcacttccttgggatgggaaaatacagtacccgtgaggtcccgacttgggggaatcacacggtggctgctgatggagcttccccaatgtgttcccaatatataatccctgaagtccctattttcgccatatcatgtagacctttagagttttaccaatccggttcaacgttcctgtgcactcaatatttatcactatatattgttggcagtg

SEQ ID NO: 48999 - DNA, 1255 bp, Arabidopsis thaliana landsberg
aacaaaatgatcgcgaaaagggatcctaactcgtctaaaactttgattatccagaattatttttaattagaaagtggatagcatataaattcattatcatggatcatatatgatcactttattgcttctttctccgattacatatttacagaataatttgggatttattttaatatcaatggaaggaacttatgttgttattttatattttaatcggattcgcataattaaaagatattttttttctaatggctattgcataaattttcatactttggttttcaaagtttatgggtacatcgactactatgttaaattttgttttatatcaacttattgtaaataagttataaaaacatatgagatgatcgcctaaaggttacaaattataaaacatggtgtgtctttaaatataatgcgtcaaacataggattatgcattttcacaaaaaaaattgtttgaaattttttgagtcgtcgttaaattgatccaatggatataaaaagaataacatacaaaagagtttggtaagaaaaatttagttgcggttttcgtcaaaaagacatagaaaatgtattatagcaaagacttttgccgaagaacaacaacaacatggtaatacattattactgtctttatgaatttcacatactgaacaaacatctataaatggaagaaagggttaacaagaacgaagaaaaagagcaaatagaaattagacatccaataatcaacttagtccatttataatcgtttattgggataacgaaaatattttgtttttacaaagttaaattcttaatacttcataatcatttagagccattaccgaaggttaagattttttttgttggtgctgttgtgatcgaatcttggataacctctgtcactaatcaatgggggtccaataaactgtatcaaaaccggaataaaccgaactaaatagatattttattgtcgtaattaaatgaagttactgtacaggcataaaccctaacggtctaaccaacgcaatatttaattttgttatactgactaaacctcgaagttagtgcctttatacgttcgtttactattccttaaagtgattcttctcattccctttctactctttcatttcaagccatggttagggttccaccttttaaaccctccaaagaaggtgatccagagttggaaactttcaaggagcctaatcttgattccacagtcaggtttgggtttggcgaagaacttagagtgagctccacacctc

SEQ ID NO: 49000 - DNA, 580 bp, Arabidopsis thaliana landsberg
  unsure (1)..(580): unsure at all n locations
tactcgaatacttggattaaaagttgttagtcaacaaaatggttgtctaacatcaaatcatgcaatttggtaggtgacgacttgcacatctcctgttttagtagttcggaagtggtccaaacgaaagggatttatgaactataaaataatacactattattatcaaaccattacatattgagactataatataattaatttaccacaaaacctgaattacgcattgactaactaatatccaaaatagggaaggtcatctctaatgtctatcaatactgatttattgataccatagatgtttcacaaaccctgaagtaatatcatccaccaaatcagttttgttttgctaagatgatggagatgggatggtgattggtgagaatggtgcggctacaattagaagataatggatcattgtggttagtaataatttaacatcacttagagtaagtggctttattcaactcgatatatatatttggttaaattcttcaactcgatatatattcttcacacactccctanatagaatattcagcaaataatagtacgacaaaaagaagcatccaagtccacacta

SEQ ID NO: 49001 - DNA, 913 bp, Arabidopsis thaliana landsberg
tactgtgctctctcttgtgccatggctcgtgcttggtctagattcaacctcgagaagttcaagtctctatctgatgattttcttgactgtacaaaatttaggatcagccatggctgatgttgtgattgatgctatgatagctgaggcagtaagacttgaaaagtaagattctatgttctttggttttggatccgcacttagatcatagtttaatgcacttagttgattagttgagttgttcttttattgtttatcagggcttcgtttgctggagatcttcagtctgtctcatggtttgcgatggctgtgggtggagtatgcggtagtttattaggaggctatgcgttatctaacttgaagattgaaacaatattcctccttttcactgtattaccggcgctacagttactatcttgtgctctggttgaagaaatttctgctaacgatgaaccattgcctgagctgttggattcgaatgagtttgaagagaaaagcatgatgagcaatgagaactttcgagatacgagtaagtccaatacaagaagaaggaaggggcagaagaaaggtaaaaaaggagcttccaatggaaagtctgagacacagaagaagcagtcaaagtctttagcttcacagtggttccagtcactgaaagcagcctcttttggtttggaccgtgcgttcaagcaaccaataatattacggtaatgcgcgctatcttaaatagtcactctgaaatttcatgaagtgttgcgttctcattttcgttctctggttgttcagaccaatggcttggtttatcattgcgcatatcgctgtgccaaatctctcgacggtcatgttctataaccagaccgaggtcttgcaattaaacgcttctttcctagaaacagcccgtgttgtgattggttaggtg

SEQ ID NO: 49002 - DNA, 730 bp, Arabidopsis thaliana landsberg
ctcctgaaaaggagtatcagaaaccgcttctctattggttatttatggtggggtgtggaaggcttttggcttcctattaaaaattacacgccctcacatgattatgctaataaatagtatatagaaataagacaacactcagtcactcacgactcacgactcacgaacaaagaacaaagttcatcaccttatctttttatctttatctttatttactttcaagataataaaaggtacgatgttctttgtatgaacacaaaataaaaagaagaaaagaatgctcttatacacgtgtaatatatgaaaagaatcatccaactaactccattaacgaactctcgtcacattatatattttacacatcatcgtttaatagacactatacgaaaacagtatagtatttctaaaaagacatccgaaagagaacctgcgaatcttggcctttaagcaacctttggctgaagcaattcttctatcctcctctcctttttcatttatttatcaaatatactccagtttattcttttcttcccactttcaatgcctctcatatatgtaaaacaaatcaaagtataataactctcaaaacatgtaacttcgattcctatctattagaaattgacgagagacatgtcgagaacaagagtgcgagctgtgacccatcaagatcttgttccaaaccctaaaaccacagatctcagcagcaaaaccggtattttcatcgctgttt

SEQ ID NO: 49003 - DNA, 479 bp, Arabidopsis thaliana landsberg
actcacggtgacgcaaacactatggtcaaactctgttttatcactcctatttttttttatttaagtgtttttttctaacaccccaaaaaagaagcaaatgaagtaaagaaaaagtcacccatttgtattttgatcaaaggtatataataaaatcctcaagaataggtttatcgaaaccaaatcaataatgtttgaccaagaacatgaataaaacaaaacaaaaaacatgaaatcgttgagaatatttttgaaagaagaaaaaaaaataccgaaccgggtagttcgctactactacacaacaacaacaagagcaacatacgtttcgttcgatgaacagaaacactttgggagtatcggttcgtctaaccgtttgttttgtattgggcacgtgttcgcatgaattcagtctcttaatcaggctttttgactatatacatccatgcttgccacatcacgggacccttttctaatttaattta

SEQ ID NO: 49004 - DNA, 1957 bp, Arabidopsis thaliana landsberg
tttccactgcctcttgtgtcctccagagactctgattccaaactattagttacggccttatcttgtgatcctttgtactttttgtttctctcagagtcttccttaatatcctcaccagaatctgacacagctgtttgactgcttcgtttgggcaacttcgattgatcctgaactactgatagaaaaccttcaaatagagatgtgtaagcttcccggagagttttgcaccccttggtgtagtcgttgttaaggttgtctggtcggtttgggttcatgtttggtcctagaacatgtatgacatgtgtaattccttctgcattgtgtaatggacaagtagaaggaagaggaactaccacggcttttccaggaagaagagtgtttgctcgtactcttgtcgcagtctcaagatctggaccagcagctttgaatattgctgcattcacacctccacctccaggtttaagccgcctacacatttagctttcaaaattagctatccagtgaagatgtatatactgaagatcaagaaaataatggaagcttaccagttagtagcattagctatgacattacagtgtagaccaccttcagaacgaagcttagttatgtccccaacaaatgtgaagaatttcgctgaatcaatgttcttctgagaagccttagccttgaccagagatagaatctttgacccgcggctcaagtccaccaagacgagacgcgcagtcccaagtttagacaagaactcctctgctttctccacaatgatatcagaagccttttcaagatcaaactgaaaatccgcagtcgaaattgatgggaatgccagtgtaggtacaatatcagcagaaccaagcttgactggcgaaactcggacatttgctgtcatttcatcagctttccgagttgtgttagtagcttcattagaagatgaagcaggcagagcactgactttcttaaagaacttcattataccgggttggcttttagtatctaattttttttcgccaaaacagccagaaggaagggtatccattggaccaagcttgttatacatgttaacagcattatcaacatcagcgtcactgtaacaaaacataatccgagaaaacccttcattcactttgggaagttccttactctgaagcatcttattcacaacagctgcagctcttccaccttgtagatttccttcatgaccagttcttttaactgatctagatatacaaacctgagcaggaagctccagaaccactgcatgaacttcgaactcaggaccaccaagcttaataaactctgaacgttgctccctgtcaagattgcatctgtctataaagacgctcttgccttccctaagagaatctgtagccatctttaaacactgagcctttgttccagctttgccattgttaacaatgtcctgaaataagttaaacaaatgaaatctaagccaacacaaaattcttacattgatagcaaccaagacagatatttcttacataagttttgtaaatacttagtctcgttgaagaatttcatcagtcagcttatgtgcaatataaaacaatcgataaaaaagagagacctggcagatacgagaccaagggcggtgagaggaacgcattgcggtgtcacaaaacgtcgatttgccgcttcctggtggaccaatcagaagcaccactatctgcttcgctttgtctgcttcaattgattccggaaaggtttgatttttaccagattcttcaatttgcacttccatcttctctcgttgatcggcgaattcctctgtttctccgattatacaattgcagtgccctcgtaatgcgtgtcgtgtggcacgcctgtatttgaaatacgtgacgtcttcgcatcatgaaaacgacgtgctgtttcccaaatttacattaaaacgcctgtttatcttttttcttttttttggtaatccatgtttatctatttt

SEQ ID NO: 49005 - DNA, 731 bp, Arabidopsis thaliana landsberg
ttgactcatccacatcattagacgaaaaaataaaacgatctattcaccttcctagttccatctgaagccgaacgaatatccttaaaagataatgccccaaactcagcatgttcactaatcattctcttgagatctttgttcaaacctaaaagaatgaacacataaatgaaaaccaatcctcattgctaaatcacaaaaacttctgagcaaagacatatcagaagacaaaccttcaagttcatcaacattatttgcccatatattgtccttgtacaatctcttccacaacattaaagcctgtcctggtctaaacccatgagattgaacccattcctacaagttgaaatatccccaattccacctcaaagatcataaaccaaatgaagaaaagattgagaattgcaaaagggacgtacttggagcgaagcataagtcatacccttcaagaccaccttctggttatcatctctcttcacagaaccttaaagatagataattactacattcctcagcaaactttaactcaaaatccgaagttgaaacagtggttaaacaaaagtagtcacctttagctgatgggtactcttctagtgaaggaagataagctgctgaagaagaagaagaagaagaagagaagcaagagaaggagaggcttctggattcgtgaaagagaattgaattggtaagaaagacgctgaggaggggagagggtaaagttagggttccgcgga

SEQ ID NO: 49006 - DNA, 542 bp, Arabidopsis thaliana landsberg
agaaacaaatctgaacttgtaccacacaaacaaagatctctgaaacaatcaaaactatctttctctaatgcaaggctactgacatacacaatcagacgagtagacgcaaattatcgaactattaaatatttggagcctaaatttgcttaagaaacccatctattattcagctcacaccactgtctgatgactaatcctagtaaaaactccatcaaagtatagcactatacagtatgatgccaagactaaagctttatcggtttagctgcttcctgttaataaagtcaaaaccttgcacactgcagtggaaacctaagcataacccgtaatcttttatagtgccaatgttggtaataagaacgcagctaaacaattgggaccaagaatatcgaatagagaacaaatctgagccaaattcaaatccttattcttctatatacccagaaaagcttaaaatcataaacgatattaaatatacagcataatcaaatgagaaatgacctgtaaagataagccgagcttggaagaacctccccggatcc

SEQ ID NO: 49007 - DNA, 847 bp, Arabidopsis thaliana landsberg
aattatttaccctaattagaaactcataaggaaacagagaagaccataaaaccacaagcctattttttgtcttttcaacagtttctcactagccggatttcccgccaagccttagaaaacagagcaaccaaaataacgaactcttaatttgtcataaccgttataaataagccatctagaccaattatgaaaattgcacactcccaaggaggctacgtaaccttcgacggaggagtccataaaactcacattctcatttttttctcaaaagaacaacgaacagctcttatacttttttacaataattcttcagagctgttcaagttcaaaaacaatttgataaagagaagacaacacaaatattaataattgtaacgaaaaaacacaaaacaaatatgtcgtacggatacgacgatgaatccaagaggaagaggaggtacattgttatcaccatctcctctgttcttctaatctcgatggtggttgcggttaccgttggtgtcagcctcaataagcatgacggtgactctaaaggtaaagcagaggtaaatgcttccgtcaaggccgtcaaggatgtttgtgcaccaactgattacagaaagacttgtgaagacactctgattaagaacgggaagaacacaaccgacccgatgcagttggttaagactgcgtttaatgttacgatgaagcagatcacggacgcagctaagaagtcgcagacgattatggagcttcagaaggatccaaggactaggatggcgcttgatcaatgcaaggagcttatggattacgcgttggacgaactaagtaactctgtcgaggagcttggaaaatttgagttccacct

SEQ ID NO: 49008 - DNA, 1293 bp, Arabidopsis thaliana landsberg
cccttggatgctcattttcatacttataaatatctatacatgtagtgtttaccaaattgggccttaaagactttattatccaagctttttgtaaaagcccattaagaaaacagaaaacagagaaaaaaaaaacatttctatttttctttgaaagcattgtgatttgttattttccccaagggctttttgtcggagccacatgatcatctgttgtagatttggaatttgttagcttgatgaatgttatattattcgttaaagaacgagttttagctttatgtatttaacatttttattgcaaaattgcatttctctgctagttttatctttttttctaatctgttctaacatggcttattgttgttcatgttcaaagagagctacttacttttcctattttaatgtaacggtcatcaatttgtatgatgcatatgattaaaggttttctttttatcatccttgaggaacactactctgaaaccatcaattggtatttgattgttactttttccacaccctttctatgattggcttagaatgcaagtgaaatatagcttttgtctttctaaatgatttcttatgtaacttttgtctgttgctttcattacattcacaactacttgattcctatgtcacttttgttgtgtggctttagatctgtaagagcgtaggctaaaatttttgacttctctatctagagtttgctattttaacttctctctgtgtaaaagttcataatcagtgatagtttcctcaagaagttgaagttagattttgctgtgattggtaagtgatcttttctatattcatttgcattatctgtttgttagcttatttggtatgttacagtactgatacaggttcttgccttgaacaaatcttttgcagaagttttgtcattctctgatggtaatagagattagttaatctatacaaaagcagtcaaaagatggcacagagttctgaaaatgttcttcctactctacgagatttcttcgattctaaaaaggctggggaagaggacgagtttttgttttatcgggcgcttaactcctcgtgcaagaaacctccaaaaccgggaaacaaggcgaaggagagacatggtttcttcaatcagggatccaaggagagaagaagaaggaaaatatcagatgctgaaaagttttcagtggaacaatattcttctggtggttttttcggtgtacggttgaacacgaatgggagacaacaacaacaacaacaacaacgattagctaagcctttagttacagagagaaacatggaaccgaggtt

SEQ ID NO: 49009 - DNA, 1757 bp, Arabidopsis thaliana landsberg
atctgacagtgcttatggacattaatttgtttttaaaatagtgattttagaaatggttaagagagaagcagcctggagatggttaatgtctaaacatgtaccaatgtcattttataatgatcacccacttaatcaaaaaccattttataattaacttaaatttataatcttggattctcctttatgtcatttgtttttagctctcctctctctcttctctcaacctcctctgcattttctggaaatttttaatgagtttttttttcttctttagtttaccaagaagactccagtttttatttaagatcgagttattagagaagtataaatataacatgggttacattggatttaagagagttaaatagacaagagtcagatttaagacattgaactttgagcttaaaagaggttgttggattgaagaaagggaaccattttcaattctcttagtactttggatgtttgtcatatactgtttgtattttgtggtctatagaaaactccaaacattgtactatattgagtattgaatcatataatactatcattgctgcaattaataggagaaaaatgtcaagagaatattttacgtaaaacatattttgggttctaagtaagtgaaattccttccactatgtgattatgaactaaatttctaacaatagtactaacataacataagtagtaacctagtagtatttgacaatttttcttatcaataacattttagtatattgtaatttgtaagataaactcctcataatcgagtaattatcttttttttttaattcaaggtggtgcatgtatgtatgtgtacactgacacaacatttgaaatctgatttcacagtgggaattggtccaagaccagtccacttgtgactttttatttatttaccccacacattttcacatttatctacaatcataagggactttaaaaacatacacattacacacacacacacacaaaaacaaaaaatttaccatcaaaatcttggagtgtgtgacgtatgaacaaaacaagattgatactgtatgtagaaaagtctcgttatcaaacgatgtggaagcgtttatcaaacgctcaaggataagtctcgttgtttccatacctaaaaacggcaaccactgtatatagaaaagatgtaaacgtcaaaactgaagaagttagaaagacgagggtaaattagtaaaatagtcgagatcatattaaagtcctaacggtatatcacacaccgttgaattccagatccgaccagataagatcacgtcgaatcgaacggtcataaaatatccgagtagttgctgaagtatccagcggtttcgccacgtgtcccgaccaagtcgctcacacgttcgtatttctctattacaaaaaaaaggaaacgaatcaaaatgttttttgatcgtaaccgggaaaaaaaaaacgatttttcgcaacgaaactttccacaatcaacggatatagagagagatctctgcgaatcgtttaaatcgtcttctaatttcgtttcggtctcttcgtaaaggattcacctctgagtggttttgcgttccattttattaggcacgtcaagctcgaaactctcgattcattggattccgcacatgtgattaagctgggaatagagttgaatgtacagaagcctattgctctatttttagtctgcaccttcggttttattgaactagccactggtacatactgcaatggtggctgtttatcttcgagattgatcccatgtgaaaagt

SEQ ID NO: 49010 - DNA, 2279 bp, Arabidopsis thaliana landsberg
ctgcttgcatgcattcaccttgaaaattgtgtcatttttttcttatggttgttactttattttatttactaaacctttgtcaacccaactgttgatccctggttttagttaaaccaacaattattaggataaacacatacttttaaaaaaaagtcaatgggtatccaagaatgattagtttagaaatttaaatatatgaaattttgttaattttcaatttaaatgttgagaaatgaaaacaatgaattgtcaaagaaaagcaacttatataatgcagacaataatgatatccgattgagtagtaaataatggagtgaagatagagtaggagacagtgtgtgtccacaaactctcacgcaactcgcttctgatataagaaacaaatttctttgacttaagccttcttcgatctctttgacctgtcagtcttttctttttccatattaatacaatcatacactgatacaccacaatgtaataatttgcggaattatgtctattagaagagacacgggtgtttattttttcccgtaattgatcgatatcgtcggatacgagtacttttgaaatggcaaaaactcacaataatagacataattccgcaaattattacattgtggtgtattcaagatttttccatgttattaacgttcagtgccaaaagcctatccaataataataataaaaaagcaaatatgatggcagcttctcaatctcgaaatctagaccattatctcttacttttgtaagcatctgattattcatatttgatatttctaatattaaataccattcgtatcatatacataagttgactaaggaagagagctagatgatgatgttcattcattttggccgggacatactttgtgggtcagatcatttttccgatcaaagagaacgtataaattacttaatatcgtcactgaaaacgaaccatcaataataatacgattcagacaacaacacaaaagaaaacgatattaagtaatttttttttttcatcaatctcagcttatgcctcataggttggtgctggaccatggatcaaaaacaaacacactaaattgtaatgttttctagtggatctctccttaaacaactagacaaaactacttatttgtatatatatttttaactattaaaatccactttttatgtaacaaactagtcataaatatacatatgtcaaatggaataaagtaattctaatcagttaaaaagtgaattcttcattacaattcacacttatgtaatgcatttacatgcatttgtatcttctttgaccccaagctcacaaactctgttcacttccactttcacaaataacagagtttcagaaaatagagagaaagagagatggaaatggaattgacgcaattgagaaaacaagaaagcaacaatctcaacggcgttaatggaggattcatggcgattgaccaattcgtcccaaatgattggaacttcgattacctctgtttcaacaatcttctccaagaagacgacaacattgatcatccttcttcttcttctttgatgaatctaatttctcagccacctccattgcttcatcaaccaccacaaccgtcgtcacctctttatgattctccgccgctctcctccgctttcgactatccttttctcgaggatatcatacactcctcttattctcctcctccattgatccttccggcttcgcaagagaacaccaacaattactcaccattgatggaggaaagcaagagcttcataagcatcggagagactaacaagaaaaagagtaacaagaagcttgaaggtcagccttcgaagaatcttatggcggagagacggcggaggaaacggttaaatgaccgactctccctgctccgatccattgtccctaaaatcaccaaggtcaaattccataaacctcatccttgtcacatgttatatggtttttatttttaagtcaagaagaaatattcttccttttttgttaagttcttaacgttacatgtatgttttcttcttgttggaatcttttttttggtacactgttcaccgataaaaggttattgctttttgtgaatctgcatagagtttgttgtatgagaaaatgtatataatttttgatgattattatataataaaatcagatggataggacatcgatactaggagatgcaatagattacatgaaggagcttttggacaagattaacaagttgcaagaagacaaacaagaacttggaagcaactctcatctaagcaccctcattacaaacgaatctaggctg

SEQ ID NO: 49011 - DNA, 712 bp, Arabidopsis thaliana landsberg
aggtagggttctacactactcccaacgtacaatattgttttcacaacataaatttaatttacaagcatggtacatatatctctactattcaataatttgaccgtatgatagtcactggcacactgcaccaaatagttaggtatacaaatgttttagcatgtgtttttcattgtgtataagatatatacgctcgataccggatcattcatagtgagtacaatcatttcatttcatataaaacacatgctagaaaagagcgcacagagaaacaatgttaaagatccaatgtatatgacatattaatggaatgtaatgagcgaaaacccctaaaatggttgctatgtgttgggacaaaaacaacacatgacaaataaatatcagagcccaccacttttgaaagcgcaaagaatcttattcctaacatacacaaatgatacaacaagaggagattaagacatttacataatgacccctccctttgtgttaaaaaggggctgtgttacgcatgttatacctcaccatgactccttccagtctaatctatcgagaccgtccacgattgctctgcgaaactcatcattgtgaagtataaaggaagacacgtgtccacctgtgacccatctcacttctgaaccaggccacgccttttgaagctccaacactgagtgttttggtatgtatccatcatcctacacaaatcatataatcagca

SEQ ID NO: 49012 - DNA, 2087 bp, Arabidopsis thaliana landsberg
gcaaaccccagcggaagatactatatttgggtcttgatttcctcatctgtttacaaaccgcaaatattcgcttcatgccagaatgcttgtgctatattttccacaatgtcagtaacacattcagacatgtttacctttttgaggctgatgtcatgggtcagtaaaagtatatcaaatttgatctcttgattatgcacagatggcttatgaactccatggtctcttggctggaaatgtcagcatcgttaccggagaaaatattaagccttcttacggtggagatgatgaggcatttttaaggaaggtcattacaccaatctaccgtgtagttcaaacggtacaagtttgactgataggtcgatggcattttaagaatcatgatctcgtatacatcatagctaaccttttttatgaactaggaagcaaacaagaatgcaaatggcaaggctgctcactcagattggtccaactatgatgatctgaacgaatatttctggtattttgaacttaagtctgtagattgcacctttacttggtgaggacacctgagtttattatatcatttgcgcattactgttatataggactcctgattgcttctctcttggctggccaatgcgtgatgatggggatcttttcaaatcaacccgtgatacgacacaggtagtctcttgtagttttcatttgctgtttctcttcccccattgatctaatcagtattttttcgattttaaattaatttccagggaaagaaaggatcgtttagaaaagcaggacgcacaggcaaatcaaatttcaccgaaactcggacattttggcacatatatcatagttttgaccgactctggacattctatctattagccctgcaggtaagcaagcaatctggccaatctatagcatgtttcctaataacatgagccagtcaaaatgacatttcgacttttcaatacaggcaatgatcattctagcatttgaacgagtagagctgagagaaatcttacgcaaagatgttttatatgctctctcaagtatcttcatcacagcagcttttctgcgcttccttcagagtacgtgacttcaatgctgtgaaaaaaaaaattatatggagtttcttggtgctcatcatttggttatgtttcctggaaataaatgttaccttgtttcttgcttctatgctaggtgtcctggacgttatcttaaacttcccaggtttccacaggtggaaatttactgatgttttgagaaatattctcaagatcgttgtcagtctcgcttggtgtgttgtgttacccctttgctatgcccagtctgtctcttttgctcctgggaagctgaaacaatggctatcatttcttccacaagttaaaggcgttcctcctctttatatcatggctgttgcactgtacttgcttccaaatgtactggcagctatcatgttcatttttccaatgcttcgacgctggatcgagaattcagactggcatatatttagattgcttctgtggtggtcacaggtatgaaggcttgtttttatttttccctctcttctggtcctgcatgaaaataccattctatttagtcagaaaaccccttaggcatgttaaggttctgatagttgaatttatctgcaactcaggatccattttcttgtgttgctggttagttatatgtatatgcaagtcgagaggaaattttgacttttactctggctatatcaatgtttagttaagtttttgaatatgaattatgctcaggggtatcttatatgttgtttgaatacccatttactgatgtgtcccgtttttccttctcagccaagaatttatgttggaagagggatgcatgaaagtcaaattgcactcataaagtgagtttatggagccaaagaagttcttctgaagactttattgcacataatgaaatttctatcaataggtatacaatattgtgggctaatatgttttctgaaatttccaggtatacgattttctggctgttgcttttctgctgcaaatttgcattcagctactttctacaggtttgacacagcataacgattacgtgagctgatgttcgaactacat

SEQ ID NO: 49013 - DNA, 963 bp, Arabidopsis thaliana landsberg
caaataaacattaaacccaaatgatatattttggtagatcaatcgacaatcattatacaacaatgatgacaaaaacattggagattgatttgagatcagcagaagggcttaagctaaaccggagacccatcaagaaaaagactttcgccgtcgtaaaaatcgacgagaaatgtcgaaaatctaatcttgacgaatcgagaagaagcaatcctacatggaactataaatcagagatgcccatcaatggtaatgaacagtttatcttcattgaggtattttatcgaacaggttctgggcatgataaaaaaatcggagaagctaaaatcccaacgaatgatttcatgggaaggtattcacctgaaggtcacttaaacttcttgagctatagattgagagatgagtttggtgataagtgtgggatcgtcaatctttcgattttggttaaatcggatccgactagggattacggcgcgtgttcgtcgcaagcggcggttactggtttgtggaggccgagattagagacggcatcgattgatggatacggtggccggactgttaccggagttccggtttggggtctgtatcaacgccaattttagtaacttttttttttgggggatgcacatattattaattcttcgtctttgttccatagattttcccaatttggaattgaggaacaaagatgtgtgattaatttttgttataatactcacgaaaccaaaattgaaaatagaaaagtcaaatttgttcgacgatgatatctaagaacttgttgttatagttcgtgcatggtgtgtttgttggaagaagaaaaaaaaaaaaaaagtcttgcaattgttctggtttgtatttaatgattgtgagttattgtaacgttacttgcttggtgatttgttccggatatgattaaacaaatatctagtggtatgtttataatcaatttaaatttgtttgagaatg

SEQ ID NO: 49014 - DNA, 859 bp, Arabidopsis thaliana landsberg
gaagatgttgaacactttgcttgagaatgtctctgtatcacaccagagaaagatctcctatgaattaacagaggattctcactgttcacaaatgggttcttctttcttgagactttagaaggttcaattttgaatcttggattgatctctgatgaatctgaacaggcttgttttgagaacagagcttttatgtaagcgcgtgaggctttgagtttttgtgttatggatgaatgcttgatctttttgctccaactgtttccaagatgattctcgttgctctcgatgaatctcttgagctctgtcgaaatctcaaagaaacaattctcgtcttgtccgatctcacagctactgaatctccgtggagacgatacatctgcggcggcgcgtggggagataggagtttccgttgcggcggtggaggaggaggaagcgagaagaagcttttgtaccattttgagacgaggagggagatgaagaggaagaagttgacctttgtagaaaagctcatcagccggagatgtggttgattcaccggaagctacggcggaggaacacatttgaaactcgaactctctgctttgcggcggggaggaagtgacggggaagctgaagaagcttgaggacgaagtagaagaagaagaagaagaagagagattgacttccatgtctatgtaaccatcatcaccatcggtggacagaacatgtgttcttgattctgattcatgcaaatccatgtctttctctatgtatgtaattgtgtgtatgtatctgtctgtgtatatatttctctctgtggttacttacttctagggagggactgagagaagtgagaagagggaagacatcttttaaagtgact

SEQ ID NO: 49015 - DNA, 377 bp, Arabidopsis thaliana landsberg
ataaggggacgggcgaatctaaagcgctttctattcattttgcaataaccttctctccttggcaaggttctttttttggcaagaaacaaacaccaatgaggaatatgcatactaaccggagatcaccgggtccaatcacgtcggcagcaactcaacgccggctaaaaccggagccagaaccgacggtgaagaaattcatcaagattattctcctctcaacaatcatagaaaaaatgatggtacagtaaaaaaatatttcacccactttttgtatgttcatctttttcatctaaaaacaataataatctgaaacttgcttgcatgtgtgaatttttgacagaaagttccggatagatttgagaggtttgatcctaaac

SEQ ID NO: 49016 - DNA, 805 bp, Arabidopsis thaliana landsberg
caatattggtcagtttaaaatcataccttatatacgtttatttttattgttcatggatgtgaaatttgtaaggaaaattacaataacggtttaaatgtctaaattaacaaaacaaaacaaatatcaagaaaatacaccattgttttgtttacaattacttttcttagggtttaggattttgtttttttccttttcatttaggatttggatttacctatttagatatagtttcaccttttaaaaaaaaacaattattataaaatatgtcctcttctagagagttaatataactcttatacgtattttgtaaacgttttcacagttacatacattaaaaaatttaaatttctaaagatatgagtaaaactctttttctcgagagtttcgattttacatattatttaccaaaagtttataaatttgaaggtagcaaaaaaaattacattgagtgttattttaattttgtataataattttgtattttattagttgtaaaaattaatgaatttgatgattttttatggtataaaaacttatattataaaataacgtatttattacatggcattgctattactacacatatcgttacccataggcagtggaccaccaagtaggataagtcgtattgataggatagcataattgtccctatttcatgtccacatacctttccggccaagtaatgtggttgaagatagggttactgaatcgtcattaatataatattgttatacaataaaaaaggaggagatgagtatggttctataaggcggcttctttgttcaagtcatttgggggtttc

SEQ ID NO: 49017 - DNA, 752 bp, Arabidopsis thaliana landsberg
aacgtgggttgttaatgttgcaagatggccaaaatcccttcgacttgacatctatttattgatcttagattggatcatatcaatggagaaaaggagaaaaaacaaaaacatgtcaattatcacaatgcgtcaaatgaatcacattggagagtaactaaaacagaatcaagagaaacattttgtgagtggttcacttcttagctttttggttagcggaatctatggcggagggagcagcatcaccggagggggtcggtgcgtcggttgtgccgccgccgtggccaggcttaacgtcctggtgaccggaagttccataagcattcttcttgtaatcctctatatcctcgtactttgtatacggacttgtttctagtggcaactcttgtttctcttcactcttcgacatatttcctgacatatttcttgaatttaagtttagcttctttttttttttcttccttgtgtgtgaagacaatatatttggagacgtaaataattattgtccaaagaaattgcacaaaattggccatcgaactagggagtgtatttgactaggttatttccacatttagctaaatctcaatttctctttatttcaaagttctaaaatctaaagcatgcatgcattgtctaatttgcaatgaatggaaacaaaacattcagtaatttaacactatatggcatatggttataaaaagtgaaatatcatttggttaacaaaagaatactatttgtgatacattttcacacct

SEQ ID NO: 49018 - DNA, 721 bp, Arabidopsis thaliana landsberg
gtggtacttgctctggagacggacgcgtgaggaagacaaaacggataagtctcaaagtaccagccggggttgattcaggtagccggttgagagtgagaggagaaggcaatgccgggaagagaggcggatcaccaggcgatctgtttgttgttatagaagttatcccagacccgattttgaaacgagacgatacaaatattctctacacttgcaagatatcgtatatcgatgcgattttagggacgacactgaaagtaccaacagtggatgggacagtagatttgaaagttccagctgggacacaacctagcacgacgcttgtgatggcgaaaaaaggagttccggtattgaacaagagtaatatgagaggagatcagttggtgagagtacaagtggagatacctaagagattgagcaaagaggagaaaaaacttattgaagagcttgctgatatgagcaagaacaagactgctaatagcaccagtagatgattagaaacacgaaaattttgacattgaaattatgaatctctctatacatatacatttttctactctggcttgtgatatttagaatggctcttgaaaaaagaagaagcaagtggaggaagatgattattgttgtggaaatggaagaattttagaattcatttttttgtggttcaaatttttaatatgttaggttttaataggctttcaaattggaatttattagtgattga

SEQ ID NO: 49019 - DNA, 587 bp, Arabidopsis thaliana landsberg
tacttttaataaaaattccatagttcaatgaatctgtaacaaaaccaagaagtgacgtgatatacttttggaactataatcatattgtgagctcaatggataagaattgattgtagtaaatgatgtcggcagttacaagtgtagttagatatatgcaataactcaaatcggacatgaactcattttaacttatctaaagagaccaccgacgaatcattttgggttcacaaaattgtacttcgatttctaagcctgaatgtgaacgcacgtttttgaatatttcaacacgtgtttcatatttcattacatgcattataacataaatattacatctttgagtctttaactagttgaccaacaaaaaaaaaacctttaactaagtctagctagtttttttactacatatataaaaacaaaaccgaaataaatatttaaaatttataatatatttgtgtggctaaatcaatcaacgtgtcatgaaggtctaattcaagttggtaaggaaatcttttgtttatgtccattcccacgtgtcactatttgtatgacggctagagaaagcatgttgaattactagtgctccggct

SEQ ID NO: 49020 - DNA, 1208 bp, Arabidopsis thaliana landsberg
gagcacattgtaaagatcggaagctttttttcctttaatagttggtaaatctttgaagccatttttcttaaaagagaaagctcttgttcgttgcgagcaaaaagaagaatatgtagagactagatagagtatgttatgtatctaatgttggccttggcacacaaggaatttagttttgttttgttgttatactagagttcaagtgttgttactagtggagttcaagtgcattttcattttcagtggagtttgaactccattgtaaatttcttaaagtaccaacgtcataaaatcatatagtatcaacgtttgaaaagcaacatcataagctcattatcgagcaagtgtcaattacgtcccagtcccacaacgtccaaacagagaaatcataacagtataaatacattgagtcatggaggagagtctaatactaatctatatataatcaattcatgcaaataaaaatggaagaagccaccatgcatgaaacaatttgaaaaaagaatatactcagagacgcttcttttgataataatttcaaaagaaaacaaaataaaaactagggacgctgagaataaaaacgataaacaatgacttttagaaaattaaaagtctaaatgggggaacaagtaagtaggaacaagaaatgggaagactaaatttagagatctagttagggacatggacacgaacatattttctcaataagagagaatgaaagatagaatagagaatgaaagatatataaatatgaggataaattgtcatttgatattataaatgtggtattaataaaaaaagtgaaggcaaatgtggtagaaatggaaataggtccactaaaatgtggcatttttgttaatttttccgttgaagttggaactagcaacaaataaaaaaagttcaatagaaggataaaaaaaaattacaaagaagggcgtcgaattcgccttccaaaccattgcatggggcactcttaactctcaaagtcttaaccaaatgagctaagtggtttaaatgaactattatcgattacataactttattattaattagcatggggcgtgccccaccataagataaagcagatttaagagacgaccatgttaaaaaatgatgagagcatattttcccacaagaccaagagttgtgaattagaagaagttgctagttgcttccgccaccaccgaagaggtaatccagagatgagc

SEQ ID NO: 49021 - DNA, 674 bp, Arabidopsis thaliana landsberg
agggatttgggatcagttgcccttcaattttctcaatacgcaagccatgaccctaatccatcccaagaaaaaaacactaaatttgaaatcttaaaccaagataaaatgctcaaaactaatacttgatcaatcctaagattgcccttgacataattcaatcaattatcaccaaagaggaagaacctttgcagaaaatcaaatcatatagcaaacctgagctttgttgaagaagacttggttcttcttgtgcataagaacctcagcttctccttccttaatgacagtataatcattgagatccgtttccattgctgatctcagattcttctctttaggagcagaggattcagaaattgaattaccaacgcgaatctgaaacccgaatggcaaatcacaaagcttgaatctatagatatgtgaataaagatgtcgaaatttagcgactggtttgagtgaagcttgaataaaccctatcgcttcaagctttgttgcagtttcagagagacacaaaggtgaaactctaaagaggccgtacgggtttggaagcgagtaacggagtatactaagttgtttaaacctacaaatcgtttggagaaattcatttatttaactttgggatacaaattagtgaaatcaaaagatacggggtcaaaattgaaattattaaaagaagg

SEQ ID NO: 49022 - DNA, 932 bp, Arabidopsis thaliana landsberg
tgcgttatctcaactcgaggggttcaaaggtaatcttgaaaatttgaagaaagtagttacagtcgaagcttccagattttttcaggcaaatgttccaaacttctatgtgggaggttctagtaataatgctgcttttgggattgatgatggtagtcatatcaaccctgatatggatctctttagccaaagaagaatgatggacataaatgccttcaactacaaccagaaccagcttcaccctaatcatgcattaccctttggaaacaatgcttatggtattaatgaagggtttgttccagaatacaatgtgaacttcagaccagagtataacccaaaccaaaaccaaatccaaaaccaaaatcaagttcaaatccaaatccaaaaccagagttttaagagagaaaacatctctgaatatgaacatcatcatggttatcctccccagtctagatctgattactattaaccctttgttgtgtgatccaacttaagtctctagacaaaaagttgtgtgtataggttatctttatttcttcttatatatgtttctacatgtgtagatgttgtttttcttgttcttgtttaagtattatgttgtatcgtgttgtttcattttaaaattatgttattgctatatataaattatatgtgttggaaacaaatgcattacgcctttgaaaatactagtctgccatggttactgttacgcattttgggcaattgcagaaatttaatcacagaatggtaacaatcataatcaatcatgttctattttaaaataaatttgcataaaagcataatgaaaatttcttgtgtgcactcatttttaaccaaaatattatatacattaattcaacatattttggtacatttgtaaaaatgaaatgacagcattacaagggcttttcctttattttattccttataatgat

SEQ ID NO: 49023 - DNA, 917 bp, Arabidopsis thaliana landsberg
ataaggataagaataaccagttcccttttccatggaacaaatttttcatgtttcaaagatataatctttatgttttaagtatcaaaacagctttacattattatttgtgtttggctttttctgttcaagaatttaagcaaattagtatataataaataaacagatttgtgtatagtattgaaacctatatccatgagcaaatgtgtggtatataaattagataacaattctttttttacatcatataaattaaataacattgaatttgaaattaatcacattttaaaaatgtgattgtacgttatttattctttaaaattatgaatactaattaaccaatatgtgtcatcgaaataactcaaaatattgtaaagaaaactatttgcatttacatatagatatcttgtaaagttaattacgatatccatagaaatgttacaatctttgactaaaaaagaaagaaagaattctaataattaataaccttttggtgtttttaatgagagacgtggactctctcggtagaaataatacaatgattaacatacaaatttgtaactatcattagccgtcagtcgccaccctcgataggacctatatacacttatacacaacactagccacacacatcctcaagcgataacaccacaaaaaaacaacaaaccaaacaaaaaaaaaacagagagagagaacaaatctccatcatcatcatggactcgtctcaaaacgacggcgtacaccaaccgcttctccatcctcaagcatctccatctccgccggagtcaaccaacggcgagctagaaactgtcctctccgacgtagaaactcctctgtttctcgcgtacgtaaagccccataatcgaatcaaagcttctctttaacctcgctgcaccagcggtcatcgtctacatgattac

SEQ ID NO: 49024 - DNA, 819 bp, Arabidopsis thaliana landsberg
  unsure (1)..(819): unsure at all n locations
ttattagaaaaaactgtaacattaaaagtagttactcattggatgaatagataatttaatacttaaaattacatttataaaattataatatcaaataaaaaaaataaaaaaaaataaaagaaaaaacaaaaaaactcgcggcatagcgcgggtgatcacctaatacatgtaaattttcaccatcaactctgactcattggaactgcatctccatgagtgtcgtagagattagaattattctggtttaaatatttaaaagagatggtactagcgatagcgaaaaccaataacctgtattttttttttttgccaaactttgcacattaaactttcatgataagtttccacaacttagaatgaacataacaaaatacaaaacataagttggggttttggtacaacataattaaatactaaacgagaaatagttagcagattctaatttctgaattctctaatgctttcttaactctaaattctaaattctctactactttcttactatgtacctatagatacctctagaaaaatcgactaggttaagttgatccgagctggcgtgaagcacccagtataaggtgatggggtgcgtattcctaccgagtaataactcgaggctgctggagagaagtccggctgagcaggagtagaccagggagatcgtgagtcaagaggcgtcatggccacctcatatgcagacacctgagcaggcaaggatggaggagatttacgcctccaaaggcagaagatgatgacagccacagcaagaacgaacaagatgcagatcnagatcaggtcacccaaggaaatgctcctact

SEQ ID NO: 49025 - DNA, 523 bp, Arabidopsis thaliana landsberg
  unsure (1)..(523): unsure at all n locations
agcaatccgatcgacagaaggaggataatggaacttttcgattcagttctcgtacaagtcaaattttgagctttaagtacttcttaggcccttttcgtgatttcggttatattcgggactgaaacctacttgctcaagcattgcttcagcattttctgatggatcaaaggttgctaagantagactgcggtatcggtacatagngggtggcagccatgccgactggttgatgcagtgttcaacaaagcccatctaacattggattgcacctantcatggatgtgctgatacgagcactcaatgcacgggactctattagaantttggagttcagcgtgtttgggacacagtagtactaggctgggtgagatatgggaagtgntcgtgctctgaatggatgttccatctttaacggttttttttttggctaaaactttctgagtacatcagttttcgatagtcgagtgaaanttgcgatgtgatangttttcggacagctacagacagttttccacgaaagaaa

SEQ ID NO: 49026 - DNA, 1099 bp, Arabidopsis thaliana landsberg
taactaaaacttcaacactacaacttaaacaagaagaaaaaatcctgtagttttaaaagaaaaaaattacagcattattgacatacatctgaggctttaaaaaaaattaagacggtaagatggacttacagaaaacacaacgaaccagtgaagcactatatattaggcagcaagaggattgaattcaatgttaccggctttgaactgttgtagcgtcttttaagcaaatataaaaattgggccttctttgtataaaatcagatttgcatattacatttgtttttttttgctggggaacaaaaaatagcatttcattaaaagacattaaatcatttgttaaaatcaaaatttgttatactgtggcaaggacgtaaggtccaccatcgtagtgcgtcaatgatattaatcatttcgaatgattctgatcgatggggtgaaaattgattctccaatgaattttgggcaaggagtgtttgagaacggtaaattgtttatggttaattcttttgtaaaccggttttactatgtccggttactatgcttcaagctattttaattttatactaattatattttttaatatttttaacatttgataattataaatatacatcaatcaaccttgtcacacacgcttctaattactccttcattcccggttaacactttgtaagacgacaattttacaaacgcggaagagaaggcgttgaagaaacggtcttgatcagctgcaaacgcttccacaaatggacgtgtacgtggatcagctccaatctccgagtcaatcctaagattgccacgtcccgcgatggcatcatcgtaataagctgtatcgaagatcaccgaagtttgatcgttggggacaaatgtggcttccgcagcttgagaagttggagaaaactctggacaagcaacacgcaagaacgtttgaaaacgtggatccatgttctcgcttgtcgcgtttgcgttatcgaaacgcgataatacgttgttgcaatgtgtgactcctatcgtatgtgcactacaagagacgaagaaacgtatctatgaattaatatcataagatattagatatactgatggtatataccatgatggc

SEQ ID NO: 49027 - DNA, 962 bp, Arabidopsis thaliana landsberg
tatcaaataattttaacctatctaaattttttttataaaaattactaactaacatgtcacgagttcacgacacatatcaataaaaatattagatgtcttcatgtattaagtctaaatttgttaatacatttactgagaaaatgaaaaagttaataactctatatgaaaaaggagtttatatataagtaaaaaagaaatttgataataaattaagaaaaaaaaaaacacaatttgtaactatattagaaaaagggtaaaagttccttatcctaacaaaaaagaaattgttgatatattgaactatttatctaattctattgattgtttttttccatatatatattcccaagacaataaaatagggatcctttcaattatatttacaattatataaaaagtttgtattaattaaccaatagacggataaaaagttgggccatagtttaacaaacaaactatctttatccaatgagaagcccaaaccggcccattttaatcatcctagtaaaacccatctcccgatcttaaaccatcggttgataccaccgacacgcgaacaagacgacgacgcagcgatgggaaaaacttcgggagcgaaacaggcgactgtagtggtcgcagcgatggcgttaggatggttagccatagagatcgctttcaagcctttcctcgataaattccgctcctcaatcgacaaatctgacccaaccaaagaccccgatgacttcgacaccgccgctactgcaaccacatccaaagagggtttgtaaaattagggttttatcagattaaagagatttactgatttcaatccatttcatgtaactgatgaatccatgtgttcttaatcataacagtttgagcaatttcttttgagtcatgatcgtgcaccagtcatcaatttgtggaaaagtctgctatattgaatctgttattgtagttcaatcgacataacataatca

SEQ ID NO: 49028 - DNA, 754 bp, Arabidopsis thaliana landsberg
ccacttttactgtaaccgcgcgtgatggtcccaccaccgtccgtattccgggaaagctttctccttggccgtttctcccactaccaccaaaccatattatcaacaactataatcatcataataataatagtgttttgtcaaaacatactaacagtgacatgagtctttgatcaaatgggcgaatcaatgtaaaagttcaaaaagtggaagtaaagacgaaaacaagttgctccatcacatgcatccttataacatataagaactttgaaaatagtttctgttaaaggctttgagtaaaataactttgatattaacaagcacaaattagtttcctaagccgccttggtaaaatatcgaactcttgatttttgaaaacaagatggttaaagagggtcaaattaatgttaaattctaacaaattactatttggtagaattaatgcaacaccaagtaggttacggagacgcatacatgcacacacatatatatgactgtttattccacatataagtagatcgaatctacaaaatatgtagtcttcgaaaaggtcccactaggtatagtttttttgctggaaagcacatgattcacaataggggaatactttttaaagaaaatatttttattgggctgtttttttcatagtaaaacctaaatgtgtcttcacaccttaaatatgtgaataacggttgcacaaggaaattaatattttcttttgagaaaactgttatttgtggggtttttgagaaatacc

SEQ ID NO: 49029 - DNA, 543 bp, Arabidopsis thaliana landsberg
tatagactaacgactgattagttttgacatcaccttatagttttgtttgattatttttttttccaaaacttacttatgtatatagtactgattactcaaagtatgtactaattaatgtcttttaacaaaaaagaaatgtactaattaatgtctatttgtatatatattatggttacatgcagtccatgttagtcgactcttccctaatgattgggaataagcaataattagtcactatcatttttatgtaattattagctacatccaacaatggagagtagactttatataaaattaactcagagaaaaataaaccctgatttcatctataagaaaaggataatggccttgttttatgcatatatgtcttatgtgtgtgtgtgtgaacatgtcaaaaggtcacttatcaaccaaacatactaaattgaataaaatgtatatttaattcaaaagtattatcaagtactcaacattcatcctagttacattaaagtaaattaatctgtaaagataactaaacgtttattataaataaaaaacatt

SEQ ID NO: 49030 - DNA, 1115 bp, Arabidopsis thaliana landsberg
aataaaacctttatcaaaaaaagagaagagttcaattaaaaggctttcattgccattcttactcgtattctagttaactatatatacagttatagttactcatgagcttctaattcaattgagaacttgtgtatgttgtgttgatatatcctagtaggatagagaacatatatgcaatactaagaaaaatcatagaacttatgagatatgtggagagaatatcttacctttatgtagtcaacgcttatataagtagtcacgtgaacttgagatgagtagtgatgagtgagtatctaggagagtttagaggggattatttataggcgtgtgccaatacttggcttcaattgaataagcgtgtgccaagtacacttggctccaatttatacacaaattccattcatattcattttttgtccatacgttctccaaactttgctttatatataaaaagtaatgcacatcctaccttttctttactttatattaacttttttttttaaaattaacttttgtaaaaagttgggaattcagttgtcgaaattgcgggaatagctagtttatgccacttagttacaagtttacaacgttcatttatatacgacacaccaatttgcgtaatcttttttatgaaatattgtgttgtggagactgatatgttgaatatgttgtgtgatctgcgtaacatgttgatcgatcgatcattgatcacaatttcaaaatagattagagtatgtaacgttggaaagtggacgtaaaatttattttaaaaagttaaactaatataaatcatgtgtgaatgtctttatatcttgctttaaatcattttcgcattatcaaattaagaatccaaattataacatgatatattgatatagcgtctcatttcatataataaaattgcaagttcatgcatctaaatttctaaactttaagatctgcaaatattcgtgaaaacgttaagcaaattttgtctaagcgtccctcttttgcgtctataaagaccattgatttagagagaaactgataaactattgattgattaatcatttggtttattgactcctgagtttcttgctcaaatcaggaaaacacttgtaaaatttgatcagaaa

SEQ ID NO: 49031 - DNA, 676 bp, Arabidopsis thaliana landsberg
aataactgttgaaacgtgagaaaaaaaaaattaccaacgaactattcgtaatcgtggaaataattattatcgcgttgataatgttattttaatagcatgcatatttaacatattatatattatacaaataatatattcgatgtatagattggaatacatatatctacagttgtatgaacagttgtatacacataaattggaattcatatgcagcacagtgataaacataaacacacacacataaatatgcagaatcatcatttaattgattgtgcaaggaactattcacataggagtcggagttattgtgtcaatttaaaaataattggtgttttatcaggtgatagataaaacattttgagaagttaattatatgtaagttttttgcgtaaaggggctgttattggaggatttttcttaaagctattttaaatataagtttctcttacaaatttgtgactcttaaatgtggatgagattcgagaaaaagagagattattccacttatagaaatgaaatgaaaaacgttggtcacgacgagaccgtcaatcacgtcgacgccgtgaatccagccgagagacgcgtttcgctctttagccattttctgtcaatcatgttttggtaaataataagacgaaaaatatgaaaccaaaaaatgaagaaattttatgtctaa

SEQ ID NO: 49032 - DNA, 782 bp, Arabidopsis thaliana landsberg
attttctttttgttattttacagctcttttttcgacgatgagaaaagctggcacaaagatagcttcactcgccgaaaagttgaagccaacgaaagaaactatagaaaaagtattagagggattaaaagaacttacgaaagaaatgatattcgatcttttacagagcattcacaggaatccagaggaatcgtcgcttgtcgctaccgccgagagagatcaatataaacacctccataaagaaaattttccaagaaatgataaagagacccgactcaattccttctataaccaaactcgaattgaaatagaaggcgacaaagaaaactttattaatatttttagttttgaaaatattttaaagtcttcaagttattttttaaccaatcaccctttcaagactatattaattttaaaagtttgtaaagtctttttctttttatttactcttttttcttttctaaagtctcagactttcactttaagagagaataataaaagaaaataaaatactgttttctttctccatataatttcaaaactatttaagaaactatttatattttattatcaaataatttagattgattaaatgtagttttacttttctgttcttttgaaatcctatttgaagattttaaatagtgaatttgtaaaatgagttttttatttattcatttatttatgaattatttaattttcaaaataaattattatgaataaatttattgtagtcactattttccaaataaattcatacatcattaattatatttattaaaaga

SEQ ID NO: 49033 - DNA, 477 bp, Arabidopsis thaliana landsberg
  unsure (1)..(477): unsure at all n locations
gttaaaaatttatcaatatataacttatataaggtgagcccacagttgccatgtgataacttctccggacacagcggaaagagagcgcttcgaggacagcacgcagagactggcacttctgtactgcctctttgtcgagtgccnnnnnnnnnnnnnnnnnnnnnnnnnnnnnnnnnnnnnnnnnnnnnnnnnnnnnnnnnnnnnnnnnnnnnnnnnnnnnnnnnnnnnnnnnnnnnnnnnnnnnnnnnnnnnnnnnnnnnnnnnnnnnnnnnnnnnnnnnnnnnnnnnnnnnnnnnnnnnnnnnnnnnnnnnnnnnnnnnnnnnnnnnnnnnnnnnnnnnnnnnnnnnnnnnnnnnnnnnnnnnnnnnnnnnnnnnnnnnnnnnnnnnnnnnnnnnnnnnnnnnnnnnnnnnnnnnnnnnnnnnnnnnnnnnnnnnnnnnnnnnnnnnnnnnnnnnnnnnnnnnnnnnnnnnnnnnn

SEQ ID NO: 49034 - DNA, 465 bp, Arabidopsis thaliana landsberg
  unsure (1)..(465): unsure at all n locations
taaacaccttgatacataattagtactacaatagcactggtacacgatgatagaattgatattagatatacaacacataacagttcgcgtgaccaggagaagacatgtatgttaacaggcacagtatggttatcgctttcagccatacgaccgtaacatcagggcctcaatccctgactaagtgtgcactgacctatacatctgtgacaaccccgagactaccatgcctcaatgcctaaaggattacatcatgtggtcttcagccaattcgtatgtaccagcgaccgtagcgactgagtctcatgcccaatctagtatgacaactcctatgaaagttaacctcgatcggcctaagcacagagcaacattttcgctaaccctggcnnnnnnnnnnnnnnnnnnnnnnnnnnnnnnnnnnnnnnnnnnnnnnnnnnnnnnnnnnnnnnnnnnnnnnnnnnnnngttc

SEQ ID NO: 49035 - DNA, 594 bp, Arabidopsis thaliana landsberg
gggctgacagctaacagacacgttttcgatgcgctttaggttgagagactcggcataggaagacatgaagacatccaagatcttcaggattagagtcaaacagtccctgcgagtttgggcgctcaggggcaattcacgttcgtgggaataggcttcacccattgcatctgcagtctcggattcaagagactcgttggaatccgattgccattcggaagtggtctcaaattgagaaactactttgaagagctggttcactccaccggtgcgttggaaccaacatgcccattccaaacgacgcggcaattgccaagaatcatcgagagggcacaagatttggtcaatgatctgggcagcatagtagagtcggtacacatcgagtggcaaaagatcggcccagtctggtgtgtcgcctgtagagatcaatgaggacttgatcgagagggaagttgggattcgcaagatgatctgccaaacagcagtagagatggtatcattcttgagtgtgagcaaattgaagagcgcgtcgaagtgggacttgtttgaggacaaaatggccgatggcaagcttgtatcgactgattgagagtcatc

SEQ ID NO: 49036 - DNA, 974 bp, Arabidopsis thaliana landsberg
ctcaagccggtaatggttggggttttcatgttcttggcgcgaaattggtcaatcttcttcttcttctaactagggttgatgatgcacgttaaacacattactagagttttagatttcacagaattcttttctttgtttggtctgttcgtcctctactgtgtttttcttttgttttggctattttgccgtctgttaaaaaattggggttttccgataatgtattgtatatgcctgaattatggaaatatcactaaaaacacttttttgcacttttgtatatattgcaattaagatttaatttctctattttgaagactttttgttaaaagagagatttgctaactcaaaattaccggagttaataagttcgttctcatcagattagcaaaacattcatctttaaagaaatctgtttatctcacgtaaaattctactaattggcagcagcacactactttaatgggcctattactatttcaatatgcactgaaaacttcattggactgtccaataacattataacattattaaaactaaactacatttgtatttgggttacaattttataaagagtaagactcaagatactaattgggctgcagacaactttaaaagccttactacaaaaatcaaaaccattcttaattaactaacaaccaggtaaaaatctcagtacaatatttacactaaaaataggtgccacccactatgcaaaagtttagggccacgaacaaaaaaacctgtaaattgttatgtcttcacaatatgtgttttaatacacatgaattttagctacggttaatgtaaattttgtagttaaattaaagctaaacaatctcaaatataaattggtcaggtccacagacaacagcctggcaagtggcaagcactaaaaattcgaccgttattttttgcccctttttttaatatttcgaaattgtatcttttagttttattttaaagctttttagccc

SEQ ID NO: 49037 - DNA, 1158 bp, Arabidopsis thaliana landsberg
tgataatcgaatttcttcttcaaaacttctgagtaatcacggaagcaatcatgcttcttaaaattacaataaactcaaatactttattacttggatatcaaatttctccaaaacttctaattaatcataaaagcgatataagttcatagctcggatgttttctgcaagtctaccactataaaaaaacatccgaactatgaacttaaatctacttcgactaaaaagattgagtctaatttcgggtaaaaaggctaaaaagtttctatgaataaccacataactctaatcatacaccgtaaaatcgaacttggagcttcacttttcatctatcctatataccacaatgccactacacaaacatattaaaccataacaagaaactgaatcttcaattaaaattcaaagattcaaattaagaattgaccaatcacaatcaatcctaaaaaaactcttttaaaaaaaacaatctgagggaaagcgagatcataaagagagaaaaaagaatcctaacctcataaacagaagattcaagctcaggcttaccaagatcatcgcgaagagccgcgacgatctcaggctcatgattatcacaaataatcatcagtttcttaagctgagtcactctccattcataaccacgtgtcacaccatcatcaaaactccgacgaagctccgtcaccaaattactcgcttccgccgatccaaaaaccttcttcgcagccattcctcaatatctctcttacgtaacgtacgcagaataaaaataattaacacagtaatcagtaatcacgggcaaagagagagagaagagaagagaacaaatattgagttcggatcccgagaatttttcttgaattcaagaaaataaatattcttttcgtagatattgacgttgctcgtgccaaataaaaagtgataagtttctttaaagacacataaaaagaagaaaaaaaatgtttcttactttattttgtttttgtcgcaatgtttcttacttttattcctcgacattgataataagtaaaagcatgcgttacgatatttatagagatgaagaaacgtcaaaaagagaatatcaagaaagattttgtttttgataattcttaacagaacaaataatttgatgacaactaagtaagaataaaatattgtattttt

SEQ ID NO: 49038 - DNA, 834 bp, Arabidopsis thaliana landsberg
gaaaacagcattgttgtcttgtgattgggctaaacattaagattaaactgtggctcaccaagtttttttctggatatggatgtttcataatgggctaaataataacccattttcccattagtttctttttttttgaacgggcaagttgcccattagctaaaaaggctccacaaaacataaaatttggacaattagaaaacctttacctaaactacaaaacaatcctaaattcaaccaaaaagaaaagaccctttttttggtataagcggatacaaaacataaatggaaaaatctttattacaaagatccaaatacgtggcacgttatattaggtcacaagaactattttgccgacctcaaaaacgatcacaagaataagtttctttcatcgagaaacacaacatatacacaaaaaaactatagcttataaatttattaatattttaataaaatctctgccgtcttcttctttctcataagccacatttcttctctctttctcttctacacaacacagctttttaaacccaacagagcaaaaaagcaaaagattcaacaaaaatctcctcaaattctattcatggtctctagaaattctgacggatatttcttggatccgaccggtatgactgttcctggtctcggaccttcctttacagccgccgtttcttcttcttcttcaccaacgacttcttctacggccgtggctgtggcggatgtgacggcgatggtttcttcttcggaggaggatttgagtaagaagattaggaagccttatactattactaagtctagagagagctggacggagcctgagcatgataaattccttga

SEQ ID NO: 49039 - DNA, 545 bp, Arabidopsis thaliana landsberg
tgtgttgttcgcttttttacctttttaatttattcttgccacatttattcttgtaaactgtactcggccggagcacatctggaaatatcgagcggccgcgttaggtgcacgcaggctgacgggcctttgtcaccatacgagagtagagactggcccaataaatcacgagctgaaatgatagaatagaaggcctgaatgcctgatcggtgtgctggcctcttggcgataatcaactcctgtgacagggatggagccagcaacccaaactagaggcaacagcccacctggacgggaagtgccaagaaaagcagtgctaatgtcagtctctactgtatataagtcgtggttaccatccctccttccgtatttaaataatgactaacacaaatactgtacattgcgacgttacaaatttatatacttactgtattaaagctgcaagggtagcctgtctccggttctgccatccataatctacatcgtctatatatatcatcaaatctacatcgtccgctaccagccccatccgacgcaccccgccccta

SEQ ID NO: 49040 - DNA, 479 bp, Arabidopsis thaliana landsberg
acgctttatgaccgcctaccccgcggtccacacgcagcagtacagcgctttatcacttagttccgccgggatctgcagggctaccccgcggacctgcccgactactaccaccaatgcccgcagacaccgtgggatggccccttgtcggtcccgttttcccctggctccgcgccactgcccgtcaccgtgtggctgcccatcgggcacggtccctcctgcgccgcggtcgcccggacgctcgagtcctaggaacctgagatgagtgacaccgaacacaacagacccatcgacaatccggacgcggcccgagggccggacaccgtggaagaggccggccccgtcaacccggcggaaaccaccgcggaaccggaaactgccgtggagccggacaccaccgggcagcccgaaaccactgtggagccggaagccgctgcggagcccgaagccgccgcggagccggaagccagtgggcaggcggc

SEQ ID NO: 49041 - DNA, 190 bp, Arabidopsis thaliana landsberg
ccttcttcaaatgcatcatcatcatcatcatctaaactctcttcagatttatcatcatcatctaaaacctctggggatgcgtcagtatcatctaaaccctcttcagatgcatcatcatcatcatcattatcatccaaatcttcttcagatgaatcatcataatcatccaaatcttcttcagaagcatcag

SEQ ID NO: 49042 - DNA, 748 bp, Arabidopsis thaliana landsberg
atgcgttacaaacgccgagtaattatgattgattaatatatgacccacgagctaagctaacataatattctaatgatgatgtcaacaaattaaaaccagctgctgcaatagatttaattaaattgtgaatataaacattactaaaatgtttattaacgatccttaccaaaaaaaagtgtttactaacgattgacatatatagcagttgaaaacgggtgcatgtgtgaaactaaatatttacagtaattacagttagtcaaaaattcaactattatatgtgtacgtacgtatcaagtatagaaaagtttgataccagcaaaaaaatatatacaatttttttatatgaaatttgttgatagaagataaatagatcatgttgacagatgggaattttttacaaatttggcataaatttagaaaaacttattactgtaacctatcactgaaaaaaaagtgtcactaatgttcgttactgcaaacacttaaaaaaacaaaactttttttttatttagatcaatatgagatgctatgagcctaggacttatgagtcaagtacttgcaaccgcaatcatctcttaataaagggtttattggcggctgcaagaaaaccaatcaaactcctagttgcggcggcctggctttccggagctaggtagctctctcgcggctttcttcgatttgactatcacgccgccccttgttgacacaacgtcttgtgtagcctcctcctacatttgtaaacttatag

SEQ ID NO: 49043 - DNA, 244 bp, Arabidopsis thaliana landsberg
ccacccctaatcaagaagttgcaactgttacttgctaacaaaggaaaaatcagcttttccaatgtaaagttgttgggtatagaatccacactttaggacagtcccaagcccaggagtagctgggcagcacaaaacaaactccatggttggggtttgttgttgttgttgttgttgtttggggggggttggtttttttttttttgtttttactgattggtttattttgtgtatcctctacctgtgc

SEQ ID NO: 49044 - DNA, 543 bp, Arabidopsis thaliana landsberg
gaaaattatccaaaagaaaggttatgcgactttccgaaatggaattgttggtatgaatgcgtgtatttgtgttttagagagctattcttgttgatgaatctctgaggagcagagcgagatagaggagagtgaaggaacatcatgggaagcagcacgggcgatcttgtgacacgtatccaatcagctcaccgtttcgatcacgatgccttgtttcgttttgccgccgacaacgtctctggctttccgaccaacccttcccaattcaaagtctcacaggtatgttttccaatcgccgaggttttttctccggtaagaaagaaacttttatctgactgtgttttgttttggtttggtttacatacagttcggacatgggcagtcgaatccaacgtttctgatagaggttggctcagggagttccttgaaacgatacgttttgaggaagaagcctcctggcaagcttcttcaatctgctcatgctgttgatcgagagtttcaggtatcaatcaattaataatctttacctctgtaaaattcatggga

SEQ ID NO: 49045 - DNA, 643 bp, Arabidopsis thaliana landsberg
tggataatatcgatcacatcgcgaatctccgaaaatgcacttggcttgttggtggtggcgttgctcctcatccgggagaagggtccagtggcaccgttcagcaactcgaggacctcaagattagtggctaatgcatcgccaacccaatgctaagttgatttcttctccaacaattcctcctcttcagccccgttggtcgccacagacttggcagcgatggtcttccacttgagagcatcctcacagacaacaaggaagagatctacattttggaatggattggagacccttgctgaagtgcaaatttcagagaacttgttgtagtctacgcaaagaaataaacaaaacaccaatcacaccagtttcctgctaaagaaatgcatgggtttcgtttttagggtttgagtaaaaaagatgtctctatataccttatgttcctgataatggatttagagatcaatgcctcttgcagggcgctagtgcaacatttgtcgcgagatctctccgttcaaaagcttcatgaaatttggtagaaattatattagaaactcaggtcaagtcagcagcgctaaaaggagactaagagctaataaaataaactacaatcgcttacattgcatatttttgagagtttatgaagaag

SEQ ID NO: 49046 - DNA, 808 bp, Arabidopsis thaliana landsberg
taatacaaattacattaaagtctatcagcaatatgtcaaaagaatctgagtcatggagccacttggaggagaagaattgtcaaaactcaaaagagaagaaaacgttacacaatgtaaagatgatgagaaaagaaaatagagagaagacactaaatttactccccataattagagggaggctgatttggagaaaaaatagtcaaaacaaaataacaaagcattgaatatcgaagatacactttattgctcctcgggtcctcaagggctttgtcacagagaaataaaaaccaaagttttggagaaaaggggttttggaccgcaaactcatacctcatgacaagcataaaccaactcatcaccagttgtttattgatttattcgataatgatagttttgtgactacttttctatctagtgtgtttctttgaaaccttgcaattttcaacattttaaacaacttttgtttttagttgtatttttagttgtaaacgcaggctaaacatatccttttgaaaatatattcacattgggcaaaaatagactgtaaaaaaatttcaccgactttttcatgtaaacacaaatgcgaaataatcaaagcctaatacagctatgagattcgattttgataaatcgatcagtctaactatggctcctatactttaaccttttctaaattcaaaatctgaaaaaataaaaccggaatcaaaccaaaaatggaacaatgaacttggtttgtctatttccctgataagttgcgtttaagtatcgacagtaatatgaattataggagcataagaagacttcttag

SEQ ID NO: 49047 - DNA, 526 bp, Arabidopsis thaliana landsberg
  unsure (1)..(526): unsure at all n locations
tgcaaatatttaattttatagtaaactaacatagttaatataatacaaagttttgatattttttgtaattgttaataaatgaaaannatgacattccagttgtatattacaacaacaaataatacgaaactcgaaaagtttagaaggctagtatttataactatgacaggatttgcattttttgatcattgccggtctaaatgacgcacttccatgaattcgcttggaaattatgttgcatatgtcggccacgacgtttnttgctccttaattccatagtccacatcccttttatacgcggaaagtattattttataacattagaactgataagtgtagttataaagtttaaccaaaaagaaaagtgtagttataaaacctccattaaaagaagtaaaaataatcatagttataacaattagcatattaaagaagattacactgagttaaacgatattagtatattactcacaccaagtaaaacgtactacatttttcttaccgntattaaaatgtctactacatg

SEQ ID NO: 49048 - DNA, 481 bp, Arabidopsis thaliana landsberg
tggtcatgtgttgtactgttaattaaaattaatctgattctagaactttatagagacaattggttgtaacattgatacatcaagggaaacacggtccgataaagcaaaaggaatctagattttagggcatgttacacattttgtccaaaaacaaaatttacataacatggggttaacacaataaagaacagaaggttgaagttaccttccttcaccatctctcacgccatctattctatagtccagtgctatggctttactaacgctaagcaacatgaaacaaaagcatctgatgcatcaagaatgggtggaagcctgaacagagacataatactacatttttcatgcacgaccatcgcggtagtccctccaagtgtgcgagccactgcagccggctgcttattgagtccttccatgatgcatgagaatgctgcaaaggtggcacaactttgagcaactcctgtggtgctcatgataaaat

SEQ ID NO: 49049 - DNA, 529 bp, Arabidopsis thaliana landsberg
  unsure (1)..(529): unsure at all n locations
aaacgtcccttttatattggtgagcttgtaaatgggtttaatagaagaggagatgagatgatggtttcaacattccggtgtactgtagatttaccgaagagattgcggcggcgattgatcgttgnggnggttttaagatagagaaaacggagaatctgataatagctgaccacatgaatggtaagcaggaagagttgatgaaagatccggattcgtacggtcgagatagggctaactatgctcaagccggtttaaagccgatcgttcaggcctatcttggtcctgacctaactcataagctcttcaaacggtacgcagttagagcagctgctgacaaagaaattctcaacaactgtttctatcatatgatctctgtttcagcggttagggtttgatgttatctatgtacataacatgcgtagtattataaaaagtatttcgacgacgaaatggtttgatgcatggtaaaataagtaattatcatttatcacactacgtttcttatatttcagataatatcccctattta

SEQ ID NO: 49050 - DNA, 582 bp, Arabidopsis thaliana landsberg
attaaatgtaatgaagttttgtttttttctctctgcatacaaaacgttctttttgggttatacatgaatttctcattctttaacatttcgaatcgtcacatcgcagactaccaaaacaaaagtgttcttgattcttccaaatcgagatgggcagagcagcaagatggtttaagggcatgtttggcacgaagaagagtaaagatagaagccacgtttccggcggagactccttcaaaggcggcgaccattccggtgacttcaatgttcataaggactctgtttggttgggaactattttgacggatacagagaaagaacacaacaagaacgcaattgtggttgcaactgctacggccactgccgcagacgcagcggtttcggcggctgcggctgtggttagactgaccagtgaaggaagagcgggagatatcatcatcacgacggaggagcggtgggctgcggtcaagatacaaaaagtcttcaggggctctttggtaatttttgcatcttcaaaatattttaatattttggcaaatggttttgttaagttcgaatttttggttatgacacagttcgaatgtt

SEQ ID NO: 49051 - DNA, 678 bp, Arabidopsis thaliana landsberg
cattatagtactatatcttgatggagccttaatcagaaatcaaggggtggtgtaacaacaatatatgtacatgtgaaaattttaaataagaaaaaacatgtattaatacttcctccaatctaatcaaactcacgtacatgtatgtcttacgcgtatatgtgtgtgtataaagactacactttactacgtagtaattgatatatagtatcaatttaatatgtgtttataacatatatctattttttttaaacatatctatttaagtttaagtttaagtccaataatttcattttactagtaaagatcacaatgtcatttaccgcattcacttaataattgctgaattcacatagtgcctgtaaattaagactaattttaggtttcaaataatttttcttttttacataacttacgatcgatattttaaatggtattggtaagtttaaggtatatagatagtgtgtctatactagagttcgttgaaattggtctgaggtataaatacctaaaaggttatatatgtttttagctgaatgtaattcgataaattttagtcgaaaccgttaagagatatcagaatttcgttttcaaataatatgggatataattacccgggattaaccgtacctgataaaatatagctctcgtacgtgtcacatgcctaatggctagttaaac

SEQ ID NO: 49052 - DNA, 488 bp, Arabidopsis thaliana landsberg
  unsure (1)..(488): unsure at all n locations
nnnnnnnnnnnnnnnnnnnntagcctctgcgccaggtcgcgaaccgttcggccctcggatgcggaccctccacgcttccgcagagagcaccgtcgccggtacacatcgcagtgattggcgttcagatcggcgccaacaccatgttagagtcacttgagtccgcgaatttggtacgatttgtcatttggatcctcaaacttgacacattgtgtcacttgggtccctgaactttgatcaggaagttttaacttggcacaccatattgccatcttgtttgagcaaattcggctttggacaagtttcagaggctgacaaagttagaggacatgtgctgctggttatcgaagtgtgacacaagtgacgtatcaatgccaagtttaaaaaccactactgcatattactcacatatcaatatcttccttatataactaactatagtatataactatattctagatataactatattatacctatcaatgtatctc

SEQ ID NO: 49053 - DNA, 1000 bp, Arabidopsis thaliana landsberg
tcccaatcctagatcctctgttttctcttctctgtttgctttcattttctctggattcggatctgaccactaataaattattatcgtttcagacaacaaaactcaaagatcgaatctatcttttgtccttagagtctggaaaaagcagctctcttttgatctcctctttagattcttcaaagctttagatgcttatctctctttctctctcagattccatttgaataaatgccattttgacagatcaaatatctcccacttttctctctctctctctctctctctctctctgtttgagctccaccattatcgaaaactctgtttttttctttctttcttgattcgatcaacaatcgttgaaaacatgaacagaggaatcgaagttatgtcaccagcaacatatctagagacatcaaactggttgtttcaagaaaacagaggaaccaaatggacagctgaagaaaacaagaaattcgaaaacgctttagccttttacgacaaagatactcccgacagatggtccagagtcgctgccatgcttcccggtaaaacagtcggagatgtgatcaaacaatacagagagcttgaggaagacgttagcgacatcgaagctggtcttataccaatccctggttacgcctctgattcattcacacttgattggggtggctacgacggagcaagcggtaacaatgggtttaacatgaacggttactacttttccgccgccggaggaaagagaggatccgccgcacgaacggcggagcatgagaggaagaaaggtgttccatggacagaagaagaacacaggtaaacttaaatcatctctctacgttaacgtcaatgcttttcttctctagatttggacccctttacactttcttttataaaaatacgtacgtcttttttcttggaaacgtgtttatgtatacgtataaagatacgcatatcgtataaatatatatacgtatgtaatttataaaattaaaactatacagtc

SEQ ID NO: 49054 - DNA, 785 bp, Arabidopsis thaliana landsberg
tcggagatttctcgatgcttccgtatgatatactgatgaagatcgctgcaccgtttagtcatccgaatcttcaagcggcgtctttggtatgtaaatcgtggagagacgcgctaaagccgttgcgagagtcgatgttgttgattcggtgggggaaaaagtacaagcacggaagaggaggtgtgcgagcgaatctcgacaaagctcttgattcgtttctgaaaggagctatgcgtggatccacgctcgctatggtcgacgctgggcttgtgtattgggaaagaggagagaaggagaaagcggtgaatttgtatcggagagcttcggagcttggtgatgctgttggtcaatgtaatttagggattgcttatcttcaaggtaaaacctaagttctctcattgatgtgattggatttttattcttaacctgattaatgtttttctggattgtgttggtttatagagaaattggatttgacttgatggatgagtttattgctgatgaatttgtggagcctttttctgagcaatttgattgcttctatctgcagttcaaccttcaaatcccaaggaagcgatgaaatggttgaaacaatctgcagagaatggttatgttcgagcacagtatcagttagctctttgtttacaccatggtcgggtcgtgcaaaccaatctgcttgaagctgtatgtgccttcttctgattcttttcttcatgcttactagttgagattctatattgttttcatgaggtgaagctgttatctagattgaaagtagtagttagtcg

SEQ ID NO: 49055 - DNA, 182 bp, Arabidopsis thaliana landsberg
aaccgaaggcagcgcggggacaaaccatacaagaataatacagcaaaggcagccaaaaaagaacaacgttaagaaagaaagagaaccggcaagggcggaaggagagccaaagcaaaacaatagcacaaagtgagaaaagaacgagagaaccaggcacaaaaacaaaaacgaaggggaacaga

SEQ ID NO: 49056 - DNA, 722 bp, Arabidopsis thaliana landsberg
gcagaaaggaacttatgatgagataatgacatatcgacttttcatttgctcctttttttttattttcaagactgtatgataagatatgataagaaatatatcattaaatgtctaccgatttacgtgaattttgcttttaaagaatcctaaaagttaaccaacgacagataaaaataaaaataaaacatggatatagtgctgcgaatatggacgagcatatgcttcttctggcccttctgaatccaattatttgttcagtatggacatgtttttttcccactctaatcaattgccacggaacaatctagaggtactgagtcatatatgatattaaattgtgtaattcaatttatcccctaagagatttcgaatgaattttggaacttgtttatgatgaaaatgaggaatggattgagatgtttactgatttgatatgtctggcgaggggagttcgttaaaatgcataaaagaaattcgtttaaattcagaaagaaatattaagaaattattgcaatattgggtgtaatctcttgcccatgtgccaaggcaagacaatgactccgtttttttttaattgtgaaaatgcattttcttcaatacgatgactatgaatcattttagaatcacattctcccaactaattccactttacttttacataaatcatccatctttttaactaaaagaaagaacgaaaacaatttgatttcgttttaaagcta

SEQ ID NO: 49057 - DNA, 762 bp, Arabidopsis thaliana landsberg
ccttgacttctttgttcactgaagtaacatcctttattctcagttagttatgcaaaaccaagtgttccaatttcagtattaatagcaaaagtcatatgtagtagagttataaatagctctctgttcataacattgcacttagcgttctaatggcagctgcaacaacaaagctagcgagagctctgcaacaaagacgcaccttcgtaaacgccagagtcaaatgggtcagtgaccattacctcgacgaagctgttcaacgagagaaaaacctaaagcaagttatctctctcaaggatcgaatcgtatcatttccgtcgaaatcactccctctctcttctctttcacttctcaaacctctcgtcaatcttcacataaccgccgccgcgtttttccagaaatacccttctgtcttcaccacttttcagccttctccttctcatcctctccatgttcgtctcactccccaagctctcactctccacaaagaagaagagacgattcatctctcgccgcctcaacgcaacgtcactgttcaacggttgactaaattcttgatgctaacgggagctggaagtcttcctctctatgtcctcgatcgtttcaggttcgatttgggtctccctcgcgattacattacttcgttgatcggcgattacccggaatactttgaagtaactgagatcaaagatcggttaacgggtgaaaagacgcttgctttgacgatatcttcgcgggggaacaacctttctgtgtcggaaatgg

SEQ ID NO: 49058 - DNA, 1259 bp, Arabidopsis thaliana landsberg
tttggcgcacaaacaatgtgaaatcctgcagtgagaaattttatcataaaagaaatcgattgttaatttttacaaccagccataattaaggtgtgctgcactaaacacagcttatacccgcacagaaaaaaacgatgcaggagaatataccaaagtgcaaagtacttacatgtatcaacggagagaagaaagcaaaatcttggagaccctcattcataactgatgatatggtttctactgatgctttatatttttgaaattcagactctaagacttcaacttctgttgctacgttgaccagtgagttgaaattttccttcaaaataaaaagtaaaaaattcaattaggcaatggcatactgggtggcaacaataagaaattgtcttcagatttgaaagggagaccaacattaagtacatcaataacttcagactccttagacacaagttgttcacgagcaacctgggcctcttctctagcagcatgaatctcttcttgaatctatagaatttcatacataaaaggtttaaaaccctttaacagtaccaaaacaagtctagaaatctgacttaaaaggataattttctttttacttgttgagcaaaggtataaagtgataaagacgaaaaagaattcatatcgtaaaaagtaaggccactgacaatttaagaatgatgattctccttgaacaagaacatcaactaataataagaacctatgtgataaacagttccaaaaacatgtaatcaacaactaaaacgatactttaaccaacaaacaaaaatacaactaaaacgatatatggtcatattagtaaaaatatatttttatctgaaccttttctaaccaatttcttaaattcatgaagcacagaggcatttctttttccaggtgtctgaatagaacagcaaatcacaatcagttaaagaaccacatatacctcagcaaatttttccctggcacatatattctgctcagtagctaccatgacaagatcatcaagatttcggttgcttgaagacttctccaattctagcatgtttatcttttggacagaacatatggttaatcaaaaagccataatgaaagcgagagaagctacttaaatagtcgctccagttataagtaaagaaaagaagacatgcaccttctcttgtagttgcttaatgagaagaatagcttctggatctcttaaatgtacaacatgttcttcgcaatgcactttgccagcgacttctgattgcttgcattttgcatca

SEQ ID NO: 49059 - DNA, 601 bp, Arabidopsis thaliana landsberg
gaacacactatatatatatatatatatatatatatatatagattctttaaagaaacatacctcggcaaggatgtgagaagatacaactgcatcccattcaggattttttgtatctaagagaacaagtacaatgtcaaacctgctcaacaagggaccagaaagtgcagtattgacagaaagagctagattcagttaaggacattctaaagagaaatatcaaaacaaatgcaaagggaaaacaggaatgcttgcccaactgatgcttgagggaagaaatatattttttaagagacatcaccaactttcctttttttttttttttttttttgggtctaaagagacatcaccaacttgaatttgaaaaatagcatgcatgtatgtaagcaaaagcatgtttgaggtctactaaatctgaagtggatacactgatcgggatcatattgtcctttaggatttgttgcaccgaagacgattgtctttgtgctaagagttgttacaaggccagccttcatattgaaaaagacaattagaaacagaaaaatacagaaagaaaatatggctacgccgatttagctgtagaacttgaaaaatggagctgatg

SEQ ID NO: 49060 - DNA, 609 bp, Arabidopsis thaliana landsberg
  unsure (1)..(609): unsure at all n locations
taatcctcagagagtattgattcaaagagtgatgtggaagaatatggagccagtcttaaatgcaccttttcgcatctttgataaaaaatctgcattttcttacccatttaatacctctttagtttccctaaatgtaaagcgttgtatttcttccttcgtacacacttttctgaccttaggtttcattgttagtatttcaggctgttctagagaagctcagttacatgctcattgggaggcatgatattgagaaattgatgcggcttgatgcggcgagtgcttgtttaccatctacgcttggccatgccgtttctcactctgaggctgttggcactgaagtagaactcagtgacctattcttgagtttgcgacctatcaagcaggtaaaaatatgtgttctctgatacttattctagtaagaatttttcattcggtgaagataattaagttgttttcttacaggataatctaattcgtgatgacaacaaactgnnnnnnnnnnnnnnnnnnnnnnnnnnnnnnnnnnnnnnnnnnnnnnnnnnnnnnnnnnnnnnnnnnnnnnnnnnnnnnnnnnnntttgccgttcatcactcttattacactagatgt

SEQ ID NO: 49061 - DNA, 671 bp, Arabidopsis thaliana landsberg
ctgatgagaaggagattgagaagatggtgttggagaagaagaagatggatctgcttagtaagtatgctagtgaagatttggtttagcagcagactgaggctaaatccatgctcaatattcatagatagaaaggtgatcatctcttcttgtaaggctttttaatcatatcatagtataattttattgtctgtagtttcttttgcagtttttgatcagaaaattgactgaactgttgtgtgttttaagaaatttcgattagaggaattctaaaaatttgttgatgtttcttatattattacatcctagattatgatcttagagaatttgctagatcttgatttatatttccttagtagtcctggtctgtttgagagtatgataaggcttctgtcgagtaatgtcataaagcgcgatcaatctataacaacaacgtacattcttgcttcattaatcaagagtttcactgacctgagtaattgacctagtacccttgtatgtggagcttagatttgcagaaactgttatttcaatgggacatactttagttagtgccttagtggcatgcattaggatgcgaaggaattcgtattatatcttctcttgaaattaatctgagaggctgatacatcatctctatgcttctcagatgctctgtttaccaacaaacttca

SEQ ID NO: 49062 - DNA, 617 bp, Arabidopsis thaliana landsberg
aatacatcatatagtatatctatctaccgtaaagagtcgtaatataatttgtaagatgttataataaaatattgagtaactgacaaaaaataatcaaatgcgatttatttcatcttgttatgataatagttcaaggattaggatgcatgcatcccataatctaatattaaaagagtatgtcggtttagtgaaaattaagctattaatttagttttgacagtggaacggaaccaaacctttgtgaaaaagttgaagaaaaaagtggagaagaagaagacgacaatgtggttaattacttgttcaacttgaacactaatttaacacccaacctaatctctaatcttagtttctaacaattcaattatattcacttttacttaaaatattttatcttgctattcgtttacttaactggaaagcactttttaaatggctttttaaaaaaaaacgaaagtctctcttttcgtttgttaaaaccttctcttttacaatttttgatgacacaaactttttggcacgtaattgtacgcttatcgcttgatgatggtagcaattctcacttggaaatcttaatcttttgtccatattatatatagcataattaaaatcatcgaaga

SEQ ID NO: 49063 - DNA, 741 bp, Arabidopsis thaliana landsberg
taaaaactgaacagtaagcatgaaattcttaaattttaaagtttaccttatttttagtaagttttatatttaaaaattttaccctgaatttttttaagttctttttagtttatattttagctactataataatgttttcctaattatcaatagttgtcaatctggacctaaatgtatccctatttttatcctaacaaaacggaccaaaaaatatgagagatgggctttaagatccgtaagagggtgataaataaatataagctacttatatatttaattaaatttaagtgataaataaatataagctacttatgtattgagatatgtggtgaaattggattttaaactacatcaaatgggtttttaaaatgacaaaatgagaactaatatctactcggtctcttactttttgattattttatatattcaatgataaaaaaaaactcacttaagagctcttcatgattaagaacaaattttgtacaattagatgctcattatttcatgcatttttatgacatccaatcaccatttggatttcaaaatcctaatctggtcaaactagtgctaagcacacatatccaatgtatatctgttcttaaattatcttaatctttttttaatgtttgaggatgatcgccatattttcatgcggctggatcgcaaatatttcttaagtttttgcacattttgtctttaccatttttttcattgacccttattgttttcttcactttttga

SEQ ID NO: 49064 - DNA, 1182 bp, Arabidopsis thaliana landsberg
ttatataattactgttataccaaaatttttgttttttataggaatggtaatttgatacatatatatataatacaataaaaatttaggtgtatacttttatgttttttaagttttgtgagagtcgtaaacactttcatgtacaccttgtaccctgaccatgacatgtgttggcagtgatgtgttggtttagaaagttaatgaggaagtcattctcatcacatctataggagtttaactgttttacttgagttcgtcatgattttattttgacgtccatcgtcaaataaaggaatatttcaggagttttatgaactatacaattacaaagaacataaatggacaaaatgatatatgttattaaatatatcgaaagagaaataataatttgtttcattagaattgagttgaagttcaacaagcatgatctaaccttaaaaagtacaattttgtttaactttgtgctcgaaatcaagatatagagcagtaaagtaaataaattattgtggtatacaacttagaagtttcatttaaaagtaataatcatatttgttacgttgatcagattcaaacgcctctatggttataacattctattgatttttttttttgtttgtcattaaatttcattagggatcacagtgagttatataaactaattatctatattatgtgatcacattggatacacacacttagtatttgttttgaacacctctctcaggttttcgtatttttgaaccctaattcgtaagataaaaaaaaatgaatatatattgaacccaatttctaaatttaatttaaggcgtaaatgaaatttgagaactaaacacgcatgagtgaatttatgatagtagtatagaaaataaattcaaattattgaaagtttaaaactattcattcatatggtgttcaaaaccatttttttgttcgttttcgtgttcttaaattttcgaaatgaagaagggtatgctttataagaataaagtttttacatccagtttaattttggattagttagggagattgaaataaattgagatgagattaataaaataaataggaggccattaattcatttacttgaccaaaaagaaagtaatatgtttctgtaaatattagttttttccttttccaatataatattgtaaatttgtttaaattaattttaatcatcgttatcgc

SEQ ID NO: 49065 - DNA, 693 bp, Arabidopsis thaliana landsberg
ccaaaccagccgttgaagcgaagatcttcacagttgtaccgttctcagcttatccaacgtttaaacaaaagacaaattatattttaatatatcaaactttagactaagtcttttcaaatactgccaaaaaaaaaccaggtgaaaatattatgtagataaattgtgagtactagtaggttcatcatagaatcatagactccagaaatcaactcaatagtcaaaaatcaatttaactcctttatatctatatacagtttgactgaaaactaaaaacatatatttgcaatctacactatttaagctttagaaaaaaacttttatttttgtattctaattattataatgatttttaggcttatagacggaaaaaaaccaacgttgcaaatattttaacgcacgttgtgtcaaaaactgagattaattaaccgatccaaaggcctaaaacttgtttttacgaaagaaacaaaaaaattaagtgtgattcaactattatcatcctacttaaaacgaaaaattccacactaatgaaaaatataaaaagtgagcacaatacagaccaatataatattcatacgattcatcatctccatatgagtaatcggggtaaccaaagttacaattctgcacaaattttaattaagccaaaaaaaagcaaataattaaaaaaaaaagcaaaaacggtctaaactaaaa

SEQ ID NO: 49066 - DNA, 584 bp, Arabidopsis thaliana landsberg
tggaggcattattaaaggctaaccctatcagttctattttccttggcgtccgaattggtgatcctactgcggttagcttcacttcaaatctttaatctcaagatccagatgcaaatattttgtgatagtaaaatgattgattacttcttaatgcattttttcaggttggtcaagagcaattctctcctagttcacctggatggcctccctttatgagggtgaatcctatattggattggtcctacaggtttctctttctcagtaatcatatcttcttattgctttatctgttaaaatcttattattacttatgttttggtatgcgtgacgtgcagaaaattttgagcacaattgtgctgacatatattttgtataatgataaagtctattaaactatcaactggtggtcactgtaattggtacacccataatatgatagagcaacccagataaagtctttagaaatttaaaaactaaagcaaaatttacagggctgggatctcttttcctcatttgatctttattattctgactttttcctataactttcttatgcagaaaagttgggcgtttttctacttgca

SEQ ID NO: 49067 - DNA, 464 bp, Arabidopsis thaliana landsberg
acgatcttggaggacgatctagctcgaaaggacagatatagccctcaaccgctgctgaatcagagtcacgcggatcatctgagaaaggacgagagagctttagctttagaggtgtccgctaaggagggcccaaccccgagagtggtgctgagtgtgacccagcccctgagggtgttgaggcaggctcctcttcggctgcttctataggacgttcacgctagatcaccactagttcaatctgaggaactcgtggtgacacacttatctaatgctccatccggtctagtcaccttagaggccagtgactcagacgttaggagtccgctacctaccaatggaccagaagtctctccgagtcgtgcattcaatatcgttcttggagatgtgtctcaacaagcagtgcaccaatgcattcggctttgggtcttagcgtaattctctccaatcttcaggtgaatcaacta

SEQ ID NO: 49068 - DNA, 552 bp, Arabidopsis thaliana landsberg
tttccttttgatttttttttttgtttgtcttgcggctaatattttttgaaactacactctacacacatttgtgcatatatgatctttatcttatgttcttctctaggagataaataaagagactatatagtcaattcatgatagttagtaaatgcaattaatgcgtgcatatagtatgtgattaattagcaaaacattatgcattaaaattataatctaaccgtaaatttaatacgaagtaacttcaagtaagttagcggtttgtgtttggaaaaatgtttcatagtcgtcattaaacctgttttttttgagcaatgtgtcagattaattatcttgaaagcgaaggctgtaagaatttctgtcattttctacttatagtcatatttggtgagctcacgaactaaccctttattagggacttgaaaggttctactatttgtcactgttagtatacatttcgaattttttatgagcataaatttttgtttttctgttttttcgagtaattagcatagatttaagaggataaaggaccatatagttgaatagatt

SEQ ID NO: 49069 - DNA, 983 bp, Arabidopsis thaliana landsberg
ctttcaatcgctgttctgacagtagaatcaagagcgaggtccaagaataacagatccttgaggcggtcatgggacttcagcagaagtggccttagctcttgacgagcttcaagcaaaccctacatcaatattccttcccatggtaagtctacgattcacagaagtcaaattaacagtacaaataaaaacgacctagtaattatgaaaacatttcacctcaagaagtggctctacattcttttcttcaacatgttctaggacgaaacgaagcaagtcctgttgagggaagtgccaacacagtttaagttggactgatttaacaggtgtattaaattcttgagatgagtagggaagttgagagaaaagttactggatatccagaaggcaatcctgatacaggatttatctgcaccccaaccatgaaaccttcaccctgaaggacaacacaaatgttcagttgccaattccaagaagaagaaataactgtaacttttcagtatatcggcattacgtcatcttggtagcccatgcaattttgtatagccgactcaaggtctgcccctgaatgaacagcctagacaaaataaagaaggccacaagttaaatgatttctcttagtaagaaaaggagaaagaggaaatcagaccaactttgccaaagaaagatgtagctagactcataaaaggggctaacataaacttggggaagtaacctttaaagtcctcatgtagtgtccaagatcacgcaaaagaccgtctttttgttctcctctaaaatttggttcagaatgtatagcacgatcataacttaagagtcgctctttggttatgccattatcgttcaaggtcttccagtaaacacttaagtcaaagtcacttttgatataatccatcaatgcctacaataagaaaagtgtcagagaaagattaagaatggtagttggtaccagaagggtaaattcaaatacctgcagatgcaacatc

SEQ ID NO: 49070 - DNA, 662 bp, Arabidopsis thaliana landsberg
tgacattactgaacttctaatgcggacattgttttaactacgtatgatgtccttaaagaggacttgacacatgacttcgacaggcatgatggtgaccggcactgtcttagattccagaaaaggtgtgattaattatatttaggattcttatacctcgcatttttcattacatgatgaacttttgtcatacctgatatattgaagaagatgaattattaaaatatttctaagaatttgccaatatagattagttccatactcatgtactcagacgagccatattgaacaacagcaaatttaatctgacaggatttttttttatctcctggtttcctgcaattgaatagcttttcggagagattgagtaaagatttcatattgtgataggtaccctgttattccgactccactcaccagaatattttggtggaggatttgtttggatgaggcccagatggtggagagcaatgcagctgctgcaacagagatggcgttgagattatacaccaaacaccgttggtgtatcaccggaactcctatacaacgcaaacttgatgacttatttggactattgaagtttcttaaagcaaatcctttcgatgtttcagatggtggattgaagttataagagacccatatgaggtcgagcaggaaaaaaaaaa

SEQ ID NO: 49071 - DNA, 797 bp, Arabidopsis thaliana landsberg
agcatccatttttctatcattgcttgcttgctatggaattgggtaaatctcgattctacttatgttgcaattgcttttctcctgttagattttccgattattctttagctggaagtgattatccagacgccatctccatcactttcaattgtattcctataccttcttctgaagattcttcgtatttctcgattcgatgcttataaacttcaatctctcttccaaatcttgaaacgaatttctcccaaaaatctctgtttcttcacaaaaaaacaaaaaaacaatgttgtgtgcatcatcttcgcttgctcttttgggtcctccttcttcagctatggtgactatggcttcttcaccagtttccagatttgttggatttggtcatcatactattctcaggtgatttactcaatctagtcacttatcttaagttcatgtactttgtggtagatatttctgaggtttatgttctttgacgatcctcaggtatgataatgatcaacgtcttcgtcgtggttgttcttggactggaattgaaaagaagatcccttttcctcggaagaagactgcctctgcttctgcttaccctctctttcgcagtcagcatactaaagactcatcaagacccaaaaattacaaagaggttcaaatttgtaatccataatgattcttccttaaatctgaattcatgattgttgttttggttttcttaaggttttctcatgttgctgcttcttgatttacttcatttacaggttactaagtcagccaggcaaatgtttgctcgagagatctct

SEQ ID NO: 49072 - DNA, 847 bp, Arabidopsis thaliana landsberg
cctgttgacttagtgacattggatcaattcattattattccctactattatctatatttctattgtatattattgactaatcccatctaggatagagactagaacacttgaatacacgcatttattaaattctttttggttcttgtaaaaaattttggttttgatttcaccatgtttccacttgtacagggggatggtggagtggagcacctacactatcttttaataggtatgtctgcgagagtaagctgaccttcttctttgccttttggcatacttacttgcttcttggttttctacttcgtttgcaggctcttcttgtcaaaggttgaggagaaattcccaaaagactcagagctgattgttgcttgccaaaaaggattgaggtacttgaaatatagatagataatgagtgactaaccatgcttgaaatatgtggttactttatattataatgagtaagtggctggttaggttctctgcctatatattatatattcatagaattgcatggtgatttatccaggttttgggttgaagaagtatcattatcaaatggtctcggttcttgtggaatgaaaattagtcttatattgaaagttagtatgttgatagtataactgtgaatcacagggttcatattgttggatgatcctcaaatttatgcttgactcgtaaatattgtcagatccttagctgcttgcgagctactatataatgcagggtatgagaatctgttctgggtacaaggtggtttagactctgctcaagacgaggttatacgattgttttaaactttcggttttgtgctttatactttttcagtttcgtttctggattgcaagat

SEQ ID NO: 49073 - DNA, 644 bp, Arabidopsis thaliana landsberg
  unsure (1)..(644): unsure at all n locations
nnnnnnnnnnnnnnnnnnnnnnnnnnnnnnnnnnnnnnnnnnnnnnnnnnnnnnnnnnnnnnnnnnnnnnnnnnnnnnnnnnnnnnnnnnnnnnnnnnnnnnnnnnnnnnnnnnnnnnnnnnnnnnnnnnnnnnnnnnnnnnnnnnnnnnnnnnnnnnnnnnnnnnnnnnnnnnnnnnnnnnnnnnnnnnnnnnnnnnnnnnnnnnnnnnnnnnnnnnnnnnnnnnnnnnnnnnnnnnnnnnnnnnnnnnnnnnnnnnnnnnnnnnnnnnnnnnnnnnnnnnnnnnnnnnnnnnnnnnnnnnnnnnnnnnnnnnnnnnnnnnnnnnnnnnnnnnnnnnnnnnnnnnnnnnnnnnnnnnnnnnnnnnnnnnnnnnnnnnnnnnnnnnnnnnnnnnnnnnnnnnnnnnnnnnnnnnnnnnnnnnnnnnnnnnnnnnnntnnnnnnnnnnnnnnnnnnnnnnnnnnnnnnnnnnnnnnnnnnnnnnnnnnnnnnnnnnnnnnnnnnnnnnnnnnnnnnnnnnnnnnnnnnnnnnnnnnnnnnnnnnnnnnnnnnnnnnattcgtaacatggtcaagctgttccatggtgaattgtacccgtccaattcaacaaatacgaccggaagcatagtgtagctgggggctaa

SEQ ID NO: 49074 - DNA, 1167 bp, Arabidopsis thaliana landsberg
aattctttagcatgttataatgaactatactacaaatgatttcaataaatctggatataaattagtaaggaaggagggttaggatgggcaagtaagagaacaaaaggaagagtgataggcacgttgatatgtttcacaggagcctttgttgaagttatttacttaggaccttttataagaccttctcctccttcatccccaacctccaatttccttactacaatctcacactacttaactttcttcaaaaattctgacaattgggctctcggctctctcctccttgcatgcgccacgctctccatctccatttggaatattatacaggtaatcaaaattacgtttcaagatatcgattttcgaaaacaaatattatcatttgtagatgaatctacacacgtcttaacttgattcttaagtaatgcatacacgttttaattattaattattttttttgtttttgttggtcgggttatgttattcggtatatcagttggatacagtccaaaaatatcctcaagtgatgaaagtagtgtctgcctatagtttagctgggacactccaatgtgcaatcttctcagcgttcatggagccagacctaagtgcatgggaactcaaacttaacatggacctatatctcattattgccacggtatatctatgtgatcatatattataattactatatagtatgtatttcgtaatctgaggatgtctatatataatcatatatattgttcatttatagggaatatttgggagcataatcagaacaagtgttcaagtgaagtgctccaaaatgaaggggccttattatgtgccactcttcaagccatttgggatcctttgggcttccatttttggcacaagcttctttgtcaatagtcttcactatggaaggtaaatataattttcgaaagttatatttaaacaacgaagagactcaaattattctctagttacatgcgttcatttatttttaacccaaatgcttaataccaaatcaaatatgcatatatgtttgatatgacttttattcctgttcaaattttattatatacatatcttaatgtgttatataaaaaatttaagttgtcccttaatttcctttttgattttttcatattttaaaaaaagaaaaaagttcaaaccaattttttttttttt

SEQ ID NO: 49075 - DNA, 1149 bp, Arabidopsis thaliana landsberg
tagctggttgatctacactagggttttgccctaaactttttgtgataattttttttgttctagttgatcaatgttttgcaaaacttcaacatataaggtccaaggttcaaaagtatgcaaaatattaaaaattatgtattagttgtctatcgtatatgtagtttaacccgtctgtagtagacaactagatattatttacaaaatattaaggacttttaaactatattttgtagacctttaattaaaacctatggatggttcctacgaaaacatcaataacaccattccggtcgtacttaaaaatttaagaaaatcaaaatgacaaaaacgtgagtagattaaacgattatagttaacgattacgcatacgtaatatcacatcgaaatatggttctttaaattttaattttaattccaatatcatcatcactaaaacattcttttttccttcaatattccattagtggctaatagacaatcccatatattatttgaaaaacctagacatttaaaaaaatttcgtcaacaaccaagatggtgctcctctaacaagtcttgattaaaccgaaccggaaaataaaaccggtttacacaaaccgtaattagttcagaggttttagctaatcactcgccgctttttcctatccgagatttcatcatcttcttcggaaggagcttatcgttccacaccaatggcttcttctgtccttaatctcttcaaatcatgtagacccttcactccaatacgcttctcttctcttcccaagtctcaattcagaatccaatttcccctcagacccggaaaagaaactcaactacgtcgctgtttcacgactctgtcatcattaacggacggtggagcaccaatttccggtgggaaggagctgtggctgcacaacacgatgagccggaagaaggagctgtttaagcctaaggtcgaaggtaaagttggaatgtacgtttgcggtgtcactgcttacgatctcagtcacattggacacgcacgagtctacgtcactttcgatgtacttttgaggtatcgactttggagaaaataagctttaaaaacttctttgggtttatgggaaagttatgaattttttttatggaattttggttcttttggaaatttggatttggggaaattta

SEQ ID NO: 49076 - DNA, 476 bp, Arabidopsis thaliana landsberg
gggtgagattggagggtctgatgacctcgggaaacgaacgagtggatgatcactaagcagagaccaaactgagggcacacatacaaataaggagataagcaaagcaaaacagagagaagagcgtgacgaagaataatcgcaacgaagatcagtaggacagacctattgaactcaccaagaaagcctcaggcaatgcaaaccaaagactaaagtggaagatagaaatgaaaagggtgagccaaaatccatataacctcacagaaatggcaggttctgccagggggttctccctggaaaacagggggtcagcgccacagcacctcgaaaaaggacgatatcatcatcagccagcaaaaacgaatacaaaaaaggctcagaagtgtccgggaatacagagtgtgcgagcaggaatgatcggaagcagaacaggggacaatcatcactgcccgtcaatacgaacaaaggaggcaacaaag

SEQ ID NO: 49077 - DNA, 736 bp, Arabidopsis thaliana landsberg
ctttggtttctcaaatgttatctacattaatattccttaaatacattatatgtatatatatatatattatactctaatataagctgaattatatataaatcttgaattcttgataatcatcatacataccagcattttctttgttttgttctgttctattttgttttttgccttgttgttgaccaagtctatacttctgcatatagaaacacatcataagagagaatataaaccaacaatttgtagacattatacattattatatattcaaatttgtataaatttggacctgtaaatggcttttgagatggtacagtgttaaaccttttaatcccatcagcttcagaaccgacttaggagttgcttctacacaaccaaaccaataacaaatgtcactaagcaaacatatataattacatttgtaacctattaaatttgaagttatcaagttacatggagaagaatcaattgaatcattggtattaacttaaccaaccaaaccgaagtgaaccggaatcataatgtgaaaccggttatctcaattgaagaataagaaagagtaaaagagctataatgttgttacacagatacatcaactgtagatttaaccggactgaaccggaattataaagtgaaaccggttatctcaattgaagaagaggaggaaagaggagcttactgtcagcgccaccgagcttagcgacggcgtcgacgaagcgatcatgaagatcggctg

SEQ ID NO: 49078 - DNA, 574 bp, Arabidopsis thaliana landsberg
gcaatctctagacgattcttcatcttctcgagttgaatctgtgatcgaaaatggttgaattgttactaagtcgattctgatgtcggaattagtgtgtttatggtttaggaagaaatgggagctagggttcaagtacaacattacaatttaggatcatctgattcctacatcgctacttctctccacgatctcaactccgtcgatggtccgccgagagatatcgacggtatcggaggcgccgttggtcgtgacggcgatagtttagataatgacggcgattcctcttctgcggtgtgtctcaatttctagggtttatgattaacttagctcaaattagcgaaatgaatcaaaattagggttttatgaattttgagaagttatcaatagatttggattttgtctttcttcaggactgtatgcatgaatcatacagaaactctatgcaaatcggagtagaagaaggtggatctaacatggagaacaaaggatctgcttacattatgttaaacattgaaggtataataaggatcatcattctcagtactggatttggctcttgcactgagtttcttga

SEQ ID NO: 49079 - DNA, 902 bp, Arabidopsis thaliana landsberg
  unsure (1)..(902): unsure at all n locations
tttggtttcggattttgaaaaacgagtaagaattagaaaactattcgcaacatttaaagatgcctaagctgtgtttagaaactactggtaggaaaataatatctaaacagtatactcaatatgttttgttactgaatcaaaccctgaacaagaatcgatcctacaaacagagtttctgtttacaaggctcaaatcaaatctactaaaccattggtataagatgccagatccattctaccttattccctttccctaaaagcagaaactgtgattacaatgctcagagtatatttaatgttatctcagcctcaccaaagatgcagtggttatgagaatgaaagatcaaaactccactaattcttctaactcaacggaaacacctccttagacaattagacccgagaatataaaggatggcctattaatcctaagcataccgaaaccgggaagattactatatggtctgtaaaaagaatctcattccagtactaagaagtcacatcattctatatactctctttctctatgcttaaagctgttggcaaattgagctcgagaccaacagatatcaacaccaggtaaccacaattcaacacaatgtgttcaataacctcctagcattttccaattgcttttaccaatctctagatataacaccatagtctctaaccaatctaatggaagaagaagcaacgaaaatgaaatcaagaaaacaacattcacccatacttgaagcagggaatcgtttaaacaagcagagttctttaccacattacaaaatttaaatgtaagcaaacgaaaattacagattcaaatggagttatcttcagagtaccgaaatttccaaagcgaattttattagccacattgagaacgaacgnacatttatgaggccctcagac

SEQ ID NO: 49080 - DNA, 1062 bp, Arabidopsis thaliana landsberg
  unsure (1)..(1062): unsure at all n locations
tatctttgtttcgactttttttacttttcaagttcttgagaaactcatttttagtttgagggtctctccagattgaagaaccggttgaagtataccatgacatggagtacaaatcaaaacgttggcatttccctttacataaccttactgtatccaacatatggtcgccatttcttgttcaagccgctattttcgaagattctaacggtgtctcgaccgcttctgttcagctacatcttgatagactcgatgagacatggaccagtctcatgcctagcttcgactatgcgatcatctcaaccggtaaatggtttcttaaatccgcaatttaccacgaaaatgcaaaactcgtcggttgccataactgtcaggaaaaacctcacatagaagagttaggattcgactatgcttataacgcatcgctgcataatgtcatggactttctagcagctgaagataacagtaaaggcacggttttctttcggacttcgactcccgatcatttccaaaacaggggaatggcatagtggcgggacgtgtaagcaaacagagccggtgagcgatgaggagattgagattaaggatgtacataagatactaaaagatattgagattgatcagttcaagagggcggttagagagaagactaaccaggacggtgggaatctaaagcttttggatttcacccggatgttgctgacccgaccggacggtcatccgggtgagtaccgacagttcaggccgtttgataaagacaaaaatgcaaaggtacagaacgattgtttgcattggtgcttgcctggtccgtttgattacttgaatgatgttatattggagactatagtaaatggctgagaggnnnnnnnnnnnnnnnnnnnnnnnnnnnnnngaaaaccggttctatggaaataaatagactaatactgaacaaatttgtgtgaattggaaacatgtnaaattatgtaagaaagattgagataatgtgatattgattcttgggagctagccggtgaaggaagcataactggttgggtaatgagttaatttntccggtttgtaaac

SEQ ID NO: 49081 - DNA, 902 bp, Arabidopsis thaliana landsberg
ctctatcatattttttcagtatctcactggcggtgttctgattctacgcaacaaatacttgatagtactatacagaggcaaggacttcctttctgatgaggtcgcggatttggttgaggacagagagagattactcagcagataccaacattttgaagaaactaaacgcgagagcgatataggactcttggaggtggtaacaaatggtaaacagttgaaggaaacaagcaaaagtggaactttattagagtttcaagaactgcaaagaaaattcggagaaatggacccgagaaacctagagactgaagctgagaaagcaagactagagaaggaactcaaaagccaagaacacaagctttccatagtaagtcttttttagcttcattgcatcttttaaaatttcgctaaggtaatataagttccatggatttgttattttcgggttttgtttgcagctaaaatcaaagatagagaaatcaaatatggagttgtttaaattaaattctttgtggaaaccatcggagggagatgatgacatcgagatattgactaatgaagaaagagaatgcttgagaagaatagggctgaagatgaacagcagcttagttcttggtaagcgccaccggatccattcttgtcttcttcttattctgcatccattgtctataagattatattacacaaatctcaatttggtatttgtttcatttgtaggtagaagaggagtcttttttggtgtaatggaaggtctacatcagcattggaagcacagggaagtagcaaaagtgatcacgatgcagaagcttttctccagagttgtctacacagcataagcgcttgatgcatagagcaatggagtactaatctcaatcgaaaaaattaaagaaggcacgccatactca

SEQ ID NO: 49082 - DNA, 432 bp, Arabidopsis thaliana landsberg
tgaaagctcatgtttagctcgatcttctctattatatagtaaacaattcaacacttgtatacattgatgattcaaatccaacaaacttttaaacatacatgcactttgacataacgatgttactatgcacatatttgggagttgcctcaggcatacaatggaatataatgggaaacgaggttggctcacatggttgactggttactatgcaattttttaagagctgagatgagctaaaaataacgtgcttacaagaactaatttatcaacagattaacgattggggctttgcacaatagtggaggacgtaaaggacactaatgtctcataaagaactattcgaactaaacaactttgtaagagctgcaggtcaactatacactgggagaaagcagaaatcttaccaagtcatatacttgaacctttagagaa

SEQ ID NO: 49083 - DNA, 1224 bp, Arabidopsis thaliana landsberg
  unsure (1)..(1224): unsure at all n locations
gttatttcttttcttgtcagtctcagaataaaccatacgtgtatttatgattatttaaaaaaaaaaaaaaaagccaatcgtataattgagcttttacaaaccaaaccacattcaatttgagttttacaaataaaagaacttaagttgaatccaacggattgatgatcaaaccaaacgacattcagactgtagcatgaaggcgagtcttcgttcctcaaacgagtactcaacaacttcaggcttttcagacatcaatcttgcattgttggtgaatggtgttggtgcggtgtgcattgggacagagactgttgctggtgtcgacgggattggaatcattgcagcaacatttttcggtgtttgcatcatcatagtcatcatcttctcttcttccaagttcctgagaatgttgttgttcttgataggagttgcaaatgatgagatctcattcactgcgttgtttttcggaagttgttgtgttgttgttgttgctatgttggcctttgatgcaaccaccgtggtcgatatgggggaaaacggtttgcgaactaatggggattgcaacatttcagaaggattcattgattgtttccttgagggtagtcctgcaatgtcaagccctcttcttcctgcaggaataagattcatttgccaatgcaattaggaaatctattcatactatgatgataaccaatgatttacatttgattaagagtcttagttaccatttgataaagctccatcattatgtcggtgatctgctttcttgttaggcttaggagtctgatgcattgctgctcctaaggaaagtcttctgttagatgcaccaccggtcgacattcttggagcctttttaccaccaaggggtttagatgggctgggtttggacccgtaaagtgcctcttgttctgctatgagctgtccttgaagctttttctgatcctttaatatgtagaaaaaagttgcatcacatagagttggattaggaagatgatattgggtcaaaagtttctggaaacaataaatagaggacttatacgtacccgttgccgacggtgttcttcttctctttcctgcctgagtatgttatactcctcaagcatagaaaggagacggatctagacacagaaaaaaaatggcagccatgaaataatagatactcaattaaacnngaaaccaatagagatattgagactncatacaccatcatagagaaattctatcccg

SEQ ID NO: 49084 - DNA, 941 bp, Arabidopsis thaliana landsberg
ttgctctgttagaacgaacaaaggcctgtcaaaaagaacaaacctgatgtgacatattacatatatgattataattgattattgtatatatagtattgcatgactatctttacaagatttcaatacgaaaataaattaaaaggagaaaatttataaacgaagcgatttcattctcggtaaggttttccgatatgtctcctaactaaatcaaagccttgtaattgaaacttgtaatgattgttattctatatatctttgaagaaagcttcggtattggacgtccttaatataattggattttatttaaattacaaaaatcactgtataattcggctacatgacttaatcaattatttcacgttgaaaacaatactatatcaacttcaaatacactccttgtgtatggattccacaagttcttttctatctatagaaatatagaatccacaagttctatctacttttattagaatttttgtattgttcgttgttgttaacataattataagcaataaattcaaaaaaaaaaaaatctaaaagacacaaaatttccatctttgatagggcttcggaatcattaattactttttacaaacaaaaaagaagaagatagggcttcggaaattattagaaagatggaaggatattgtattaaatttggcttcatattttcctttggtttgcggccatatttccagtacccacaggccacaggaaaaaaagtagtactgctttattaagtgtgttacgataaatggaaagcgttttagtatgtgattacaaattattgtatgtgatcattaattagttattggtccgacttctaagtttaaatattttcagaattcagttagtttaattatacatgttagacgaaatgactttttttgagccatatataatggatctgaatttttattttggaaaatctttttataaat

SEQ ID NO: 49085 - DNA, 985 bp, Arabidopsis thaliana landsberg
gtgtcttgcgtagtagtttatctgtttatgattagttttatgtgatgtacactttagcaatacaaaaatggtatatataattaaataaagcttttactatatctaatatcaatcatcagatcacgatgacatgtgtttattatatctaatattaaattgactgtgatatatgtatgctagagtactataaattatgtattttatgcttatattataggtttgagtatatccttctttgtttgaataatacctttaagtatatgatatatctattaaatagattgtaacatttttgattaaaaatatagaaaataataactattttaaaagattattttatatatgcatctaagagaactaagaaaaaaaatataataatctgatatattggtaagaagatatgttgatgacaaaaaaagggtaagaagatatgtaattaattttttaaaaaataaatttgatagcttgatggttttatttgtagcttagaagaagttagatttaaaacaatatctcaaattttaacatatatatttttggtcaagaaaatatgttatcggtatatatataattttggatagggaaatttgtaagaataaccaacaaaaaccacttgggaaagctttaaaaaaaaaacactttggaaaacttaaaaataaataaataaaaaacaagtttggaaagctttctactaggtgtttttctattaattttcatgactcatcacgaagcttttacttgttttgcagtacatgattgtccgatcgtggacaatatatatacccctcgagaaactggcgattcacgacgttcatgtggattttattatatgcactcctaatacaccaataccaaaaccaacaagctggtcttcagttctttattgattcaagatttcaaggaatttatcgttagatttatatgaactctttgcttgtaacagtaatcagtattattcatttgttcatgagagctacgacatact

SEQ ID NO: 49086 - DNA, 571 bp, Arabidopsis thaliana landsberg
aattcgcagttagcaaagaagatactcaaaacaaacccttttttctcattctgaacaagaggtgaaagaaaagacatgtacataacataactggcgtggacacagattcgtagctgattctacaagcatgtcattagattgactttgtgattggtgacgacagtaaaggagagaaaagctaagatttttataagaaatgagtgttaggagattatgtgctgtgataactggtatactgtctctgtttcgagatgttctttgatcatttgtgtaacaaatatgtagccaatttttccatgtaagattgatgatgttgagaaacatggaatacatggtcaaacaaactcaagtctccttatattttgctataaggtgatcaaaatcttgtaatccttgttccttgtcattgtgacaatcatataaatgttaaagatgtggagtatatgagtagtcagtctttttctcatgatacagtatatggatataacaaatagatagttcatcatatttggaaatgttttcacaactcctaaagatttaatttcataccataatttgaatctcttctttg

SEQ ID NO: 49087 - DNA, 608 bp, Arabidopsis thaliana landsberg
gaaaaaacatttgttagcattgttttttttgatgttttattttggtctcacaggccaaggaaaaaaaaactgcaaaaccctaatgttttacatactcgaaattgaaaattgtttaccattatttgatttccctggagaaaacaatccgtttaatcatttcaaggcgatatcaacactaagcaacgacgccaacaaagatatatatggtcggttaattaactcaaaagtaggaagaaaaaaaattctacaagcttagtaatagctattacagtattcacagagaagctcgagatggaaaaattgttgattcaacgtaatcaacacacacaaagctcgtagtcgataaacggaaaaagatggattcatctacaacgacgtagattttttttttatcacaacggcaaagtatgtatgagtatatcattttagaaattatcaatctgttagaaacggtactaaaaataatacttttattctacataacagtctcttaccgtttctaccaatgaaaagactcttattactttgtcatctgatccacatactacgcaatgagaccagagaacataagtgatgatggcgttggcgtccgctcgtgcctcctttga

SEQ ID NO: 49088 - DNA, 1245 bp, Arabidopsis thaliana landsberg
  unsure (1)..(1245): unsure at all n locations
ttccaacatggaatcttatgattgctttattgtacatacaatgagagctaatagatcaaacttgtttgaatgtaaataatttggaatcttttttgtggggatatagagttgggttttataatctcctcgagttagaaacaagcattattggttttagatacatctaagattaatcttgcatactattgccatttttttggctgattgttactcatatatagttcgaccagagaaaaatcaacgtctacacttttcatgtacaactgactacggctcaagccttctctaatatagattgtgccatatgcaaatgtaaccaatcatcgacattgagattctctgctttgatcagcaacttctgtttgttttaaagattcttaattgaaggattcataatggaatttttttttaagatcgtgaagattatacttccttatagtttggtttttaaagatgtaaaatttatttcatatggtttctgatgtcttttgatcatttgtaagtatattagttgtttgtgcaaacaatattactagttccatgcatcgatacatatttgattaagaacattcgccaaatggtcaatacaatggggtatcagatcaaagatacaaaccaaattaagacccttggaatttgtaacaaatatggtgctggagatagatatcacaattcataataattaattataggatttataatcaccattttaatattgatgtatcaattaatggaaacaattgcacggacctacttgcagtatatgcaaaatgaaattggtttgagctatgttttggtattaacttgctttgtaacgtttgaatctttttttctaaatatattcacattttaatataacattgtacaattacagatgtatgagaactataatatctaaacaaagccatgattaatgacaaataataaattttcgaaagtgaatatattattatagaacttaattatttatttaaaagtaaaaactaatcataactcatgaagtaaaaaaatagttggtctagccaattgcaaagtagtcacataaccacttcggttaagacattggcaaagatcaaaaagtcacaaacaaagttttttctctggttgactaaatcgtcgaaccaccacatgtaattaatttgacttaaactaacaattagacagtangtatataaagaatagtggtgttttctgatgggaggcatttttccacgattattttgttcacgagaaaatgctatgtcg

SEQ ID NO: 49089 - DNA, 515 bp, Arabidopsis thaliana landsberg
actactgacttcagatcagctgtggatgagtgttgacggttgtacaggcgccgttcttgagtctttttcaaaatgtctccaaatggagaagctgggggatggtgttgagatggctaccattgatttgcatgcccttgtgggtggtgttgactgttttactcatctcaatgattcttataccaccacctgaacgcctttcaacgtttatgggatctcagctttgtaaccctcagaatcaccaagtatgtgtacaagaacccgttcttgggcctataagactggatgaaactaaatctggattcactgcaaaggggatcacacccaaggagcttggtattattatgctagctatgcagagccaagccttttcgttcagcagctagttgcatgctcttgctatgcagtccatcaagttttgcgaaatgaaggctaattagttgtgaacataagagtaatgctttttgtagtgaacaataattgtcgactgtgtttaatttttgttggtcagatatgag

SEQ ID NO: 49090 - DNA, 528 bp, Arabidopsis thaliana landsberg
cttctatttccaccaatcactctctgaacacctaacctctgctgctcctctctaatccgagtaaccaacaccgcttcctcagcccgtctcatcaaagtctcagaccaacgttctccaggcctagccatgttccttcccatcacatcctgaaacttcccaacatactcatgatgtagatacggctctctatctctcatagcatcctctgagaaatactgtccctcggatacaagcttattcaaataagccaatctcctattcctcacagctacagacctcgatttaatctcttctgaagtcggacttatcttcttccgcaggtttttcaaatgccaatcaacctcgtagtcatgtttcatagcatcaaactcaagcaattcatctactagtagctccgatccatatctctctgaaatcatcaaagcaaaaacaactaatgcttcagttcccaaatcatatttaataaaaaagtttcattctaataacattacacactcaatacttagatgattatgaagccaaaactca

SEQ ID NO: 49091 - DNA, 743 bp, Arabidopsis thaliana landsberg
gtgtatgtttacgttatcatatctttgtggcctttcctatatgagcttaggctgttttgggcctctcatttctggtagacttcagtttggtttttcatgtaacacaatttagagaaacaaaaaccgatatggcacggaaaactttgataaaataatgaagaacccaattaatgtatgttataagaacatacgatttttttttttgttaacttgtaaatccagtagctcatcaactcacacatgcatgctactagatttacattcgtgtagaacaaaaaaataatttttaaaagaaaaaatattaaggaaagacaagacaagcaaatattcatgaaaacaaggatttggaaaataaatatcaataacaacttactatttttggtttataactattattctatatatagagtatttatatgtgttaagagagtttaaagtgtcaaataaaacaaagagacaaaaaaggactagtgggaggagcaaatcgaagaagacatatgttgtcttcttgatttagtttgaaaaccctagcacaccattcattttttggttaatcaggaaaatattcatccctttagtacacaaacctatctttatttgaaaagcgttacttatcaattagtaagaatagcaattttttctaagctacgatccaaaagttccagaaatttttagataattcttctctaataattcaagcgatccaagtagaaccatagctgaagaatagcacccaaataaaa

SEQ ID NO: 49092 - DNA, 331 bp, Arabidopsis thaliana landsberg
  unsure (1)..(331): unsure at all n locations
aaactcgaacttaatccttaccactatcctgcgtaaccagctttctcctataacctacagttagatgagtaatggaatataaggagaccagcagacttccacctataggctatggtgaaatgaacactgatgttatcacctgaacttgattctaacnnnnnnnnnnnnnnnnnnnnnnnnnnnnnnnnnncctataaaaacctcacgcctttgccatattgcttgacacccactttcttacatcgcggacagggctggctgttattgataacttttactttcatcgcactcttcgttcattaacattgcatactccaaatcctttctgttg

SEQ ID NO: 49093 - DNA, 817 bp, Arabidopsis thaliana landsberg
aacatctatagaggattgtggtcggtgtttgccggcaacgacacatatgtgatttcttagttacttcaacaataaactcgagtttgcctcttatctagctagaatgacttttgtttagcagttttctgaattgcagcttccctaaaccattatcttagtgcacatacataaattatggtgcaatatcattttggtaacgttactatttgttagatatttatttaacagaaaatgtcataatccttaaacacaaattcttatttaaatatgtaaacgttttctaaaacttatggcttcttctgatttattggatctaatatattggagcagccttttgtttaccattggaatactcaagctaagaataatattgttagcttgaaattttctacattctaatgtattctagtttcaactttcaactaacacatcatctttccacatagtaggcgcgtataccttcccaattttgtccctttaaaccggaaactaaccgaatttccctatccacattctaactaaaccgagacaaaccgtttcatttcgagcaagtcttgaacaaattagtttcagagtgctgctattcgtttttggtattcggacaaattaaacttgaaccgatggttagctacttagccaattaaaccgaaactatccaacatcttcataacgtgtctcatttgacagataggggcatttacgtcatttcggagtctccgccacatgtcagatttgttttataacgaaaaaaattcggtatatttaatttgaagatatggctggaaaattcgtaaatttgaccttcgtcttcgggaat

SEQ ID NO: 49094 - DNA, 256 bp, Arabidopsis thaliana landsberg
aatatcgctaaggaatccagaaatttgcctcctatcagaaattttaaacagcgaatcgtggttgagaaagggaaagactcgagaatgtggaagctcatctataaacacatggtaacagagaaagaaggaattgattctgcaaatgctgaatcagtggcttcagttgaaagtgaatatgatgatgaggctggtggtcttcagattgatgcaagaagaagcggaacagttacacttgttagagaagcgcttgagaaaa

SEQ ID NO: 49095 - DNA, 324 bp, Arabidopsis thaliana landsberg
cagcggacccgcttactgaattctttgtttaacatgatgatctatgctacgataatttaagattacccggcctgcgcagggaactgtgaacataggacggcggcggccaacattagctacaacctgtttgctaacttcttggctaacggcatatccttaaagccgcggaagggagcctcacgtactagtgcagtgggtctcgtcgtacggaattaccaacaatgtccaccactaaaacggcatgcccaccccatgaatcaagaagagcttagctgtaatcttactatgttggacggaagttccgtgttgagtaataagcgagct

SEQ ID NO: 49096 - DNA, 523 bp, Arabidopsis thaliana landsberg
gtcttcttcaccatctcaaaccctagcttcgggaaccataacatctccttcaaaacgacgtagcacagtacacgacggccggtttctatcatgtcgtttcgtgacacagagactaaaccgttcggctcttttcggaactccgtcgacgaagcttcatcgacccaagtcatgtgagctatggaaatcatcatcatcatcatctagaccgatcaaaactcagtcgtttcgaagagtttatagcgcaaacttagatccattctccgacgaagagttctcgaaaaaaatccaagagctaactctcagattcaatatcccacaccatgacgacgacgagaattcaatcgagccgccatggaacgagatggttcatttgtcgagtattgaaatgaaagcaaacagtgttgatcttcctctttcacttcgtatgtataagaagaaacgtcaatgggaagaaggagttaacaagctggtgaatctgcgtgttgctcgatgaataaagctttttcttcaatggtgtttatga

SEQ ID NO: 49097 - DNA, 619 bp, Arabidopsis thaliana landsberg
tgattcactatttgtattaaaaatctttaggatatgccccaccacttgccattaatttcaaatatcttcagcttcaatcaagaaaagaggaaacttgattgatacaaatattcctgaaactgcttctcagttaaagtaaaagaggatgaagaaggaagcagagagattctggttttcttcttcttttattggataaaacgacacatagcttccactggctcaatttccccatctaacaaaagcgtagaatcaaagcaaacccgatatcccactactcatttcttcatatacaccaaaaccactcctcaagcacaataatcctggagagaaaagaaaaatacctttctgtttctgcagtcttctttttgacagagaatgcacataagagaggatgatgacagcatcagctctctgcggcctcggggcatttgccgtcggctgtttcgatttgtggtggctaactatggatattaggagacaaagagatgaatgaagataagcctgagaggaacaaactgatcaagaagggatcaatgtctgacatcactattcatttcaagcaattagaagcttcggaggatacaagtccctgcatcagcaagtcagaatcagagagagg

SEQ ID NO: 49098 - DNA, 456 bp, Arabidopsis thaliana landsberg
tgcttcctgtggagcaaggaagcgaacgaagccagccttttgtattagtgcattctgttcagttcttacttgatcatcccgtgttctcgcgtgtgccatggccgagtgacaagctcaacactgatattgttgtcttgtctcaaatgaagtctggttccacaagttaaccggaaatcttcatgggtgatagctgtgtcagattcttccgcgcatagggcaagtaatgcaagtgatagctgtgtcagtttacccccattttcttgggcatcacttgtctcaaatgaagtccattggaggttcgcaatttatgttccgtggcatcgcacgggcacctacctagtagcttattagtttttaagaaactggaaatctggtttctataaactcagacatagaccggtgagtttggaaccgctctggtttgtgtaaactagttttcttaaaaaaaaagagtgg

SEQ ID NO: 49099 - DNA, 1348 bp, Arabidopsis thaliana landsberg
aaaaaaaatttctaaagttagaattttaaagataaaaaaaaacattaagaaaaatggtttttttagttttttttagccattaaaaaatggtcctttatctaatcccaaaaaaatgggtcattatttaatcctctattgataacccttctaataaaaatcaatgttgagatcatgcagctatctagacgtaaactagttatacatatatcaaaagaaaaaaaaatgtttagatcgattttagtttaccttagttcttgatctgtatatatatgaagttgatataaattcttcgtaagactcaaagtggtaatgttttctaatatttgtataatttgtttctgacaactcagatattttatttatagaatttttgcaactgtagatttatgactggtatatattattactaactaatggcaaaacaataattttagattaaggagagggagaagaaaacgggtcagcaagaaggacaattagtccaatgctccaactcttcttcagttcttctgcctcaatactgcgtaacctcctccaggtctcgtctttctctctctcagtactagtccaaattagattaagaggttgattaattgtgccatgtgcatatatataattcaaatttgtacatgtatatctatgaatgattctgattaatttaattttatgggcagagatggctttgtggagagagttgggggagagaacggtggtgcatcgtcgttgacggaaccaaactctctgcttccggcttggatgttacgtcctaccactacgaacgagtagaactatctcactctttataatataatgataatataattaatgtttaatattttcataacattcagcatttttttggtgacttatactcattattaataccgatatgttttagctagtcatattatatgtatgatggaactccgttgtcgagacgtatgtacgtaagctatcattagattcactgcgtcttaagaacaaagattcatatcttggtaatgatttctcatgaataattaatgtaacttttactttttaaactgtggtgaacgcaatatatcaatattctatcatttgtaaatgcgatcactatgttgtttatgactgatattcaaaattgctcaaatttagtcttcttgtaaatgtgctcattatttgcgctttaaagttgtcgcagcaaggtaccgcatggcacacatgattatttgatttttgaaaaatggaaaaaggtttgtataaatacgataattgttcaaaatattcaaaaatattctaaaagtgattctatatttttttataaacaactgaatatggtatatgcatgtgttttaaaaattataaaata

SEQ ID NO: 49100 - DNA, 586 bp, Arabidopsis thaliana landsberg
gcgatcgtcaatacgatttcccttgaattctagctccttcagttgatggtttacttcagcattttgtttctctgtttcttctatagctgcaacaagttttctttcttcttcctcaatctaagtagagcaggaaacaacaaccaacttctaacttaagattatatgaaattcatcatctttagagtcaaacaatatggtaaaagctgaaatataccttcttcttttccttgagaaaatcagcttcactaagaacatcttgcgtctctccttctaacctctgaacgcatgcttcgtatgcttccacgtccctcgtcacatcctcgacttctttttcaagtttatcagacaataccctcatgcattctaagcacaatggctgttcaacctataaaattcaaaaaaggggaaagtaaaacatattatcaggtccacatgactcaaatttatcgagcagatatactcttgtaacaagaacaaaaacgttagagcgtcatgatacctgtgtctgagttctagcaatatcaaaagcacgagttaagacattgatagtcgcattaaagccagaagtatttgaatgtaagggacc

SEQ ID NO: 49101 - DNA, 1194 bp, Arabidopsis thaliana landsberg
  unsure (1)..(1194): unsure at all n locations
atgttggctcagttcctgcgatctgaatcctgtatatcacaaaccaaaatttacatatacaagtgtgacttataaccgaagtaatttaggttttgactttggttaacataaaccctaactaaaccaaagttaaattaaatcatttattgttatgtacctggttaaggaagagtcttcaaggcaaattaagaggccacttttttggctgaagtaaccgaatgcgacgtgtttgatcatctcagcggtagagtcactgcgttttgataaatcgatttggtcggttgataacttgagaatgaaacaatccttcccattgatttctttctctccaacgaattgtgccgatgagaaaactgatgaaatggttagaggatccaacccctgatttcgtgttcatgcacatagacaatctccattagtagaagtatatttatcattagcaatccacgttctatctccttatatagaataaaagtgccaatactttaaactatgatcaataactagcaattccataaatataattgatcctgacaaatcatcatttgatactaactagcaaggattggttccatttcactagcaggtctatttttcattggatgcatagttttgaccatacagcgaccaacaatcacaagagtagtttaattacattaaatatatgcttttggttggtttgaattccccaaaactggtggaagtgtatgtttgtacgtttattcttggcggctgcttagaagatatatttagtacatcatatctcattttctgaaaattcaaacactgttttgcagggattattgagataattaagtacatacttttaaactcggatttagattttagatttgtaatcatgttaccctttnnnnnnnnnnnnnnnnnnnnnnncaaaagaaacagaatagaaaaataccccacatggatgacaatacatgaataagagcaaacatgaaccttgtttagtgtaaatactattttcaatttaagaccgataagtgaggtctagttttaactcgttataaacaattattgttaactagtgatcaatgtaccacaaaaggggaccatttacgtactaattaacacataatgtttttatcccaaaaatcttataattgtataaagttgggattaactaatatctcacctttgatctttttccaagttccaccctttaatccatttttt

SEQ ID NO: 49102 - DNA, 620 bp, Arabidopsis thaliana landsberg
ctaactatctttattccaaacttcaaccacttttactctaatgctaacaactgggcatatctatcataaagcaaattttacaacatgatgtgatttctacaatgtaaccattcctttttgtgtctttgtaatacctttgattatgctaaggttgctcttttgccctttgcttctcttgactacaagcaaaataagattttgatgttgttagtaatcaacaactgggtttgtataaaagggaagaggaattagagtggagatgagagagataccgattttcttgaatccagaaactggctatatatgtcatagagcttttgtttctcggtttcggaaaccgatggtttagttttagaagcaatcgacttcagaagaggatcagttattattggtgtagttccggtctcgggtttatcttctctgttcagatactcgtgtacagctgcaagttgcgcatctgagagaagagcttgaagatcagctccactgaagccttcagtcatcaaagctataggctttaggtcaatatcatctagccatcagaagcttgtagaaatgcagaaagattttttgtcatttttaacctacctgttaatattttaattagattaaaatccttt

SEQ ID NO: 49103 - DNA, 291 bp, Arabidopsis thaliana landsberg
aggacggtgaagcagagatagttcatcgtccagatcacaacagtgtgataatgagatttacttatatcataggtattcagaatgtactactaaaaaatccaacaggcatattatatgtagtcttaggctcgtatgcagccatagcagaggatttagacgacatcactgcaaaccaatctttcgccatgtgtctaagcatcgtcgaacagttgctccgaatccacactatcaggagcgagccagcgacacatgtctccagcgcctcatacatggtctgagcgtccctcaata

SEQ ID NO: 49104 - DNA, 407 bp, Arabidopsis thaliana landsberg
aggacaataccaggctggaacccttagccagccagcaggctactgcccaagaacgcgcccatgcttctcaaaaagaccgagcgcacgcggatcgacagcgagcgcgaacagaagcgcggcatgctgctcaatgccgaagcccacgacccgcggacgccgatggctgccatcgccggggcggaggaaacgccggaaccccgcagcagcatagaggctgacgcgagaggccaaggggccggcgcgcaatagaggcagcgacgctcgacaactggcacggaagaacggcaacattctggagaccacccgccatgaaagcggaaacgtgcaggtgaaccagcaacctgagctgatggaggagatcaacggcaatgccgtcgctgccagacagacggagaagacccggcatc

SEQ ID NO: 49105 - DNA, 992 bp, Arabidopsis thaliana landsberg
tattttagatttgaatccaatgttgtgttgttgttgttgattggaactcaggttggaacaagcgactggattagcttttagattcgtcattggaaagtcaaaggatgccaaaaagatggctgagcttgagaaggagataaaagagtacagagattttgtgcttcttgataccgaggaagaatatatacgacttccatataaaacgtaaaatcctggttttggttgttgatctgtgtttccctattatttcttagtgttttagtagttttattcttatcaatgactgattgatgtcttctccttgtaggttggctttcttcaaagcagcttttaaactctttgaagctgattattatgtcaaagccgacgatgacatttatttgagaccaggtatttgagagctagtgtttcagattgttttcctctgcatcacagtagtattcaaattccttttgtttttgttttggttcagatcgacttgcgacgcttcttgccaatgaaagacttcattcacagacatacattggctgcatgaagaaaggaccagttataactgaccctaaactaaaatggtattaactagtcctctctttatccgtgactgtaattctttgttgagtttatcagttttggtgacagatactgaatttgtcaggtacgagaaacaaggcaatttgattggaaatgaatactttttacatgcttatggaccgatatacgttctttcagccgagatagtagcttcacttgcagcagctaggaatggcaggtttgaaatgtttttgatgtacctaattagcagattttgatatgccaatctcattatcggcgtgtttcatttcagtctgagaatgtttataatgaagatgtaactatcggatcttggatgcttgcaatggatgtacatcacgaagacaaccgcgctttatgcgatccgcattgttccccaaagtccatagcagtttgggacattcccatatgctcatgtaaca

SEQ ID NO: 49106 - DNA, 672 bp, Arabidopsis thaliana landsberg
attatctcttaacattaaagtgtatctgttcgttagaaactaatttaattttctcccattggaacttaagaggctggttttatgcaggaggtttccaagttctgtgacctttatgagactgagaaagagaagttactggacgttgaaagtgaccttaaggactgcaaggtgattagaacttccgtgacttagtatccagattattcatccttttagtgagagttttcttgaaatttcaaacattcatgatccagagaaacctgcacaatagtaacaaggacttgctagatctcaaagagaattatatccaagttgtttcaaagttaaaggaaaaggaagtcatcgtctccagaatgaaagcttcaggtaacagttcttactcaatactttttctttacatgcttcccatttcttgggtttgttgcttactcatatttttcttgaacagagacttctttgatcgaccgtgcaaaggggttacgttgtgatctgcagcatgcgtcaaacgatataaattcgttgctcacaagattgggtacttcttctttcctatttctaagggtgaaaataagatctgtcatgtgctgatttttcttgtttctgcagaccaaaaagacaagctggaatccgataaccagagcatgcttctgaaatttggatcacaacttgatc

SEQ ID NO: 49107 - DNA, 594 bp, Arabidopsis thaliana landsberg
agagtactacgcatagagcaaggtattaggcatcatagacataagactggtctgctcaaatctttgccaggtgttgccttagccaaagcacatggtgtttaggctccatcttcacaaagccatcaccttgccttttgttgtccaataggtaggtaaggcaagtcatcaattcctcatcagtgaaacctggaatactcatgcaaatttgatacagatcagggtggacatctgtggtctggactacaacaggtgcttggacagcttcagccaatttgttcacagctccagttagtcctgtcataatccccagctcttcatcactgagtctccttttctttccatatgattcataggaactaccagcaccagcaccactatgagaagggctgacaccagcacaaccagaagcagtagtaccaacaagacatggttcttcagatgcaccagcaccttcagcgatatccgagatggtgcaaggggctcatttgaggccatgcataccagccagtagcctgccagctccacatataatttgcatctgacatagttttaattggccattgaggaatcagcatcctttggttgcttttgtat

SEQ ID NO: 49108 - DNA, 374 bp, Arabidopsis thaliana landsberg
tactcttcacttttctgtcaccgatccaatcctattctttttttagagcattaaactcttatgtattctaacgtagttttaactttaatgccaattccacccatcgtaatgttaggtcgctcggtggattatattgttgtttatccattggttgttactttgaaaatttcacaaatatcagaatcattatttgaatctttatttcataatcgttgatcttacaattacatactcaaagtttgacactagctagacttaccaaaaccggttggcgccatatcgtaaaatcgagtaatcatatgatgtatagtaattatgttatcccgattataaattcctagaacggaatatatgccctaactacttttctgacc

SEQ ID NO: 49109 - DNA, 574 bp, Arabidopsis thaliana landsberg
ccaaaggatttgtagttctggataacgctagcttgatcgtcccattcagggacatcgtctcccatgagagcgcggacgttgggagggaagttgaaagctggtttaaagatattagggttcttcttaggaagagcaacgcgaactttagccctacagttcctgtactttcttctcgacctcgccatctctctcactgattttttttttcgcgatggagaagaaaaagcagagaggtgaagttcgcggcggaaagggtttaactacaaagggtttacacggttctctaaaacgacgtcgttatgttatttacctattacaaattattttaaaccggtcgatgatatacggtaatagatacaatatttgattggttcagtggatcttttataattttttcactgtaaattttgaagtaaacttattccaaagaaaagattcatttttacaaaattcgtatttagtactcaaggttatgtgtggatagaaacacattcatttataattttagatttacatactcgtaagaagactatttctcaaaaataatccgctctaggtacttgtggtcacagat

SEQ ID NO: 49110 - DNA, 696 bp, Arabidopsis thaliana landsberg
  unsure (1)..(696): unsure at all n locations
catgtttttccatggattgagaagaactcaataggaaaagtaacaaccatgtattagatttaatataacatgaacaaacatttatatgcacttattatttatcatatgtttcagaaccagccttagtttcttgctcatgtctcttcaaatctcttcatcagtataagattaagttaattttgttcatagtcaacaaagaaactaatgtgttttggtaaagtaacgaccactctatgttgaaccgtttccggtttaagatattctaaccggatgattgagagtcgtaccgattggtttgaatcggttttggattttgctgctctatcgtcgtgggagagagataatcatcaattttnnnnnnnnnnnnnnnnnnnnnnngaaccatataaatcatctcccatggcggaaatcgaagtctttaactaaagaagaagaagaagataaagctttgtaatttatagaatggcgtgtgtatcgacatgcttgattctctcccctaggttaactcaagtgggtttatcatcaaagaagccttttttgattcggctcagatctcctgttgatcgttactcttttcccagaatgttaacggagaggtgtttgagcactcgtcggaagtttaatcgccatggaatcgctgtggtgaaggctgcgagtttagataaagttagcggcgcaatcaaaccaagtggattg

SEQ ID NO: 49111 - DNA, 537 bp, Arabidopsis thaliana landsberg
ttgactaattttaagcacaattttgaagcaaatttgtgagtaaacgtgtagagttttcatactcatctttgcattctattggcctgacaataaaaaggctttgaaaaacgattgatctaatgcatctgaatattgcaattattatttcgtatgtgtttaaacatacattctataaaatcactttcagtgcacctgacaacttatctcctaacgtttatttttatatttttagtctttggtcctattgtttatatttgtttcttggagtctcaacaaatattaccttctggaatgtttgttcatgaattggttaagcattttgagactctacttgtgtccgtagtaaagcataattggagtctaaactagtagaatatgtatgaggcaaacaatcactgtgaatttagagtcattaattgaaaatagtgagagagagaaaagatcactaaaaatagatgagttaattacaatgttgagaagtatactagagtctttaaaacacgtcaaatgaccacaggtgcaaagctgagatgcaaa

SEQ ID NO: 49112 - DNA, 594 bp, Arabidopsis thaliana landsberg
  unsure (1)..(594): unsure at all n locations
tctctcagattcctcccaagcaatctcgttttcaaattcttcgtatggtttcgtgagttgtttttttttcctttccgaattcatcgtcgatctcaaagtaaatagtcttgacctagatttgttggggtacaaacatatttgttttttgttgataatcacaactttttctggtttttaattaagataatgggatgnnnttagttagggtatcgtcagattattgagactatgggatttattaggttaggtagatgtgccctgtgacataacacaaacctatgactgtagaagcttctttcatgttaattcatataggtgcttaattggttgagtcagttcctgtgctgcgtatattggcaaatttttaactttttttggatctgcaacgtctttgtaatatcaaaatgctgagttattttaatcttaataatgctaattttgccggttattcctagcttccactgcttaatctgtaccaagaaagatgtctaagttctttgctcaaactctctaatcaagaattgggtgaaaaagaaattaacacagaaaaagatgagcttcagttacttctaggccttgaacttaatgagacaa

SEQ ID NO: 49113 - DNA, 533 bp, Arabidopsis thaliana landsberg
taatttcggaatcaaatccaaaagaaactcttaccctttttgatataaatcagaatcagtgatgagattttcaaaatgttactttcttctctgttttgttttttcatttaccataaacggaaaattctgaagaattcactaagaacaaaactttatgaatttggagtgttgtggtgaagatatgggttttatgctattgaggttttctacaaaatctaattgaatggtcaacaaattggtgtgagaggagatcttgtttccttaatcgcatatattagctttgaaaatttgtggaaattgttataaattaaaatgtgttgaacagctattaatgctgcagcaagaaacgaagaagtgtacaccaagggggggggggggggggggggttgaaaaggggaattcgggtaatttgtaaggggatttccgggattttgaacttttgggggggaatctataacgggcgtggctaaaaaggggaaaagtttgggccaaaactgggggaattttggaattgggtttaaattccaaaaagt

SEQ ID NO: 49114 - DNA, 781 bp, Arabidopsis thaliana landsberg
tttaacttacgagtagagacatcagaaaatgatttccgaaaaggatatcgatgaaaaaatactcatttttgtttcaaaacattaaggttgtaaaatgtaaatgattgtggtaaagagaatagataggtaaattacactctccatagtaccaggataatattttttaaaatttctacatatataagatataatcagcaaaaaaaattggttaaatttttgtcctcagattcgagatagttttctttctagcttatttatctttcttggttctcttatatctcgccagcctcacttatctatcacccgagacagctacactactggccaccgataagccaatacgaattggtgtgatgggatgcgccgaaatcgctaggaaggtctcccgtgccatccatcttgctcccaatgcctaaactttaaactggaaatcaaacctcaaattcttattattttctaaattataaaaactacacttttaatcaaaatcaaaagtattaatttaagctctaaaagacaaatgttaaaactctaaagtctaaaccataaaagttatggcatttcttcagttttcaaacaattagcctaatgtttttttccttagtttttctaaaaatagattgaatattataacctttttgatatataagaaaaaaggttatttaaaaatttatgtcgtctggttgcaacaacttcacctatttcatttcctttttatcaacaacactctatctttttctttatcaacacttttcttttattttttggccggaaaaaaccc

SEQ ID NO: 49115 - DNA, 478 bp, Arabidopsis thaliana landsberg
  unsure (1)..(478): unsure at all n locations
acttccctcccttggtgacaaatctgannnnnnnnnnnnnnnnnnnnnncacacctggccttccgaacgaccggactgttcaacatatgtcattttcgcgattgcatgtcggcgccgcacgcagtatccggatacgcaagcaagaaacgacacacacggcgagacaggatgccccaacaatcctattctcgaatgaactttctatcctgctcgcgatgtcatgaaagcataaaatgctcgatatcgaaacacgacaagcattttcgtcactgtgatatcacgctgcaaagtcgttgtaaatgactttcactattcactttcattgatccgactcggatggtttggccggcgcaccggggcaaccgggcggtggtgggccgacagccacccgggccacgctgcatttgaccgaattgtgcagatgcagcggttctgtcgaggccggagccggcggtggtgcacccaggcctggcaccag

SEQ ID NO: 49116 - DNA, 1095 bp, Arabidopsis thaliana landsberg
gggtaaagtcgattgcaatggaggttgtgatgacaacttctcgccttaattatctgttgatgttgaattcgaataatgataaagctgtttgttattactgatttactagtctaaaaagtctttcgatttactcttttcaaagcttaccaaaaaaaaaatgtacaagatccgagtctttttttaatttttaattttttttcctggtgaagatattcatgatctgctatatataattagtaaaagttccatggatagtcaaaatggaaattaattaacaaaactatcttttttataaaaaaatttattactatgctgctaacaagtaacaatgatgcgaccatccttagtcccttacacttgattcgtctattattttttctaattcaaatgtcaattttttaatggcacagatactcgttttcaagtcaatggagtgatactcatctgaattggtcgtgtctttttcctttatattagccctatcagcggctttaataattataacagacattattatattgatgatcattgggatgccaatgaagaaagcgcggatcaccaagtttttgatcattggtatatgcgattcatccatttcataacggataatcattcttacgcgatgatctgctgagagtgtgacaattatttgatcgtttacgctatgttccttaacctggtcataaacaacggtatatatatatatgcgttaccttaactacttcacaagcaaggtttcaacttttcaagtaaggaattcactcaccttagactctgcactatcaaaatcttcccacaagctcatcgataagtaatcatttttgcgccagtgaatttgaacatctgtaatagcagcaatcattttaaatagctatcacctaagcataatttcctaataaacacgaattggcaaaagcgtaaatagatatatttgaatatacaagtagattaccggagttttcaagtatggatatgatgacgttgctaacctccgaagttatgttcatcatctacaccataaattacttgtaagaattaactccgagtgatcattcacttttatattattttcatgaataccaaaataaaacaaga

SEQ ID NO: 49117 - DNA, 922 bp, Arabidopsis thaliana landsberg
ggatttatttacgaaaagaacggccgctaaacgctttcaagtatttaaatttcaacatttaagtttgaaaacattttgttaataaacttttagttttaaaatatcaaaacagattatttttgaaaaaatcttaaaattaaatttaagtacgagaaaacatgttgaatttatgataacgcaagagttacatatctaaaagacgggatgctaagtctaaccgttccagtatttaaatttaacatttaagtttaaaaacatttttgtaataaaaatattttatataataaaaagccttttagctaacaattttcccttttcggtaagacaacttcggtaagacaaaattacccttttccgttacaacggtcatatatttttttacagcgtaacaattttcctatggcctatgtgcgtcatgagtcaaatagcttgaacaaaagcggagcagtttagctagactaaccgttagtgggataacatacgcattttttattcgtatattttagtgtttaccgtgaatattttaattaaaacataaaaatatttttttccctaattctttaattttggttttcattttcaagtccgccaaaaaaagcgaagagagggttttaatacgattccactcttctcaacaaatttgacgtttttgttcttcgaaattcaaattcacccagaaaaaatctcaatccgcgatggttgaagaatcagcttctgcgtcggaagcttcggtgatacaaaccctaaccgagccggcgacggagattgcgcaaaccctagaacctaacctagcctcaatcgaagccaccgtcgaatcggttgttcagggaggcactgaatccacttgtcacaacgattctaataacaacaacgaagctgatagtgctgctactgaggtttgtgatgaggagcgtgagaagac

SEQ ID NO: 49118 - DNA, 862 bp, Arabidopsis thaliana landsberg
  unsure (1)..(862): unsure at all n locations
caaaaaagatattagaagaatgtaactatatatcatattctttctaaaattttgaagtaaagaccaaaaatgtcaattttgaaacaccctgtaagcttggattggtacgatatatttagctacagcctggattaaaacaatgactaatcacgaatcatgtggaagctaaacttaaacaaatatgcattaaatacgttaaatccatgcttatgtattctttacttttattttgcatgtattttgtctttttattttccgaaaattacccatcaaagttttattttattttaaaaccgtggaatgacactttttggttactacacttgcagaatcactaacataatcaacattcaacaaaattataaagatctgtgaaattattctgttattttacgtatttaggcaacgtacctggataataggaagatttgggtgttgtaaatcatttcgaagatcactgaaaaacttcactagtctcttcttatataccgaagcatcgaccatatcaaccgtatcagactcaccctgataccacaaaaccgcccggtacgagccaccaccaccactagccatcgccgctttagccctcttcaccgtctcctcgtaaagaaactcacctttttgccattggcttagtttagtcccaccgatagagcacggaaccaaacccacctgaccaaaccggttaaccacccggttagcaaagggcatcccnggtccaacaccattagtcttattaatgtcaatgtcaacgtgaagtggctctttagcgtctttccactcgagtttactcgtgagacggaggatcgaagggtttgatcggcattctggcggaattacccgtccacacggtggtgtttgt

SEQ ID NO: 49119 - DNA, 1069 bp, Arabidopsis thaliana landsberg
cgcatcattacaaatttgtttttttgtttaattctaatatttataaatatataaacatgataagaacctaactcctaacaaaaagatatcgtatgtgtgtatgcatgtttggtggcaaatagattatcggagatacttattgattcagagaggatggattattgctttgatcatgttcatgtctgtgtttgaaattgcattctgccaaaaccaaactcctgagccagaatcaacacaagtcttgcagctacattaccaagatcgatatgtacgtcgtctctatacatatttttactaatcaagattcttaaatagcttttcattaacaactagagagacctatttcacaaataacaaaactgttacgctcataatgtgtggctttcttgatgtgcaagtcacgtgaatcgtttaagaaaccctaagtgatgacgatgatttgtaggtggtaatggagaatagatttttacaattaactttatcaaatcctgagggtttcgtcaccggaatccagtataatggtatcgacaatgtgctcgcctactacaccaacaaagaatatgatagagggtaagtatgtatatctttatgtatctaactgctctgttctgagggtttaaactctaagtctctaattgatctgatttctgtagttactgggacgtagtgtggaacttccctgggaaaaaggctaaaaagaccaaaggcacactagaccggtatatggttgttgtgtctatgtttagttataccaatcaatatgacctaaatgtgaagtgagacttacttggattactttacaggattgaagcaacaaagatggaagtgattacacagaacgatgaaaaaatagagctatcgttttcaaggacatggaatacatcttcaactacggctgttccagtgaatatagacaagaggtagtcaagtcactatctagagaaaatctttagtttcttgggatctatattgatgagacatgagttgatttcaggtttgtaatgctgcgaaactcgtccggattctacagttacgccatcttcgaacggttacaaggatggcccgctgt

SEQ ID NO: 49120 - DNA, 610 bp, Arabidopsis thaliana landsberg
ttcaatttccaacacaagaaaatatttacttgtaagctaatgataagttgggtgggattatgacaaagaaatacaattcgtacgttatttaaaatagtcaaaatcgtaccgagtggtgggaagaaagaaaaagtcaaatgctgaaagtgtacgtcgtagtagataagcgtatcataaaaaaattaatgtgaagcaacaacaattaaaagaatattttcatgttactatgttatctaaccattaatacaagtcaccgactaggtgataatttggtatttacgtaagaatagttatgcatgtatcgacttatagacttttttttttaaaaaaaaagggcaaccctatcagctcatactttatttcattgcattttcaacgacggctaaggctaatttgacagaataaaaacatatcaaaagtgaatctagaaccaatgatatttaagcaaatatatttgttttttggtttttatatcttataagtagaagttaagaacaaaatagcatcttttaaactgactatgatgtattgtcaaaaaaaaaaatgactatgatgattaatgaaatgtatatacccaactaggaaccaataaacaaagaaaagggtattt

SEQ ID NO: 49121 - DNA, 670 bp, Arabidopsis thaliana landsberg
  unsure (1)..(670): unsure at all n locations
cctgcttttgtaatacttgggaagcccgtcttgggaccttttcatggacccgcaaacttgtgtcgtatcgacatgtcaagagtgtnngtcgatcgaccactcctctctgagttcctgagatcctaaaatcgtcccttagacttcctcttatctttagcttttgnctccnnaaaatgtctccatcgtcccctacccgtantgtcccgcttgnncatggaataccccctgaaaagacaccttaacaaagaccctcgagaaataaccactaaagacctcannaaatcctaacccccctaaatcatagatannaaatcagtgannaaataggtatattatcacccaaagcatgccaagaatannatgagannaatgatatgacaacccagtgatgaatggccctatgaaaccctagacccacaaacnngatgatgaatggaatgtaagaaaaccatgcaatattattaggcattattcatactcccccaaaccttagttttcttggcttgccctttaaagctaaatacagaaaaaccactagctgataggagagggtttaatagtnntggggattcagaacccaatagcactcaaataaatagtactaataatcaatttcccaatttgnngtagtttaaagatgcccgataagagtcgaacttctaccctcaaa

SEQ ID NO: 49122 - DNA, 1423 bp, Arabidopsis thaliana landsberg
  unsure (1)..(1423): unsure at all n locations
aatcatctctgaccgcctcgaagctacaggacactccgctccacaaccgatttatcgataaaagacgtcccatgactttccatggacgagcaaaggcatcattactccctgcctgagaagattagagcatatgttgaagctgaaagaattcctcacggccactgaatctttagagaaaaattgatctctgcaagcttctttttttctcctcaatgttggcgccatttaatgttggaactaggaataaactaaaaagtataatgaaccagacacggttaaccgggaccaatgattgaacgaaattaaattaaccggaaaagcgtttgttcctcagtgaaaagaatacaaggatttggatatctggttttaagttacaggagacaatcttcttgctacgtttgtgtttgttgttgaagagaatctgctctaatgattgaagtaagtgacggatggatccgtgcagttctcatagaacgagcttcgcttcttcctttcgcatactcctcgccaagaggccacctcggtcgaagatcatactaaattcataaccaacaaaacatcaatctccaagttatcagtttttcaaacaatagaatctttacaagtaccgagttttgttaagaaaaagtaccacataatcctcaggttcagttgcaggtggaggtggatcatatcttcctacacgaaaatgctcgagaccagtccaagccaccattactcctggtgagactaatgaattcttgttagtttctattctctgtgtctctaatttgatcagtaggagaatttcaaactctatttaccattgtctgtgcagaggctaggaggagggcaaacaagtttcaggtttttgttttcgacaatgttattaagtcggagtcgtacatacttgtttgaagcaacaccaccagagattacctgaagcttagtcaataataagtctagaagcatttgtcaagcaaaacagaggtttctttttcttgttctaaacctcaccatatgtttaatagaaggctctagttctaatgcccagtctattgctcgctcacatttttcttccagatgcaagacagctactcgctggttcatacaaactgaaaatgtttagaaatcagcatttcactagaacattaaaaccggagataaatttgtacctggaaagaagcggcaatantcagcacggtttcttctgtcttcgtttgttgcagaagagacgggacatttagcatcactgcacatccagcaaacgaccaatatttttgtacacaaagcttcagcatatgtgacacaacgctgataaacaatttccgaagctgattataagatctcactattttacatttctttggcttcaatggctagcacacatgtgcttcaaccagcataagaaaagtgcaactttatgatatttcatggacctgat

SEQ ID NO: 49123 - DNA, 391 bp, Arabidopsis thaliana landsberg
cacccttgatgagagaaaacaagattggagcttgcatggttgagagttaaaatgaaggcatgtagtctgcggggcgtggttgtgtaattgtcaagatgtgaaataacatagaacggcattttggcatgtttgtatacacgtccttcaactctgacaataggggattctgtctaacgtaacggtatactataaaattttaaaaaagtcacaataaaaaacctgtagagatataaatactaaggttcctaaacaacattttttgtcggggggggggggatcactatttgattcggatagctaccagggacgaaagaaaaagcaagcaagcaagcaacagttaattcatgcaaggtcatgttcaggtttttggtttcaaaaaaaaaagagggat

SEQ ID NO: 49124 - DNA, 668 bp, Arabidopsis thaliana landsberg
cttgtgctatcaaacgcaaatacaagatttctccattgagaccttttcgacagtaaaccgattgcgatcaaattagctgatctgatcggaaaatcacaagaaaaccctagaaaactcctccggattcgaattctcgactcgattcaatgtatcaatggagaaaatttgacttcttcgaggagaaatacggaggcaagatacctgaggatgtaaccggagatatacaatgttgttccagtggccgtggcaaagtcgtcatcggctctaacgacggatccgtcagcttcctcgatcgcggtgtaaagttcgattccggtttccaagctcactcttcctccgtcctcttccttcaacacctcaaggtatattgatccaatccattcatcaaattttacaattcttcttcaaatttgttgtatgatttgcaaattgagattgtgtttgttgtttatcaattcatgctcatcgatttcacaattcctgttgattttgatgtttttacgcttgtcgttgtttctttcaatagcaaaggaactttctcgtcaccgtcggagaagatgaacaaatatcgccgcaacagtcagggatgtgtcttaaggtttttgatcttgacaaagttcaggaggaaggtactagttcggctacgtaatcgcctcaagtcgagcgtc

SEQ ID NO: 49125 - DNA, 423 bp, Arabidopsis thaliana landsberg
atacgcacacactcccgcgcaatagcgagaaccgcaaaataaagccccggtaaggataccagccacgatagggaaggcacagtgatgccctgtgatcatgagcatatggcgaaattccggccatagcttaattgcacagagaccagctagagagtggggcaggtactcaccggcacacagcaaggagcgaggccgcgcttgcttgaccggctcgtggcggagggaagtggggctggctggcgttgtgtggcgccgatggagctcgagccggtccttttctaggcgctcgggggaaggcggtggctgggggaagcggccggcaccggcgagctcgccatgcgtgcgggcctggcgctcacgccgattgggtcggctcgggcctgctgcgggggtgccaggtcggctcgcgctccgtggcggggt

SEQ ID NO: 49126 - DNA, 791 bp, Arabidopsis thaliana landsberg
aaaagaataaaaaaaaaaaaaaagaagaaaaggggaactctgaagcaacaagaagagaaggaaaaaaaaaaaaaaagaaagaaaaaaaaaaaaagaaaggaaaaaaaaaaaaattaaataaaaaaaaaaggaaaaaaaaaaaaaaaaagagagggaaaaaaaaaaaaaaagaaaaaagaaaaaaggaagaaaaaaaaaaaaaaaaagaaaaaaaggaaaaaaaaaaaaaaaaaagaaaaaaagagaaaaaaaagaaaaaagaaaaggaagagaagaaaaagaaaaaaaaagaaaaggaaaaaaaagaaaaagagaaaaagagaaaaaaaaaaaaaaaagaagaagaaaaaaaaaaaaagaaaaaaaaagaggaaaaaggaagaaaaaagaaagagaaaagaagaaaagaaaaggagaaaaaaaaaaaaaagaaaaagaaaaaaagaaaaaaagaaagaagagaaagaaagaaaaaaagaaagaaaaaaaagaggagaaaaaaagaaaaaaagaaagaaaaaaaaagaaaaaaaaaaaaaagaaaagggaaaaaaaaaaaaagagcaaaaagaaagaaaaaaaaaagaggaaaaaaaaaaagagaaaaaaaaaaaaaaaagaagaagaaaagagaaaaaaaaaagaaaaaaaaaaaaaaaagaggaaaagaaagaaaaaaaagaaagaaaaaaaagaaaaaagaggaaaaaaagagaagaaaaaagagaaaaagaagaaaaaagagaaaagaaaaaaagaaaagaaaaggaaggaaaaaaaaaaaaaagaaa

SEQ ID NO: 49127 - DNA, 599 bp, Arabidopsis thaliana landsberg
accagatcggaggagttggtcaccgaagatgcttgaaccgttgtacagatcgctgacccttacagccctcatcttgtgcgatcgccgtcatccccggagccacccacgcctttgtgtcctctgccgccggagacaaccgcacctcgcatgaacgttggagggggccatcacttccatgcacgcgtgggagctgccaccgcacaagcctctagtcgctcgtgcctcctcgggccaagaccgacgctcgctcctccggggccaccgtcgtcgttgtgcgtgcctttggggccatcgtcgccgctcgcgcctcgagtaaccgccgtcgacgagtgaggggggcgcgtgtcgccgctcacgcctccggggccgccatcatcgctcgtgccctaagaaaccgccgccgctgtgtgatgaggacgacaccgctcgtgcgtcaggatgaggacgtaaaaaacgaacctatcggtctatgactatatacacacacacacacgaaaacattctatatatttttattttgtgaagatgagaatcgctgccaattccaatacagccataacgcaaaatactagttctattgagaatgttggcaattagga

SEQ ID NO: 49128 - DNA, 341 bp, Arabidopsis thaliana landsberg
cagtaccaaactaagaacataactctatctatgcatttcagttaatacagaaaaaatgaaatagcggggcttagggggcttagatacaggggtactaaccctattaacaatgcccaacgatcttacatgtagatatgcgcaaagactttgatcttattatttgaactgaagaatctaaataacccttacaaaagatttaaaagttcccccccattttaatatgaggtttaggacacaagcacatacatcactacgaatggacacgacagacacgggcaatccggaatactaatagatgactatggtggaattagacacactacctacaacatcaacaaaat

SEQ ID NO: 49129 - DNA, 153 bp, Arabidopsis thaliana landsberg
ggttcacgctcacacgggtgcatcgtcataacgattcccgaggctaacgggttaggttctcaactttgccaacctcatggcagccctacgcatcttgtatcatacatggcgagccaccacagtcagcgaacccccaatgccatagcgttccgc

SEQ ID NO: 49130 - DNA, 639 bp, Arabidopsis thaliana landsberg
aaatctagaaaaattcttgacttgagtaatgtagccaaatacaaaatatgacatttgttactatataaaacaaaattgtttcagataaaacaagtaaattattaatcatgtatatgtatttacgtcaactcgtgtttggagcttcagtcttcataaatctctttttgtgaattagttagctactataaaaaaattaaagaccaatttgaattagcttgtgtgaaaatgaaaatgtttaggaagctcagtccatgaagctatctgtgttgaagtgtattacaataatttctcaacaatcaatgagagacaagatcaagaaccgtttatctgcaataacttctcaacatcaatgagggacaagatcaagagacgattgtgatggagaaagaaagtcaagacaattatgatgtgatttacactgtcaacacgtgtatcatatactgtagtcctcgataaaattaatactataaagattacagaccgatttaaaattcattaccacgatatgcatgaggacaactatttgatagttttttttttatttttatgatagacaactcacaactaattgatccgatgcacaataatgagcttatagtatttatttcgacatttcgattgttcaagtcggatttcgga

SEQ ID NO: 49131 - DNA, 426 bp, Arabidopsis thaliana landsberg
tttttatgtaaaaacaagatttctatctttcttatgtatttcttcctataatatatacaaaaaaaaaaattaaaaatagaaaaaatcttattacaaactttaaaaacagctgggcaaatgtatgtaaggcgtgtgatgataggaacaagtcagcatacatcactccagtctggcaaacccacgaattacatatccctcccacgcccacgcaaacaaatacatgtcgaatcttgtttcgtctcctttcttcttcgttgacacacttagggttcacttcaattctcttctttggatcgtattacttggggacatttaaagatctggctctgggatattctgggttagctaggatccacattctcaggtgtcagacctgaacttttgctccatctaaatcgcttttctcttcttctctggctggtctgg

SEQ ID NO: 49132 - DNA, 853 bp, Arabidopsis thaliana landsberg
gactgtaacagtcagatccgcttggttaaattgctttaactctttgaattgcagaattctagagcaaacttcgagaaaatcctctcaagattcccagaggtaaaaatgctggatggaatataacttgctatatataatgaatagagccccttgtattcactatcacagtagccaatttctggctttgctatttaaaattagacttgttgctgatactgttttgtgttggatacaagtttagaacatagaaaatcgatgtacctactgatgatctgttcttattaggcaagtataatacttcaatacgcttttgatagattgctgacactgatgatatctgatgacagcttcaatcagtattcaagaatttacttagcgaaggaactttgaaaccatcagacttcaaatccatgccgttggaggagttacctgtccatgaagaagaccaagtatgcctttttctttctctttacatgagacacgaaactcttaccttagaactgcacatgaacaagaacaatacatatcttcttttcatcagccctttccatgtgttttttccttccaaacaactgtttaaaagcgcttcatatcttagtttacactaacaaattttggatatattttgctcagtccagcagaagtctctcacacaagacaaagtgcaaccataagcgtttactgaaaacccaagaaaaggagctagcggtacgtttgcatttaatctgtcattttgaagttctactactcatttggaaagatacttatggcatgcctctcttgactttagttccttatttgtctggcatgttctttttattccaagatgttattatatttaacaagttgatca

SEQ ID NO: 49133 - DNA, 1079 bp, Arabidopsis thaliana landsberg
cagctcattctctctggttttttttcagtaacaaaattattccgaaaacaacaatacatactaaacaaataaaaacaatattcgaaaccattattaatatttttttccatttaaaaatgatttgattccaacattcctaacaattactgccactctcggataagttcagatgctttttttgcctttacatttttgtttcgatgtgtagcttttctccaatggtttcattttgcttcgtttgtactttattctttattctctctataaagaaacaagacgatgcatgcatgaacgttatataatcttatcacacttattagatttaatcaatagagcatcacggaaacaaattcatagttaaaaatcgttttttttcgaatcgattattttacaagtatgaaaaccgccatacatactttgatatataattatataaaatggttgggacgtccaattggcaaacctcaatatttaataacaacttcgcattcattttccgtaatagatatactttttaatgatcatttcaagatatagaatagagtttcagaaaattttcaaaatttaaatatataacttactatcagataagttataaaataaaaatatatgtcataaatttatcgtctaattgtttcaaatggagaatataaatacacaaattatttcttaattaaaatatgcaaatttttattttaagaaaacatcattttcgttttttttatatccagataagacatcagataaaaatttataaatgtaaatgccaacgtttgatgaaacactcaatgctatattttaaatattaagcattcaaatttaacatgtaactatataaacaaagaaatacaaaaaataataataatacaaacaaaacaaaggaatggaccccctagctagtatagtatctatgcgattggcatgtttagtgatcgatagccgatagttatacactgttaactctgaaatattgagtctaccagaaagaagtattggcccatatcgaagacttgaaatgacccaaattattccatgtaaatcaaaacgtaaagtaattgggttcgatacattttgcagtt

SEQ ID NO: 49134 - DNA, 606 bp, Arabidopsis thaliana landsberg
gtcatatgtcggcggtcggttccaacaattattatccaagtcaggttggcacagtgcattctccctaatacactagctttttggggtattgtctcaacagacctaaaacccgctgctatacatacgggcgagtgtcgcgcccgtgattgatcccgacggcgatgctcgcacacggcctggattggcacgccgtatgtgcggacgacccgatggacatgcaatgtgttagcggtttggttccaacaattaatatcaaagccaggttggcccagcccaacccattattcctagtgggctaactttgtgggttttggctcaacagaactaaaacccgctgcgtgcgggctgagtgtagctagggcgggggtgtagcagctcctagtgacacgagctatgcaacaatggtggtgagagctatgtaacaccataatgggctaactttatgagggatattggccaacagaactaaagcccactactatgcgtgtggacacatgtgtcacgatctgacgttctggattggcgcgccatgtgtgcgggcagcccccggacacatcatgtgttggcggtctaattccacaattattacctagtcgcgccgtgttg

SEQ ID NO: 49135 - DNA, 850 bp, Arabidopsis thaliana landsberg
acaatctagctgctagtactaaatttggtgttcgtggttgctttgctttatgtcaaaattgaatctgtgagatctctgtaaccggacttgaagtccttttttcgtctctggtgcaaaaccacaacaagttttagagagatatcgatttcttaatgatctgtgtttatttacttgcggcttgagaataaacattgcaaccttttgcttttgaaggctttacttagaatgtgcaggtttcatgatacttcttggtgtttactatctgcttttcggatgttatattgattaatggcttgaaaattttgaaattgagatatctataaaagctacacagctgtgtgaatattgttataattcgctcaatcttctgattcgttttctcatggaatccaggttctaacttgattaccagtgagaagtaggctaagatggaaatcatgtcaagagagaatgagactgctttgtcaggtcctaggccgatggaatggtctaccgtcccacacagtgcttctcaaggacctggtcccaatggcaagaaccggacctcgagcttggaagcacctatcatgttgctaagtggacatccgagtgctgtctataccatgaagttcaatcctgctggaactctgattgcatctggatcccatgacagagaaatcttcctctggagagttcacggggactgcaaaaacttcatggttttgaaaggtcacaagaacgccatccttgatcttcattggaccagtgatggctcccagattgtatcagctagtccggataaaactgtaagggcttgggatgttgagactgggaaacaaatcaagaagatggctgaacattcatcgtttgt

SEQ ID NO: 49136 - DNA, 350 bp, Arabidopsis thaliana landsberg
aatgattcatgatttttatgtgacttaatataaaccgtccctaagtattttaagactacaagtaactaaaataaagaagtagctttatgataataatttaaatttcagatttgttttagtaaaaaaaaaaaatatatatatatatatatatatatattatgaaaaattagcttttcttgacatttgaacctgagtgctgaaggttactacgaatagcctttaccactaaactacttaataaacaccaaattttgagggccgaattggttttataggatttgggaacgccaacttgggcttgggggcccacattaccgaaggttgaaattaaatggcccaatggtggggtt

SEQ ID NO: 49137 - DNA, 1511 bp, Arabidopsis thaliana landsberg
agctgaatattttcttttccaatactagagttgatatgtatgtgaaccccattaacttagattttgttttaataaatatgacccaacgttgttttcctagctgagtatctttccattgtcagaacagaatacacgaaggacggaagtcacaccagactacagactttccgcagttgtcaatggagagacttttatgcatggccgccaacaggaaaggacctgttttaaagtgggagaataacgttgcatggcctggaaaacttactttaactgataaatccctctatttcgaggtaattattgttctttattttctaagtcccttgggaaggagcgagcgagtgaacactcttttctgtttgcttttatagatgaagaacacttcagttttacatatttcctgcatagatatgcaacgttagctggaattctaatcttttaaattttaaactttgtgaacccatctcttattagaatgttcttttggtgtagaaatgagaaccctaaacccttctcatggaaatactcttttggtttcagccagttgacataaaaggaagtaaaggggtcttgagacttgatctcgctggggacaagtcaacagtggagaaagcgaaagtggggcctctggggttttctctctttgattctgcagtttctgtttcatccggccccgggtgagttcatatgttcatgtagctgatcactgatatggttctgatacgtctctgacggtgccatatgtctgggtggtcgtttacctatatgctaatctgtaaaatattcatttaggttggccacttgggttctggagttcgttgaccttggaggtgaacttagacgagatgtttggcatgcaattattagtgaagttatagcgttgcacacatttctacaagaatttgggccaggagagggtgataagtcgctgtatcaagtgtttggtgcaaagaagggtaaggaaaaagcaattacaagtgcatctaactgtattgcaagacttcaagctcttcaatatatgcggaatttgcctgatgatcctatcaaactagttcagttctcttttcttcaacaagtagcctatggtgacatcgtatgtcaaactttagccgtaaatttttggggtggaccactattgaccaaagttgcagacaaacgaggtgatattgccagggcttccagagagtcctatgaaacttttgataacgtgtctgatctagatggaagtgtttacttgaaaaggtggatgagatctccttcctggggttcaactgcatccatgaacttctggaaaaactcttctctaagacaaggcttagttctgagcaaacaccttgcggttgctgatctcacacttgtagaaagggcaacagaaacatgtagacaaaaatacaaggtggtcgaaaaaactcaagccactattgatgctgcaactatcaaaggaatacctagtaacattgacctctttaaggtaacactttttctccattggatagttttgctacaaacat

SEQ ID NO: 49138 - DNA, 837 bp, Arabidopsis thaliana landsberg
tttttttttgtgctaccttattcttgaatcaattgtctgttacttcaattctatatatttcttgttgtttctaaatgattaagggaaataccgggaaatttagattaccgaaaaataacgaagagaaagatgacaattatttgcccttacttaatatattaatcctaagtcgaaaaaccaaacctcattgaaataattatatatcgaatggaaatggtgattagggagattcttgaaaggatattgttttgctatatgaatgtggtctagttgatccaatgtagtttagttaattaatgtttcaatacaatggagtattagtgaacataatagggtggtagtgtttccacggttccaccaagcgcgctatctcagttacttcactcaagtgttaagctttgtttgatacgttcctaggatcagtctagtgaaattttcgttcatctgaggctgaaaaggttaaaatgtatattgtctaatattttttgttgcctttgcaattcctttcttgtctcttttattctccttttatttctagctagatagtttttcagaattatgcaagagtaactaagaagtgtctaatataattaccaaaatgagagtggacacgtcctttatgattcagtacttaattcaccatatctaaacttaaatctgtaaaaagtcttcacagtgctgagacaaatctaataaacgcctattatgagtctaatttactatacagactatgctatatatgtataaacataaaattcatctctaaaaatgaagtgggtttgtgaaaaaacgaaagacagaaaatattatggaacaattcaataaatttatcactag

SEQ ID NO: 49139 - DNA, 1022 bp, Arabidopsis thaliana landsberg
  unsure (1)..(1022): unsure at all n locations
ggcaacaatcataagctcatgcaaaacagctttttgtcggtccatggcagtattaattccaccaagctcctacacaagttaacaaacaaagctctttatacaaacttgagctaaccagaacattcctctaggaaacaataaaacgatatactccacaaacctgaacaatgcggctagcatcaaactcaaacccttcactggatacagaagaatcataaagtcgactacactgatctaatctctgactttcacttctatgctccaatatcttctctctacagataacacaaagaatcaataaccatcaacggcatcaaaaagattctaaatttattgattctttaagatttcaaaatctgaacaagaacaattcaacaaaataacagtaagcactaaagcaaagcctatggagaaaaaggaaacgaatttaggcgtttaagtaaaagcatactcaatctgaagcaagagtttctgagaatcgggatgaagatcggcccacttagtactgtaattcgccggagctttatcgttggtgaacaaatacaactgttgttgtacttgctgctgctgttgctgatttagctgttgctgctgctgctggaactgttgcggctgaaacaacgacgtttgctgttgttgctgcggttgcgagaagatggaattggtttgctgtggttgcgattgcgagaagatggaattggtttgctgcggctgcgattgcgagaagatggaattggtttgctgcggctgaaacaacgacgtttgctgagtttgaaacagcggctgaggcgtctgttgttgctgtgggggaaaaaacgacattgctggatataaccgacggagaatcaaatctagggtttctatcgccggcgacgatttggaagttgagcaaaaaaattcaaaagccccctctcgttaaaactttaaacacagataaattgatatttaattagctttctttcacattntaacaaatttggagggctcttttgcaaacaatacattatcagttttgtcttaat

SEQ ID NO: 49140 - DNA, 514 bp, Arabidopsis thaliana landsberg
tgcgcatttataaataaacactaacatggtcaaccttaattgaaatattatttattaataattgtttagtttaaacatgctatctatttattagtcctcgcacgtcgcgttggcctgcgtgctgtgtgcatgcctgcatgctgtttcacgcattgcgcacttcgtcttgctccgttaattcacctcgcttagagtcgctaatattatttaaattatttatttaacgaagggctgttagtataacaagaattaattaaaactaggtgatagctttagttgcatttaataaatgtcgaataacacgagtatgtcgaattaaatgttccatttcatatttgtataacatagacacaataacttctcgatcatagcttcgatctcggcgtctatttttctcatatgaccataaaaacgagcgctattttgtattgcacgtgattatactattttcgttttatggtgtattgtcctttctgtttcaagaatgttgaacgtgtgtttgactcgcttggat

SEQ ID NO: 49141 - DNA, 485 bp, Arabidopsis thaliana landsberg
atagaacgaaaatacacattgcacatactatacttttatatacatactgatgagaagaataatgcaacgaacatcctttgctttcgatttctatatttacttaaaccgaaactccatttatcagccacgaaaggcttaaatattattataggctctccactttagtattttcatcaaggctagctatactctctgagcttagccaaatcggaaatacaaacaaacccgctaaagaatatattccaaaccgctaaaaagtcaaacaacatttgtaatgtctaatgttattcaatcatgagatttttattaaaaaagttgtctttaaactttggtgtcggtatttaaaaatgtcactaaaatcaatcgtctctgtgttcaaatctctgtgtgaagtttaatgattcaaaaagaatctactagagacgaagctttaacgatgaacaaaatgatatgatttatcatatttatagagatttaacatcgat

SEQ ID NO: 49142 - DNA, 1068 bp, Arabidopsis thaliana landsberg
catgattattccatgacagaagaaataaataattttaacaaaaaaaaagacagaagcaataaataaaaaacaagcttctgatacatgaaatacatatatgtctcatacatacgtttagacaaacctgaaatgtcctcttcgtacaataatatccacacgtgtcagatttacactgaagtgttgctatgcatatcttttgttccatacttttctctacctttacaaaatcatttattttcttctcgatatcaccgattggtgtatgttgtaatcatacattaacattaacaaacaaagatactttttcaaggattattctaattggcagttttagaaataatggaattatcctttactaatcatacagaaataatgtaaatatgtttagcatgtgtgaaatgactgttggtcgatttttaactttaataaataaaaaagcaataagaacgtggttttatttcgccactcccacttgcatcgtcatcatcaaagaaaaacactaatgtctagaccaaagatttaaaacatctaccccatatatatatgatgaacaagatagcaagtaaatttaaatgtaaaattaaattttagtttgctaagattaatatacaaaagaagtattatcaatttatcagttattaatcaaatcaagttttaagtgcaactccaaagtttccatgcttatatagttatttgtatactactatactgtatgtgcaagaaaagcatttatactcttcgccatatatttcaaagttcacaaaatttaattaaatttttataccatttatgtacctataaatagatagaagaagccccatctctttcaaactatcaaccaccaaaatctttcacattacaccttccttttgtcctcaaaccaaaaccctagaaaccaaaaatggaaaaagccttgagaaacttcaccgaatctacccactcaccagaccctaatcctctcacaaaattcttcactgaacctacagcctcacctgttagccgcaaccgcaaactgtcttcaaaagataccactgtaaccatcgcccgagctggcagcagcacgacgag

SEQ ID NO: 49143 - DNA, 117 bp, Arabidopsis thaliana landsberg
aggggatgccgaaagagtaaaaaaaaaaaaggaggccaaaagctgaaagactaattttgaaaaaagagggggataatcagaggggagagggggggaagaataaaaaccaaagaagga

SEQ ID NO: 49144 - DNA, 517 bp, Arabidopsis thaliana landsberg
gaacgtctcattgttttactaaattagtttgattaattgattataaatcataataagttttggacttctaactcataaccgccatttgagtgaattaaccaatctttaacgtgtattattctagttgtaatgaatcataacacgcccattcgatatgatggctgttatgtattattcatgtctattctaacagattctagcaaatcaccaagtgttaacacaccaaattgatttgtttaagaggtgtaaggaagaaaaatcatagtactagctagtagagcaatgatataacaacataatctataacatataatgtcgaaaaatggtatatatctacaataaacggagattcgttacaacttatagcacataagtcgaaatatcgcacactttttcgaaattttgaatttttccaaaggagaatatctttgatcctattgattatttcgttgcagtttttatagcttacgttttcgaaaacacacattgcgcttaataagccacattccgaaaaaaa

SEQ ID NO: 49145 - DNA, 914 bp, Arabidopsis thaliana landsberg
agccttggcttattccgcagcaaccccaccttttgaataatcatgagacttcttagaacagttggagatctttttttgtgtgtttaatgagagatataagtgtcttttaatttgatgtaatcggatttattcattctcatagtttagtttggtttaattcatctttgtccgttgctttctttcatgtagggcatcttatgattcacttttatactatagtccgaattaaaacatttgttaagactttatatgaacccacatgcatgttcgtataaaacattccttggtgtttttgtcttatgttacttgattcttcttatccgctggtcggatcataaaccactcacatattgatacatgttccttagttagaataataatagactataatagctaaagccttgggggatgcaataaggattggagtttagcaataagcattatcacgtctcgtcttttcagaattgtagagacagagaagtgtgtgtggtccttttgataaagaggtcaaaaatttcgaaaagggctctaaagcagacgaagctggagagaaaaaagataaaggaccaccacactaaatggtccacactcttcaccatagaccactttacacatttttctatctcgataataaccggaattcgtacccaaaacttaaatttaagcagttttcttcaaaacattttcttttaccaaagttgtgtgtcctcgagtttggcaacatcagctgattctatttttgacaaagtaacaaagagaaaaagtaataagctaaaactttttccttgttaccgtttgttctctctagcgagagctggtacagaaattttgtttggattaaaggtgggctaagaaaagtgattctacatttagtctctcaagaggataattaggacattatcagacacagctag

SEQ ID NO: 49146 - DNA, 526 bp, Arabidopsis thaliana landsberg
tttttttcattataaaaatgattaattttattagtgaccaccggtgattttctgtgtcctagtacttgtttctttagagttctttttggtatttattagtgatacatattttttaaattttaatataacagcaagaaaaatcataaccaaatctgtactactttgaattgatatagtactgaaactataattcctattcaaatataatccttattttccaacgggaaattttcagagaaacagtaaaacctgggccatggtaaaaaaaatacacattttactgtacatggagaatgatatgatatatgtaaagagtaaaacctagaaaatgtaatattaccaaatgatgatagtctagcaatcaaatcagcaagatatctacttaaagccagtgatcaatttctacttaaagcattgtcttcgttttaagtcagatttaacattaggaatataaacttgtccaaattaatatgggattggacaaagcctattgataaagaaaactaagagtgtgagagttatggat

SEQ ID NO: 49147 - DNA, 935 bp, Arabidopsis thaliana landsberg
aatatagataactccactgtttatgtatgaatctgggtttttcataatttggagtcagaaaggtgattttgctttatttttctaaattcacgttccaatagtagaaaggaaattagtttacatgttgtggttatagctgataaaattgtggaccaaggactacagaaacttcggtaaaaggaaaatttagattatatgttgatgtgaaaaaagattatttatgtcagtcacgtaatggaaattttgttttacaagtaaaaagtatataaaccaaaggttaaaattttgctcacatttttttttaaaaatggtctacgtagattatgcagcaagatgggcttatttaggctatataattgacaaattagtacatcataaacccatacggttaacttattacgctcaaactgggcctcatctttgtagtaatgggctggtatgattcgaaacgtgaatctttgtatgcgcttgaatagcacgctcaatttagagcgcgtgggtatgtttatgtgacgaagcaagattccttccttggccgccagacaaattgcaaaccgaaattgatcacggcgacgcgtttgcacaaattaaatttcagacaaagacgtctgcgtgcacatccagaaacattgactaatcaaaatatgccacgtatgcgaagatttggcttcccagggttaatttcgtaaaatggaatcgtgtcaaggaccagtaaggttattatcatcatgtatttctccacatttatttaatgaagaattcttgtgggctctaccaccggcccatctgatccatacaaaaacagagagcaaaatcggaaatgtcacttctaccctaactcgctcgacgattaattagtgacaaaacacaaaagaaacacgtatctgagcctattttcgtagtcttacaataacttgaaaaaggaggagggaaaa

SEQ ID NO: 49148 - DNA, 580 bp, Arabidopsis thaliana landsberg
caatggatttgtgcgcaggctcatacagactctccttgctggcgattaggacgctagatccactgttgtgaggagcgtggtaggagggggccgtgtggcagcatgatggaggcagaacgcggttggagcaggcgacgtggcgggggcgggatcgggatgcggacgaaggttgtaggggctcggatgggatgtggatagatggggaggaggctgcgtagatatcggtgtggggtgcgcgacatgcggggtgctagcggcgcggtgagcgtccatgcgggctagcacggatggtgcgggagtggttggaagatagcggcatgcaggggagatggttggggccggcggggatgggatctgggagtgggcgcacgaatggggatgatggtgcatgtttgaggcggagtatgcggcggcgggatcgtggcgatgtgtgttcgaggcagttggattggggatacggtgaatctggcggaagagcgggcgtaggcgaggacgcacgggcgtaggcgggggcgccgtttggtgtggacgtcctttttgtcttcttaataggagtagtttagactaggtgtgtacatgt

SEQ ID NO: 49149 - DNA, 492 bp, Arabidopsis thaliana landsberg
  unsure (1)..(492): unsure at all n locations
taaaccgttttgtattaattaattgaaaattagtacatatttattgccataaacaaaattgattggcttgttattactcattaatgggcttttttatgtaccgactggatgaggacaatgacacctatattagatcctgaagacgttcagctttcacacacacgaaaatattctcttccatttttttccttcttcctatttttagaagttatggcgactgagttatcgtgatttcagtgaccatacaagttggcaattattgagnnnnnnnnnnnnnnnnnnnnngacgggggcggcaggtttcttagcaacgcaactgtgcaaccgcttgaacctgttcgaatacgttctatgttcaatcttcaatgctacctgacggatgaattgacatgtgtacatcgacggtctcctttgtctatttttatatttgatcaatctaagtatcgacaaaatcgacgtgaggcaaaatgtctattcagggtaccgagctcg

SEQ ID NO: 49150 - DNA, 376 bp, Arabidopsis thaliana landsberg
acagccgccgcgtacttggctgtttgtgttttctctttgtcaagaaggaaatagactctagtatcgactttagatgtctcgtgccacgacttcacagctgtttccatagtctcaacaataaaagaaaacatctctttccaacactcttcagttccatagttttcagactgcatgtgttaaattcagaatctgagttggaacaatcaaatataagcaacgaggaaggcttagactgattcctctggaattcacaagaagagaaaaagaggactaaccatttcagatttaaaactttcaagaagcttggccatgtcaacattagatcttaaattctcaagttcccgagctctccgttgctccttccgcaactgaccga

SEQ ID NO: 49151 - DNA, 560 bp, Arabidopsis thaliana landsberg
cttctgccgattggttccccttcgtcaacgccaagtccacggacggcttgtgtacgtgctctgtgcacaataggcgtgccacccccacatccacacgttgaggcaacatgtcatggacacggaccaaaatccacgactgagcgcctgctcgagcacggcacgccgtcgacgcgatttccatccacgtcgaatttggcatggcgtatccactgatctcatttcccgtgcatcgtccagccaggaacaaccatcagaccgagaaatccagccagcagcccgccggccggcacagaaaatgttacgaggtagcagaaagaagagcgaagaacccatcattactcgttgcgaggattgtttcagattggtcaaagataagtgttgatcactatttgtggtattagatatggccggacggttcacaatcaaatcaaaataggcgtaattaacctcttttccgcgcatgtttatcctctaatatcacggattatatcgggaaacgtctagaaatggctctaggcctattcccttatacatatgaaggggtaatgcccgggtacgag

SEQ ID NO: 49152 - DNA, 797 bp, Arabidopsis thaliana landsberg
cgatttggtagcttttggaaattctcatcaagattcatgtgtgcattgttggtgaatgaatagacattaggtctgttttctaactggtgggattatatattttgtaggaatatggggaaatagagtcggaatttgctaaggttggcacggaacgatgtctcttagagttcttaacatatcgtaaccctggtcctattcttctacctaaaggaaaacgctatgatgactctgtttcacttccctcttggctaactgattcagatgtcaaatattatgtgtcaaagtatgagaagaatggcttcactggaccagtaaactactaccgaaatatggaccggtatagactctgctactctcgaatcgcttgtttattttaagccttataaaacttgcttgaattcattcaggacccagatgcatttgcatgtatatctttgagcaatagttgaggtagtgtttattcttaattcattaggcctgccctgttaaatggagtcctttagtctttatgtaagatcagaagggttattgtgattgtaaatgctttttataaagccatcgtcattgagtggcctctttgtaattgtgtgtttatataagttggtgacgctgaactttgatttagattttggatccgtgtaatcgcaattttcagacataaaactcggatcaagatctttatgttagtgtcacatttctttctttgctctttgcagaacatgggagcccatggggtcactatcatacgctaaagagaaagttccggttaagttcataatcggcgaccaagatctgac

SEQ ID NO: 49153 - DNA, 536 bp, Arabidopsis thaliana landsberg
aatgaaagtctaaatcgttttgaaactgcatatttacgtgatatcagaaattagaatcgttaagtaaatttaatataatgtacttgggttctgaaataatgtaagaaaatactactgtatagtacacattttcttgtaatgtaataagttaaaaaggagaaaagcaaaaacaaaatgaaataggaaagattttgtcattatgttccacgtggggtggctcgacctctgttgtactatcatgtgctgaatctaaagagcattcattatgattagtctcctaaaaatcttaagttctgaacgaattcactttttccaaattttgaaattctgtattatttttgatatcttgaatataatataggaattacaaaaaaaaaaaggtgtccgtacagatcaagatttgagagggaaaaagatagaaaacattctaataagagtgactgaaaccatttgggctttctgaatttcttcgtttctgcttatctctagattcctcttttggacgatgtatcagtttcactccttcggaacttgca

SEQ ID NO: 49154 - DNA, 903 bp, Arabidopsis thaliana landsberg
taaatcggtttgatagtactcttcaaaacctgtttttagctgaatctcttagaattacgaccaatttgttttgttgttttggggtaaatttcgattttaaggtaacgcacgatatagcaagcaattgggtttaaaaaagaataaataataaaaacatttaatgcagtttggcagaatctaccaagagacctttttgctgcattgtatcatactatcattttttaattcggcacaagacaagtgtagacttagctatagactatagggttcaggtttacaactaggattattgtcttaaaagcaatctaattatataactgaactcacaagttaagattttttttaggagcttaaacacgaagaagatttacatacatatgcttgtaatccttttctgtccttcgtcaaattatatttattctgacacaaaatataaagtgtttatttgttttatcttataagatggtttgctaatttatactcaaattgcaataagtatctcaattttgtttacttgagttgtattaatttaacttttgattctgaagtaggacaaataataattaaaaaataaatagaatccagtttagtcaaaccggctttagatttcttcgagggacaaaaacgtagacacgattcgtaaacagttttttttttaaaaaggaaatgaaatagacaacaggctttgggaccaaggcaaagtttcttgactcgtcgtaaactagaagaaaacatgttaaagagaggaggggcaaagtagtcaaaacaagtttgagtcatgcacaagaaatctcctgcatcgcacccaagtaggacccacgtgtggagaaaaattgagtagtggtaatgatctggtggtctcgggagtagtgtaagagcaatgtttctgacccgtctatattg

SEQ ID NO: 49155 - DNA, 611 bp, Arabidopsis thaliana landsberg
aatttatttatatgaccattgtatacctgtaggacgactatataatatgatttttacgtacgccttactttaattcgcgattgaataaggtttcttcattaatattataggatgttgtgtatgactcatcttcacatgggcctacagagctacattgcgaggataactacttacttacacgtgtatttgtgattgcggatatatgcttacatctattattttaaatatatatatatatatatatatacacataattaatagatttaatatatacataattaatagatacgaagattatttctttatcaagttgtatgaatcggttatttatagtatcaacttacgcaaatcaaacaaatatcattcatagcaaaaaagtggacgttagatataaaagcatactcttcttaataacgacattaaaacaacaacaaaaatgcatacaaaatgctatttatggcacacgtcaaattaatcattttactatccaaccagatgattacattgttagagttgcgataatacattaatatttatctttggaatagggtggcacttttgattcttgcagtggttgagaactattccgagttgtttttttttgagggaaa

SEQ ID NO: 49156 - DNA, 627 bp, Arabidopsis thaliana landsberg
  unsure (1)..(627): unsure at all n locations
aaacctgttttaccttatacaaacaaaactatgaaaatatagtgaaaaaagattatttttacgttttcttgttttcgacctcatatctaattttcttatcaaaacaataatttgtggcattatattttgagctacacaaaaaaaaattgtgaagacaaattgatgcatttttatcggttttagaatcttttgtttgtgcatttttgtcaaacctaaatgtgattttagtgtcccttataatttttttttcttcaagtaatttcagattctaagagaaatgtgagtctcatttagttataataaaatgggaatgcattttctaaatataattttacacaatttcaaattttttctactcctcaaaaactgtctatcctacaatataaacttaacaaagtgtttatatatagtaacaacaacaacaacaacaacaacaacaacaacaaaaaaaaaaagaacaaacaaagtttgtgtatatatatgcaacacatcctacttagtattttactgttgcatagtaagtaaaacagtagtgtgtcataaaaagcatagatattatttcccgctttttctttttaaattattctcgtaagtcgtaactaanatattatactatactatagtata

SEQ ID NO: 49157 - DNA, 617 bp, Arabidopsis thaliana landsberg
tcagcttccgcaacgttgaattttcgcgcgtccagtgctcgaatggcgccccatctagcatcatcattcacacaaaggtattgcgactcgttccatattccgcttgacttgttgaagtaccgatctataaccacccgaattgctgtttcttgatcgggagtgaaagtcctggtgtggtcctttctatttcgcacacaacttgcaaagctaaagaactcatccagttgttcggtgatttcccgttcactatcgctatgttcagagggaggatgaatcgtagtttgaccttgttgggcatgttgttgctgctgtttggttccagtcttcgatactccactttgttcctcttgcgcgtcaaagggatctcgtatccaatagctcatcacagcaagtctttcttgcacgagccaaaaaaacactatcaaagatgtacataaacaaatagaacaaaaaacaatctctacttgataggaacattgttggcaaaaagactgggataatgttccaagtaaaacggcaatggggaccagaataacagtttgctcattgtattcaaagaattgtaagccagcacattgcgaacgatggattgaattctcacaaatgtgatatccgat

SEQ ID NO: 49158 - DNA, 837 bp, Arabidopsis thaliana landsberg
ttaattaggtgtagtttgcacttttgaaaatgttaaaggtgtctgtgaaataggtataatattttaggttaaaattgctaatacgatcaagtcaaattactaataattatacgtgttaattgtgctgaaagttttgtgtttttctgttgccaatgctccaatgcggtgtctgcaatagtagccaattattgattactgattagagacaatcattatttagaaaccataatttcagatctataattcattattacaaatttgaaattcgaatgtcacgtcactatgttaatatttctactctaattaagcagagttaattacttttttatttttccaaatgtttatctaaaaaaaaagttcgaataatacattcaacttcaaaatattattgttatgaaataaatagtaatagcactcttagttttgtgaactactataatgttattctcaaaactgatgcttgggaaaataaaattaaagctggagtattgattattacaaaagtatagggatacatataatggccacgtatatatatcatttttaagttgaatgattgcgtggaataattaaacgaaaggatatgccttgttggcgattccctatagagccaatataaaccttgtggccaatgaaaaaagagcaagttgcaacaatttttaataattctcatgtcatttgattctttcttttatatttgatactatatacaataagcaaccgatcgacgttgacagaagaaaagcaacagatggacgaatatttttccaagcaattgcaaatagaaataggcaaatagccaaatgccctaataaaaaaatgtgattaatgaatgac

SEQ ID NO: 49159 - DNA, 157 bp, Arabidopsis thaliana landsberg
  unsure (1)..(157): unsure at all n locations
acaaattanngnnaacaacagaccttnagaagaagaaaaacaaacanntgnggtttaaaaagtaagaacgaanangaaaaaagcagagcaaaaaaaaaaggaaccactgacgcgaccaaagaaaaaaaaaaagaggccgccacgacagaccccgcag

SEQ ID NO: 49160 - DNA, 1142 bp, Arabidopsis thaliana landsberg
  unsure (1)..(1142): unsure at all n locations
gcggttaaagactgatttccaggtcgaggaggagaagaagaggaggcgatttcgttatttttttttgagaagccaataaaatagaaaagagataatcattttctgtgaatttcaaagctggaggtggaggacagggcagnnnnnnnnnnnnnnnnnnnntttctttacttaaaaaaatggttttgtccttttttaatttcgaatttgaaaccaggatctggaaatttctggttcaattaaaaccggacattttaaggaaaaccggagatggttcggtatatggtgactgtctgactgatctgtgtcttctttttcataaaggtttaaacttttagttccagagactgggagcgaagcaatggaatcaatgacgccaatctcgtgccctacgactcctcgttggaaccaagacagaccatttctcactggtcgctttcatcaggtgctcgatcttcagatgtgcttgattttagttctctaattcgttcaaattctatttaattgtgaacattggtaacttctgagaaaaagtagttttgacaatgggtttatctcaggaaacgagggcaagctccaagtttgctgattctaagaggtttactttagactcgtctaggtattttgaaattttatactaaaaattagtaatacatctctgttttaacctcccaaagtctgttcctttttcatcttattctaaagagtcattgacctttatattttgctttcagcagttctggagtagagcaggcaattggctgctatgacacaccggttcaggtttgtgttattttacaaagcaagtctgtccctttttttcttggcttccacttattctgtgagattgttattatgtaaccttgaaactagtgttggggtccttaaagcttgggtttgagttgtgtagtttttacaagttggcatcattgtaggtgaagttggtttctcgttttcgtggcatagactaggataattgacctgagctaaacaattgtggaacttcctagcctaggtttagaattggtgtcacctcttttgttatgtccatttcagtaactgttttttattccttttggcatgcaggagcttatcgccattgatgatcttttaatctgcgttgggttgggaatttgaaaggggag

SEQ ID NO: 49161 - DNA, 1390 bp, Arabidopsis thaliana landsberg
ctattctatagtaccaatttggagccatcatcatcactaatacgagttaatagttataaatgtcaggagtactatcaatcttgttgttgtttttatgtcaatattttagaaatgatcatggcggtaatttatatctaatttacctgatgaacaatagtgattggcttattgcgaatgagaattcaagtcctaaacacaatttttttaattagtgccttcaagttcatctcaaaacaactaaccccacaagtcatcatcagaacatcacaattgtgaaccaaagaaaggaaaaaattataaaacgaaagaaaagggaaaagaaagacatcagatgctgtctccttatgacattagtttagtgctatttagttcatcacctccttgtcttagatgcgttaatgacttgacgtgtgtacaatccaatttaatggatgggtccatgaataacaacaataacataaaactaatagtactaatatatatacttgatacaagtattatctaaataaatgatcaatgtctcttcacaactgtacgaacgtaatttatgattgatccaaccttctccacacgcttttgctcttatgtacggaagatccttaatttaagctgcgcgtgcaatttctccaagtcgttgcacatacttcttaacttactcacatactcgtcacgcgtctctcacgcgctctttgctctttttccatgttgcttcttcgattcttccctttctcaacttaaagattctcttccttcacctttttttttactataattgttcacaacgtattttatttacttgaactgtcccaaactttgatgctaaatgaaagagaacttgtctttagataaatcatgtagtctacttggttaacatggctattggcctatttactcaactttttacgcagtggtgaagtagaactatcgtgctcaaaggttaacacaacattgttgtccttacatattttactcagttttgatattttaaggagtttagatcttggatatgtgaacaatttattcgtttcatttgattctaattttggtctaatgatttaccatatgatgcaattatagaaagttattttacagaaagtctgttcaactcaaaattagtgaggagtttaacgaaccagacattaagtattaattctgaaaaaacatttgatcatgcaagcaatactatatttacatatacatgatttatattatgtaagttatttcatataatcgtcgataagaccctaacgttcattacagaaacaaaaaacagaacatacaatatctttatgcatgaatcataaatcgaaaagaagacgcatgcattgggaaattaactggtataattaattttggatagcttcagccaataacatgaatgcgtaaatgt

SEQ ID NO: 49162 - DNA, 982 bp, Arabidopsis thaliana landsberg
aaaacggtctctatctcgagcaaagactctttttcatttatgtgaaaatggattggtcacttatctatctggtaatgctttcatgttaggttgttgattcaattaaacaaggtcatcaagcaatgatatttgttcattcccgaaaagacacttcaaaaacagctgagaaactggtacatgatattttacctttttatattcagcttctactttttacctgatgtcttccaaaacgcatgcatttgtggttttcctgaaatcttaattattgcatatgagaatgatctcgccgccgaaaacatggtttctcaaacgattttggaatccagatctagaagtacatgacttttatattttcactttggcaggttgatcttgcccggcaatatgaaactctggatttgttcacgaatgagactcatcctcaatttcaactgatgaaggtaaaaaatggaatatatattatcttttttaacatcattgttggtgttaatttctcaagattgtttctgatgtatctcagaaagacgttatgaagtccagaaataaggatcttgtcaaattctttgaagctggcttcggaattcatcatgctgggatgttgagatctgatagaacacttacggagaggctgttttctgatggtctcttgaaggtacaaaacattttgtctgcttgctctttactatttaaatacttatttcccgcaacttgttttggttatacaggtgcttgtttgcactgcaactcttgcgtggggtgtaaatctgcctgcacacacagtcgtaattaaggtatgcttatgtggtgctctttggtatagccagagttcactctgtaatctgtgggaagataagtttctgttttgggagatcaaacaagtggcgcaattatatcacatttccttataaaacaatatgttcggttgatttccagggaacacaattgtatgatgcccaggctggtgggtgaaagacttgga

SEQ ID NO: 49163 - DNA, 847 bp, Arabidopsis thaliana landsberg
tatgagaggcagtagtgatggttggtgcagtatatggattaattctttttattgatattgctcttaacaggaggcctacttcactccatgatcgtagtagagatagtgatgatgatgattaccacgatagagattatgatgtggcagccctagcaaacaatttgagccaggcttttcgatatggaatttacagcaatgatgacatggatgaggtgatgttctcgtgtttccttttcatagctgctacgtgtgacttttctttggaaattagtattatccaagattttggccgcatatttcaataagttttggaatgtcatgggtgtagactgtttagtcaaaggagggaattgattcaggaattttcttggaattcatttttatttatgttagccatcctgtgataggtcctgaaatacatagtgaaattggatgcaatactgtctaaagttttgctaatgtattggaccactggggtggatccagttaccaaatctctgtatttggtggatagttaaaccgtcatttctttcttcaatcattctgcttggttgaccactggatagatatagcattgggggtttcagaccatcttctcttcctttattatctttaatgtagcctagaagtagcttggataaagtcggttaacctgagcaactaaattccgtcagagcttttgatttcattgcattgttttcctcatatcacattgttctaccattaacatatctatattatccactgcaggcccaaggctctatggaacgcgatgatgaggtattgttcgtcttttccttatatttaggaattgaggctcgacttcatttgtggaaagtaggttcaa

SEQ ID NO: 49164 - DNA, 505 bp, Arabidopsis thaliana landsberg
tatttttgtttactaagaattttctttaaagaatgttaaaagtttggagaaatgtatgatttcataagactattttttcaattatattatatagcgaaaaagaaaataaatatgtgcccatgagattatatatttattgttaagtttgaaaagtaagagtaaataggtaatttataataagttattttatatgtagagaaattaaaagatggaaaagttatgagaattagtgaaaaaataatgatggagagttgagtggtatgaagttgcgtgatctaagttttttaaatgtaaaaatttgtagattttggtatagttttttttttttggttgtggtttttgatatagtaagattgtgaatggtgacattgatggtactttaaagggtattgtaatagtgatgtatgagtagtaaaatgtggatatatatatataaaaatatatgtgtgtgtatatgttttaagctgtgtttttgttggtggttatgtgtgtgttttaaattgtg

SEQ ID NO: 49165 - DNA, 911 bp, Arabidopsis thaliana landsberg
tcgattatcaatcgtatttgtagaaccaattcttaccactggaattcgtgtttcacattagtggcaacttattttcaagtacacattttaaatacgtcacttgtcactggaatttcaaccttcagtgagttaagtcatcaatatacttagttttggatccttgttaatttttcaaactttacacaccatctggtaaatagtctattgtagagcattaaaaccatcctcaagtcgtcccataacatttaccaattgatcaattatttgcagattaaatttccccgaaaattaagttaaaccttttttgaggtgagtttatttgaaagccctatctcttctatatcatatcttaaagaagtgattcagctgtggggaagatgattgttgagctattcaatagaacgatgaatcacaactgcccatctgccccaaattggatattgcaaagaaatctttcgtgaaaagtgcatttgaacgcactaagccgatacacacatatctgtggttttggaattttcaacagtggtgttgaagttcaagtagatcattataagttcaaaacatcacagataacttgcaacaattgctaaattcacaaatttccccgtcaaaatgtatatctaatctaactaatacaattagagtaaagttgaatcaaacgaattgtggggaagatgattgttgagctattcaattgacattgaatcacaactgcccatctgccccaaattaatgtcgcagagaaatctttcgtacaaagcgcattacatcgcactaagccgatacacacaatctctgcatttaaacaaaaccaacactgaaacttcatatgaaactagctatacaccaaaaaacacaagagaacccacgaaaacgtaaatcatcaaagagctcttggagattcaatctac

SEQ ID NO: 49166 - DNA, 854 bp, Arabidopsis thaliana landsberg
tctctctattcttttaacctaaatttagtcttatcaaaggacataagaatatatttttgtatcaaacttgaaaacatcacttaaaataaaacaaaataaattattaaaatatcactaaaatgaagaagagagataacttatatatacttttaccaaatatatatctaatgtaagattctgaaattgagtcatttttatctcagcaaaatcatttcataacccgggcgaataaagtgtgtgtttagtattacgtgcttgaaacgtaactagatcattaagctaagacttgtaaaacacgtacatgcatcataattcataaatgattagtttaagaataatcaacatatggttaataaattggtaaaacaatattagaaaaaagagaaaaactaccgtttaaggtagttttccattatttgcaaagcatatatacaatatatcatttcatttcattatggaacataagtgttcaatactcgtcttaacacaatttaagaagaagaaaataagactaacaaatgaaaagcttagtgactgtgtcactgtctcttaacccgtcactaatctgttgcaacttctttaatcctataacaaagaaactgtttttaatccgaaaacttcaactatataaaccggcacaaaaaaaccgtcatcaatcaaaacaaattacttaaacaaagatctcgacaacaacgtctacaacgcataattatgtccatgcattgttttttccttttcacaaaaagataacaataaactaaaataaaaactttactattacaacaaatcgtatctcaatttcatgaagagatggccgaaaggaataaaaacatggacccacccgcccatcgaat

SEQ ID NO: 49167 - DNA, 648 bp, Arabidopsis thaliana landsberg
tctaaatacaagcttagcactagtaaagtatgatcttactgatcagaggattgtaatttgtaaatattgtggctgaggtttgcttagtcaaataatgtgcttgcatcttgcttttggtattgctgattttgttgatctctggatcttgttctgtttacagtagtatcatggctatgacatggtctaatttgttttctgttttgtgtaggtttgaagtttgcttcgctctgcctttgaagtctgttgattatttctccaacaggaccttggacagatattgttaatatgttttctgggataaagatcatacctcgtgatgaggtaaagtttctagtttcatatgatcctgaattttcttttgtgtttattcatcttggattgagtttgatgttatttttctttgctattaggtgcatgatgatagttcggagggggaaagagagaaatctaaaggtgggaaggatagaagaagaaagaacaaggacgtaaatagaaaggagcgtaggggagaaggaagtaagagagatgggaagaagattgccaagagtggagatggcgagaccgttgatgatgacttgcttgaaggggatattgttagaaagaaaatgggtctcgattggatgctgccgccaacccgaaaggctgatc

SEQ ID NO: 49168 - DNA, 651 bp, Arabidopsis thaliana landsberg
ggtaaaaaccaactgaaatcgccaccgtgggtcttctctatcctaaggagtgcagcaattctagaacccaattcgtcaacagctgtcggtcctcttgggtactctcttctttcaattagttttgcaaattgcaatctttatatgatttgtttgggaattaatggaagaaatgaaaaattgtaggtgaaacatttcgatagagagtactgtaggaacaagagagttcaaaggctgttggatgatggagatgagaggaaaggtccaatgtcacttcctcagccttacactttcaagccttctccttccacttagaagattccttcctttctggtatcttattaactcttactcaatatgtccttattttacttcaaccttagattctttaatttgtcttatgtttgcatatccctctagtgttctgtgttttcatcattgctcttatgatcaagcttttttaccttgatcacatcaaattcgtccttattcagggtaggtttttgtttgtctttgtcaggtgttgaggaagattacaatggccaaatactgttcctgaatcattttctttgcctagttttttagatctttatttgtgttgtaagcctttgaacatgggaataaagtgccacatttcaagaacctgattatttg

SEQ ID NO: 49169 - DNA, 218 bp, Arabidopsis thaliana landsberg
ttttttttttttttttttttttttttttttttttttttttttttttttgtttttttttttttttatttttttttttttttttttttttttttttcttttttttttatttttttttttgttttttttttttttttttttttttttttttttttttgtttttttttttttttttcttattgcttttttttttttatttttcgtctgcttattgttttttt

SEQ ID NO: 49170 - DNA, 587 bp, Arabidopsis thaliana landsberg
ttaattgattcttggttaacaatgaaataatcgtacgagtttttaaggaatgagaaatcgctttcagtcacttcaaatataaattttgaaactatgtgttaacatttcatggttcacaaatcctgttctttttgtcactagaagttaaacaagtatataaattgttatatttgtttattatatggatgatggcacacatcaaaatttgaaccatgtgaaaagagggaatctttaactattcgattaccctaaatttgatggaaaaaaaaatcattcggaaaaaatatcaattagtacacaatgcatagacactccaacaaaaaaattgaataaacaacaaatcagctaagttctttttacatatcattcccactttccccctcccactccataagaaaaaaaaaaaaaaacagatacatcaaaagcaaattcatcacaacttaaaaaaatgtgattagatcaaataaaaaaggccatcttctttgataaattaatttcttgacacaaagaggtataaatagtcaaaaatcaattagccatgaaaagaaagatcttagggaacgaacagcttaagacattgaggagct

SEQ ID NO: 49171 - DNA, 774 bp, Arabidopsis thaliana landsberg
gtaatatatacaacactgccttctgggagccttcaactaccgcattcaaaacatttattttgttatgataaaacaaacttaaatctaataagtaagtaagaagcaaattttcttacgaaatactatatttttagggtgctactttaaaaagttcactcaatatagcaactttgaccactactaaccccaatattcctaattttgttggtctatacgaaaatcgaaaggaagtatctatacgtaaagaaaccatagtaattgatattttaacaaatatattatactaatctagaaaatgattttctctaatgaactttgctgtcaaaaaaaaaaaaaagattttcactatggccaaaaaattctactaatctatcctatattttgttatttaaaaaaataaaaaaaaaaatagaaaagatagaatgaagtacttgtctgatattgggatcgagtcttcttgaaaacactctaatctcatgaattttgcgaggcgatgtaacaggatcgtaggtgcaattctcgtaagcttgcttataaacacttttaatggttccatcatggctactagaagaaacatgttgcatgtagaaagtgacaggtcgttggcaaggatcacgatgaatctctcttgtgttgaatgtgtaaacacttgctaatccgcctgatttttgccatggtcggaacgtctcttgtgcccgcaaaacatcccgtagaaacaaatgcctgccatcaatctaacaattgaaacaaacatttaaattttgaattaattaa

SEQ ID NO: 49172 - DNA, 585 bp, Arabidopsis thaliana landsberg
tttctctagttttattttgttagtatcaaaacaatttttcatttcagaaactattaataacttcatgatatactagatttaaaataccttgtatggtaaaaaatgttatatcgttttattctatatatatgttaaacaatgttgtgtatgtggcatttaatgacgcatatacggtgtctttttttccaaagatttgaaaacaaaacgacgtcgtttaatttttgaattaataagaaaaatgcaggtttgagtaaaaatattattttaatgtctattaattatttgaaacatgaaaagtttcggatatttttgtatattcatttttcttattatcagaaatattattgtcatgacttattaactataaaattagtgattatgattatatgcatagacaattatattaacaattttttcgtttacatttttcaataaaaatagtatttaccgtataatctccatatataaacagccccatttccggctatgcatcgtgctctgctgtacgacgactaactataacatattttagaagattgtatatatgtgataataattcttacaattacattttcaacacaatat

SEQ ID NO: 49173 - DNA, 602 bp, Arabidopsis thaliana landsberg
agttttacactatgattacggaactgtattatatagtaagacaaagcaattataaagttcaaatatcatatctatttcaaatggtaaatctataatttaagttaaataagaaaaaaaaataactaaacgagaaataaatacaaacgaaactgacagtaaataatttaagaaaaaggggtaaatgaaatgagaaaaatatatatttggaattttatgaagatatgtagtagattgtgacttgttagtatatgttttatttaaattttaaaacacttagataatttaagtagatatcaggatttataaataaaaattaatggtacatgctgaaaatttgatcatattaagccgacaaaaaataaaattgaacatattaaaagtttgcaatttaggaaaaacaaatatatccttttaatgtagtacgtataatggtgccattagtgactacataatattttaagataagaaataagttggcagttaattggttcaactttccgtgttcatcgaattagaatgcctcaataattgagtattgacagatctttcagagaaaaaaaataaattttttttgacaaacgtagtgtctaaactaaaccgta

SEQ ID NO: 49174 - DNA, 1010 bp, Arabidopsis thaliana landsberg
caaagtgctctgtatccacagtaacagcacacatgacattcttttgatctctatatttatacttctctgtttttctctgttttaagaggggacaaaatataataagtctctgtttcgagtaagaagtctcacaattaccaaaagttgaagaccacaatttatgcaaagacgaattttatgaatgaatccatgatcagtaattaatcaactttcaggaacaccaaacaaagaaaaaaccaaaaccaaacaaaaataaacaaaactactttttcttcaagtagtgtttctccatagactcgatcacttttgtcatctcctcctcataagattcggagtgtgctaacacatgatctttctgctgcattaacatcatcatttgtttttgcatctgcattagcatcttttgattcttttgcaccaacgacaacacttcactttgtctctccatcattgccacttggctctgagtaatgtcattcaaagagtataatatttcagcttctgcttaaaactttcttccacattaacactctgaatgacagattcttgaaaagactcttgatccggtctcatattgtattcatgaaccaacaagcaatcgataatgacattaacagaaagtttttctgcaacctccactaagactttatcgaatcttggaggcaaagaggaaagaatcttcttcaccaatattttttcttcgaccttccacccgcaagacttcatacgaaacactagctccaataattttccagtaaactcatgaaccgtttccgcatcgctcattgtcgtgttgttgtactctttcttgagatcaagaagctttctagcttgaaatataggaccacctactgatctcaccatcaaaatttcccatgcttcttttgatgatgtagcataagctatccatgaaaaaatctcagtgcttaatccactttggattagagaaagccattcacatctttccattcgagccattgtttctcccatatcaaatagttttctgcctt

SEQ ID NO: 49175 - DNA, 1231 bp, Arabidopsis thaliana landsberg
  unsure (1)..(1231): unsure at all n locations
cccaggacagcagaaggacaaactctagagtctgcacaagcaatcaccagaaactgttgcttaaactgttagtaacaattcctttctccagacaaaattcaaaccacagaagatatctcaagccttccatgaacaacaaaatttcgttgaagagtaaagctaccnnnnnnnnnnnnnnnnnnnnnnnatttttgtagtgttcaaagtcatccctgctcaagagaatatcatcaggtgaagaagaaaggaaataagtaatctattaaccattgaaaaatgacaattggtggtactctgcaacttacatgtacttaagcttcttgaaggccaggaaccgctgtttaatgtcgtcaaatacatcagtgttgttttgtctatcaattgcaaccccattagcttcctgagtcagtccaggtgtctttcctgaagccatcacttgcaagtttgtagcttttcttctgcaaacaccacaaaaacatactaaatctgaacatttgattattataaaaacatcttcactgagattttgccatttgaagcatcacaaaaaagactcttcttttcaaatcttataaaagacacactacttatagaaacctaagaaacaaaaacataagctgtacaaacaaaaagggtcttcaacaaagtacaatgcatcaccaagtgatttctctaagattcttatcatagattctctcacaactatatcataattacggatcgttatcccaattccaaactgaaaagttagtaaagccaagaaattacctgaaagaagctggaattctcaactgggttgtctttaaactgtgattgggaccaaagatctgaaataaaaaatgcaacagagttaagaaaaccaatagtcagaattagatgaaacagtgtgatagggagggggggaagaagaattgacaacataccgcttgagtttggagattaaggagagacgtggaagaaaaaggatcatgggagacagagaagtgtgtgggagtggctgccatgaaaaaggtctagagagtaaagttgggtacttagaatctggatcaataaggcacaaggcatctgaagagtgttcatctgaaaaaacaagaaggccttaaaaaaattaaatattgatttatttaattttggtaagaagtggatgtgaatgcatttatccggcaaagacggagaaaccaaagtttttgagccgcctcagttttggaccccaccccacaaattcagaaaa

SEQ ID NO: 49176 - DNA, 620 bp, Arabidopsis thaliana landsberg
ctctttcccaaccttcgcaagcaatcacattcagtgcctctctcccaaagacctccatctcaaggaacatcctctcttcgtcttctcgtggcacaattgtctcaagcatgtcaaaaatcgaggagaaatgaaatagagcttcgcgaaaccgtgttacgaaaaacggtgcgttgtatgcaccattcacaatgccaaagacaaagagatcaggattgatcttcccgatcaaattgagaacagtgtctctacaactttctactttgactgactcatcatgcaaattctcagcccggtacaggcaattaacaacagtaatctcatccctgtcgatatcaagatcttcaagttgaattgcatcccacttcttagcaattgctttatactcaaatggcaccccaaagagtttggcatacgctgctaacctttgaccagtttcttcaacccgctgtgccggacgaaacccgggctgcggaaactcaatcccggtgatcctaaccttcggtgatccatacatcgaaaaccggtgaataagagttggccattggaaaccgtaaagaatccaaaatcaataacatgaacgcgctgagagttccaacaagatacgtatcgcttattagtta

SEQ ID NO: 49177 - DNA, 948 bp, Arabidopsis thaliana landsberg
tagtaaaacaatcaccatgaaaaaatcgtcatattcaagcatagttttactctctctttttcaacgatcatagtctgacaataaactaagtgaattcagacttgaacatacgaacaacaattattcacatcattcaatggttttgcattctttttccttataagatccaggtataagagatacacaaattgaataaggatccaaagttagatctttgtacggtttttaaaaatacaatgaagtaatatgttatatagttctgatgtgcaggttcagacgctgtgtttacttaccatgatcatacgtagaaactctcagtcacacgaattatgagactatgatgtcgtccgaaaattaagacatcttataatagtaagaaaattaaagaacgtgatttgtagtttataattataacaacttataagattttgaaaaccttttaaattgattaaaaaattattttaattctatattcttaacaaaaacaaatcaccaataaaaaaaaaaaatctactatctgaatttctaatgcttactgcctaatctataaatgttatcttcaaaacatcgtaaacagtcttaaccgcactggttatttcttaaccatcgttttattttttttataaagaataaggacctacatatctgaatgaaataattactttgcgtagactaatacacattcgtatttgacctgcttctttagttccttttttttttttttttcgttaaagtcagtttttagttttcagtccataattaataatctttctctctctttttctcttgcacccaaagaaaatctctctttgcaacccaaaaaaaaagctctctctctctcccatcccatcacaatctctccatctccatcttcatctcccatctatgtctcttgtataaagataaacccacaagtcttaaaactattcctttctcttcctctctctc

SEQ ID NO: 49178 - DNA, 845 bp, Arabidopsis thaliana landsberg
catattttgttattttatacatgcgtaagcagaggtaaacgcatttatttacatctctcgtttacagcttagacttgtattataaatagtatatggccgagaaacaatactttgcttacgctttttggagatgactcttgagttacaagtaacttaaaatagtatcatctagtgtagtatgtgtccatgtaacctatcaatcctagcttcttcggcatttatgactcgttgatacaaagacaaggcgcgttttcggatcaatgcgtcttatgtttttttccggagctacttgtcagtttggctgttgcatattagatatgttcagaaacagtcagcaaaataagaccagtaataacagagttttgaaagcaaatgaatgatgaacaaaccgttatttacccaaaaatatagaggatcatcgaagaccgcaacataaggtaatgtttcagaagaagcgccgttgttttttcctccaatctgaggcttataagaagcttccaagatctggctaacgtagtaatccgcaggactgcctaatagattccactcagctagttgcttaagcttttgatcatttaagaaactgagattgctgaattgttggttcggatcagccgatgtcccgggaatgctaccggtttctagtttttgagttaagatatctgagcttttactaaagagtcctgagtaatttccaagagctgaacttgcagaacacgttatgtccttgtacatctgatgaagctgcagattagggtcttcttcttctataggaacattcatgttttcatcggtacgaacccatgagaaattctcaagtggttgctccatctccattccgaaat

SEQ ID NO: 49179 - DNA, 890 bp, Arabidopsis thaliana landsberg
gggctttcttttgagagcaaaagattgctgcacaaagggcgagagaacttggaaagtttcataaagctgacataccaggttccaaggaacctcagctgtgggttgatatcttgaagttctatgaaaaaggttaggagtttatttttgttttgattattgttctagtttcttttccccctatttgatgaagtgttggctagatcataaaccaccaattgtggttccagctcttatgcgtttttccatatctgctatgtacctttacttgcagcatctactcttacgtttgaggaacctgataagcagaagctctttgaaactatttcgtttgaagaactccatacagaaattattgagctaagggtatttccttctgctctgtaaagaattttgtatgtctgcagtgtgaatatgttcttgatgtcttatgatactccatttctggtgttagaaaatcgtactagtcaagttctgcctaggtgcgaatatggtttaccacataattgtagttgtttttgtgctatgtgctaaaccagacaatacacggaatagtatatttttcatgttggaaattgtagttgcttgtgtgctatgtgctaaaatgtggccatccttgaatgatgtcgaagaattggtcctctggttcttctcccatgcagtaacttgttcaaaaacctgctaatgcttctttcagtaatctaaactatttgtgtttatgattggttgtgcatgttagcaatctattctctgctttggtttgatagtatttgctgattctgatgattgatcaggaattcacaggcttacttaacgcacctgtggtgtttgctcataacgatttactatcaggaaacttcatgctgaatgatgaaaaaggtaagaaaatccct

SEQ ID NO: 49180 - DNA, 636 bp, Arabidopsis thaliana landsberg
  unsure (1)..(636): unsure at all n locations
tacctagtccggtggatcacccatgcaagttgctctgccggttcgtgttccggtgtggcaacgtctcaagtggcgggctaccataaagagccttcctggcagcgcatcaaggtcatgcctcagccacaagtgatggagaaacgtaaacaagtgtggaagagaattacccccctgtcagctggacaggatagggtagtgcacacctcccctatgtcggcaggggcctctgttcagggaagggcctctttttaggatcaagcctccccttccaagcgtggaagaaagcgacggaggcgccctcaccataagagcacggaagcacacctctctcaggcagcctgctttggaggtggaggtgggtgctgatctccagtgtgatccgcacccggtagatagtagcaccacggttccggctgctccgggacgcagatgtgtgatggaattctaccctgccatcgcacgcgaagaaatcaggctaagggcagctttgttcgtnnnnnnnnnnnnnnnnnnnnnnnnnnnnnnnnnnnnnnnnnnnnnnnnnnnnnnnnnnnnnnnnnnnnnnnnnnnnnnnnnnnnnnnnnnnnnnnnnnnnnnnnnnnnnnnnntttcatgctagtatttccagatgaggat

SEQ ID NO: 49181 - DNA, 686 bp, Arabidopsis thaliana landsberg
  unsure (1)..(686): unsure at all n locations
ccgaaactgatgggcaaacggtggtattaaacaggtgcttggagatattccttcgatattttgcttgaacgcattctcgcacttgggctaaatttcttacttgggctgagttttggtacaatacgtcctttcatacggctttaaaggcaactcctttcaaggttgtttatgggagagaaccacctcctnnnnnnnnnnnnnnnnnnnnnnnnnnnnnnnnttttgaactggcgaagatgttggtagaaagagacctgatgcaaggacgttgagtttgcagtagactcttggtgtacttgaagttgcgtccttaccgtcaacaatctgtggtgaaacacatttgtcagaaactctcagccaaattctttggtcctttccaagattttggagcgtattggcaaggcagcatatcgcttggaagtgccagcttagtccaagatacacccgttgtttcaagtctctcagctgaaataggttctcgggtctctccaccaggtacttccgttgccaacctctttttctgatcaagatgagttggtcctatcaccagaggctgttctcgacactcgctacaatcaagagggaaagttggaagcatcggttgcttggcgagtgttgcctccacatgaagacttctntgtggggagaaatttttaaagagtgcaagcgttcattttatcctgaac

SEQ ID NO: 49182 - DNA, 2161 bp, Arabidopsis thaliana landsberg
aagcaaaaacctattttcggcaggaacctttgaactcgttaagtttctcaaggactgattcgtgaattgcgtctctggatctctactcttcgaacgctggtggctagatgatccttgcttttttgtctgatgttgctgctgcggctcttgctgctgttgaagctggtataaagcccttagcctcacaatctctttctccaatacatcatgttctactgtaaaaagaaacccaagattaagttaacatctcaccaaatacaatttacatcctcaaggaaactagaaggcatcatttttctactccatgcttagaagctttatagtagtgtaccatagcttaaaataagttctctggtatgcctaagaactggcaaaaccagacatcctatcttcaaagtgatatgaagtaatgaagaaaaaggttttggggttctggtaagagactgaaaaacttacagtactttataagctgctcttgtgctaagctttccaaccgattcttaagggacttgttctccaagctgagaattagattctgctgattgagaaactcaagctccgcagacacttcagaaccctctacttgtaacatctgaacgttcctttccagttcagctatgtactgaattttacggactcgagagcgctgtgcaagctgcctgcaaaagataatcatctggtttgattaagcagagtaaagttacaactgaactaaatgaatctttatcagaaacagctcaagaacaaactaaaatatcaaaatagacgacgtactgtctagcacgtttcgtatcagcctcggaagtagcagacttagccagaggattatcccgtttttcgaatgacgactttgcgaaattatttatgaaatctttcttgctatcagcagcagaataagccttttctgtatcacgtaggctaccagaagaccctgatcttgtgatagagctactctccaaacaaccagaactactgttcgggcgagcaccggaatctggtaatgaatcccacggtcttattttctgtttggacaaatgagctgaagggtagaaaggaacaggctggcttctaaggtaatcagactccttgggacctctaacgtgattagagaaaccattattgttattatatctaccaccatcccaaagcgtgtaatcaacatcaaaaccaacaggaacatctacatatgcaaatgaatcactcgatgaccgtcgatgccctcctttccgtacaggtgtttcaggttcgttgagaagatcgtcaagccaagaaggctgttcctcaataagaaaactctcagatgaagttcgatgatgattggcatttccttctccaagcttctgaacagccttggatccaatcacactacttggaacaaaatctgcactaaacgttggaccacccgtaaacggacttttcggaggcagtaaagcttgtttcccattgcatcccagatttctatgattctgagacccctttgaacttgccatctgccaacataaacacaacaaactcatagaaaacaagtatagacactaaatcattcaggtagggataaataaagttgtgcctaacagagaacctaacaatgtgaacaaaaaggtaacatgagttccttaagctaaagagtataacatcaaaacattgcttgaaattgtaaaggtagttcttttacataaactcaagtccaaatcaaaccaaatgccagaattttgactatgaatcaatagaaattagataaataaatctaccctaattacaacattttcatcaacaatgaaaataggaaatcacaaatctgttttaaaagtcttttacctctatattaataataaatcgagaaggagacgagatctgcaaaattgaaacgaggaatggggagaagaagatggattgttgtcttcttcttctaatgaatgaatctgtcaaattgtttctttttctggtggcagaggttagaaggctagctggattgatgagtaaaggcctaaaaattaacgatgattctgcttttttatttatttattttccaggtatgtttttttttagttacctgtgttctcgcgctgtcttcaacttgagcgtaggtttgtgacttgactttgtgaacaagttctgtccaaaatccttttttatcttatgttttaataaatgagggatt

SEQ ID NO: 49183 - DNA, 512 bp, Arabidopsis thaliana landsberg
agcgcgtgtcgtcgaattgatcatatattctacacttgtttgatttgtagcgacgagttagatttgccagctaaacaggaacgagatagcaaaccctacagctaagcaaataacaaaacataaagcgatgcgagtgtcaacatctaggaatggccgctgatgcctctttaaaacagcttcagcagttgtctgatgctgcatgcctgccaagaacggagatgcgctcagaatactaacatatacacagcccaaccagaagtagaatagcattttgacaaaatatggatactgcacagcattgaatgtcacatgtggaaggcaacacaacgttgccaatcgcatcaaccacacacgtacgttgtaaaatcctacacaagcgcctagccacgggcaatgatgatctgcgaacattggagtgaacgacgtagtggaagccgatgataaggtatgcaaaatcacgcacccatctttaaaacgcattttttgcatacaatgacagtggtgtgctcggg

SEQ ID NO: 49184 - DNA, 895 bp, Arabidopsis thaliana landsberg
ttcgccatacactcgtattagatgattctaaactaatcaacaatctcaagattttctgagatggttaacttatatagctcttatcttttttttttttcaagaacacctagtagttcttggacaagtaaaattttcaatatagtattcggtcatggtgggtcgaccatgttttgaacgctggatcgatcatcatgtggtcggacgatcataatttcagagattgatcgaccatccttggaagcacgaacacatttagtcatgtgtttgaattttcttttatcttatttgtttccaactcccaaatgatacgaaatgtcacaaaaactcttaaaatcactacataatctaagacttcctaagacacaaatactcctatggacattaaaacaagattttatcaacagtgaagccatattatcatcactgtagttctgaaaatgccatattgcccaaagtcttttctagctagtatgccatagtggctaacatcttcttctttcttttcatctctctaaataagcaaaaaattgagaggctttctcttcctcttctattcctctccaacatagtattcattctctcctcatctcatttcttgtttcttttcagccggagcttgtgccgatggttctacgtcgatctcactctctcaacgacgaagaaaacatcccccaaagcctccttctatgtccaaatgtaaagcttgtccgcagcacacaaccttccaccgctgtaccaccaccgttcctacttttctgacatggaactgaagctttatcgagttttatgttaagtaatgttaatcggaagtcctttaggcaagatgtctagctaaatgttatagaaattctaaaatgaaaatttttgttttcaggcagacaatggtaactagtaa

SEQ ID NO: 49185 - DNA, 1321 bp, Arabidopsis thaliana landsberg
ggacccgtagttagaaatcttcctttcaagttgaagttcattcactttcttttttttcaaatctttggttttttaattacattcattataaaacagttttttttggtgaatacaattttatatttatacaaaaaaattggctaaaaaatggcttgaaggacagagatctctgtcacaacgagcaatctaagtatgctttgatgattaagtaaacacatgattagtttttattttatgtacttaattagttctaccttttgtactaccatagttatttttggaatttgaagtactacactgttctgactttgattctcgaaacgtgtaatctgaatttgataccaacctagatgcaacgatatgtctgttggtgattaattggctcaaaacactatatacttaattctctttaccatcctaactttgaatcgaaactaaagctgatgtaatcacaaaaatcggatgtaaccgaaaccgatgatgattagcaatattctaataagatcagtcacataaatcacgctataaaactagtggacgatctttggaattggacctcctgaagcatatatcgtcatatatatgagcattggcgcatctagctagatatatagatatattcttgatatactatgttcacctactagaaaatactatatccatttctcatattttttttgaaaacaaattataattctggagttgacattttgcaatatgaaattcacttgtgggggaccaatattttaaatataaaatctcctgaaatttattgtttctccaacaccatagatgtaagattcttcattataacataggaaacaatgttgttaacattgtcttaacatctttaacattcttacacaaatccatatcattgtcctgaatagcgccaaaatgatgtattaatatggaaaaaagttgatgcataaatatgtattatgtatgtatcgagctttattcatttaactaaaaataaaaattataaaagatgtaatatatgcatggaataggatcaagggaatatgatgacagattgagagtaacgtgatcattcatgaatgggcctgttggataaagctatcgattctcccaaagataaacatatatcaccacttgttacaatctcattaccgacttgccgtccctaaaaccaaaccaattaatacgtgtcaatatcctacttacaccattctcattcaacaatttttctgtttttcatggtctgaaaaaaaaccttaatactaaatttgaaaacaccttaacaaatgaggataagagcatattcatcatgaaaaattcaagaattctaccgagcgtc

SEQ ID NO: 49186 - DNA, 574 bp, Arabidopsis thaliana landsberg
ggttttgccgagtacctggctatgacagatttctctctggagtagcacgtgtagctagatgtggggcagaccttcatgacaataaaatgacaaaagtaagtaaaaaatagttactcaaacaaagcagtattttttggatatacttttattagacttcgttgtttctgcccatgctaagatggtacaaatgaggaacctaaaaataacatcatacaagtagagaatatacatttaatttcagtactacaatccaattccacacatttagcaaagcttgacctatacgtcagctgaatttgaattgaaaaggaactggtgtgtcaaaaaactcagtgtatgaaaatgggctatttatcttttgcatgcaccactactgtagtgaggtccttgctctgtcttccttagtgtaaaactgaataatcccagtgtcaagtgactgaacgtttggaatgtttcattcagttttaacaacattttatcattcatttcatttgttatttgttaccatgaagcatttgtcttggtatgatttgtacatgtatctgttgtggaaggtaccatgaatttagaatgg

SEQ ID NO: 49187 - DNA, 718 bp, Arabidopsis thaliana landsberg
gagactcaatagtgaatcatgtgatctactcggagctttttctatatctgctgggttgtgtagattttaattcttaccttgtagtgtgagagtcgtgtaaaatgggaagaggaattccattacatttttggtttgatcagttttagttttagatttgcttgtgaccatggaattgtaaagtgattaagtcagcatcgatgagtcatttatgagaagccaattatgttcttttagttggaagatatgttaagaagtttgtaaggtgtttagttgaaaacccatcttagaaaaactgcagacctgatttatttgtatgctgctaagtcttttctggtttatgtttgtggtaagcttaacatttttttgactgttgtaggaaatccatgactacttgaagactatctgccctgatttgcatatagttcgaggggagtttgacgaagatgcgcgataccctgagaataaaaccttgactattgggcaattcaagctgggattgtgtcatggccaccaggttcagtttcccttctttgcgcatttcctcatgatcatttgcagcatacgaataatccctcgtatcgtacatcatctgtttatcataattctcagactagaagaccaaattttgcttgcctttacttcattgctttgttggtgtgtgtcccttacccagtgagtttcagcgttggctcgcttactgttattttgcaggataatt

SEQ ID NO: 49188 - DNA, 747 bp, Arabidopsis thaliana landsberg
aaaataagcaatttatttatgttttttaagacaaaaataatcgaccttaaaagcaaagaacatgggggggcttttagatatcattggtggtttaagcaaccccaaaaagttttatctgagcgtggatcacgcgccttcacagtaccctcaaatatgactttgtagaatgagtagtcaaattcagagaatttaccaaattgtgtcattcaacaaaacaaaacaaagactttatacataaacaaatctctctcttaagaaaaattttctacaaaccttaaaacattcttccttcttctcctccttattctctctacgacttttaaagacagaccctacaccatggttatgatcatgaagatgtctttgtggtctctttcttaaatgatttggtttggtccaaatctctttctcgttttccatttattctttccttatagagtccaatcacaatcctctgtttttggtcccctgttttggtctctgtttttcagattggtctaaaaatccacagaatagaaaaaagatttgatttttatcacaaatctcgataataattcacaaaatccagttttgatttcccaaaatcaaatcaaaaagtcattttttttgttcccggtttaccctttttgatcatgggttgcgcgagttctaagcatcgtaagcgttgtctccattgccggagaggatattctcctccggtggatgtacagagaagtcactcagtgcatcacgcatcgcaaaactttg

SEQ ID NO: 49189 - DNA, 996 bp, Arabidopsis thaliana landsberg
  unsure (1)..(996): unsure at all n locations
agtttgcatccaataattttaataaaaatttcaaaaattgagtgtagtctattactgatagcagcatataatacacatattaaatttcaaacaactgttgctaaacatattattacggttatctgataaatagtaatactaatggttaggcgttaataagatatgtcatagtctctaactacccaccgaaagttgtaagaaaactacatgaggtatgggaatctgaaagttagctaggtaagtgacaagaaagtaaaaaatatcaacggagaaaatgactttacaattcttaaaattaaatcagtaacaaaataaacccattttgctagttaattctgctatcagcaatgatgctcatgaaacagtgacaagagagtcattgttcttcagcaccgtcgcatcagttcttgagtaatccagtgtcttttttgcatgtaaccaaccatcttcgtgtaaatgtatgtaattgagcctgaaatctttattatcaatatcaagatgcaaaccgtttggatttggattcaaaaatttggataaaagcttcacaattcaactttcagttgctaacacaaaacaggagttactgaaacaaacaccaatttgatctaaactgtttcataaacttattataaccatgctccaaaaacgtagctctcttgacttacaaaacattcaagaatcacaaaccaagaagatactggaatctaagaagttttgatctttagatccgagcggattctgcttccatatacttacaaatcctctccataacctctcttcctttagcgctattctgcatgaatttctctgcgcacttttgttcaacctttctaaccattgaggccagagccgacaatggttttgatcccaatgctttgcttcttggctaacaaaccgtccaggctgatggattatctggatgcggatcatatcttatcctcctctncacttaaatgaactttttgagactaatgttctttgttgttagctgggaaa

SEQ ID NO: 49190 - DNA, 528 bp, Arabidopsis thaliana landsberg
agagtttttccaaagtcctattactttaaattataatctatttgattgtattttggtatatgcattttttgatatcaaatatccacaacaccttcatgggatgggagcttccgtaggtttgaattcgatatataaaatcagcaaatactcttttgaggtgtaattttattttattggaactaatactacaacagagttaaagaagatatttgtgggtttctatatacacataatatattatagagttttatttcacagacagaaaaccatgatgcaatccatacataaagctagcacacacaagctatgattattgtatagaactgttttccctcgagataatactgtacacatgcatacaaagtcgtttatatttatatgttcctataaataataatagtttacattctcacttcttttcttatataaaatacattctcacttcttataatttatgtttagaaaaagataaaatctctggatatctttggatctcaagatatctcacaagaattcgattagttcatg

SEQ ID NO: 49191 - DNA, 571 bp, Arabidopsis thaliana landsberg
agaccttaggccttcccaagccaccccaccaaaacctacaaaatgcttaaacagacaggtataaggttgaaaagcatctatggcagattataaccagaaaagtaacacatctcttattcaactcgacacgcatcaaaacatacttgaagtcacagccataacagatttctcagcttctagttattcataatgcatttattattacaaccaaatgcttccttttacaaatcacacatcatgtcaaagcccaaaaagatgaaaacacatgactgtgaagaagtttctctttaccttcccccaaggctgttgttcagtgctctcaaaagccacggcttgggcttttctagttccttatcccaggacttctggaagctaaaaaatgagataaaaatatgtcacgcaaccatgccagtcatagacagtatgagaacagctgttatttattaaaatatacctcctcataagagtctcagttttatcccaagtgtccagatgccatacatccttctcggtgagaggtcgttttgatcccagagtcatcaatgggttcaaccatgagaagaagatacct

SEQ ID NO: 49192 - DNA, 652 bp, Arabidopsis thaliana landsberg
gaggtgtaaatgataataaatatatattagtctgtgagtttagaaagaaacaaaaattaaaggggggtgatggggaagaaaatgttgcatagttgtcaaaattcgaaaatctcagctaaagagagaaagagaagcaccatttttctttctcgtcgtgtcatcggtttctcagattcctgaataatcattcccttccgattccaaaatccccaaacctcatccactcctccatctcccggattcggattcccagaatcatgcccatggagaacgacaatggcccacacgttggcaacgtcgtcgtcaccgctgagcaagcgaccaagattaacgagactgatggacggttgccggagaatcggcagaccggtgttgtctctgacaccggaagtggtagcgagagaggagagcaaggggttggagagtcggcagttgctgtggcggtgccggtggaggagagcggatcgatttcggtgggagagctacctgctccccgatcttcctctgctagagttccgtttactaatctaagccaaattgatgcggatcttgctcttgctcgcacactccaagaacaggtgcgtctttctttctcatctctctatttcggatttctccgtttttaggttattccatgcttgttagggctttg

SEQ ID NO: 49193 - DNA, 1034 bp, Arabidopsis thaliana landsberg
atccatgtaagccgaaaacgtatgcacctaaacaaaatacacgagtcgacacccatttagaatgataagttttttaaaagctgatcctgattctcaaaaatgtatagacctaggtccaaaattttcagatcatcaaaaacaattgtggcaatatatctcaaattcttctgttaagataagataatatcaagcggttagatacgaaatgctatggaaaaaggtatttaaaaaaagaaaagaatgtggtgtccttgtcctacaatggtgacccaagatagcacttccctaagccataggctattctggaattgcattacatatctcaccccaccatgttcttaaagaaaccaacttccctgtcactccaaaccttaattaattaaaaaccctaattaaaacctataaaacttcattaaacacaatccaagactcttgtatcaaaaaccttaattagtgtgcatgtaataaatataagttgcccactagcaccaattactaccccacaatacatcatcctcttttcccacatataaaaaccctttgagagatctcaactttgtttcatctcatttatcatcatccttcaagaacacaaagctagacagaaaaaaaaaatgtgttcctcaaaattaaaaaatctgacccaagaaaacatttctcagatcaacggccgtccggttcttcaaccgaagtcgaaccaagttccgacattagaccgacgtaactcactaaaaaaatcgcctcctaagcctttgaatccaattgcatcaaagataccctcaccaagaccaatttctctaatctctcctcctttgtctcccaacacaaaatccttaagaaaaccggccggttcttgcaaggaacttcttaggtctagctctacaaaatcgaaaccagtgatatcaccagagaacagtgatggtggctacaaagaggttatgcctatggtgattgttcaaagcagcctggaagtatagcagctgccagaagagaagaggttgcaatgatacatgatgagagaaagaagaaatttc

SEQ ID NO: 49194 - DNA, 403 bp, Arabidopsis thaliana landsberg
ttttttttttttttttttttttttttttttttctttttttttttttttttttttttttttttttttttttttttttttttttttttttttttttttttttttttttttttttttttttttttttttttttttttttttttttttttttttttttttttttttttttttatttttttttttttttttgatttttattttaccttattttttattgattgtttttatcattactttttttttcttttttttcttttctatttttttttttcttgttttattttttttttttttttttttttctttttttttttttttttttcatttttttttttttttcttgtttttgtttttttttttttttcttatgttttttttttgttttttttttttttttatttttttt

SEQ ID NO: 49195 - DNA, 801 bp, Arabidopsis thaliana landsberg
  unsure (1)..(801): unsure at all n locations
taataaatggaccatcttagcaaatagaacctacagaagcgtggaagaataaatgtcaccacatgctattcacctaagctattaccatatttaggtttcttcaagtgtttgatcataaagcacatcaccccactatcataggctaaattgtagaatgtattactggccaatttacattatgtaattcattttgaattttgctgctatcaaccaaagtcgacacatggtttaaaaaagtttgatgttgaaattttgccaaacaaatccaaaactcccataaaacctgtggtgtagatttagagtatgaactggggtatgcgatggggcaatagataattgcagttgttgatcacagagttttagaagaaaatattttagttgctttgttattttcagtaattatgaagtttatgattgtatcattggtcaaaccaaacctacatttccttgactaattatactgctcaaactaagctgttgcagttgctacttgtattcataaatggttggtgaggaaaaaatatttcaaaggaggaacgaggccatgatcaaatatgttgttttgcccatcttgacgtatatcatgtcattttctctttcccaaaagagttgtgcaaaaagttagctagtgtagtctttaatttctagtgcagtctttaactcanactctaaaaatatgctcgttccaaataataagccaaaaaataaagcaatgatatgatacataataagctaaaatccatacaaatntattacttatgatngntaatagtttttgtggtggaaaacaaactcactcat

SEQ ID NO: 49196 - DNA, 303 bp, Arabidopsis thaliana landsberg
ttctaatttctgtgacctcactcttgggagttctattcatgggttgatcaccaaatcagattgcggctgggcgtgcacatttgtatgtaacgtactaattgacatgtatgggaaatgcggaagcattatgagtgtaatgaaagtctttgaagaaacaagagagaaaaacctcattacatggacggcattgatttcgggtcttggcatccatggatattgacagggggggctttaaaagtttaaggaaacactggctttgggttttaagccaaaatcgggctcggtcttctctattctaactgg

SEQ ID NO: 49197 - DNA, 521 bp, Arabidopsis thaliana landsberg
ggcaccagtccgcggcaccgagcgactccccgacgaaccccgctcccggcgagtgaatttggggcgcagaagctactagctcggcccggcgaggacccgaccaccgagctgacttggaggcaactcggacgcattccgcgcaactcagggagcgcccaggaggctcggctcaagttcaacggtggtggagacatgagctccgcggtggcacccgaggcgaggccccccccatggcgctagatctccaatcctggcagcttgggatgtggataggatgaggtggtctaggattttataccggagtagggctcgatccggagagaccgttcgacgaacgcagcggcgaagatctcggcggaattctgttttagcgcccccgttcggacttgaggaagatgatagggctgacagtgggtcccatacgccagcgctagagcaggagtgggctggcgggtggcaaagtgcatatgggctagaagtgagggattaggcccaagtgaggcttatgtgtttttgtcttt
